United States Patent Application Publication US 2017/0114356 A1 - sequence listing, part 20

SEQ ID NO: 25685 - DNA, 1217 bp, Zea Mays
ggaaaacaaaccggatgtgcggatgtgcctagaagcctctcggtgtgcctccagttcttactacggaggccacgctgccagcggcggcagcgacggcgctgctgcgtgcgcctccatcgagccctcgcggatgtcgtttcctggacaataatagtgctgctgcatccgcctccatccatcccacgtttcctcgaggagatgatcctttttgatatattcacagatgtagtgggcataaccaactaggatcatatataaataccattgcaagggacatctagctccacgttgatattactgacgcctaatgttgaccttggattaacaatatatatcgtgggttcacatagaaatacaaagttagcatgacaatatcgtaagcgagtgctaaatcaacatcgattggttcttagaggtaaacagttcacaactccaggcaacaactccagcaattgatgaagggattccagcatccaccaagaaactgatgaagggagttcctgtgctcgtgcgcttcaagtctgtgaaacatcagatgctacgcctaggcacttgcatcacgtgccctcgctcgagctgctgcggtgattggcggcggggtcggcggagccgcggaggcacccaggttagcgcaagaactgccgggccggcaacaagtgcgagcggaggcaaagccgagacgccgatctgcaactggagttgatggcgaggtggatgaaggagcagcagaatatccaggcgccgatgtcatctccaccgccgttgaagtctctcacgccgccccggcccaacaattcccgccttcctccaccaataaaacatcgcacgatacaagattaacgcggggaagcagctagctggccgcgaactaaggtgattaggagacgatccacgacacgcatacttagaccttattcggttatatgagataaatcacactatagatttaatttgagtataaattgagtgaattcatacctcacacctaattctatggtgggattaaatctatcaactaatacatgtgtttatcaaagctagttattttttgattcatagattctaatgtaaacttgtgcaatatttttatggatttgttccatacctaatgagctatggataaaatcactttcttacatagtttaaaaaaatctcaaacccttgttttatatttcatgatgggtttaaccgattaaaaaaatagtcttggattattt

SEQ ID NO: 25686 - DNA, 875 bp, Zea Mays
ccggatgtgcggatgtgcctagaagcctctcggtgtgcctccagttcttactacggaggccacgctgccagcggcggcagcgacggcgctgctgcgtgcgcctccatcgagccctcgcggatgtcgtttcctggacaataatagtgctgctgcatccgcctccatccatcccacgtttcctcgaggagatgatcctttttgatatattcacagatgtagtgggcataaccaactaggatcatatataaataccattgcaagggacatctagctccacgttgatattactgacgcctaatgttgaccttggattaacaatatatatcgtgggttcacatagaaatacaaagttagcatgacaatatcgtaagcgagtgctaaatcaacatcgattggttcttagaggtaatgcctatctatctatgttggtagtgatttatataggttcatgcatgctacttcattgctgtttgttttttgtcttctcattatttgtttgcaagctcccctttttatactattaaggaataaacatttttttggcaaaaggaaacacaagaaaccactgctcttttatgtgcacgctctccacgtaacattaggattcctatgcaatatggttatttctctgatgaacatattgccgcgctagaaggtatacaccataaggtttaagtgctttcccatgtttcagaaggaatactctacagttcacatcaacattactaaactaccaaaaatgcactatttgtaacgcacctattatgtaatgaccatgtatattttgtaatgatcatgatcatccatatcactctatatatgtatgtgtaatatagtatctgtatgactatacattaatgttaagtatttaattt

SEQ ID NO: 25687 - DNA, 921 bp, Zea Mays
gtcgtctgcggcctggacgccttactgaccccgcgtcccggcaactgaactgtgatcgtgtatgttggcaatatccatcttcaagtgacggacgcaatactgcaggaagtcttccaaagcattggtccagtagaagggtgcaagctcatcagaaaagaaaagacccccacgtccagagttacaagaagatcaagctttagcgatggctgctgctgtgttgcctcctcttgttggaccgaagagaagggaggggagaagcagctggcgtgcagacttctactcaggtggtcttttattctctatggggcttctaggatacatcttctccagaagcaccataagtcttgtcttgggcattacaccagggctagccactctgctacttggcactctcagtctgaagttctagaggagcgacagatctagcttcctgcttatcttggctcaggcagaggtgatgctgatgtgcaagcatcttcaccttgagttctgccttgccagaatgaatcaagtttattttcccatcctgctccatttgaggcaaattgaacagggatttgtttggcttccaaatggtttgttggtcctaaaatagtcagaatcacatgacatctgtgctatagatatggacctcggtggttttctccacattaggaaagctggaaaagccttttgaacttagttttttttgctaatagtggtgttatggtgaaacagagttttgtgtgtatgtaccaacagctaaaatgtaaacacgacattatcatagttgagtacaggaataattatctcttatatcttattgcaaaatctgaaacagttctcctgtagatggttagcttgcattttacgctacaattacctcagatcacttgttgtatcttacaccaatttacgaaatttcttgatgcgttttatgac

SEQ ID NO: 25688 - DNA, 777 bp, Zea Mays
cggcgccagcctgcaggtatgttggcaatatccatcttcaagtgacggacgcaatactgcaggaagtcttccaaagcattggtccagtagaagggtgcaagctcatcagaaaagaaaagacccccacgtccagagttacaagaagatcaagctttagcgatggctgctgctgtgttgcctcctcttgttggaccgaagagaagggaggggagaagcagctggcgtgcagacttctactcaggtggtcttttattctctatggggcttctaggatacatcttctccagaagcaccataagtcttgtcttgggcattacaccagggctagccactctgctacttggcactctcagtctgaagttctagaggagcgacagatctagcttcctgcttatcttggctcaggcagggatttgtttggcttccaaatggtttgttggtcctaaaatagtcagaatcacatgacatctgtgctatagatatggacctcggtggttttctccacattaggaaagctggaaaagccttttgaacttagttttttttgctaatagtggtgttatggtgaaacagagttttgtgtgtatgtaccaacagctaaaatgtaaacacgacattatcatagttgagtacaggaataattatctcttatatcttattgcaaaatctgaaacagttctcctgtagatggttagcttgcattttacgctacaattacctcagatcacttgttgtatcttacaccaatttacgaaatttcttgatgcgttttatgac

SEQ ID NO: 25689 - DNA, 1638 bp, Zea Mays
aggatcttgattgcgttgcttcactatggaggagttaaggcagaatattttatggaacttctacataatgcaattgaaggggttaataatgctcgttatagtttcagacacgcgctgaagcttgcatatggatatgctaatatggaggattcaatgttagaacgcatgattcattctggaattccactagaagaaccatacttgctatctaggctgagttttatggccaaacaggaaatgaaagtattcagagaaggaaagctaccaattgatgaatgctattatttgatgggtacaacagatcctacaggaacgctgaaaccaaatgaagtttgtgtgatacttgacagcggacaatactctggagatgttcttgtgtttaaacatcctgggctacattttggcgatatacatatcttaactgcaaggcaaattgatggactagagaagaattttattggatattcaaaaaatgcaatactttttcctacttctggacaaagatcattggctgatgagatggccaatagtgattttgatggtgacgagttctgggtctcaagaaacaatatgttacacaaaaggtttagcgcctgactgttggttagcacatatggaccgattattaacagaaggagtcgatcaagatgagaagaagtcaatcgtggaaaacatgattaaattagttgacctttattatgcggctctggatgggcacaaggtagatgttgatcgccatctgagagtaaaagcatatccacacttcatggagaagaaaggatttgaatcctaccattcttcatctattttgggcagaatctacgatgagactgaggaaataatagcgcagcaatgtgacgaacagatccagataacgacactgccgtgcttcagtgaggtggaggcaaccccggaatgcacctccctatgggaacaccggtaccaggagtacttgacaaagagcaggggccttttcgatctgggcaaggaagaaaagaacgacgagttccagaaactctaccaacactacaaacatctgctatacgacgccgacgaactggaggagacctcgcgggacctctcagacgtgttcatggaggcctgcgcgatatacaggatcgtgtacgagcgagcatggtgtaccaggagcgtcagcaggtgccgtttcgtgtggaacgtggctggagcggcgctgtgccacctccacgcgaccaagtacgcggcgcagcgcggggagaaaaccgcgctctgcccgctctcagttatccgccagctttacatctgatatatatattttttttttggtaaagcagctgatttctgcctgtaaaatgaaacgggtgagctgatgcgtcttaagagaagtatatactggggctctcgatcaacttagtcaagagcttcacagttgctttgatttgatgaggttaatatagaattgctttcttgtacgtcaccagccttcaatcttaaagactcgttcgcatcttttgatacacagaagttgtgtaggtttgccgattttttttatctaaatgacatctggtacagatttattgaagcttgaattgcagttggacaactttattgctgacattcatcgaaaggaagttgagaaataagatagttgtattgaac

SEQ ID NO: 25690 - DNA, 3584 bp, Zea Mays
atggacgccagagattgggtttatgagggtggacctcaccgagtacaaaagaactgcgccctgccaactgcccgaatgatgatgggcgtcagacttcttcgattatgcggcgacttgggccgtcctcgtaagtgtcgaggttggagcttggctggtggtcgacgatggcaacctcgtacgccacgaggctcgactgatgatcatcgtggtggaccacacagatcttggcgctgcgcttgcaaccacttgcacgcccgatgtcgacgagctatcacggatgttgtcggagtggacgaggcggggttcgctggtggccaaaatcacgtggattgggagccgaaggtccctgcgcgcgggggtagaagccaggtggtggcggtggcggttacacgcgccaagacatggctggccgttgcggtttacaaggatccaggaaaagagacgaaaaagaaagacagtgaacagggggatatcaagaaatgcacttcgcctgtaagatgctattttatttgcactaagtctgggtggaggggggatgaggcttatattccaattgacaagtgccgcaaactgttcatgcatatccatactgctcccaccattgcaaattatatgaaaaggtttcatttgatactttccaaaactctaacactggatgttgatttatcgacaattgacgttatactgattgatgatgaaccttgtcgggacgagcatgggaacattgttatgctagatgggaagcgtttgatccatactgatgggactggcttcatatctgaaaatttggctaagaaatgccctagcagaataatcaaaggaaagaagtcaaaagtttgtacgcttggccctgtgcttgccattttctttacagaaacttattactaatattttaactttatggatgatatgtgggggttctacagatggttgtgatttttgattttttatgttctgatgtgttatttgtgggtggaactcagcataaagcctagtcgtgcgatggttgaggccccagccctcattggcgtagtttgccagcaaagtcagggaagagaggagatatgaaaagattcaacctattacttaattgttctgagtacatgcgtatacccagtggtgatgcttgtccaacaacagcctatccttgccttaggagtattgctgaccccacatgacaatttatcaagccaacacattcataccaagtatgacatagtcccaagcaatttatgtaggctagagttaaaacctaacacaggccactagtaaaaaggggaaaacaaataaaagaaagcaatatatgaggctcagtaatattgatattattagagggcctaaagtgtgttcatggtttaggcatgtgaatagctgcttttcatgcactcctgtccaagggtgattctttgggtatattcctttgtttcaagtttctccacttcacatatcaagtttgctgccccatgaataaagttttttttttcaagtttggccgacgcctacctctccttatattatttctatgccttatgattgcactattcgctggcacattgaggcctcctctggacatatccatacaaaccacaatatgccatggatttcttttgctctgaagttgttcagtggactgcttctttccattcctccgaaattgaaatgcttatgtaaataaaggagcatttatggaaatcactcctgcatatgtttatatgcatcaaggtgaaacaacgcctcttctcatgcaggtccgtcttttttataatggatatgctgtaaagggaactctgctagttgacaaaaggattagtaataatactattgtgatccgaccatcaatggtaaaagtaaaagctgacccaaagttgtgccggatgaagtctctgagttctttggaaatagtttccacaagttgcatatggatatgctaatatggaggattcaatgttagaacgcatgattcattctggaattccactagaagaaccatacttgctatctaggctgagttttatggccaaacaggaaatgaaagtattcagagaaggaaagctaccaattgatgaatgctattatttgatgggtacaacagatcctacaggaacgctgaaaccaaatgaagtttgtgtgatacttgacagcggacaatactctggagatgttcttgtgtttaaacatcctgggctacattttggcgatatacatatcttaactgcaaggcaaattgatggactagagaagaattttattggatattcaaaaaatgcaatactttttcctacttctggacaaagatcattggctgatgagatggccaatagtgattttgatggtgacgagttctgggtctcaagaaacaatatgttactaaagactttcgagaagcgaagtgagccatgggttgaactattaaaactgaaggagacccagcacaggcttagcaaacctggggatttaaatgaattgattctcgaaagagtgctatttaatgaatgcttgacgactatgtttatacccaattacacaaaaggtttagcgcctgactgttggttagcacatatggaccgattattaacagaaggagtcgatcaagatgagaagaagtcaatcgtggaaaacatgattaaattagttgacctttattatgcggctctggatgggcacaaggtagatgttgatcgccatctgagagtaaaagcatatccacacttcatggagaagaaaggatttgaatcctaccattcttcatctattttgggcagaatctacgatgagactgaggaaataatagcgcagcaatgtgacgaacagatccagataacgacactgccgtgcttcagtgaggtggaggcaaccccggaatgcacctccctatgggaacaccggtaccaggagtacttgacaaagagcaggggccttttcgatctgggcaaggaagaaaagaacgacgagttccagaaactctaccaacactacaaacatctgctatacgacgccgacgaactggaggagacctcgcgggacctctcagacgtgttcatggaggcctgcgcgatatacaggatcgtgtacgagcgagcatggtgtaccaggagcgtcagcaggtgccgtttcgtgtggaacgtggctggagcggcgctgtgccacctccacgcgaccaagtacgcggcgcagcgcggggagaaaaccgcgctctgcccgctctcagttatccgccagctttacatctgatatatatattttttttttggtaaagcagctgatttctgcctgtaaaatgaaacgggtgagctgatgcgtcttaagagaagtatatactggggctctcgatcaacttagtcaagagcttcacagttgctttgatttgatgaggttaatatagaattgctttcttgtacgtcaccagccttcaatcttaaagactcgttcgcatcttttgatacacagaagttgtgtaggtttgccgattttttttatctaaatgacatctggtacagatttattgaagcttgaattgcagttggacaactttattgctgacattcatcgaaaggaagttgagaaataagatagttgtattgaac

SEQ ID NO: 25691 - DNA, 2901 bp, Zea Mays
cctagctattcgatcctcgttcaacatcaaatggggccccaaactaagcgacaagctagttacatgatcacaacagaagttaggaaccacgtgagggctagaggaaacaatatatgtaaattaaagcaggaaaatgattgaattgagagcaaattcttccttcataaatgaatttgtaagagttaggcgatggacgccagagattgggtttatgagggtggacctcaccgagtacaaaagaactgcgccctgccaactgcccgaatgatgatgggcgtcagacttcttcgattatgcggcgacttgggccgtcctcgtaagtgtcgaggttggagcttggctggtggtcgacgatggcaacctcgtacgccacgaggctcgactgatgatcatcgtggtggaccacacagatcttggcgctgcgcttgcaaccacttgcacgcccgatgtcgacgagctatcacggatgttgtcggagtggacgaggcggggttcgctggtggccaaaatcacgtggattgggagccgaaggtccctgcgcgcgggggtagaagccaggtggtggcggtggcggttacacgcgccaagacatggctggccgttgcggtttacaaggatccaggaaaagagacgaaaaagaaagacagtgaacagggggatatcaagaaatgcacttcgcctgtaagatgctattttatttgcactaagtctgggtggaggggggatgaggcttatattccaattgacaagtgccgcaaactgttcatgcatatccatactgctcccaccattgcaaattatatgaaaaggtttcatttgatactttccaaaactctaacactggatgttgatttatcgacaattgacgttatactgattgatgatgaaccttgtcgggacgagcatgggaacattgttatgctagatgggaagcgtttgatccatactgatgggactggcttcatatctgaaaatttggctaagaaatgccctagcagaataatcaaaggaaagaagtcaaaagtttatatgcatcaaggtgaaacaacgcctcttctcatgcaggtccgtcttttttataatggatatgctgtaaagggaactctgctagttgacaaaaggattagtaataatactattgtgatccgaccatcaatggtaaaagtaaaagctgacccaaagttgtgccggatgaagtctctgagttctttggaaatagtttccacaagttgcatatggatatgctaatatggaggattcaatgttagaacgcatgattcattctggaattccactagaagaaccatacttgctatctaggctgagttttatggccaaacaggaaatgaaagtattcagagaaggaaagctaccaattgatgaatgctattatttgatgggtacaacagatcctacaggaacgctgaaaccaaatgaagtttgtgtgatacttgacagcggacaatactctggagatgttcttgtgtttaaacatcctgggctacattttggcgatatacatatcttaactgcaaggcaaattgatggactagagaagaattttattggatattcaaaaaatgcaatactttttcctacttctggacaaagatcattggctgatgagatggccaatagtgattttgatggtgacgagttctgggtctcaagaaacaatatgttactaaagactttcgagaagcgaagtgagccatgggttgaactattaaaactgaaggagacccagcacaggcttagcaaacctggggatttaaatgaattgattctcgaaagagtgctatttaatgaatgcttgacgactatgtttatacccaattacacaaaaggtttagcgcctgactgttggttagcacatatggaccgattattaacagaaggagtcgatcaagatgagaagaagtcaatcgtggaaaacatgattaaattagttgacctttattatgcggctctggatgggcacaaggtagatgttgatcgccatctgagagtaaaagcatatccacacttcatggagaagaaaggatttgaatcctaccattcttcatctattttgggcagaatctacgatgagactgaggaaataatagcgcagcaatgtgacgaacagatccagataacgacactgccgtgcttcagtgaggtggaggcaaccccggaatgcacctccctatgggaacaccggtaccaggagtacttgacaaagagcaggggccttttcgatctgggcaaggaagaaaagaacgacgagttccagaaactctaccaacactacaaacatctgctatacgacgccgacgaactggaggagacctcgcgggacctctcagacgtgttcatggaggcctgcgcgatatacaggatcgtgtacgagcgagcatggtgtaccaggagcgtcagcaggtgccgtttcgtgtggaacgtggctggagcggcgctgtgccacctccacgcgaccaagtacgcggcgcagcgcggggagaaaaccgcgctctgcccgctctcagttatccgccagctttacatctgatatatatattttttttttggtaaagcagctgatttctgcctgtaaaatgaaacgggtgagctgatgcgtcttaagagaagtatatactggggctctcgatcaacttagtcaagagcttcacagttgctttgatttgatgaggttaatatagaattgctttcttgtacgtcaccagccttcaatcttaaagactcgttcgcatcttttgatacacagaagttgtgtaggtttgccgattttttttatctaaatgacatctggtacagatttattgaagcttgaattgcagttggacaactttattgctgacattcatcgaaaggaagttgagaaataagatagttgtattgaac

SEQ ID NO: 25692 - DNA, 3050 bp, Zea Mays
cctagctattcgatcctcgttcaacatcaaatggggccccaaactaagcgacaagctagttacatgatcacaacagaagttaggaaccacgtgagggctagaggaaacaatatatgtaaattaaagcaggaaaatgattgaattgagagcaaattcttccttcataaatgaatttgtaagagttaggcgatggacgccagagattgggtttatgagggtggacctcaccgagtacaaaagaactgcgccctgccaactgcccgaatgatgatgggcgtcagacttcttcgattatgcggcgacttgggccgtcctcgtaagtgtcgaggttggagcttggctggtggtcgacgatggcaacctcgtacgccacgaggctcgactgatgatcatcgtggtggaccacacagatcttggcgctgcgcttgcaaccacttgcacgcccgatgtcgacgagctatcacggatgttgtcggagtggacgaggcggggttcgctggtggccaaaatcacgtggattgggagccgaaggtccctgcgcgcgggggtagaagccaggtggtggcggtggcggttacacgcgccaagacatggctggccgttgcggtttacaaggatccaggaaaagagacgaaaaagaaagacagtgaacagggggatatcaagaaatgcacttcgcctgtaagatgctattttatttgcactaagtctgggtggaggggggatgaggcttatattccaattgacaagtgccgcaaactgttcatgcatatccatactgctcccaccattgcaaattatatgaaaaggtttcatttgatactttccaaaactctaacactggatgttgatttatcgacaattgacgttatactgattgatgatgaaccttgtcgggacgagcatgggaacattgttatgctagatgggaagcgtttgatccatactgatgggactggcttcatatctgaaaatttggctaagaaatgccctagcagaataatcaaaggaaagaagtcaaaagtttatatgcatcaaggtgaaacaacgcctcttctcatgcaggtccgtcttttttataatggatatgctgtaaagggaactctgctagttgacaaaaggattagtaataatactattgtgatccgaccatcaatggtaaaagtaaaagctgacccaaagttgtgccggatgaagtctctgagttctttggaaatagtttccacaagccatcaatccaataggacatcaacatcaaggatcttgattgcgttgcttcactatggaggagttaaggcagaatattttatggaacttctacataatgcaattgaaggggttaataatgctcgttatagtttcagacacgcgctgaagcttgcatatggatatgctaatatggaggattcaatgttagaacgcatgattcattctggaattccactagaagaaccatacttgctatctaggctgagttttatggccaaacaggaaatgaaagtattcagagaaggaaagctaccaattgatgaatgctattatttgatgggtacaacagatcctacaggaacgctgaaaccaaatgaagtttgtgtgatacttgacagcggacaatactctggagatgttcttgtgtttaaacatcctgggctacattttggcgatatacatatcttaactgcaaggcaaattgatggactagagaagaattttattggatattcaaaaaatgcaatactttttcctacttctggacaaagatcattggctgatgagatggccaatagtgattttgatggtgacgagttctgggtctcaagaaacaatatgttactaaagactttcgagaagcgaagtgagccatgggttgaactattaaaactgaaggagacccagcacaggcttagcaaacctggggatttaaatgaattgattctcgaaagagtgctatttaatgaatgcttgacgactatgtttatacccaattacacaaaaggtttagcgcctgactgttggttagcacatatggaccgattattaacagaaggagtcgatcaagatgagaagaagtcaatcgtggaaaacatgattaaattagttgacctttattatgcggctctggatgggcacaaggtagatgttgatcgccatctgagagtaaaagcatatccacacttcatggagaagaaaggatttgaatcctaccattcttcatctattttgggcagaatctacgatgagactgaggaaataatagcgcagcaatgtgacgaacagatccagataacgacactgccgtgcttcagtgaggtggaggcaaccccggaatgcacctccctatgggaacaccggtaccaggagtacttgacaaagagcaggggccttttcgatctgggcaaggaagaaaagaacgacgagttccagaaactctaccaacactacaaacatctgctatacgacgccgacgaactggaggagacctcgcgggacctctcagacgtgttcatggaggcctgcgcgatatacaggatcgtgtacgagcgagcatggtgtaccaggagcgtcagcaggtgccgtttcgtgtggaacgtggctggagcggcgctgtgccacctccacgcgaccaagtacgcggcgcagcgcggggagaaaaccgcgctctgcccgctctcagttatccgccagctttacatctgatatatatattttttttttggtaaagcagctgatttctgcctgtaaaatgaaacgggtgagctgatgcgtcttaagagaagtatatactggggctctcgatcaacttagtcaagagcttcacagttgctttgatttgatgaggttaatatagaattgctttcttgtacgtcaccagccttcaatcttaaagactcgttcgcatcttttgatacacagaagttgtgtaggtttgccgattttttttatctaaatgacatctggtacagatttattgaagcttgaattgcagttggacaactttattgctgacattcatcgaaaggaagttgagaaataagatagttgtattgaac

SEQ ID NO: 25693 - DNA, 3613 bp, Zea Mays
atgcagcctcccggcccgcctctggcgacgccgcagccgctgccgccggcggtggcggcggagctcgcgcagcttgagtcgaggctgggccaggtcgccggagagcccgcgcgccacgagctcgcggagctaggcgaagtcgccgcggttcgcgtgctacgtaggatcgcgaggtctcaagagcaggtccggacgctcactggctacatcgtctcggctgcggtgcaggagacgttcgcgctcaatgcgcaggccgtccccaccgccgagagccgcgcctgcaactcctccgctccttccctaagtgatggatctgtacaagggccgcagtgcgccagtgaacttcgaatggaagaagtaactgcgggcctctcaaactatcgcatggcaatatgcgagggtcaaggtcaggaggatcatgcagtgatgatggcaattgacaacccacctgactgcatccccccctggggttgggaccaagattgcattgaagttgataaccttgtgccaggaattgcttctcaggcaaaccagatgcctatgcagtatggcgaccgcgaccgtatccaagaactagtttctattgtaccacatggtgttcgtatgctggctgaaagtcttgaaaatggcagagcatctgagttgcagaactatgtacaaaatggcattcccgaacagtggatggttccagcagatcaaagaatggaatccacctcgagccgcctgcaacatgttttaaaatgtcttcagggagttggaccctttggacaccatctcggtccggaatgtgcaataatgataccaaagcctgagccaaatgttgttgtcgaaaatttgttcagggagatagcaagccctcatatcacagacaacaaattgaggaatacagcgagccctcagatgtgtgcgttggaggatttagagttcagcaagagatttttgatactctcttatctttgtcggaataacctggaagatgaagttgtactgactgtggactatattaaatcgttgaagtttctgtccatggttcattttgagtcccaaatttggaggaaatttggtcagaagaattttcaggcatccaatagagctgcaacagatagggcaaagaatttcgattcagacccaactacaacaaaattataccattgcaatatcgagataagaggggagtccatattctttgttttgaaggggccatatatggagaataagaggacttatctacaaaaagttcttggtgatgataatgttcttctagtaaagtttatggtttcttcagacaagagcactgatttctaccgccaacattaccatagggttgttgaagatggtattgttttgggtctgcgacgatataattttttcggtttcatttgatactttccaaaactctaacactggatgttgatttatcgacaattgacgttatactgattgatgatgaaccttgtcgggacgagcatgggaacattgttatgctagatgggaagcgtttgatccatactgatgggactggcttcatatctgaaaatttggctaagaaatgccctagcagaataatcaaaggaaagaagtcaaaagtttatatgcatcaaggtgaaacaacgcctcttctcatgcaggtccgtcttttttataatggatatgctgtaaagggaactctgctagttgacaaaaggattagtaataatactattgtgatccgaccatcaatggtaaaagtaaaagctgacccaaagttgtgccggatgaagtctctgagttctttggaaatagtttccacaagccatcaatccaataggacatcaacatcaaggatcttgattgcgttgcttcactatggaggagttaaggcagaatattttatggaacttctacataatgcaattgaaggggttaataatgctcgttatagtttcagacacgcgctgaagcttgcatatggatatgctaatatggaggattcaatgttagaacgcatgattcattctggaattccactagaagaaccatacttgctatctaggctgagttttatggccaaacaggaaatgaaagtattcagagaaggaaagctaccaattgatgaatgctattatttgatgggtacaacagatcctacaggaacgctgaaaccaaatgaagtttgtgtgatacttgacagcggacaatactctggagatgttcttgtgtttaaacatcctgggctacattttggcgatatacatatcttaactgcaaggcaaattgatggactagagaagaattttattggatattcaaaaaatgcaatactttttcctacttctggacaaagatcattggctgatgagatggccaatagtgattttgatggtgacgagttctgggtctcaagaaacaatatgttactaaagactttcgagaagcgaagtgagccatgggttgaactattaaaactgaaggagacccagcacaggcttagcaaacctggggatttaaatgaattgattctcgaaagagtgctatttaatgaatgcttgacgactatgtttatacccaattacacaaaaggtttagcgcctgactgttggttagcacatatggaccgattattaacagaaggagtcgatcaagatgagaagaagtcaatcgtggaaaacatgattaaattagttgacctttattatgcggctctggatgggcacaaggtagatgttgatcgccatctgagagtaaaagcatatccacacttcatggagaagaaaggatttgaatcctaccattcttcatctattttgggcagaatctacgatgagactgaggaaataatagcgcagcaatgtgacgaacagatccagataacgacactgccgtgcttcagtgaggtggaggcaaccccggaatgcacctccctatgggaacaccggtaccaggagtacttgacaaagagcaggggccttttcgatctgggcaaggaagaaaagaacgacgagttccagaaactctaccaacactacaaacatctgctatacgacgccgacgaactggaggagacctcgcgggacctctcagacgtgttcatggaggcctgcgcgatatacaggatcgtgtacgagcgagcatggtgtaccaggagcgtcagcaggtgccgtttcgtgtggaacgtggctggagcggcgctgtgccacctccacgcgaccaagtacgcggcgcagcgcggggagaaaaccgcgctctgcccgctctcagttatccgccagctttacatctgatatatatattttttttttggtaaagcagctgatttctgcctgtaaaatgaaacgggtgagctgatgcgtcttaagagaagtatatactggggctctcgatcaacttagtcaagagcttcacagttgctttgatttgatgaggttaatatagaattgctttcttgtacgtcaccagccttcaatcttaaagactcgttcgcatcttttgatacacagaagttgtgtaggtttgccgattttttttatctaaatgacatctggtacagatttattgaagcttgaattgcagttggacaactttattgctgacattcatcgaaaggaagttgagaaataagatagttgtattgaac

SEQ ID NO: 25694 - DNA, 4799 bp, Zea Mays
atgcagcctcccggcccgcctctggcgacgccgcagccgctgccgccggcggtggcggcggagctcgcgcagcttgagtcgaggctgggccaggtcgccggagagcccgcgcgccacgagctcgcggagctaggcgaagtcgccgcggttcgcgtgctacgtaggatcgcgaggtctcaagagcaggtccggacgctcactggctacatcgtctcggctgcggtgcaggagacgttcgcgctcaatgcgcaggccgtccccaccgccgagagccgcgcctgcaactcctccgctccttccctaagtgatggatctgtacaagggccgcagtgcgccagtgaacttcgaatggaagaagtaactgcgggcctctcaaactatcgcatggcaatatgcgagggtcaaggtcaggaggatcatgcagtgatgatggcaattgacaacccacctgactgcatccccccctggggttgggaccaagattgcattgaagttgataaccttgtgccaggaattgcttctcaggcaaaccagatgcctatgcagtatggcgaccgcgaccgtatccaagaactagtttctattgtaccacatggtgttcgtatgctggctgaaagtcttgaaaatggcagagcatctgagttgcagaactatgtacaaaatggcattcccgaacagtggatggttccagcagatcaaagaatggaatccacctcgagccgcctgcaacatgttttaaaatgtcttcagggagttggaccctttggacaccatctcggtccggaatgtgcaataatgataccaaagcctgagccaaatgttgttgtcgaaaatttgttcagggagatagcaagccctcatatcacagacaacaaattgaggaatacagcgagccctcagatgtgtgcgttggaggatttagagttcagcaagagatttttgatactctcttatctttgtcggaataacctggaagatgaagttgtactgactgtggactatattaaatcgttgaagtttctgtccatggttcattttgagtcccaaatttggaggaaatttggtcagaagaattttcaggcatccaatagagctgcaacagatagggcaaagaatttcgattcagacccaactacaacaaaattataccattgcaatatcgagataagaggggagtccatattctttgttttgaaggggccatatatggagaataagaggacttatctacaaaaagttcttggtgatgataatgttcttctagtaaagtttatggtttcttcagacaagagcactgatttctaccgccaacattaccatagggttgttgaagatggtattgttttgggtctgcgacgatataattttttcgtttacaaggatccaggaaaagagacgaaaaagaaagacagtgaacagggggatatcaagaaatgcacttcgcctgtttcatttgatactttccaaaactctaacactggatgttgatttatcgacaattgacgttatactgattgatgatgaaccttgtcgggacgagcatgggaacattgttatgctagatgggaagcgtttgatccatactgatgggactggcttcatatctgaaaatttggctaagaaatgccctagcagaataatcaaaggaaagaagtcaaaagtttgtacgcttggccctgtgcttgccattttctttacagaaacttattactaatattttaactttatggatgatatgtgggggttctacagatggttgtgatttttgattttttatgttctgatgtgttatttgtgggtggaactcagcataaagcctagtcgtgcgatggttgaggccccagccctcattggcgtagtttgccagcaaagtcagggaagagaggagatatgaaaagattcaacctattacttaattgttctgagtacatgcgtatacccagtggtgatgcttgtccaacaacagcctatccttgccttaggagtattgctgaccccacatgacaatttatcaagccaacacattcataccaagtatgacatagtcccaagcaatttatgtaggctagagttaaaacctaacacaggccactagtaaaaaggggaaaacaaataaaagaaagcaatatatgaggctcagtaatattgatattattagagggcctaaagtgtgttcatggtttaggcatgtgaatagctgcttttcatgcactcctgtccaagggtgattctttgggtatattcctttgtttcaagtttctccacttcacatatcaagtttgctgccccatgaataaagttttttttttcaagtttggccgacgcctacctctccttatattatttctatgccttatgattgcactattcgctggcacattgaggcctcctctggacatatccatacaaaccacaatatgccatggatttcttttgctctgaagttgttcagtggactgcttctttccattcctccgaaattgaaatgcttatgtaaataaaggagcatttatggaaatcactcctgcatatgtttatatgcatcaaggtgaaacaacgcctcttctcatgcaggtccgtcttttttataatggatatgctgtaaagggaactctgctagttgacaaaaggattagtaataatactattgtgatccgaccatcaatggtaaaagtaaaagctgacccaaagttgtgccggatgaagtctctgagttctttggaaatagtttccacaagttgcatatggatatgctaatatggaggattcaatgttagaacgcatgattcattctggaattccactagaagaaccatacttgctatctaggctgagttttatggccaaacaggaaatgaaagtattcagagaaggaaagctaccaattgatgaatgctattatttgatgggtacaacagatcctacaggaacgctgaaaccaaatgaagtttgtgtgatacttgacagcggacaatactctggagatgttcttgtgtttaaacatcctgggctacattttggcgatatacatatcttaactgcaaggcaaattgatggactagagaagaattttattggatattcaaaaaatgcaatactttttcctacttctggacaaagatcattggctgatgagatggccaatagtgattttgatggtgacgagttctgggtctcaagaaacaatatgttactaaagactttcgagaagcgaagtgagccatgggttgaactattaaaactgaaggagacccagcacaggcttagcaaacctggggatttaaatgaattgattctcgaaagagtgctatttaatgaatgcttgacgactatgtttatacccaagtattgtatctcttcaattattaatcatgttcatatcattgttttcataggatgttacttggttttgaattgatcagtatgctttgcacgatttcatcatttataaatacttttgctaaaccttataaacattctttaatttgtattaaattacatatctttaatttattttaaggtattcaatcaactatgtgacattcatgcatatttgcaaagctaggtgaagttgtatgcttaaatataaaaaaggcacaatcatgcttttaatggcatgccttaatgacttacatattgctcatgccttttgttagtccaatatgtagtgcggactggtgaaatgaattatttctcgtcattgccttcattgtgcagttcaactcggactctagttacacaaaaggtttagcgcctgactgttggttagcacatatggaccgattattaacagaaggagtcgatcaagatgagaagaagtcaatcgtggaaaacatgattaaattagttgacctttattatgcggctctggatgggcacaaggtagatgttgatcgccatctgagagtaaaagcatatccacacttcatggagaagaaaggatttgaatcctaccattcttcatctattttgggcagaatctacgatgagactgaggaaataatagcgcagcaatgtgacgaacagatccagataacgacactgccgtgcttcagtgaggtggaggcaaccccggaatgcacctccctatgggaacaccggtaccaggagtacttgacaaagagcaggggccttttcgatctgggcaaggaagaaaagaacgacgagttccagaaactctaccaacactacaaacatctgctatacgacgccgacgaactggaggagacctcgcgggacctctcagacgtgttcatggaggcctgcgcgatatacaggatcgtgtacgagcgagcatggtgtaccaggagcgtcagcaggtgccgtttcgtgtggaacgtggctggagcggcgctgtgccacctccacgcgaccaagtacgcggcgcagcgcggggagaaaaccgcgctctgcccgctctcagttatccgccagctttacatctgatatatatattttttttttggtaaagcagctgatttctgcctgtaaaatgaaacgggtgagctgatgcgtcttaagagaagtatatactggggctctcgatcaacttagtcaagagcttcacagttgctttgatttgatgaggttaatatagaattgctttcttgtacgtcaccagccttcaatcttaaagactcgttcgcatcttttgatacacagaagttgtgtaggtttgccgattttttttatctaaatgacatctggtacagatttattgaagcttgaattgcagttggacaactttattgctgacattcatcgaaaggaagttgagaaataagatagttgtattgaac

SEQ ID NO: 25695 - DNA, 3880 bp, Zea Mays
atgcagcctcccggcccgcctctggcgacgccgcagccgctgccgccggcggtggcggcggagctcgcgcagcttgagtcgaggctgggccaggtcgccggagagcccgcgcgccacgagctcgcggagctaggcgaagtcgccgcggttcgcgtgctacgtaggatcgcgaggtctcaagagcaggtccggacgctcactggctacatcgtctcggctgcggtgcaggagacgttcgcgctcaatgcgcaggccgtccccaccgccgagagccgcgcctgcaactcctccgctccttccctaagtgatggatctgtacaagggccgcagtgcgccagtgaacttcgaatggaagaagtaactgcgggcctctcaaactatcgcatggcaatatgcgagggtcaaggtcaggaggatcatgcagtgatgatggcaattgacaacccacctgactgcatccccccctggggttgggaccaagattgcattgaagttgataaccttgtgccaggaattgcttctcaggcaaaccagatgcctatgcagtatggcgaccgcgaccgtatccaagaactagtttctattgtaccacatggtgttcgtatgctggctgaaagtcttgaaaatggcagagcatctgagttgcagaactatgtacaaaatggcattcccgaacagtggatggttccagcagatcaaagaatggaatccacctcgagccgcctgcaacatgttttaaaatgtcttcagggagttggaccctttggacaccatctcggtccggaatgtgcaataatgataccaaagcctgagccaaatgttgttgtcgaaaatttgttcagggagatagcaagccctcatatcacagacaacaaattgaggaatacagcgagccctcagatgtgtgcgttggaggatttagagttcagcaagagatttttgatactctcttatctttgtcggaataacctggaagatgaagttgtactgactgtggactatattaaatcgttgaagtttctgtccatggttcattttgagtcccaaatttggaggaaatttggtcagaagaattttcaggcatccaatagagctgcaacagatagggcaaagaatttcgattcagacccaactacaacaaaattataccattgcaatatcgagataagaggggagtccatattctttgttttgaagtttacaaggatccaggaaaagagacgaaaaagaaagacagtgaacagggggatatcaagaaatgcacttcgcctgtaagatgctattttatttgcactaagtctgggtggaggggggatgaggcttatattccaattgacaagtgccgcaaactgttcatgcatatccatactgctcccaccattgcaaattatatgaaaaggtttcatttgatactttccaaaactctaacactggatgttgatttatcgacaattgacgttatactgattgatgatgaaccttgtcgggacgagcatgggaacattgttatgctagatgggaagcgtttgatccatactgatgggactggcttcatatctgaaaatttggctaagaaatgccctagcagaataatcaaaggaaagaagtcaaaagtttatatgcatcaaggtgaaacaacgcctcttctcatgcaggtccgtcttttttataatggatatgctgtaaagggaactctgctagttgacaaaaggattagtaataatactattgtgatccgaccatcaatggtaaaagtaaaagctgacccaaagttgtgccggatgaagtctctgagttctttggaaatagtttccacaagttgcatatggatatgctaatatggaggattcaatgttagaacgcatgattcattctggaattccactagaagaaccatacttgctatctaggctgagttttatggccaaacaggaaatgaaagtattcagagaaggaaagctaccaattgatgaatgctattatttgatgggtacaacagatcctacaggaacgctgaaaccaaatgaagtttgtgtgatacttgacagcggacaatactctggagatgttcttgtgtttaaacatcctgggctacattttggcgatatacatatcttaactgcaaggcaaattgatggactagagaagaattttattggatattcaaaaaatgcaatactttttcctacttctggacaaagatcattggctgatgagatggccaatagtgattttgatggtgacgagttctgggtctcaagaaacaatatgttactaaagactttcgagaagcgaagtgagccatgggttgaactattaaaactgaaggagacccagcacaggcttagcaaacctggggatttaaatgaattgattctcgaaagagtgctatttaatgaatgcttgacgactatgtttatacccaagtattgtatctcttcaattattaatcatgttcatatcattgttttcataggatgttacttggttttgaattgatcagtatgctttgcacgatttcatcatttataaatacttttgctaaaccttataaacattctttaatttgtattaaattacatatctttaatttattttaaggtattcaatcaactatgtgacattcatgcatatttgcaaagctaggtgaagttgtatgcttaaatataaaaaaggcacaatcatgcttttaatggcatgccttaatgacttacatattgctcatgccttttgttagtccaatatgtagtgcggactggtgaaatgaattatttctcgtcattgccttcattgtgcagttcaactcggactctagttacacaaaaggtttagcgcctgactgttggttagcacatatggaccgattattaacagaaggagtcgatcaagatgagaagaagtcaatcgtggaaaacatgattaaattagttgacctttattatgcggctctggatgggcacaaggtagatgttgatcgccatctgagagtaaaagcatatccacacttcatggagaagaaaggatttgaatcctaccattcttcatctattttgggcagaatctacgatgagactgaggaaataatagcgcagcaatgtgacgaacagatccagataacgacactgccgtgcttcagtgaggtggaggcaaccccggaatgcacctccctatgggaacaccggtaccaggagtacttgacaaagagcaggggccttttcgatctgggcaaggaagaaaagaacgacgagttccagaaactctaccaacactacaaacatctgctatacgacgccgacgaactggaggagacctcgcgggacctctcagacgtgttcatggaggcctgcgcgatatacaggatcgtgtacgagcgagcatggtgtaccaggagcgtcagcaggtgccgtttcgtgtggaacgtggctggagcggcgctgtgccacctccacgcgaccaagtacgcggcgcagcgcggggagaaaaccgcgctctgcccgctctcagttatccgccagctttacatctgatatatatattttttttttggtaaagcagctgatttctgcctgtaaaatgaaacgggtgagctgatgcgtcttaagagaagtatatactggggctctcgatcaacttagtcaagagcttcacagttgctttgatttgatgaggttaatatagaattgctttcttgtacgtcaccagccttcaatcttaaagactcgttcgcatcttttgatacacagaagttgtgtaggtttgccgattttttttatctaaatgacatctggtacagatttattgaagcttgaattgcagttggacaactttattgctgacattcatcgaaaggaagttgagaaataagatagttgtattgaac

SEQ ID NO: 25696 - DNA, 3538 bp, Zea Mays
atgcagcctcccggcccgcctctggcgacgccgcagccgctgccgccggcggtggcggcggagctcgcgcagcttgagtcgaggctgggccaggtcgccggagagcccgcgcgccacgagctcgcggagctaggcgaagtcgccgcggttcgcgtgctacgtaggatcgcgaggtctcaagagcaggtccggacgctcactggctacatcgtctcggctgcggtgcaggagacgttcgcgctcaatgcgcaggccgtccccaccgccgagagccgcgcctgcaactcctccgctccttccctaagtgatggatctgtacaagggccgcagtgcgccagtgaacttcgaatggaagaagtaactgcgggcctctcaaactatcgcatggcaatatgcgagggtcaaggtcaggaggatcatgcagtgatgatggcaattgacaacccacctgactgcatccccccctggggttgggaccaagattgcattgaagttgataaccttgtgccaggaattgcttctcaggcaaaccagatgcctatgcagtatggcgaccgcgaccgtatccaagaactagtttctattgtaccacatggtgttcgtatgctggctgaaagtcttgaaaatggcagagcatctgagttgcagaactatgtacaaaatggcattcccgaacagtggatggttccagcagatcaaagaatggaatccacctcgagccgcctgcaacatgttttaaaatgtcttcagggagttggaccctttggacaccatctcggtccggaatgtgcaataatgataccaaagcctgagccaaatgttgttgtcgaaaatttgttcagggagatagcaagccctcatatcacagacaacaaattgaggaatacagcgagccctcagatgtgtgcgttggaggatttagagttcagcaagagatttttgatactctcttatctttgtcggaataacctggaagatgaagttgtactgactgtggactatattaaatcgttgaagtttctgtccatggttcattttgagtcccaaatttggaggaaatttggtcagaagaattttcaggcatccaatagagctgcaacagatagggcaaagaatttcgattcagacccaactacaacaaaattataccattgcaatatcgagataagaggggagtccatattctttgttttgaaggggccatatatggagaataagaggacttatctacaaaaagttcttggtgatgataatgttcttctagtaaagtttatggtttcttcagacaagagcactgatttctaccgccaacattaccatagggttgttgaagatggtattgttttgggtctgcgacgatataattttttcgtttacaaggatccaggaaaagagacgaaaaagaaagacagtgaacagggggatatcaagaaatgcacttcgcctgtttcatttgatactttccaaaactctaacactggatgttgatttatcgacaattgacgttatactgattgatgatgaaccttgtcgggacgagcatgggaacattgttatgctagatgggaagcgtttgatccatactgatgggactggcttcatatctgaaaatttggctaagaaatgccctagcagaataatcaaaggaaagaagtcaaaagtttatatgcatcaaggtgaaacaacgcctcttctcatgcaggtccgtcttttttataatggatatgctgtaaagggaactctgctagttgacaaaaggattagtaataatactattgtgatccgaccatcaatggtaaaagtaaaagctgacccaaagttgtgccggatgaagtctctgagttctttggaaatagtttccacaagttgcatatggatatgctaatatggaggattcaatgttagaacgcatgattcattctggaattccactagaagaaccatacttgctatctaggctgagttttatggccaaacaggaaatgaaagtattcagagaaggaaagctaccaattgatgaatgctattatttgatgggtacaacagatcctacaggaacgctgaaaccaaatgaagtttgtgtgatacttgacagcggacaatactctggagatgttcttgtgtttaaacatcctgggctacattttggcgatatacatatcttaactgcaaggcaaattgatggactagagaagaattttattggatattcaaaaaatgcaatactttttcctacttctggacaaagatcattggctgatgagatggccaatagtgattttgatggtgacgagttctgggtctcaagaaacaatatgttactaaagactttcgagaagcgaagtgagccatgggttgaactattaaaactgaaggagacccagcacaggcttagcaaacctggggatttaaatgaattgattctcgaaagagtgctatttaatgaatgcttgacgactatgtttatacccaattacacaaaaggtttagcgcctgactgttggttagcacatatggaccgattattaacagaaggagtcgatcaagatgagaagaagtcaatcgtggaaaacatgattaaattagttgacctttattatgcggctctggatgggcacaaggtagatgttgatcgccatctgagagtaaaagcatatccacacttcatggagaagaaaggatttgaatcctaccattcttcatctattttgggcagaatctacgatgagactgaggaaataatagcgcagcaatgtgacgaacagatccagataacgacactgccgtgcttcagtgaggtggaggcaaccccggaatgcacctccctatgggaacaccggtaccaggagtacttgacaaagagcaggggccttttcgatctgggcaaggaagaaaagaacgacgagttccagaaactctaccaacactacaaacatctgctatacgacgccgacgaactggaggagacctcgcgggacctctcagacgtgttcatggaggcctgcgcgatatacaggatcgtgtacgagcgagcatggtgtaccaggagcgtcagcaggtgccgtttcgtgtggaacgtggctggagcggcgctgtgccacctccacgcgaccaagtacgcggcgcagcgcggggagaaaaccgcgctctgcccgctctcagttatccgccagctttacatctgatatatatattttttttttggtaaagcagctgatttctgcctgtaaaatgaaacgggtgagctgatgcgtcttaagagaagtatatactggggctctcgatcaacttagtcaagagcttcacagttgctttgatttgatgaggttaatatagaattgctttcttgtacgtcaccagccttcaatcttaaagactcgttcgcatcttttgatacacagaagttgtgtaggtttgccgattttttttatctaaatgacatctggtacagatttattgaagcttgaattgcagttggacaactttattgctgacattcatcgaaaggaagttgagaaataagatagttgtattgaac

SEQ ID NO: 25697 - DNA, 4153 bp, Zea Mays
cgcggcgccgcttgcgccagtgccccctcctcgctttccgctttcatccgggccccactcgccgcttcggtctgagctcggccaaccatcggccatcgccagtgccgctgccgtatccgtcgagtaatgcagcctcccggcccgcctctggcgacgccgcagccgctgccgccggcggtggcggcggagctcgcgcagcttgagtcgaggctgggccaggtcgccggagagcccgcgcgccacgagctcgcggagctaggcgaagtcgccgcggttcgcgtgctacgtaggatcgcgaggtctcaagagcaggtccggacgctcactggctacatcgtctcggctgcggtgcaggagacgttcgcgctcaatgcgcaggccgtccccaccgccgagagccgcgcctgcaactcctccgctccttccctaagtgatggatctgtacaagggccgcagtgcgccagtgaacttcgaatggaagaagtaactgcgggcctctcaaactatcgcatggcaatatgcgagggtcaaggtcaggaggatcatgcagtgatgatggcaattgacaacccacctgactgcatccccccctggggttgggaccaagattgcattgaagttgataaccttgtgccaggaattgcttctcaggcaaaccagatgcctatgcagtatggcgaccgcgaccgtatccaagaactagtttctattgtaccacatggtgttcgtatgctggctgaaagtcttgaaaatggcagagcatctgagttgcagaactatgtacaaaatggcattcccgaacagtggatggttccagcagatcaaagaatggaatccacctcgagccgcctgcaacatgttttaaaatgtcttcagggagttggaccctttggacaccatctcggtccggaatgtgcaataatgataccaaagcctgagccaaatgttgttgtcgaaaatttgttcagggagatagcaagccctcatatcacagacaacaaattgaggaatacagcgagccctcagatgtgtgcgttggaggatttagagttcagcaagagatttttgatactctcttatctttgtcggaataacctggaagatgaagttgtactgactgtggactatattaaatcgttgaagtttctgtccatggttcattttgagtcccaaatttggaggaaatttggtcagaagaattttcaggcatccaatagagctgcaacagatagggcaaagaatttcgattcagacccaactacaacaaaattataccattgcaatatcgagataagaggggagtccatattctttgttttgaaggggccatatatggagaataagaggacttatctacaaaaagttcttggtgatgataatgttcttctagtaaagtttatggtttcttcagacaagagcactgatttctaccgccaacattaccatagggttgttgaagatggtattgttttgggtctgcgacgatataattttttcggatttttctttggaagttttggaggatgcatgagaaatggtcctcttgtcagggatctgaaacattggagttgcatgcaaatattaagttattggggattcctaacaggctgataaaagcagcagacttcttaatttatctgcattttgctgtgctgcagcagttcttggacttctagttttcagattgattccattggtcttcttccacagtttacaaggatccaggaaaagagacgaaaaagaaagacagtgaacagggggatatcaagaaatgcacttcgcctgtaagatgctattttatttgcactaagtctgggtggaggggggatgaggcttatattccaattgacaagtgccgcaaactgttcatgcatatccatactgctcccaccattgcaaattatatgaaaaggtttcatttgatactttccaaaactctaacactggatgttgatttatcgacaattgacgttatactgattgatgatgaaccttgtcgggacgagcatgggaacattgttatgctagatgggaagcgtttgatccatactgatgggactggcttcatatctgaaaatttggctaagaaatgccctagcagaataatcaaaggaaagaagtcaaaagtttatatgcatcaaggtgaaacaacgcctcttctcatgcaggtccgtcttttttataatggatatgctgtaaagggaactctgctagttgacaaaaggattagtaataatactattgtgatccgaccatcaatggtaaaagtaaaagctgacccaaagttgtgccggatgaagtctctgagttctttggaaatagtttccacaagccatcaatccaataggacatcaacatcaaggatcttgattgcgttgcttcactatggaggagttaaggcagaatattttatggaacttctacataatgcaattgaaggggttaataatgctcgttatagtttcagacacgcgctgaagcttgcatatggatatgctaatatggaggattcaatgttagaacgcatgattcattctggaattccactagaagaaccatacttgctatctaggctgagttttatggccaaacaggaaatgaaagtattcagagaaggaaagctaccaattgatgaatgctattatttgatgggtacaacagatcctacaggaacgctgaaaccaaatgaagtttgtgtgatacttgacagcggacaatactctggagatgttcttgtgtttaaacatcctgggctacattttggcgatatacatatcttaactgcaaggcaaattgatggactagagaagaattttattggatattcaaaaaatgcaatactttttcctacttctggacaaagatcattggctgatgagatggccaatagtgattttgatggtgacgagttctgggtctcaagaaacaatatgttactaaagactttcgagaagcgaagtgagccatgggttgaactattaaaactgaaggagacccagcacaggcttagcaaacctggggatttaaatgaattgattctcgaaagagtgctatttaatgaatgcttgacgactatgtttatacccaattacacaaaaggtttagcgcctgactgttggttagcacatatggaccgattattaacagaaggagtcgatcaagatgagaagaagtcaatcgtggaaaacatgattaaattagttgacctttattatgcggctctggatgggcacaaggtagatgttgatcgccatctgagagtaaaagcatatccacacttcatggagaagaaaggatttgaatcctaccattcttcatctattttgggcagaatctacgatgagactgaggaaataatagcgcagcaatgtgacgaacagatccagataacgacactgccgtgcttcagtgaggtggaggcaaccccggaatgcacctccctatgggaacaccggtaccaggagtacttgacaaagagcaggggccttttcgatctgggcaaggaagaaaagaacgacgagttccagaaactctaccaacactacaaacatctgctatacgacgccgacgaactggaggagacctcgcgggacctctcagacgtgttcatggaggcctgcgcgatatacaggatcgtgtacgagcgagcatggtgtaccaggagcgtcagcaggtgccgtttcgtgtggaacgtggctggagcggcgctgtgccacctccacgcgaccaagtacgcggcgcagcgcggggagaaaaccgcgctctgcccgctctcagttatccgccagctttacatctgatatatatattttttttttggtaaagcagctgatttctgcctgtaaaatgaaacgggtgagctgatgcgtcttaagagaagtatatactggggctctcgatcaacttagtcaagagcttcacagttgctttgatttgatgaggttaatatagaattgctttcttgtacgtcaccagccttcaatcttaaagactcgttcgcatcttttgatacacagaagttgtgtaggtttgccgattttttttatctaaatgacatctggtacagatttattgaagcttgaattgcagttggacaactttattgctgacattcatcgaaaggaagttgagaaataagatagttgtattgaac

SEQ ID NO: 25698 - DNA, 3779 bp, Zea Mays
ccacccccaccgccgcggcgccgcttgcgccagtgccccctcctcgctttccgctttcatccgggccccactcgccgcttcggtctgagctcggccaaccatcggccatcgccagtgccgctgccgtatccgtcgagtaatgcagcctcccggcccgcctctggcgacgccgcagccgctgccgccggcggtggcggcggagctcgcgcagcttgagtcgaggctgggccaggtcgccggagagcccgcgcgccacgagctcgcggagctaggcgaagtcgccgcggttcgcgtgctacgtaggatcgcgaggtctcaagagcaggtccggacgctcactggctacatcgtctcggctgcggtgcaggagacgttcgcgctcaatgcgcaggccgtccccaccgccgagagccgcgcctgcaactcctccgctccttccctaagtgatggatctgtacaagggccgcagtgcgccagtgaacttcgaatggaagaagtaactgcgggcctctcaaactatcgcatggcaatatgcgagggtcaaggtcaggaggatcatgcagtgatgatggcaattgacaacccacctgactgcatccccccctggggttgggaccaagattgcattgaagttgataaccttgtgccaggaattgcttctcaggcaaaccagatgcctatgcagtatggcgaccgcgaccgtatccaagaactagtttctattgtaccacatggtgttcgtatgctggctgaaagtcttgaaaatggcagagcatctgagttgcagaactatgtacaaaatggcattcccgaacagtggatggttccagcagatcaaagaatggaatccacctcgagccgcctgcaacatgttttaaaatgtcttcagggagttggaccctttggacaccatctcggtccggaatgtgcaataatgataccaaagcctgagccaaatgttgttgtcgaaaatttgttcagggagatagcaagccctcatatcacagacaacaaattgaggaatacagcgagccctcagatgtgtgcgttggaggatttagagttcagcaagagatttttgatactctcttatctttgtcggaataacctggaagatgaagttgtactgactgtggactatattaaatcgttgaagtttctgtccatggttcattttgagtcccaaatttggaggaaatttggtcagaagaattttcaggcatccaatagagctgcaacagatagggcaaagaatttcgattcagacccaactacaacaaaattataccattgcaatatcgagataagaggggagtccatattctttgttttgaagtttacaaggatccaggaaaagagacgaaaaagaaagacagtgaacagggggatatcaagaaatgcacttcgcctgtaagatgctattttatttgcactaagtctgggtggaggggggatgaggcttatattccaattgacaagtgccgcaaactgttcatgcatatccatactgctcccaccattgcaaattatatgaaaaggtttcatttgatactttccaaaactctaacactggatgttgatttatcgacaattgacgttatactgattgatgatgaaccttgtcgggacgagcatgggaacattgttatgctagatgggaagcgtttgatccatactgatgggactggcttcatatctgaaaatttggctaagaaatgccctagcagaataatcaaaggaaagaagtcaaaagtttatatgcatcaaggtgaaacaacgcctcttctcatgcaggtccgtcttttttataatggatatgctgtaaagggaactctgctagttgacaaaaggattagtaataatactattgtgatccgaccatcaatggtaaaagtaaaagctgacccaaagttgtgccggatgaagtctctgagttctttggaaatagtttccacaagccatcaatccaataggacatcaacatcaaggatcttgattgcgttgcttcactatggaggagttaaggcagaatattttatggaacttctacataatgcaattgaaggggttaataatgctcgttatagtttcagacacgcgctgaagcttgcatatggatatgctaatatggaggattcaatgttagaacgcatgattcattctggaattccactagaagaaccatacttgctatctaggctgagttttatggccaaacaggaaatgaaagtattcagagaaggaaagctaccaattgatgaatgctattatttgatgggtacaacagatcctacaggaacgctgaaaccaaatgaagtttgtgtgatacttgacagcggacaatactctggagatgttcttgtgtttaaacatcctgggctacattttggcgatatacatatcttaactgcaaggcaaattgatggactagagaagaattttattggatattcaaaaaatgcaatactttttcctacttctggacaaagatcattggctgatgagatggccaatagtgattttgatggtgacgagttctgggtctcaagaaacaatatgttactaaagactttcgagaagcgaagtgagccatgggttgaactattaaaactgaaggagacccagcacaggcttagcaaacctggggatttaaatgaattgattctcgaaagagtgctatttaatgaatgcttgacgactatgtttatacccaattacacaaaaggtttagcgcctgactgttggttagcacatatggaccgattattaacagaaggagtcgatcaagatgagaagaagtcaatcgtggaaaacatgattaaattagttgacctttattatgcggctctggatgggcacaaggtagatgttgatcgccatctgagagtaaaagcatatccacacttcatggagaagaaaggatttgaatcctaccattcttcatctattttgggcagaatctacgatgagactgaggaaataatagcgcagcaatgtgacgaacagatccagataacgacactgccgtgcttcagtgaggtggaggcaaccccggaatgcacctccctatgggaacaccggtaccaggagtacttgacaaagagcaggggccttttcgatctgggcaaggaagaaaagaacgacgagttccagaaactctaccaacactacaaacatctgctatacgacgccgacgaactggaggagacctcgcgggacctctcagacgtgttcatggaggcctgcgcgatatacaggatcgtgtacgagcgagcatggtgtaccaggagcgtcagcaggtgccgtttcgtgtggaacgtggctggagcggcgctgtgccacctccacgcgaccaagtacgcggcgcagcgcggggagaaaaccgcgctctgcccgctctcagttatccgccagctttacatctgatatatatattttttttttggtaaagcagctgatttctgcctgtaaaatgaaacgggtgagctgatgcgtcttaagagaagtatatactggggctctcgatcaacttagtcaagagcttcacagttgctttgatttgatgaggttaatatagaattgctttcttgtacgtcaccagccttcaatcttaaagactcgttcgcatcttttgatacacagaagttgtgtaggtttgccgattttttttatctaaatgacatctggtacagatttattgaagcttgaattgcagttggacaactttattgctgacattcatcgaaaggaagttgagaaataagatagttgtattgaac

SEQ ID NO: 25699 - DNA, 3630 bp, Zea Mays
ccacccccaccgccgcggcgccgcttgcgccagtgccccctcctcgctttccgctttcatccgggccccactcgccgcttcggtctgagctcggccaaccatcggccatcgccagtgccgctgccgtatccgtcgagtaatgcagcctcccggcccgcctctggcgacgccgcagccgctgccgccggcggtggcggcggagctcgcgcagcttgagtcgaggctgggccaggtcgccggagagcccgcgcgccacgagctcgcggagctaggcgaagtcgccgcggttcgcgtgctacgtaggatcgcgaggtctcaagagcaggtccggacgctcactggctacatcgtctcggctgcggtgcaggagacgttcgcgctcaatgcgcaggccgtccccaccgccgagagccgcgcctgcaactcctccgctccttccctaagtgatggatctgtacaagggccgcagtgcgccagtgaacttcgaatggaagaagtaactgcgggcctctcaaactatcgcatggcaatatgcgagggtcaaggtcaggaggatcatgcagtgatgatggcaattgacaacccacctgactgcatccccccctggggttgggaccaagattgcattgaagttgataaccttgtgccaggaattgcttctcaggcaaaccagatgcctatgcagtatggcgaccgcgaccgtatccaagaactagtttctattgtaccacatggtgttcgtatgctggctgaaagtcttgaaaatggcagagcatctgagttgcagaactatgtacaaaatggcattcccgaacagtggatggttccagcagatcaaagaatggaatccacctcgagccgcctgcaacatgttttaaaatgtcttcagggagttggaccctttggacaccatctcggtccggaatgtgcaataatgataccaaagcctgagccaaatgttgttgtcgaaaatttgttcagggagatagcaagccctcatatcacagacaacaaattgaggaatacagcgagccctcagatgtgtgcgttggaggatttagagttcagcaagagatttttgatactctcttatctttgtcggaataacctggaagatgaagttgtactgactgtggactatattaaatcgttgaagtttctgtccatggttcattttgagtcccaaatttggaggaaatttggtcagaagaattttcaggcatccaatagagctgcaacagatagggcaaagaatttcgattcagacccaactacaacaaaattataccattgcaatatcgagataagaggggagtccatattctttgttttgaagtttacaaggatccaggaaaagagacgaaaaagaaagacagtgaacagggggatatcaagaaatgcacttcgcctgtaagatgctattttatttgcactaagtctgggtggaggggggatgaggcttatattccaattgacaagtgccgcaaactgttcatgcatatccatactgctcccaccattgcaaattatatgaaaaggtttcatttgatactttccaaaactctaacactggatgttgatttatcgacaattgacgttatactgattgatgatgaaccttgtcgggacgagcatgggaacattgttatgctagatgggaagcgtttgatccatactgatgggactggcttcatatctgaaaatttggctaagaaatgccctagcagaataatcaaaggaaagaagtcaaaagtttatatgcatcaaggtgaaacaacgcctcttctcatgcaggtccgtcttttttataatggatatgctgtaaagggaactctgctagttgacaaaaggattagtaataatactattgtgatccgaccatcaatggtaaaagtaaaagctgacccaaagttgtgccggatgaagtctctgagttctttggaaatagtttccacaagttgcatatggatatgctaatatggaggattcaatgttagaacgcatgattcattctggaattccactagaagaaccatacttgctatctaggctgagttttatggccaaacaggaaatgaaagtattcagagaaggaaagctaccaattgatgaatgctattatttgatgggtacaacagatcctacaggaacgctgaaaccaaatgaagtttgtgtgatacttgacagcggacaatactctggagatgttcttgtgtttaaacatcctgggctacattttggcgatatacatatcttaactgcaaggcaaattgatggactagagaagaattttattggatattcaaaaaatgcaatactttttcctacttctggacaaagatcattggctgatgagatggccaatagtgattttgatggtgacgagttctgggtctcaagaaacaatatgttactaaagactttcgagaagcgaagtgagccatgggttgaactattaaaactgaaggagacccagcacaggcttagcaaacctggggatttaaatgaattgattctcgaaagagtgctatttaatgaatgcttgacgactatgtttatacccaattacacaaaaggtttagcgcctgactgttggttagcacatatggaccgattattaacagaaggagtcgatcaagatgagaagaagtcaatcgtggaaaacatgattaaattagttgacctttattatgcggctctggatgggcacaaggtagatgttgatcgccatctgagagtaaaagcatatccacacttcatggagaagaaaggatttgaatcctaccattcttcatctattttgggcagaatctacgatgagactgaggaaataatagcgcagcaatgtgacgaacagatccagataacgacactgccgtgcttcagtgaggtggaggcaaccccggaatgcacctccctatgggaacaccggtaccaggagtacttgacaaagagcaggggccttttcgatctgggcaaggaagaaaagaacgacgagttccagaaactctaccaacactacaaacatctgctatacgacgccgacgaactggaggagacctcgcgggacctctcagacgtgttcatggaggcctgcgcgatatacaggatcgtgtacgagcgagcatggtgtaccaggagcgtcagcaggtgccgtttcgtgtggaacgtggctggagcggcgctgtgccacctccacgcgaccaagtacgcggcgcagcgcggggagaaaaccgcgctctgcccgctctcagttatccgccagctttacatctgatatatatattttttttttggtaaagcagctgatttctgcctgtaaaatgaaacgggtgagctgatgcgtcttaagagaagtatatactggggctctcgatcaacttagtcaagagcttcacagttgctttgatttgatgaggttaatatagaattgctttcttgtacgtcaccagccttcaatcttaaagactcgttcgcatcttttgatacacagaagttgtgtaggtttgccgattttttttatctaaatgacatctggtacagatttattgaagcttgaattgcagttggacaactttattgctgacattcatcgaaaggaagttgagaaataagatagttgtattgaac

SEQ ID NO: 25700 - DNA, 4636 bp, Zea Mays
ctgcgctccaactcaacgcggcccccacccccaccgccgcggcgccgcttgcgccagtgccccctcctcgctttccgctttcatccgggccccactcgccgcttcggtctgagctcggccaaccatcggccatcgccagtgccgctgccgtatccgtcgagtaatgcagcctcccggcccgcctctggcgacgccgcagccgctgccgccggcggtggcggcggagctcgcgcagcttgagtcgaggctgggccaggtcgccggagagcccgcgcgccacgagctcgcggagctaggcgaagtcgccgcggttcgcgtgctacgtaggatcgcgaggtctcaagagcaggtccggacgctcactggctacatcgtctcggctgcggtgcaggagacgttcgcgctcaatgcgcaggccgtccccaccgccgagagccgcgcctgcaactcctccgctccttccctaagtgatggatctgtacaagggccgcagtgcgccagtgaacttcgaatggaagaagtaactgcgggcctctcaaactatcgcatggcaatatgcgagggtcaaggtcaggaggatcatgcagtgatgatggcaattgacaacccacctgactgcatccccccctggggttgggaccaagattgcattgaagttgataaccttgtgccaggaattgcttctcaggcaaaccagatgcctatgcagtatggcgaccgcgaccgtatccaagaactagtttctattgtaccacatggtgttcgtatgctggctgaaagtcttgaaaatggcagagcatctgagttgcagaactatgtacaaaatggcattcccgaacagtggatggttccagcagatcaaagaatggaatccacctcgagccgcctgcaacatgttttaaaatgtcttcagggagttggaccctttggacaccatctcggtccggaatgtgcaataatgataccaaagcctgagccaaatgttgttgtcgaaaatttgttcagggagatagcaagccctcatatcacagacaacaaattgaggaatacagcgagccctcagatgtgtgcgttggaggatttagagttcagcaagagatttttgatactctcttatctttgtcggaataacctggaagatgaagttgtactgactgtggactatattaaatcgttgaagtttctgtccatggttcattttgagtcccaaatttggaggaaatttggtcagaagaattttcaggcatccaatagagctgcaacagatagggcaaagaatttcgattcagacccaactacaacaaaattataccattgcaatatcgagataagaggggagtccatattctttgttttgaagtttacaaggatccaggaaaagagacgaaaaagaaagacagtgaacagggggatatcaagaaatgcacttcgcctgtttcatttgatactttccaaaactctaacactggatgttgatttatcgacaattgacgttatactgattgatgatgaaccttgtcgggacgagcatgggaacattgttatgctagatgggaagcgtttgatccatactgatgggactggcttcatatctgaaaatttggctaagaaatgccctagcagaataatcaaaggaaagaagtcaaaagtttgtacgcttggccctgtgcttgccattttctttacagaaacttattactaatattttaactttatggatgatatgtgggggttctacagatggttgtgatttttgattttttatgttctgatgtgttatttgtgggtggaactcagcataaagcctagtcgtgcgatggttgaggccccagccctcattggcgtagtttgccagcaaagtcagggaagagaggagatatgaaaagattcaacctattacttaattgttctgagtacatgcgtatacccagtggtgatgcttgtccaacaacagcctatccttgccttaggagtattgctgaccccacatgacaatttatcaagccaacacattcataccaagtatgacatagtcccaagcaatttatgtaggctagagttaaaacctaacacaggccactagtaaaaaggggaaaacaaataaaagaaagcaatatatgaggctcagtaatattgatattattagagggcctaaagtgtgttcatggtttaggcatgtgaatagctgcttttcatgcactcctgtccaagggtgattctttgggtatattcctttgtttcaagtttctccacttcacatatcaagtttgctgccccatgaataaagttttttttttcaagtttggccgacgcctacctctccttatattatttctatgccttatgattgcactattcgctggcacattgaggcctcctctggacatatccatacaaaccacaatatgccatggatttcttttgctctgaagttgttcagtggactgcttctttccattcctccgaaattgaaatgcttatgtaaataaaggagcatttatggaaatcactcctgcatatgtatgcctctgcattcagtatgcagtagtttatggtaaaggttcatacaactgtcagttaatatattgattgtttctatcccttttcaggtttatatgcatcaaggtgaaacaacgcctcttctcatgcaggtccgtcttttttataatggatatgctgtaaagggaactctgctagttgacaaaaggattagtaataatactattgtgatccgaccatcaatggtaaaagtaaaagctgacccaaagttgtgccggatgaagtctctgagttctttggaaatagtttccacaagccatcaatccaataggacatcaacatcaaggatcttgattgcgttgcttcactatggaggagttaaggcagaatattttatggaacttctacataatgcaattgaaggggttaataatgctcgttatagtttcagacacgcgctgaagcttgcatatggatatgctaatatggaggattcaatgttagaacgcatgattcattctggaattccactagaagaaccatacttgctatctaggctgagttttatggccaaacaggaaatgaaagtattcagagaaggaaagctaccaattgatgaatgctattatttgatgggtacaacagatcctacaggaacgctgaaaccaaatgaagtttgtgtgatacttgacagcggacaatactctggagatgttcttgtgtttaaacatcctgggctacattttggcgatatacatatcttaactgcaaggcaaattgatggactagagaagaattttattggatattcaaaaaatgcaatactttttcctacttctggacaaagatcattggctgatgagatggccaatagtgattttgatggtgacgagttctgggtctcaagaaacaatatgttactaaagactttcgagaagcgaagtgagccatgggttgaactattaaaactgaaggagacccagcacaggcttagcaaacctggggatttaaatgaattgattctcgaaagagtgctatttaatgaatgcttgacgactatgtttatacccaattacacaaaaggtttagcgcctgactgttggttagcacatatggaccgattattaacagaaggagtcgatcaagatgagaagaagtcaatcgtggaaaacatgattaaattagttgacctttattatgcggctctggatgggcacaaggtagatgttgatcgccatctgagagtaaaagcatatccacacttcatggagaagaaaggatttgaatcctaccattcttcatctattttgggcagaatctacgatgagactgaggaaataatagcgcagcaatgtgacgaacagatccagataacgacactgccgtgcttcagtgaggtggaggcaaccccggaatgcacctccctatgggaacaccggtaccaggagtacttgacaaagagcaggggccttttcgatctgggcaaggaagaaaagaacgacgagttccagaaactctaccaacactacaaacatctgctatacgacgccgacgaactggaggagacctcgcgggacctctcagacgtgttcatggaggcctgcgcgatatacaggatcgtgtacgagcgagcatggtgtaccaggagcgtcagcaggtgccgtttcgtgtggaacgtggctggagcggcgctgtgccacctccacgcgaccaagtacgcggcgcagcgcggggagaaaaccgcgctctgcccgctctcagttatccgccagctttacatctgatatatatattttttttttggtaaagcagctgatttctgcctgtaaaatgaaacgggtgagctgatgcgtcttaagagaagtatatactggggctctcgatcaacttagtcaagagcttcacagttgctttgatttgatgaggttaatatagaattgctttcttgtacgtcaccagccttcaatcttaaagactcgttcgcatcttttgatacacagaagttgtgtaggtttgccgattttttttatctaaatgacatctggtacagatttattgaagcttgaattgcagttggacaactttattgctgacattcatcgaaaggaagttgagaaataagatagttgtattgaac

SEQ ID NO: 25701 - DNA, 3551 bp, Zea Mays
ccatatcctccgcctgtttcgctctctgcgctccaactcaacgcggcccccacccccaccgccgcggcgccgcttgcgccagtgccccctcctcgctttccgctttcatccgggccccactcgccgcttcggtctgagctcggccaaccatcggccatcgccagtgccgctgccgtatccgtcgagtaatgcagcctcccggcccgcctctggcgacgccgcagccgctgccgccggcggtggcggcggagctcgcgcagcttgagtcgaggctgggccaggtcgccggagagcccgcgcgccacgagctcgcggagctaggcgaagtcgccgcggttcgcgtgctacgtaggatcgcgaggtctcaagagcaggtccggacgctcactggctacatcgtctcggctgcggtgcaggagacgttcgcgctcaatgcgcaggccgtccccaccgccgagagccgcgcctgcaactcctccgctccttccctaagtgatggatctgtacaagggccgcagtgcgccagtgaacttcgaatggaagaagtaactgcgggcctctcaaactatcgcatggcaatatgcgagggtcaaggtcaggaggatcatgcagtgatgatggcaattgacaacccacctgactgcatccccccctggggttgggaccaagattgcattgaagttgataaccttgtgccaggaattgcttctcaggcaaaccagatgcctatgcagtatggcgaccgcgaccgtatccaagaactagtttctattgtaccacatggtgttcgtatgctggctgaaagtcttgaaaatggcagagcatctgagttgcagaactatgtacaaaatggcattcccgaacagtggatggttccagcagatcaaagaatggaatccacctcgagccgcctgcaacatgttttaaaatgtcttcagggagttggaccctttggacaccatctcggtccggaatgtgcaataatgataccaaagcctgagccaaatgttgttgtcgaaaatttgttcagggagatagcaagccctcatatcacagacaacaaattgaggaatacagcgagccctcagatgtgtgcgttggaggatttagagttcagcaagagatttttgatactctcttatctttgtcggaataacctggaagatgaagttgtactgactgtggactatattaaatcgttgaagtttctgtccatggttcattttgagtcccaaatttggaggaaatttggtcagaagaattttcaggcatccaatagagctgcaacagatagggcaaagaatttcgattcagacccaactacaacaaaattataccattgcaatatcgagataagaggggagtccatattctttgttttgaagtttacaaggatccaggaaaagagacgaaaaagaaagacagtgaacagggggatatcaagaaatgcacttcgcctgtttcatttgatactttccaaaactctaacactggatgttgatttatcgacaattgacgttatactgattgatgatgaaccttgtcgggacgagcatgggaacattgttatgctagatgggaagcgtttgatccatactgatgggactggcttcatatctgaaaatttggctaagaaatgccctagcagaataatcaaaggaaagaagtcaaaagtttatatgcatcaaggtgaaacaacgcctcttctcatgcaggtccgtcttttttataatggatatgctgtaaagggaactctgctagttgacaaaaggattagtaataatactattgtgatccgaccatcaatggtaaaagtaaaagctgacccaaagttgtgccggatgaagtctctgagttctttggaaatagtttccacaagttgcatatggatatgctaatatggaggattcaatgttagaacgcatgattcattctggaattccactagaagaaccatacttgctatctaggctgagttttatggccaaacaggaaatgaaagtattcagagaaggaaagctaccaattgatgaatgctattatttgatgggtacaacagatcctacaggaacgctgaaaccaaatgaagtttgtgtgatacttgacagcggacaatactctggagatgttcttgtgtttaaacatcctgggctacattttggcgatatacatatcttaactgcaaggcaaattgatggactagagaagaattttattggatattcaaaaaatgcaatactttttcctacttctggacaaagatcattggctgatgagatggccaatagtgattttgatggtgacgagttctgggtctcaagaaacaatatgttactaaagactttcgagaagcgaagtgagccatgggttgaactattaaaactgaaggagacccagcacaggcttagcaaacctggggatttaaatgaattgattctcgaaagagtgctatttaatgaatgcttgacgactatgtttatacccaattacacaaaaggtttagcgcctgactgttggttagcacatatggaccgattattaacagaaggagtcgatcaagatgagaagaagtcaatcgtggaaaacatgattaaattagttgacctttattatgcggctctggatgggcacaaggtagatgttgatcgccatctgagagtaaaagcatatccacacttcatggagaagaaaggatttgaatcctaccattcttcatctattttgggcagaatctacgatgagactgaggaaataatagcgcagcaatgtgacgaacagatccagataacgacactgccgtgcttcagtgaggtggaggcaaccccggaatgcacctccctatgggaacaccggtaccaggagtacttgacaaagagcaggggccttttcgatctgggcaaggaagaaaagaacgacgagttccagaaactctaccaacactacaaacatctgctatacgacgccgacgaactggaggagacctcgcgggacctctcagacgtgttcatggaggcctgcgcgatatacaggatcgtgtacgagcgagcatggtgtaccaggagcgtcagcaggtgccgtttcgtgtggaacgtggctggagcggcgctgtgccacctccacgcgaccaagtacgcggcgcagcgcggggagaaaaccgcgctctgcccgctctcagttatccgccagctttacatctgatatatatattttttttttggtaaagcagctgatttctgcctgtaaaatgaaacgggtgagctgatgcgtcttaagagaagtatatactggggctctcgatcaacttagtcaagagcttcacagttgctttgatttgatgaggttaatatagaattgctttcttgtacgtcaccagccttcaatcttaaagactcgttcgcatcttttgatacacagaagttgtgtaggtttgccgattttttttatctaaatgacatctggtacagatttattgaagcttgaattgcagttggacaactttattgctgacattcatcgaaaggaagttgagaaataagatagttgtattgaac

SEQ ID NO: 25702 - DNA, 2624 bp, Zea Mays
gggtttcatgagagtctatatattgtaaccccatctcctatgttagcctatctaacagaatggaagcacacagcaagcagagagagagacggaggaagacggaggaggctaggcagtctattattaccggaatatgtttttgcttgccgtcctcaggcacagtacaaggattatatatcccaggtcgtgcctacaccagaccaactggactctagacccactccggcccatacacgcgagggttgctgcgtcgaacacgatgtgtgcgtccttcaggcacattggtctcctgttgctgggccgacatatcgaagtccttgacattccctccctctggaagacctgcttgtccccaagcaggagcaaagggaaaacattgttgaagtgcttcgcgatcttcccatgtcgccaattcagcaggaagcccggaccatgacaccaggacctgttgcacgagccgactgcccttggtgatgcctcgggactgaataatctgcaatggaacgctgatctctgggatatcatcaggtagtggaagaggttctggatctttgaatcctttagcgagcttaagttgagacacatgcaccaccggatgaatgcgactggaagcaggtaatgccagtcgatatgccacctgtccaattctgtccagaattttgtagggaccgaaaaacttgtaactcagtttgtgatgtgcacgtggcataacagaagcttggacatatggttggagccggagatatacccaatcgccctcttgaaatgtacgctctgacctgtgtttatcagcatgtcgtttcattctggactgggcgcgcagaagatgctgacgaataagctcctgcatcactgagcgttcctgcagccaagcggacaaacttgctggagcagcgtcattgatagtgagaccaagggtcctaggctgtcggccatacaatgcttgaatatagctgttctggacatcagtgagccattgtggaacgacctccgaaacagcattaatctctggagaaatccgacgggataacgcatccgctacccgattggaatggccttgccggtagatgatcttatattggagccccaagagtttagtgaacaccttatgctgccatggagtatgcaaccgttgctcattgagctgggacagactctggtgatcagtgagaataataaactcgccatgctgcaaatattgacgccactgctgaaccgctacaagaatagccatgaattccttctcataagctgaaagtccgcgacatttagggcccagtgctttactcaagaaggataatggatgccctttctgcataagcacagcaccaattccaaaagaactagcgtcagtttcaatagtgaactgagaggaaaaatcaggcaaggccagcaccggagctgatgctagagctgctttcaaggtgtggaatgctgtggaatgatcgtccgtccaaacgtatacaactcccttcttgagcagcccatgcaagggatggcaaatgatcccaaagtgacggatgaacttcctatagtatccagcaaggcccagaaaactccgtaattccttgacatttgctggttttggccagtcagctatagcttggattttggcaggatctgtagcgacaccagcagcagacacaatatgtcccaaataagaaacctgattttgtgcaaaagaacacttgttcatcttcaccttccaggcatctctggacaacagctcgaacacttgttgtaaatgtttaagatggtcttccaaggttgcactgtaaataagtatatcatcaaagaagacgagggcacacttgcgcaatagaggaaacaacgtttgattcatagctcgctgaaatgtacccggagcaccggtgaggccaaacgccataacacgaaattcataatgtcccatatgagtttggaatgccgtcttgtgctcttcaccagccttgagcaaaatctggtggaatcctgcgcgcaggtcaagaatagaaaaccaggaagcaccaaatagttcatccaagagctcatcaatcacaggtaccgggtatttagtcttcactgtaagtgcattaaggtgcctatagtccacacagaaacgccagctgtgatccttctttttaaccaatataactggtgacgaaaaggcactagagctaggttgaataagaccactgcgtaacatatccttgacctgtgcttccacctcatctttcattgctggggaaaaacgatacggcctcatgttgactgggcgagcacccggaatcaaaggaattgtgtgatcacaaaatcggcttggaggtaatgtggtgggttcctcgaataaggattgatatgaacacagtaattgatgcactgaagcaggcaaatcagattcagacacttgacataattcagatgagggtacatgtgtggctgctacctgtctgacctgcaacagggctcctgaaggaactagtggctgaagaccatgaatgacagtagattgtccttgaaattcaatggataaccatttgtgtttccagtcaacatgcatcgggctatactggataagccaatccataccaagaatcaagtcatagttgggaagcggtataatcttgaagtctgactgaaactga

SEQ ID NO: 25703 - DNA, 3950 bp, Zea Mays
ctgcgctccaactcaacgcggcccccacccccaccgccgcggcgccgcttgcgccagtgccccctcctcgctttccgctttcatccgggccccactcgccgcttcggtctgagctcggccaaccatcggccatcgccagtgccgctgccgtatccgtcgagtaatgcagcctcccggcccgcctctggcgacgccgcagccgctgccgccggcggtggcggcggagctcgcgcagcttgagtcgaggctgggccaggtcgccggagagcccgcgcgccacgagctcgcggagctaggcgaagtcgccgcggttcgcgtgctacgtaggatcgcgaggtctcaagagcaggtccggacgctcactggctacatcgtctcggctgcggtgcaggagacgttcgcgctcaatgcgcaggccgtccccaccgccgagagccgcgcctgcaactcctccgctccttccctaagtgatggatctgtacaagggccgcagtgcgccagtgaacttcgaatggaagaagtaactgcgggcctctcaaactatcgcatggcaatatgcgagggtcaaggtcaggaggatcatgcagtgatgatggcaattgacaacccacctgactgcatccccccctggggttgggaccaagattgcattgaagttgataaccttgtgccaggaattgcttctcaggcaaaccagatgcctatgcagtatggcgaccgcgaccgtatccaagaactagtttctattgtaccacatggtgttcgtatgctggctgaaagtcttgaaaatggcagagcatctgagttgcagaactatgtacaaaatggcattcccgaacagtggatggttccagcagatcaaagaatggaatccacctcgagccgcctgcaacatgttttaaaatgtcttcagggagttggaccctttggacaccatctcggtccggaatgtgcaataatgataccaaagcctgagccaaatgttgttgtcgaaaatttgttcagggagatagcaagccctcatatcacagacaacaaattgaggaatacagcgagccctcagatgtgtgcgttggaggatttagagttcagcaagagatttttgatactctcttatctttgtcggaataacctggaagatgaagttgtactgactgtggactatattaaatcgttgaagtttctgtccatggttcattttgagtcccaaatttggaggaaatttggtcagaagaattttcaggcatccaatagagctgcaacagatagggcaaagaatttcgattcagacccaactacaacaaaattataccattgcaatatcgagataagaggggagtccatattctttgttttgaaggggccatatatggagaataagaggacttatctacaaaaagttcttggtgatgataatgttcttctagtaaagtttatggtttcttcagacaagagcactgatttctaccgccaacattaccatagggttgttgaagatggtattgttttgggtctgcgacgatataattttttcgtttacaaggatccaggaaaagagacgaaaaagaaagacagtgaacagggggatatcaagaaatgcacttcgcctgtaagatgctattttatttgcactaagtctgggtggaggggggatgaggcttatattccaattgacaagtgccgcaaactgttcatgcatatccatactgctcccaccattgcaaattatatgaaaaggtttcatttgatactttccaaaactctaacactggatgttgatttatcgacaattgacgttatactgattgatgatgaaccttgtcgggacgagcatgggaacattgttatgctagatgggaagcgtttgatccatactgatgggactggcttcatatctgaaaatttggctaagaaatgccctagcagaataatcaaaggaaagaagtcaaaagtttgtacgcttggccctgtgcttgccattttctttacagaaacttattactaatattttaactttatggatgatatgtgggggttctacagatggttgtgatttttgattttttatgttctgatgtgttatttgtgggtggaactcagcataaagcctagtcgtgcgatggttgaggccccagccctcattggcgtagtttgccagcaaagtcagggaagagaggagatatgaaaagattcaacctattacttaattgttctgagtacatgcgtatacccagtggtgatgcttgtccaacaacagcctatccttgccttaggagtattgctgaccccacatgacaatttatcaagccaacacattcataccaagtatgacatagtcccaagcaatttatgtaggctagagttaaaacctaacacaggccactagtaaaaaggggaaaacaaataaaagaaagcaatatatgaggctcagtaatattgatattattagagggcctaaagtgtgttcatggtttaggcatgtgaatagctgcttttcatgcactcctgtccaagggtgattctttgggtatattcctttgtttcaagtttctccacttcacatatcaagtttgctgccccatgaataaagttttttttttcaagtttggccgacgcctacctctccttatattatttctatgccttatgattgcactattcgctggcacattgaggcctcctctggacatatccatacaaaccacaatatgccatggatttcttttgctctgaagttgttcagtggactgcttctttccattcctccgaaattgaaatgcttatgtaaataaaggagcatttatggaaatcactcctgcatatgtatgcctctgcattcagtatgcagtagtttatggtaaaggttcatacaactgtcagttaatatattgattgtttctatcccttttcaggtttatatgcatcaaggtgaaacaacgcctcttctcatgcaggtccgtcttttttataatggatatgctgtaaagggaactctgctagttgacaaaaggattagtaataatactattgtgatccgaccatcaatggtaaaagtaaaagctgacccaaagttgtgccggatgaagtctctgagttctttggaaatagtttccacaagccatcaatccaataggacatcaacatcaaggatcttgattgcgttgcttcactatggaggagttaaggcagaatattttatggaacttctacataatgcaattgaaggggttaataatgctcgttatagtttcagacacgcgctgaagcttgcatatggatatgctaatatggaggattcaatgttagaacgcatgattcattctggaattccactagaagaaccatacttgctatctaggctgagttttatggccaaacaggaaatgaaagtattcagagaaggaaagctaccaattgatgaatgctattatttgatgggtacaacagatcctacaggaacgctgaaaccaaatgaagtttgtgtgatacttgacagcggacaatactctggagatgttcttgtgtttaaacatcctgggctacattttggcgatatacatatcttaactgcaaggcaaattgatggactagagaagaattttattggatattcaaaaaatgcaatactttttcctacttctggacaaagatcattggctgatgagatggccaatagtgattttgatggtgacgagttctgggtctcaagaaacaatatgttactaaagactttcgagaagcgaagtgagccatgggttgaactattaaaactgaaggagacccagcacaggcttagcaaacctggggatttaaatgaattgattctcgaaagagtgctatttaatgaatgcttgacgactatgtttatacccaatccaatatgtagtgcggactggtgaaatgaattatttctcgtcattgccttcattgtgcagttcaactcggactct

SEQ ID NO: 25704 - DNA, 1047 bp, Zea Mays
atggacgccagagattgggtttatgagggtggacctcaccgagtacaaaagaactgcgccctgccaactgcccgaatgatgatgggcgtcagacttcttcgattatgcggcgacttgggccgtcctcgtaagtgtcgaggttggagcttggctggtggtcgacgatggcaacctcgtacgccacgaggctcgactgatgatcatcgtggtggaccacacagatcttggcgctgcgcttgcaaccacttgcacgcccgatgtcgacgagctatcacggatgttgtcggagtggacgaggcggggttcgctggtggccaaaatcacgtggattgggagccgaaggtccctgcgcgcgggggtagaagccaggtggtggcggtggcggttacacgcgccaagacatggctggccgttgcggtttacaaggatccaggaaaagagacgaaaaagaaagacagtgaacagggggatatcaagaaatgcacttcgcctgtaagatgctattttatttgcactaagtctgggtggaggggggatgaggcttatattccaattgacaagtgccgcaaactgttcatgcatatccatactgctcccaccattgcaaattatatgaaaaggtttcatttgatactttccaaaactctaacactggatgttgatttatcgacaattgacgttatactgattgatgatgaaccttgtcgggacgagcatgggaacattgttatgctagatgggaagcgtttgatccatactgatgggactggcttcatatctgaaaatttggctaagaaatgccctagcagaataatcaaaggaaagaagtcaaaagtttatatgcatcaaggtgaaacaacgcctcttctcatgcaggtccgtcttttttataatggatatgctgtaaagggaactctgctagttgacaaaaggatctatctatctatcaacagagatccttacataatagagatcgatctatctgttaacggagatcctagccatataggcatgctatacagggattctaacaccccctcagtttga

SEQ ID NO: 25705 - DNA, 1031 bp, Zea Mays
atggacgccagagattgggtttatgagggtggacctcaccgagtacaaaagaactgcgccctgccaactgcccgaatgatgatgggcgtcagacttcttcgattatgcggcgacttgggccgtcctcgtaagtgtcgaggttggagcttggctggtggtcgacgatggcaacctcgtacgccacgaggctcgactgatgatcatcgtggtggaccacacagatcttggcgctgcgcttgcaaccacttgcacgcccgatgtcgacgagctatcacggatgttgtcggagtggacgaggcggggttcgctggtggccaaaatcacgtggattgggagccgaaggtccctgcgcgcgggggtagaagccaggtggtggcggtggcggttacacgcgccaagacatggctggccgttgcgtttacaaggatccaggaaaagagacgaaaaagaaagacagtgaacagggggatatcaagaaatgcacttcgcctgtaagatgctattttatttgcactaagtctgggtggaggggggatgaggcttatattccaattgacaagtgccgcaaactgttcatgcatatccatactgctcccaccattgcaaattatatgaaaaggtttcatttgatactttccaaaactctaacactggatgttgatttatcgacaattgacgttatactgattgatgatgaaccttgtcgggacgagcatgggaacattgttatgctagatgggaagcgtttgatccatactgatgggactggcttcatatctgaaaatttggctaagaaatgccctagcagaataatcaaaggaaagaagtcaaaagtttatatgcatcaaggtgaaacaacggtccgtcttttttataatggatatgctgtaaagggaactctgctagttgacaaaaggatctatctatctatcaacagagatccttacataatagagatcgatctatctgttaacggagatcctagccatataggcatgctatacagggattctaacaccccctcagtttga

SEQ ID NO: 25706 - DNA, 1609 bp, Zea Mays
atgcagcctcccggcccgcctctggcgacgccgcagccgctgccgccggcggtggcggcggagctcgcgcagcttgagtcgaggctgggccaggtcgccggagagcccgcgcgccacgagctcgcggagctaggcgaagtcgccgcggttcgcgtgctacgtaggatcgcgaggtctcaagagcaggtccggacgctcactggctacatcgtctcggctgcggtgcaggagacgttcgcgctcaatgcgcaggccgtccccaccgccgagagccgcgcctgcaactcctccgctccttccctaagtgatggatctgtacaagggccgcagtgcgccagtgaacttcgaatggaagaagtaactgcgggcctctcaaactatcgcatggcaatatgcgagggtcaaggtcaggaggatcatgcagtgatgatggcaattgacaacccacctgactgcatccccccctggggttgggaccaagattgcattgaagttgataaccttgtgccaggaattgcttctcaggcaaaccagatgcctatgcagtatggcgaccgcgaccgtatccaagaactagtttctattgtaccacatggtgttcgtatgctggctgaaagtcttgaaaatggcagagcatctgagttgcagaactatgtacaaaatggcattcccgaacagtggatggttccagcagatcaaagaatggaatccacctcgagccgcctgcaacatgttttaaaatgtcttcagggagttggaccctttggacaccatctcggtccggaatgtgcaataatgataccaaagcctgagccaaatgttgttgtcgaaaatttgttcagggagatagcaagccctcatatcacagacaacaaattgaggaatacagcgagccctcagatgtgtgcgttggaggatttagagttcagcaagagatttttgatactctcttatctttgtcggaataacctggaagatgaagttgtactgactgtggactatattaaatcgttgaagtttctgtccatggttcattttgagtcccaaatttggaggaaatttggtcagaagaattttcaggcatccaatagagctgcaacagatagggcaaagaatttcgattcagacccaactacaacaaaattataccattgcaatatcgagataagaggggagtccatattctttgttttgaaggtttcatttgatactttccaaaactctaacactggatgttgatttatcgacaattgacgttatactgattgatgatgaaccttgtcgggacgagcatgggaacattgttatgctagatgggaagcgtttgatccatactgatgggactggcttcatatctgaaaatttggctaagaaatgccctagcagaataatcaaaggaaagaagtcaaaagtttatatgcatcaaggtgaaacaacggtccgtcttttttataatggatatgctgtaaagggaactctgctagttgacaaaaggatctatctatctatcaacagagatccttacataatagagatcgatctatctgttaacggagatcctagccatataggcatgctatacagggattctaacaccccctcagtttga

SEQ ID NO: 25707 - DNA, 2140 bp, Zea Mays
ccacccccaccgccgcggcgccgcttgcgccagtgccccctcctcgctttccgctttcatccgggccccactcgccgcttcggtctgagctcggccaaccatcggccatcgccagtgccgctgccgtatccgtcgagtaatgcagcctcccggcccgcctctggcgacgccgcagccgctgccgccggcggtggcggcggagctcgcgcagcttgagtcgaggctgggccaggtcgccggagagcccgcgcgccacgagctcgcggagctaggcgaagtcgccgcggttcgcgtgctacgtaggatcgcgaggtctcaagagcaggtccggacgctcactggctacatcgtctcggctgcggtgcaggagacgttcgcgctcaatgcgcaggccgtccccaccgccgagagccgcgcctgcaactcctccgctccttccctaagtgatggatctgtacaagggccgcagtgcgccagtgaacttcgaatggaagaagtaactgcgggcctctcaaactatcgcatggcaatatgcgagggtcaaggtcaggaggatcatgcagtgatgatggcaattgacaacccacctgactgcatccccccctggggttgggaccaagattgcattgaagttgataaccttgtgccaggaattgcttctcaggcaaaccagatgcctatgcagtatggcgaccgcgaccgtatccaagaactagtttctattgtaccacatggtgttcgtatgctggctgaaagtcttgaaaatggcagagcatctgagttgcagaactatgtacaaaatggcattcccgaacagtggatggttccagcagatcaaagaatggaatccacctcgagccgcctgcaacatgttttaaaatgtcttcagggagttggaccctttggacaccatctcggtccggaatgtgcaataatgataccaaagcctgagccaaatgttgttgtcgaaaatttgttcagggagatagcaagccctcatatcacagacaacaaattgaggaatacagcgagccctcagatgtgtgcgttggaggatttagagttcagcaagagatttttgatactctcttatctttgtcggaataacctggaagatgaagttgtactgactgtggactatattaaatcgttgaagtttctgtccatggttcattttgagtcccaaatttggaggaaatttggtcagaagaattttcaggcatccaatagagctgcaacagatagggcaaagaatttcgattcagacccaactacaacaaaattataccattgcaatatcgagataagaggggagtccatattctttgttttgaaggggccatatatggagaataagaggacttatctacaaaaagttcttggtgatgataatgttcttctagtaaagtttatggtttcttcagacaagagcactgatttctaccgccaacattaccatagggttgttgaagatggtattgttttgggtctgcgacgatataattttttcgtttacaaggatccaggaaaagagacgaaaaagaaagacagtgaacagggggatatcaagaaatgcacttcgcctgtaagatgctattttatttgcactaagtctgggtggaggggggatgaggcttatattccaattgacaagtgccgcaaactgttcatgcatatccatactgctcccaccattgcaaattatatgaaaaggtttcatttgatactttccaaaactctaacactggatgttgatttatcgacaattgacgttatactgattgatgatgaaccttgtcgggacgagcatgggaacattgttatgctagatgggaagcgtttgatccatactgatgggactggcttcatatctgaaaatttggctaagaaatgccctagcagaataatcaaaggaaagaagtcaaaagtttatatgcatcaaggtgaaacaacgcctcttctcatgcaggtccgtcttttttataatggatatgctgtaaagggaactctgctagttgacaaaaggatctatctatctatcaacagagatccttacataatagagatcgatctatctgttaacggagatcctagccatataggcatgctatacagggattctaacaccccctcagtttga

SEQ ID NO: 25708 - DNA, 1974 bp, Zea Mays
ctgcgctccaactcaacgcggcccccacccccaccgccgcggcgccgcttgcgccagtgccccctcctcgctttccgctttcatccgggccccactcgccgcttcggtctgagctcggccaaccatcggccatcgccagtgccgctgccgtatccgtcgagtaatgcagcctcccggcccgcctctggcgacgccgcagccgctgccgccggcggtggcggcggagctcgcgcagcttgagtcgaggctgggccaggtcgccggagagcccgcgcgccacgagctcgcggagctaggcgaagtcgccgcggttcgcgtgctacgtaggatcgcgaggtctcaagagcaggtccggacgctcactggctacatcgtctcggctgcggtgcaggagacgttcgcgctcaatgcgcaggccgtccccaccgccgagagccgcgcctgcaactcctccgctccttccctaagtgatggatctgtacaagggccgcagtgcgccagtgaacttcgaatggaagaagtaactgcgggcctctcaaactatcgcatggcaatatgcgagggtcaaggtcaggaggatcatgcagtgatgatggcaattgacaacccacctgactgcatccccccctggggttgggaccaagattgcattgaagttgataaccttgtgccaggaattgcttctcaggcaaaccagatgcctatgcagtatggcgaccgcgaccgtatccaagaactagtttctattgtaccacatggtgttcgtatgctggctgaaagtcttgaaaatggcagagcatctgagttgcagaactatgtacaaaatggcattcccgaacagtggatggttccagcagatcaaagaatggaatccacctcgagccgcctgcaacatgttttaaaatgtcttcagggagttggaccctttggacaccatctcggtccggaatgtgcaataatgataccaaagcctgagccaaatgttgttgtcgaaaatttgttcagggagatagcaagccctcatatcacagacaacaaattgaggaatacagcgagccctcagatgtgtgcgttggaggatttagagttcagcaagagatttttgatactctcttatctttgtcggaataacctggaagatgaagttgtactgactgtggactatattaaatcgttgaagtttctgtccatggttcattttgagtcccaaatttggaggaaatttggtcagaagaattttcaggcatccaatagagctgcaacagatagggcaaagaatttcgattcagacccaactacaacaaaattataccattgcaatatcgagataagaggggagtccatattctttgttttgaagtttacaaggatccaggaaaagagacgaaaaagaaagacagtgaacagggggatatcaagaaatgcacttcgcctgtaagatgctattttatttgcactaagtctgggtggaggggggatgaggcttatattccaattgacaagtgccgcaaactgttcatgcatatccatactgctcccaccattgcaaattatatgaaaaggtttcatttgatactttccaaaactctaacactggatgttgatttatcgacaattgacgttatactgattgatgatgaaccttgtcgggacgagcatgggaacattgttatgctagatgggaagcgtttgatccatactgatgggactggcttcatatctgaaaatttggctaagaaatgccctagcagaataatcaaaggaaagaagtcaaaagtttatatgcatcaaggtgaaacaacggtccgtcttttttataatggatatgctgtaaagggaactctgctagttgacaaaaggatctatctatctatcaacagagatccttacataatagagatcgatctatctgttaacggagatcctagccatataggcatgctatacagggattctaacaccccctcagtttga

SEQ ID NO: 25709 - DNA, 1419 bp, Zea Mays
atgcagcctcccggcccgcctctggcgacgccgcagccgctgccgccggcggtggcggcggagctcgcgcagcttgagtcgaggctgggccaggtcgccggagagcccgcgcgccacgagctcgcggagctaggcgaagtcgccgcggttcgcgtgctacgtaggatcgcgaggtctcaagagcaggtccggacgctcactggctacatcgtctcggctgcggtgcaggagacgttcgcgctcaatgcgcaggccgtccccaccgccgagagccgcgcctgcaactcctccgctccttccctaagtgatggatctgtacaagggccgcagtgcgccagtgaacttcgaatggaagaagtaactgcgggcctctcaaactatcgcatggcaatatgcgagggtcaaggtcaggaggatcatgcagtgatgatggcaattgacaacccacctgactgcatccccccctggggttgggaccaagattgcattgaagttgataaccttgtgccaggaattgcttctcaggcaaaccagatgcctatgcagtatggcgaccgcgaccgtatccaagaactagtttctattgtaccacatggtgttcgtatgctggctgaaagtcttgaaaatggcagagcatctgagttgcagaactatgtacaaaatggcattcccgaacagtggatggttccagcagatcaaagaatggaatccacctcgagccgcctgcaacatgttttaaaatgtcttcagggagttggaccctttggacaccatctcggtccggaatgtgcaataatgataccaaagcctgagccaaatgttgttgtcgaaaatttgttcagggagatagcaagccctcatatcacagacaacaaattgaggaatacagcgagccctcagatgtgtgcgttggaggatttagagttcagcaagagatttttgatactctcttatctttgtcggaataacctggaagatgaagttgtactgactgtggactatattaaatcgttgaagtttctgtccatggttcattttgagtcccaaatttggaggaaatttggtcagaagaattttcaggcatccaatagagctgcaacagatagggcaaagaatttcgattcagacccaactacaacaaaattataccattgcaatatcgagataagaggggagtccatattctttgttttgaaggggccatatatggagaataagaggacttatctacaaaaagttcttggtgatgataatgttcttctagtaaagtttatggtttcttcagacaagagcactgatttctaccgccaacattaccatagggttgttgaagatggtattgttttgggtctgcgacgatataattttttcgcagttcttggacttctagttttcagattgattccattggtcttcttc

SEQ ID NO: 25710 - DNA, 804 bp, Zea Mays
aaaagctaaaccaaactcgcaagtcgcaacaggtcagccctcaccccccgtcgtcccaggcatggccccaacgagagcgctgcccgccctctggttgtccatggccgccgccgccagctatgtcgtcggagaaaagtactgcaggttgtgctatctgaagggcagttccatggtccccactatccaagcccagggcgacgtcgggctgctggaccgccgctgccttgccggctacgacttctcccacggcgacgtcgttgttttcaggttgtcgacggatcatgggatgaagatggtccagaggctgatcgcgctgccgggggattggattcagatcccggagaagcgggacatccggcaggtccccagcggccactgttgggtggaaggggacaatgccggcaacagctgggactcgagacactatggccccgtaagggcattctccctaacaatcattcttagcagattttcgtcaatctgttcagtttctttctttaacaagaactgccatctatacgtaggttcggtatatacgttctaactttgcaagcttcaggttcctctggacctgatggaagggaagatcacacacataatctggccaccccatagagtgcgtcgggtggacaggatggtaccggaaggcaggattatgcctctgtcagcaactccaaggaggaagcaacaatagggtctcaatcgaccgcatcgaaggcgtcaacaattggaaggtcttcatacaagaatgcataacagagttactaaagactttcgagaagcgaagtgagccatgggtggaac

SEQ ID NO: 25711 - DNA, 280 bp, Zea Mays
ctggtgaccacgcctgcagttctcccacctcgccatggctcggacgtcctaatgagttgctagctcgtatgaagcttgttccgtaatcatctcagaattcccagaagaagaagaagatgaaattcaagaagtggtttctgaagagcggtctgcttcagtgcctgctcatcaagtgatgggagccatctaactgggtatttaatagagggatctagaacctcttcactgcaataaggcaagccccggtgcatgcaaccccttccttgtatttttaaagaag

SEQ ID NO: 25712 - DNA, 3116 bp, Zea Mays
tcgcgccgcccggatacagggcggcgtccggctcggggacaggacaggacgggacggacgcctttgccgatgtcagtgattcctcgctgcttcacgattcaccggtacgctcactccatcgacttctcagtctcctgctgctgtgccagctttcccttccttgtgagggacgtttttctccctcactgactcgcgggcccactcgccggcacgagctcttcaacctgttcgccaaatccgatcaataaatgttgctccatctacctcccttcgctcagcttctctcatctgagtcacggcgcccgatgtgtgtcaaatcacaattgatccttaatataatatacgtatacatattcgcaaatgaaaactcggtctcgaaagttaccgcagcggaagccactgccaaggagattgaaagtcaggcggccgctcaagtattccgaggctgcacttggatatttagaaggggatgcatgctcatatccctagattcaaattctgcattagtgatttgtttggatattgaccgtaagcaccttctcatccagattgagccaaagggtgtgaactcatctcgctggaacaagagcacgcgtgctcatcctgtagttctattcccacgaatcagcagttggagaaatcttcggctggagttagagagggggtgcatgctcatatccctagattcaaattctgcattagtgatttgtttggatattgaccgtaagcaccttctcatccagattgagccaaagggtgtgaactcatctcggtccattgacatcgatcagcaatcggagaagcacaagagtatgtcaagagtgtcagcttcagtggagagagagcttgttcatgaacaacccactgacgacgatgcgtctgcgctggcgtatttggttcgacgtcggtgtccaaacacgtatctctttttttatggacatgcactggaggaccgtgttgttcggatgacttttatagctaagccgacctattccagtaggagaaaatacctcaatgacttgctagatgctgatcttgtgagcctgagtcgaggtgacaggaaaagatggcataacatgcgggctgctgctgaggctgctgctgaggcagctgctcaggctgcgaggctgctgctcaggctgagcctgctgaccatgcaggccatgaagactaaacctgatggtgctgccggttctgtctgtagtttagagctgcagtcgcttatctactttctactaattctagatcttgtgaacttaggacattgtgcttatcatgccgaatgtttggtgttctaaactttagacattgtgttgctgttttaattactcatgtatcaatgttgtgaacttaagacattgtgctagtcactttagacgttatgttgctactttcgatcactttcttgatttttgccacggtggcggtgccggcgctgaggtctaggagcctgagctgggcggcgctgaggtctaggacttcctcaagagatgttgtaacccttcagttaataggtaactcagttaatactctatattgtctcagttaatggggaactcagttaatcttatattttgtatcagttaatggataactcagttaatatgttgtaacctttccgttaatggataactcagttaatcctctatattgtctcagttaatggataactcagttaattccttgtaatggatcagttaacggagcgctcagttaatttacaatataccctcagttaattgctcactcggttaatacactgtaacccttcagttaattctgcactcccttgtgactttcgattacggaatattcttatagaaaaattatagatagtgcatgttggagacaggaatatttgatttttttaatatggaatatttctatagcaaagtgtaaatattccatgttctagtcaggaatatttgaccttcttttacgaaatattcttataaaggagtgtaaatattccatcttccagacaggaatgtttaaagttataatatggaatgttcttataaaaattgtaaatattccatatttcatttcagaaatatttgacattttattacggaatattcttataacccatacaccctaaaaaaccctaaacctaaaaaaccctaaacccataccctgaacccaaaacccttccgatacaaacaccaaacgacgtggtgcttgtatgatagactcaaacaccaaccgaaatggtttttgacttataggtagcaaaacccccgtcacctgtgtttagaacccacctaaagaggttcatcgcggtctagaggccattttggagaagggtttacctggatccgctcttaacgtagttgtcacaccgcgtacatggcagtaggaggaattaaatatagcacatcgtgcatctaggaataacagatgggtcgtcgatcgtgggctgccacgacatataactagcacgtccaggtttacgtaatagcacatccagagtaaaattgtgctttcctctctttcattctgaaaaatgtaactctcatttggtttcattctctagctattccatcaaatattttgtatatatggagtgtttttactgccatagcacaagctggacatatggacaccaaagttcatgagcttacctttcatagatcatagacactcttatgtattggcttcctttttctaattgatctcagacgaatatggatcaattgtggaagactgggcgcagccctagcaggagcagacgcactggcaccaaggtctactaccactacctccgcctacaatgtaatctgatttgttcttgccgacatcaccacccgatttatcttccaaccaatcaaccccgtctgagttgtttccttcattatgagaacaaatatcccatggcttatcatacgctgagacgctggagccactggacgcctcgacgtgatgtggctgagacgctgagggcgatatggctggaccgctggagcgcgcggcctggaactcgacgcctggacggcgcgcggcctggagcgcgtggcgtgtctggacgctggagcgcgcggcctagggagctggacgcctggacagcgcacggcctggagcgcgaggcgtggcgcggcctggagctcgacgcctag

SEQ ID NO: 25713 - DNA, 2384 bp, Zea Mays
catcgctctggcatcaacgtcttgggcatccagggaataccattttttcatgctggtgatgagatactacgatctaagtcgcttgatcgagattcatatgactctggtgattggtttaacaagattgattttacctatgaaacaaacaattggggtgttgggcttccaccaagagaaaagaacgaagggagctggcctttgatgaagccaagattggagaacccgtcgttcaaacctgcaaaacatgacattattgctgccttagacaaatttattgatatcctcaagatcagatactcatcacctctctttcgcctaactacagcaagtgatattgtgcaaagggttcactttcacaacacagggccctccttggttccaggagttattgtcatgagcatcgaagatgcacgaaatgataggcatgatatggcccagatagatgaaacattctcttgtgtcgttacagtcttcaatgtatgtccgtacgaagtgtctatagaaatccctgatcttgcatcactgcggcttcagttgcatccagtgcaggtgaattcatcggatgcgttagccaggcagtctgcgtacgacaccgccacaggtcgattcaccgtgccgaaaaggacagcagcagtgttcgtggaacccaggtgctgatggatgcctttcgctagcgagcaagtgcattcggcatccaagtcgaagcaaacgaatgaaataagagaaggccatcgaataaaacgaagtatataaatagattgaataagacgttgcccaagttgccaaggcacgctttgccatatgtatgcgttgaaaaataaataaataaataaataaatgatgttatagaggtacaaaagcattggaacatttctttatagaggtgaaccaccctattttccagtttccatgtgtgaattgtgattagcatatgtatggaataataatataaattaattttatgcatttgtgtgttgtgtcgtggatgacaacatcaacatattgcttctacttgatctctctataattttttttgaagaaatacctagtctagatgtaatatcgtaattccctagctactatatgatatcagggcgttcattagttcgcagggcagaaggtgacgtcatagctggaaggtccggagcaggtgaaggtgctggtggcgtcgtcgtaggcgtagctgtaggccgacgggcatgcgctcttgaacacctgcgagtagttggtcgggccgcacatcgccggcgtgccgtactgcccggtgcagcagtagcgcgcgctgccgtaggcgatgcacgcgctcttgcacgctacgacgccgccgccggacgatgcgacgacgcggaggtccccggggcacacggcgtttacgtcgcccgcgcaagccgcggggcggcagtcgccgccgccgcccgagggcgccacgcgcaccggcacgttgaagccgtcgacgaggctgacgtcgtagaagtccggcctgccgctgcccggcgcggcgagcgtgacctcgacgagcgagaccggaggcgccggcccgcggccctggcacgcgacgtcgcccgtgccgcagtcggccgtggcgcaggagaagcgcccggtggcggggtcggccacgcagcccgtgcgcgcccacaacgtgccggaccatgtccccgacgacggcgcgtccatgctggacgtggcggacggcgccaggtagaagcccgaccgcgcgagcggcggcgagctggcgccgtggagcgcgcccacccacaccgcgtgcttgcaggcgttggtgaagatgaacgacgccgctccatccacgcctagcgctgaatcagttatggaacaaagaacttgatgtgtatccaatttgccacacagaccacaagtccagaaccgatgatgaattaatcagatttctcagcagagacgctgaaccagtttaagattaaaaaaatagcaccaaacagagaaacacacaaacaacgtgggaatgaaaaagaatgccaccgcacccgtcaagagaaaaagctgaagaatcaagagaatggccattctgttcctgctagctccattgccttcggcggagagctgaggaagaaggtgagctactgccatggccatggcggcacgcacaagaaacctcggtggatcgatgtcgatctcagatcgacgctggtatctgtctgtacgtgtatttatagcaagtaaaatcaagaagctagctaggcccagcatgtacggtggttgtagctttagtagatatttagatagaccttcacccggatagaatagaaggaagatgcgtggatgagagaaaaaggcaggcaggcagaggcagcacatgaagaaaacgtttaaaccttttcggcgaatttatgtcgttccctcacgcttgg

SEQ ID NO: 25714 - DNA, 2777 bp, Zea Mays
gacagtttcaacgatagaatccgtgatgctataaatggtggcagtccgtttgggaatccactgcaacaaggtttctctactggattgttcttagagccaaatggattttatcagggcaatgaaacagagacaaggctcacgcttgctacatacgctgaccatatacagattggattagctggcaatttgaaggactatgtagttatatctcatactggagaagctagaaaaggatctgaaattcgcaccttcgatggctcaccagttggctatgcttcatcccctatagaaacaataaactacgcctctgctcatgacaatgaaacactatttgatattattagtctaaagactccgatggacctctcaattgacgagcgatgcaggataaatcatttgtccacaagcatgattgcattatcccagggaataccattttttcatgctggtgatgagatactacgatctaagtcgcttgatcgagattcatatgactctggtgattggtttaacaagattgattttacctatgaaacaaacaattggggtgttgggcttccaccaagagaaaagaacgaagggagctggcctttgatgaagccaagattggagaacccgtcgttcaaacctgcaaaacatgacattattgctgccttagacaaatttattgatatcctcaagatcagatactcatcacctctctttcgcctaactacagcaagtgatattgtgcaaagggttcactttcacaacacagggccctccttggttccaggagttattgtcatgagcatcgaagatgcacgaaatgataggcatgatatggcccagatagatgaaacattctcttgtgtcgttacagtcttcaatgtatgtccgtacgaagtgtctatagaaatccctgatcttgcatcactgcggcttcagttgcatccagtgcaggtgaattcatcggatgcgttagccaggcagtctgcgtacgacaccgccacaggtcgattcaccgtgccgaaaaggacagcagcagtgttcgtggaacccaggtgctgatggatgcctttcgctagcgagcaagtgcattcggcatccaagtcgaagcaaacgaatgaaataagagaaggccatcgaataaaacgaagtatataaatagattgaataagacgttgcccaagttgccaaggcacgctttgccatatgtatgcgttgaaaaataaataaataaataaataaatgatgttatagaggtacaaaagcattggaacatttctttatagaggtgaaccaccctattttccagtttccatgtgtgaattgtgattagcatatgtatggaataataatataaattaattttatgcatttgtgtgttgtgtcgtggatgacaacatcaacatattgcttctacttgatctctctataattttttttgaagaaatacctagtctagatgtaatatcgtaattccctagctactatatgatatcagggcgttcattagttcgcagggcagaaggtgacgtcatagctggaaggtccggagcaggtgaaggtgctggtggcgtcgtcgtaggcgtagctgtaggccgacgggcatgcgctcttgaacacctgcgagtagttggtcgggccgcacatcgccggcgtgccgtactgcccggtgcagcagtagcgcgcgctgccgtaggcgatgcacgcgctcttgcacgctacgacgccgccgccggacgatgcgacgacgcggaggtccccggggcacacggcgtttacgtcgcccgcgcaagccgcggggcggcagtcgccgccgccgcccgagggcgccacgcgcaccggcacgttgaagccgtcgacgaggctgacgtcgtagaagtccggcctgccgctgcccggcgcggcgagcgtgacctcgacgagcgagaccggaggcgccggcccgcggccctggcacgcgacgtcgcccgtgccgcagtcggccgtggcgcaggagaagcgcccggtggcggggtcggccacgcagcccgtgcgcgcccacaacgtgccggaccatgtccccgacgacggcgcgtccatgctggacgtggcggacggcgccaggtagaagcccgaccgcgcgagcggcggcgagctggcgccgtggagcgcgcccacccacaccgcgtgcttgcaggcgttggtgaagatgaacgacgccgctccatccacgcctagcgctgaatcagttatggaacaaagaacttgatgtgtatccaatttgccacacagaccacaagtccagaaccgatgatgaattaatcagatttctcagcagagacgctgaaccagtttaagattaaaaaaatagcaccaaacagagaaacacacaaacaacgtgggaatgaaaaagaatgccaccgcacccgtcaagagaaaaagctgaagaatcaagagaatggccattctgttcctgctagctccattgccttcggcggagagctgaggaagaaggtgagctactgccatggccatggcggcacgcacaagaaacctcggtggatcgatgtcgatctcagatcgacgctggtatctgtctgtacgtgtatttatagcaagtaaaatcaagaagctagctaggcccagcatgtacggtggttgtagctttagtagatatttagatagaccttcacccggatagaatagaaggaagatgcgtggatgagagaaaaaggcaggcaggcagaggcagcacatgaagaaaacgtttaaaccttttcggcgaatttatgtcgttccctcacgcttgg

SEQ ID NO: 25715 - DNA, 3306 bp, Zea Mays
ctgcatgttttaccagacaaatgtaaatctcttgcagtattgctcaagaatcaagatgatgagattgaactgtcaaaactccctccagggtcagatttgcaacaagctgcaattgtggctattcaggaagaggacccttataattgggggtataaccctgtggtttggggcgttccaaaaggaagctatgcaagtaacccagatggtccaagtcgtatcattgagtaccggctgatggtgcagattgtacctggatactacctcagaagggactctaatggtcagactgagaacagcgcggctgtgaacaatacagcaagttgacgggttcagatttgatctaatgggacatatcatgaaaaagacaatgattagagcaaaatcggctcttcaaagccttacaattgatgaacatggagtagatggttcaaagatatacttgtatggtgaaggatggaacttcggtgaagttgcggaaaatcaacgtgggataaatggatcccagctaaatatgagtggcactgggattggtagtttcaacgatagaatccgtgatgctataaatggtggcagtccgtttgggaatccactgcaacaaggtttctctactggattgttcttagagccaaatggattttatcagggcaatgaaacagagacaaggctcacgcttgctacatacgctgaccatatacagattggattagctggcaatttgaaggactatgtagttatatctcatactggagaagctagaaaaggatctgaaattcgcaccttcgatggctcaccagttggctatgcttcatcccctatagaaacaataaactacgcctctgctcatgacaatgaaacactatttgatattattagtctaaagactccgatggacctctcaattgacgagcgatgcaggataaatcatttgtccacaagcatgattgcattatcccagggaataccattttttcatgctggtgatgagatactacgatctaagtcgcttgatcgagattcatatgactctggtgattggtttaacaagattgattttacctatgaaacaaacaattggggtgttgggcttccaccaagagaaaagaacgaagggagctggcctttgatgaagccaagattggagaacccgtcgttcaaacctgcaaaacatgacattattgctgccttagacaaatttattgatatcctcaagatcagatactcatcacctctctttcgcctaactacagcaagtgatattgtgcaaagggttcactttcacaacacagggccctccttggttccaggagttattgtcatgagcatcgaagatgcacgaaatgataggcatgatatggcccagatagatgaaacattctcttgtgtcgttacagtcttcaatgtatgtccgtacgaagtgtctatagaaatccctgatcttgcatcactgcggcttcagttgcatccagtgcaggtgaattcatcggatgcgttagccaggcagtctgcgtacgacaccgccacaggtcgattcaccgtgccgaaaaggacagcagcagtgttcgtggaacccaggtgctgatggatgcctttcgctagcgagcaagtgcattcggcatccaagtcgaagcaaacgaatgaaataagagaaggccatcgaataaaacgaagtatataaatagattgaataagacgttgcccaagttgccaaggcacgctttgccatatgtatgcgttgaaaaataaataaataaataaataaatgatgttatagaggtacaaaagcattggaacatttctttatagaggtgaaccaccctattttccagtttccatgtgtgaattgtgattagcatatgtatggaataataatataaattaattttatgcatttgtgtgttgtgtcgtggatgacaacatcaacatattgcttctacttgatctctctataattttttttgaagaaatacctagtctagatgtaatatcgtaattccctagctactatatgatatcagggcgttcattagttcgcagggcagaaggtgacgtcatagctggaaggtccggagcaggtgaaggtgctggtggcgtcgtcgtaggcgtagctgtaggccgacgggcatgcgctcttgaacacctgcgagtagttggtcgggccgcacatcgccggcgtgccgtactgcccggtgcagcagtagcgcgcgctgccgtaggcgatgcacgcgctcttgcacgctacgacgccgccgccggacgatgcgacgacgcggaggtccccggggcacacggcgtttacgtcgcccgcgcaagccgcggggcggcagtcgccgccgccgcccgagggcgccacgcgcaccggcacgttgaagccgtcgacgaggctgacgtcgtagaagtccggcctgccgctgcccggcgcggcgagcgtgacctcgacgagcgagaccggaggcgccggcccgcggccctggcacgcgacgtcgcccgtgccgcagtcggccgtggcgcaggagaagcgcccggtggcggggtcggccacgcagcccgtgcgcgcccacaacgtgccggaccatgtccccgacgacggcgcgtccatgctggacgtggcggacggcgccaggtagaagcccgaccgcgcgagcggcggcgagctggcgccgtggagcgcgcccacccacaccgcgtgcttgcaggcgttggtgaagatgaacgacgccgctccatccacgcctagcgctgaatcagttatggaacaaagaacttgatgtgtatccaatttgccacacagaccacaagtccagaaccgatgatgaattaatcagatttctcagcagagacgctgaaccagtttaagattaaaaaaatagcaccaaacagagaaacacacaaacaacgtgggaatgaaaaagaatgccaccgcacccgtcaagagaaaaagctgaagaatcaagagaatggccattctgttcctgctagctccattgccttcggcggagagctgaggaagaaggtgagctactgccatggccatggcggcacgcacaagaaacctcggtggatcgatgtcgatctcagatcgacgctggtatctgtctgtacgtgtatttatagcaagtaaaatcaagaagctagctaggcccagcatgtacggtggttgtagctttagtagatatttagatagaccttcacccggatagaatagaaggaagatgcgtggatgagagaaaaaggcaggcaggcagaggcagcacatgaagaaaacgtttaaaccttttcggcgaatttatgtcgttccctcacgcttgg

SEQ ID NO: 25716 - DNA, 3478 bp, Zea Mays
taaagattcaactctttctgcatgttttaccagacaaatgtaaatctcttgcagtattgctcaagaatcaagatgatgagattgaactgtcaaaactccctccagggtcagatttgcaacaagctgcaattgtggctattcaggaagaggacccttataattgggggtataaccctgtggtttggggcgttccaaaaggaagctatgcaagtaacccagatggtccaagtcgtatcattgagtaccggctgatggtgcaggccttgaatcgcttaggtcttcgagttgtcatggatgttgtatacaatcatctatactcaagtggcccttttgccatcacttccgtgcttgacaagattgtacctggatactacctcagaagggactctaatggtcagactgagaacagcgcggctgtgaacaatacagcaagtgagcatttcatggttgatagattaatcgtggatgaccttctgaattgggcagtaaattacaaagttgacgggttcagatttgatctaatgggacatatcatgaaaaagacaatgattagagcaaaatcggctcttcaaagccttacaattgatgaacatggagtagatggttcaaagatatacttgtatggtgaaggatggaacttcggtgaagttgcggaaaatcaacgtgggataaatggatcccagctaaatatgagtggcactgggattggtagtttcaacgatagaatccgtgatgctataaatggtggcagtccgtttgggaatccactgcaacaaggtttctctactggattgttcttagagttttgtcttggtccttttctgcagccaaatggattttatcagggcaatgaaacagagacaaggctcacgcttgctacatacgctgaccatatacagattggattagctggcaatttgaaggactatgtagttatatctcatactggagaagctagaaaaggatctgaaattcgcaccttcgatggctcaccaataaactacgcctctgctcatgacaatgaaacactatttgatattattagtctaaagactccgatggacctctcaattgacgagcgatgcaggataaatcatttgtccacaagcatgattgcattatcccagggaataccattttttcatgctggtgatgagatactacgatctaagtcgcttgatcgagattcatatgactctggtgattggtttaacaagattgattttacctatgaaacaaacaattggggtgttgggcttccaccaagagaaaagaacgaagggagctggcctttgatgaagccaagattggagaacccgtcgttcaaacctgcaaaacatgacattattgctgccttagacaaatttattgatatcctcaagatcagatactcatcacctctctttcgcctaactacagcaagtgatattgtgcaaagggttcactttcacaacacagggccctccttggttccaggagttattgtcatgagcatcgaagatgcacgaaatgataggcatgatatggcccagatagatgaaacattctcttgtgtcgttacagtcttcaatgtatgtccgtacgaagtgtctatagaaatccctgatcttgcatcactgcggcttcagttgcatccagtgcaggtgaattcatcggatgcgttagccaggcagtctgcgtacgacaccgccacaggtcgattcaccgtgccgaaaaggacagcagcagtgttcgtggaacccaggtgctgatggatgcctttcgctagcgagcaagtgcattcggcatccaagtcgaagcaaacgaatgaaataagagaaggccatcgaataaaacgaagtatataaatagattgaataagacgttgcccaagttgccaaggcacgctttgccatatgtatgcgttgaaaaataaataaataaataaataaatgatgttatagaggtacaaaagcattggaacatttctttatagaggtgaaccaccctattttccagtttccatgtgtgaattgtgattagcatatgtatggaataataatataaattaattttatgcatttgtgtgttgtgtcgtggatgacaacatcaacatattgcttctacttgatctctctataattttttttgaagaaatacctagtctagatgtaatatcgtaattccctagctactatatgatatcagggcgttcattagttcgcagggcagaaggtgacgtcatagctggaaggtccggagcaggtgaaggtgctggtggcgtcgtcgtaggcgtagctgtaggccgacgggcatgcgctcttgaacacctgcgagtagttggtcgggccgcacatcgccggcgtgccgtactgcccggtgcagcagtagcgcgcgctgccgtaggcgatgcacgcgctcttgcacgctacgacgccgccgccggacgatgcgacgacgcggaggtccccggggcacacggcgtttacgtcgcccgcgcaagccgcggggcggcagtcgccgccgccgcccgagggcgccacgcgcaccggcacgttgaagccgtcgacgaggctgacgtcgtagaagtccggcctgccgctgcccggcgcggcgagcgtgacctcgacgagcgagaccggaggcgccggcccgcggccctggcacgcgacgtcgcccgtgccgcagtcggccgtggcgcaggagaagcgcccggtggcggggtcggccacgcagcccgtgcgcgcccacaacgtgccggaccatgtccccgacgacggcgcgtccatgctggacgtggcggacggcgccaggtagaagcccgaccgcgcgagcggcggcgagctggcgccgtggagcgcgcccacccacaccgcgtgcttgcaggcgttggtgaagatgaacgacgccgctccatccacgcctagcgctgaatcagttatggaacaaagaacttgatgtgtatccaatttgccacacagaccacaagtccagaaccgatgatgaattaatcagatttctcagcagagacgctgaaccagtttaagattaaaaaaatagcaccaaacagagaaacacacaaacaacgtgggaatgaaaaagaatgccaccgcacccgtcaagagaaaaagctgaagaatcaagagaatggccattctgttcctgctagctccattgccttcggcggagagctgaggaagaaggtgagctactgccatggccatggcggcacgcacaagaaacctcggtggatcgatgtcgatctcagatcgacgctggtatctgtctgtacgtgtatttatagcaagtaaaatcaagaagctagctaggcccagcatgtacggtggttgtagctttagtagatatttagatagaccttcacccggatagaatagaaggaagatgcgtggatgagagaaaaaggcaggcaggcagaggcagcacatgaagaaaacgtttaaaccttttcggcgaatttatgtcgttccctcacgcttgg

SEQ ID NO: 25717 - DNA, 3480 bp, Zea Mays
taaagattcaactctttctgcatgttttaccagacaaatgtaaatctcttgcagtattgctcaagaatcaagatgatgagattgaactgtcaaaactccctccagggtcagatttgcaacaagctgcaattgtggctattcaggaagaggacccttataattgggggtataaccctgtggtttggggcgttccaaaaggaagctatgcaagtaacccagatggtccaagtcgtatcattgagtaccggctgatggtgcaggccttgaatcgcttaggtcttcgagttgtcatggatgttgtatacaatcatctatactcaagtggcccttttgccatcacttccgtgcttgacaagattgtacctggatactacctcagaagggactctaatggtcagactgagaacagcgcggctgtgaacaatacagcaagtgagcatttcatggttgatagattaatcgtggatgaccttctgaattgggcagtaaattacaaagttgacgggttcagatttgatctaatgggacatatcatgaaaaagacaatgattagagcaaaatcggctcttcaaagccttacaattgatgaacatggagtagatggttcaaagatatacttgtatggtgaaggatggaacttcggtgaagttgcggaaaatcaacgtgggataaatggatcccagctaaatatgagtggcactgggattgtttcaacgatagaatccgtgatgctataaatggtggcagtccgtttgggaatccactgcaacaaggtttctctactggattgttcttagagccaaatggattttatcagggcaatgaaacagagacaaggctcacgcttgctacatacgctgaccatatacagattggattagctggcaatttgaaggactatgtagttatatctcatactggagaagctagaaaaggatctgaaattcgcaccttcgatggctcaccagttggctatgcttcatcccctatagaaacaataaactacgcctctgctcatgacaatgaaacactatttgatattattagtctaaagactccgatggacctctcaattgacgagcgatgcaggataaatcatttgtccacaagcatgattgcattatcccagggaataccattttttcatgctggtgatgagatactacgatctaagtcgcttgatcgagattcatatgactctggtgattggtttaacaagattgattttacctatgaaacaaacaattggggtgttgggcttccaccaagagaaaagaacgaagggagctggcctttgatgaagccaagattggagaacccgtcgttcaaacctgcaaaacatgacattattgctgccttagacaaatttattgatatcctcaagatcagatactcatcacctctctttcgcctaactacagcaagtgatattgtgcaaagggttcactttcacaacacagggccctccttggttccaggagttattgtcatgagcatcgaagatgcacgaaatgataggcatgatatggcccagatagatgaaacattctcttgtgtcgttacagtcttcaatgtatgtccgtacgaagtgtctatagaaatccctgatcttgcatcactgcggcttcagttgcatccagtgcaggtgaattcatcggatgcgttagccaggcagtctgcgtacgacaccgccacaggtcgattcaccgtgccgaaaaggacagcagcagtgttcgtggaacccaggtgctgatggatgcctttcgctagcgagcaagtgcattcggcatccaagtcgaagcaaacgaatgaaataagagaaggccatcgaataaaacgaagtatataaatagattgaataagacgttgcccaagttgccaaggcacgctttgccatatgtatgcgttgaaaaataaataaataaataaataaatgatgttatagaggtacaaaagcattggaacatttctttatagaggtgaaccaccctattttccagtttccatgtgtgaattgtgattagcatatgtatggaataataatataaattaattttatgcatttgtgtgttgtgtcgtggatgacaacatcaacatattgcttctacttgatctctctataattttttttgaagaaatacctagtctagatgtaatatcgtaattccctagctactatatgatatcagggcgttcattagttcgcagggcagaaggtgacgtcatagctggaaggtccggagcaggtgaaggtgctggtggcgtcgtcgtaggcgtagctgtaggccgacgggcatgcgctcttgaacacctgcgagtagttggtcgggccgcacatcgccggcgtgccgtactgcccggtgcagcagtagcgcgcgctgccgtaggcgatgcacgcgctcttgcacgctacgacgccgccgccggacgatgcgacgacgcggaggtccccggggcacacggcgtttacgtcgcccgcgcaagccgcggggcggcagtcgccgccgccgcccgagggcgccacgcgcaccggcacgttgaagccgtcgacgaggctgacgtcgtagaagtccggcctgccgctgcccggcgcggcgagcgtgacctcgacgagcgagaccggaggcgccggcccgcggccctggcacgcgacgtcgcccgtgccgcagtcggccgtggcgcaggagaagcgcccggtggcggggtcggccacgcagcccgtgcgcgcccacaacgtgccggaccatgtccccgacgacggcgcgtccatgctggacgtggcggacggcgccaggtagaagcccgaccgcgcgagcggcggcgagctggcgccgtggagcgcgcccacccacaccgcgtgcttgcaggcgttggtgaagatgaacgacgccgctccatccacgcctagcgctgaatcagttatggaacaaagaacttgatgtgtatccaatttgccacacagaccacaagtccagaaccgatgatgaattaatcagatttctcagcagagacgctgaaccagtttaagattaaaaaaatagcaccaaacagagaaacacacaaacaacgtgggaatgaaaaagaatgccaccgcacccgtcaagagaaaaagctgaagaatcaagagaatggccattctgttcctgctagctccattgccttcggcggagagctgaggaagaaggtgagctactgccatggccatggcggcacgcacaagaaacctcggtggatcgatgtcgatctcagatcgacgctggtatctgtctgtacgtgtatttatagcaagtaaaatcaagaagctagctaggcccagcatgtacggtggttgtagctttagtagatatttagatagaccttcacccggatagaatagaaggaagatgcgtggatgagagaaaaaggcaggcaggcagaggcagcacatgaagaaaacgtttaaaccttttcggcgaatttatgtcgttccctcacgcttgg

SEQ ID NO: 25718 - DNA, 4402 bp, Zea Mays
ccacctgcaccaacgccagcaggataatggggttcttgttggatgcgagggcttactgggtgacaaaatccttgattgcatggaatatcagtgatcagaaaacttctctcttcttatatgcaagcagaaatgctacaatgtgcatgtcgagtcaggatatgaaaggttatgattccaaagttgagctgcaaccagaaaatgatggacttccatccagtgtgacccagaaattcccttttatcagctcttatagagccttcagaattccgagctccgttgatgttgccaccttggtgaaatgtcaacttgctgttgcttcatttgatgctcatgggaacaggcaagatgttactgggttgcaactacctggagtattggatgacatgttcgcctacactggaccgcttggtactatttttagtgaagaagctgtgagtatgtacctatgggctcctacagcacaggatgtaagtgtgagcttctatgatggtccagctggccctttactggaaacagttcaactcaacgagttaaatggtgtttggagtgttactggtccaaggaactgggagaaccggtattatctatatgaagtcacagtatatcatcaaactacaggaaacattgagaaatgtttagccgctgatccttatgctagagggctttctgcaaatagcacacgaacttggttggttgatattaataatgaaacattaaagccacttgcctgggatggattggcggctgaaaagccaaggcttgattccttctctgacataagcatatatgaattgcacattcgtgatttcagtgcccatgatagcacagtggactgtcctttccgaggaggtttctgtgcatttacatttcaggattctgtaggcatagaacacctaaagaaactatctgatgccggtttgactcatgtccatttgttgccaagctttcaatttggtggtgttgatgacataaagagcaattggaaatgtgttgatgagattgaactgtcaaaactccctccagggtcagatttgcaacaagctgcaattgtggctattcaggaagaggacccttataattgggggtataaccctgtggtttggggcgttccaaaaggaagctatgcaagtaacccagatggtccaagtcgtatcattgagtaccggctgatggtgcaggccttgaatcgcttaggtcttcgagttgtcatggatgttgtatacaatcatctatactcaagtggcccttttgccatcacttccgtgcttgacaagattgtacctggatactacctcagaagggactctaatggtcagactgagaacagcgcggctgtgaacaatacagcaagtgagcatttcatggttgatagattaatcgtggatgaccttctgaattgggcagtaaattacaaagttgacgggttcagatttgatctaatgggacatatcatgaaaaagacaatgattagagcaaaatcggctcttcaaagccttacaattgatgaacatggagtagatggttcaaagatatacttgtatggtgaaggatggaacttcggtgaagttgcggaaaatcaacgtgggataaatggatcccagctaaatatgagtggcactgggattggtagtttcaacgatagaatccgtgatgctataaatggtggcagtccgtttgggaatccactgcaacaaggtttctctactggattgttcttagagccaaatggattttatcagggcaatgaaacagagacaaggctcacgcttgctacatacgctgaccatatacagattggattagctggcaatttgaaggactatgtagttatatctcatactggagaagctagaaaaggatctgaaattcgcaccttcgatggctcaccagttggctatgcttcatcccctatagaaacaataaactacgcctctgctcatgacaatgaaacactatttgatattattagtctaaagactccgatggacctctcaattgacgagcgatgcaggataaatcatttgtccacaagcatgattgcattatcccagggaataccattttttcatgctggtgatgagatactacgatctaagtcgcttgatcgagattcatatgactctggtgattggtttaacaagattgattttacctatgaaacaaacaattggggtgttgggcttccaccaagagaaaagaacgaagggagctggcctttgatgaagccaagattggagaacccgtcgttcaaacctgcaaaacatgacattattgctgccttagacaaatttattgatatcctcaagatcagatactcatcacctctctttcgcctaactacagcaagtgatattgtgcaaagggttcactttcacaacacagggccctccttggttccaggagttattgtcatgagcatcgaagatgcacgaaatgataggcatgatatggcccagatagatgaaacattctcttgtgtcgttacagtcttcaatgtatgtccgtacgaagtgtctatagaaatccctgatcttgcatcactgcggcttcagttgcatccagtgcaggtgaattcatcggatgcgttagccaggcagtctgcgtacgacaccgccacaggtcgattcaccgtgccgaaaaggacagcagcagtgttcgtggaacccaggtgctgatggatgcctttcgctagcgagcaagtgcattcggcatccaagtcgaagcaaacgaatgaaataagagaaggccatcgaataaaacgaagtatataaatagattgaataagacgttgcccaagttgccaaggcacgctttgccatatgtatgcgttgaaaaataaataaataaataaataaatgatgttatagaggtacaaaagcattggaacatttctttatagaggtgaaccaccctattttccagtttccatgtgtgaattgtgattagcatatgtatggaataataatataaattaattttatgcatttgtgtgttgtgtcgtggatgacaacatcaacatattgcttctacttgatctctctataattttttttgaagaaatacctagtctagatgtaatatcgtaattccctagctactatatgatatcagggcgttcattagttcgcagggcagaaggtgacgtcatagctggaaggtccggagcaggtgaaggtgctggtggcgtcgtcgtaggcgtagctgtaggccgacgggcatgcgctcttgaacacctgcgagtagttggtcgggccgcacatcgccggcgtgccgtactgcccggtgcagcagtagcgcgcgctgccgtaggcgatgcacgcgctcttgcacgctacgacgccgccgccggacgatgcgacgacgcggaggtccccggggcacacggcgtttacgtcgcccgcgcaagccgcggggcggcagtcgccgccgccgcccgagggcgccacgcgcaccggcacgttgaagccgtcgacgaggctgacgtcgtagaagtccggcctgccgctgcccggcgcggcgagcgtgacctcgacgagcgagaccggaggcgccggcccgcggccctggcacgcgacgtcgcccgtgccgcagtcggccgtggcgcaggagaagcgcccggtggcggggtcggccacgcagcccgtgcgcgcccacaacgtgccggaccatgtccccgacgacggcgcgtccatgctggacgtggcggacggcgccaggtagaagcccgaccgcgcgagcggcggcgagctggcgccgtggagcgcgcccacccacaccgcgtgcttgcaggcgttggtgaagatgaacgacgccgctccatccacgcctagcgctgaatcagttatggaacaaagaacttgatgtgtatccaatttgccacacagaccacaagtccagaaccgatgatgaattaatcagatttctcagcagagacgctgaaccagtttaagattaaaaaaatagcaccaaacagagaaacacacaaacaacgtgggaatgaaaaagaatgccaccgcacccgtcaagagaaaaagctgaagaatcaagagaatggccattctgttcctgctagctccattgccttcggcggagagctgaggaagaaggtgagctactgccatggccatggcggcacgcacaagaaacctcggtggatcgatgtcgatctcagatcgacgctggtatctgtctgtacgtgtatttatagcaagtaaaatcaagaagctagctaggcccagcatgtacggtggttgtagctttagtagatatttagatagaccttcacccggatagaatagaaggaagatgcgtggatgagagaaaaaggcaggcaggcagaggcagcacatgaagaaaacgtttaaaccttttcggcgaatttatgtcgttccctcacgcttgg

SEQ ID NO: 25719 - DNA, 4508 bp, Zea Mays
atgttgctccacgccggtccctcgttcctgctcgcaccacctccgcgctttgccgccgctccgtcgtcagcttcgccgaggcgatccaggacaccgcaatcctcgccgccgacgtcgcatttcgcgcgccccgctgatcccgtggcccaaagggtgcgtcccgtcgcgccgaggccccccatggcgacggcggaggagggcgccagctctgacgtcggcgtcgccgtcgccgagtccgcacaggggttcttgttggatgcgagggcttactgggtgacaaaatccttgattgcatggaatatcagtgatcagaaaacttctctcttcttatatgcaagcagaaatgctacaatgtgcatgtcgagtcaggatatgaaaggttatgattccaaagttgagctgcaaccagaaaatgatggacttccatccagtgtgacccagaaattcccttttatcagctcttatagagccttcagaattccgagctccgttgatgttgccaccttggtgaaatgtcaacttgctgttgcttcatttgatggcaagatgttactgggttgcaactacctggagtattggatgacatgttcgcctacactggaccgcttggtactatttttagtgaagaagctgtgagtatgtacctatgggctcctacagcacaggatgtaagtgtgagcttctatgatggtccagctggccctttactggaaacagttcaactcaacgagttaaatggtgtttggagtgttactggtccaaggaactgggagaaccggtattatctatatgaagtcacagtatatcatcaaactacaggaaacattgagaaatgtttagccgctgatccttatgctagagggctttctgcaaatagcacacgaacttggttggttgatattaataatgaaacattaaagccacttgcctgggatggattggcggctgaaaagccaaggcttgattccttctctgacataagcatatatgaattgcacattcgtgatttcagtgcccatgatagcacagtggactgtcctttccgaggaggtttctgtgcatttacatttcaggattctgtaggcatagaacacctaaagaaactatctgatgccggtttgactcatgtccatttgttgccaagctttcaatttggtggtgttgatgacataaagagcaattggaaatgtgttgggtcagatttgcaacaagctgcaattgtggctattcaggaagaggacccttataattgggggtataaccctgtggtttggggcgttccaaaaggaagctatgcaagtaacccagatggtccaagtcgtatcattgagtaccggctgatggtgcaggccttgaatcgcttaggtcttcgagttgtcatggatgttgtatacaatcatctatactcaagtggcccttttgccatcacttccgtgcttgacaagattgtacctggatactacctcagaagggactctaatggtcagactgagaacagcgcggctgtgaacaatacagcaagttgacgggttcagatttgatctaatgggacatatcatgaaaaagacaatgattagagcaaaatcggctcttcaaagccttacaattgatgaacatggagtagatggttcaaagatatacttgtatggtgaaggatggaacttcggtgaagttgcggaaaatcaacgtgggataaatggatcccagctaaatatgagtggcactgggattggtagtttcaacgatagaatccgtgatgctataaatggtggcagtccgtttgggaatccactgcaacaaggtttctctactggattgttcttagagccaaatggattttatcagggcaatgaaacagagacaaggctcacgcttgctacatacgctgaccatatacagattggattagctggcaatttgaaggactatgtagttatatctcatactggagaagctagaaaaggatctgaaattcgcaccttcgatggctcaccagttggctatgcttcatcccctatagaaacaataaactacgcctctgctcatgacaatgaaacactatttgatattattagtctaaagactccgatggacctctcaattgacgagcgatgcaggataaatcatttgtccacaagcatgattgcattatcccagggaataccattttttcatgctggtgatgagatactacgatctaagtcgcttgatcgagattcatatgactctggtgattggtttaacaagattgattttacctatgaaacaaacaattggggtgttgggcttccaccaagagaaaagaacgaagggagctggcctttgatgaagccaagattggagaacccgtcgttcaaacctgcaaaacatgacattattgctgccttagacaaatttattgatatcctcaagatcagatactcatcacctctctttcgcctaactacagcaagtgatattgtgcaaagggttcactttcacaacacagggccctccttggttccaggagttattgtcatgagcatcgaagatgcacgaaatgataggcatgatatggcccagatagatgaaacattctcttgtgtcgttacagtcttcaatgtatgtccgtacgaagtgtctatagaaatccctgatcttgcatcactgcggcttcagttgcatccagtgcaggtgaattcatcggatgcgttagccaggcagtctgcgtacgacaccgccacaggtcgattcaccgtgccgaaaaggacagcagcagtgttcgtggaacccaggtgctgatggatgcctttcgctagcgagcaagtgcattcggcatccaagtcgaagcaaacgaatgaaataagagaaggccatcgaataaaacgaagtatataaatagattgaataagacgttgcccaagttgccaaggcacgctttgccatatgtatgcgttgaaaaataaataaataaataaataaatgatgttatagaggtacaaaagcattggaacatttctttatagaggtgaaccaccctattttccagtttccatgtgtgaattgtgattagcatatgtatggaataataatataaattaattttatgcatttgtgtgttgtgtcgtggatgacaacatcaacatattgcttctacttgatctctctataattttttttgaagaaatacctagtctagatgtaatatcgtaattccctagctactatatgatatcagggcgttcattagttcgcagggcagaaggtgacgtcatagctggaaggtccggagcaggtgaaggtgctggtggcgtcgtcgtaggcgtagctgtaggccgacgggcatgcgctcttgaacacctgcgagtagttggtcgggccgcacatcgccggcgtgccgtactgcccggtgcagcagtagcgcgcgctgccgtaggcgatgcacgcgctcttgcacgctacgacgccgccgccggacgatgcgacgacgcggaggtccccggggcacacggcgtttacgtcgcccgcgcaagccgcggggcggcagtcgccgccgccgcccgagggcgccacgcgcaccggcacgttgaagccgtcgacgaggctgacgtcgtagaagtccggcctgccgctgcccggcgcggcgagcgtgacctcgacgagcgagaccggaggcgccggcccgcggccctggcacgcgacgtcgcccgtgccgcagtcggccgtggcgcaggagaagcgcccggtggcggggtcggccacgcagcccgtgcgcgcccacaacgtgccggaccatgtccccgacgacggcgcgtccatgctggacgtggcggacggcgccaggtagaagcccgaccgcgcgagcggcggcgagctggcgccgtggagcgcgcccacccacaccgcgtgcttgcaggcgttggtgaagatgaacgacgccgctccatccacgcctagcgctgaatcagttatggaacaaagaacttgatgtgtatccaatttgccacacagaccacaagtccagaaccgatgatgaattaatcagatttctcagcagagacgctgaaccagtttaagattaaaaaaatagcaccaaacagagaaacacacaaacaacgtgggaatgaaaaagaatgccaccgcacccgtcaagagaaaaagctgaagaatcaagagaatggccattctgttcctgctagctccattgccttcggcggagagctgaggaagaaggtgagctactgccatggccatggcggcacgcacaagaaacctcggtggatcgatgtcgatctcagatcgacgctggtatctgtctgtacgtgtatttatagcaagtaaaatcaagaagctagctaggcccagcatgtacggtggttgtagctttagtagatatttagatagaccttcacccggatagaatagaaggaagatgcgtggatgagagaaaaaggcaggcaggcagaggcagcacatgaagaaaacgtttaaaccttttcggcgaatttatgtcgttccctcacgcttgg

SEQ ID NO: 25720 - DNA, 4392 bp, Zea Mays
atgttgctccacgccggtccctcgttcctgctcgcaccacctccgcgctttgccgccgctccgtcgtcagcttcgccgaggcgatccaggacaccgcaatcctcgccgccgacgtcgcatttcgcgcgccccgctgatcccgtggcccaaagggtgcgtcccgtcgcgccgaggccccccatggcgacggcggaggagggcgccagctctgacgtcggcgtcgccgtcgccgagtccgcacaggggttcttgttggatgcgagggcttactgggtgacaaaatccttgattgcatggaatatcagtgatcagaaaacttctctcttcttatatgcaagcagaaatgctacaatgtgcatgtcgagtcaggatatgaaaggttatgattccaaagttgagctgcaaccagaaaatgatggacttccatccagtgtgacccagaaattcccttttatcagctcttatagagccttcagaattccgagctccgttgatgttgccaccttggtgaaatgtcaacttgctgttgcttcatttgatgctcatgggaacaggcaagatgttactgggttgcaactacctggagtattggatgacatgttcgcctacactggaccgcttggtactatttttagtgaagaagctgtgagtatgtacctatgggctcctacagcacaggatgtaagtgtgagcttctatgatggtccagctggccctttactggaaacagttcaactcaacgagttaaatggtgtttggagtgttactggtccaaggaactgggagaaccggtattatctatatgaagtcacagtatatcatcaaactacaggaaacattgagaaatgtttagccgctgatccttatgctagagggctttctgcaaatagcacacgaacttggttggttgatattaataatgaaacattaaagccacttgcctgggatggattggcggctgaaaagccaaggcttgattccttctctgacataagcatatatgaattgcacattcgtgatttcagtgcccatgatagcacagtggactgtcctttccgaggaggtttctgtgcatttacatttcaggattctgtaggcatagaacacctaaagaaactatctgatgccggtttgactcatgtccatttgttgccaagctttcaatttggtggtgttgatgacataaagagcaattggaaatgtgttgatgagattgaactgtcaaaactccctccagggtcagatttgcaacaagctgcaattgtggctattcaggaagaggacccttataattgggggtataaccctgtggtttggggcgttccaaaaggaagctatgcaagtaacccagatggtccaagtcgtatcattgagtaccggctgatggtgcaggccttgaatcgcttaggtcttcgagttgtcatggatgttgtatacaatcatctatactcaagtggcccttttgccatcacttccgtgcttgacaagattgtacctggatactacctcagaagggactctaatggtcagactgagaacagcgcggctgtgaacaatacagcaagtgagcatttcatggttgatagattaatcgtggatgaccttctgaattgggcagtaaattacaaagttgacgggttcagatttgatctaatgggacatatcatgaaaaagacaatgccaaatggattttatcagggcaatgaaacagagacaaggctcacgcttgctacatacgctgaccatatacagattggattagctggcaatttgaaggactatgtagttatatctcatactggagaagctagaaaaggatctgaaattcgcaccttcgatggctcaccagttggctatgcttcatcccctatagaaacagtaaatttctgaagttttttttttaaaaactataaactacgcctctgctcatgacaatgaaacactatttgatattattagtctaaagactccgatggacctctcaattgacgagcgatgcaggataaatcatttgtccacaagcatgattgcattatcccagggaataccattttttcatgctggtgatgagatactacgatctaagtcgcttgatcgagattcatatgactctggtgattggtttaacaagattgattttacctatgaaacaaacaattggggtgttgggcttccaccaagagaaaagaacgaagggagctggcctttgatgaagccaagattggagaacccgtcgttcaaacctgcaaaacatgacattattgctgccttagacaaatttattgatatcctcaagatcagatactcatcacctctctttcgcctaactacagcaagtgatattgtgcaaagggttcactttcacaacacagggccctccttggttccaggagttattgtcatgagcatcgaagatgcacgaaatgataggcatgatatggcccagatagatgaaacattctcttgtgtcgttacagtcttcaatgtatgtccgtacgaagtgtctatagaaatccctgatcttgcatcactgcggcttcagttgcatccagtgcaggtgaattcatcggatgcgttagccaggcagtctgcgtacgacaccgccacaggtcgattcaccgtgccgaaaaggacagcagcagtgttcgtggaacccaggtgctgatggatgcctttcgctagcgagcaagtgcattcggcatccaagtcgaagcaaacgaatgaaataagagaaggccatcgaataaaacgaagtatataaatagattgaataagacgttgcccaagttgccaaggcacgctttgccatatgtatgcgttgaaaaataaataaataaataaataaatgatgttatagaggtacaaaagcattggaacatttctttatagaggtgaaccaccctattttccagtttccatgtgtgaattgtgattagcatatgtatggaataataatataaattaattttatgcatttgtgtgttgtgtcgtggatgacaacatcaacatattgcttctacttgatctctctataattttttttgaagaaatacctagtctagatgtaatatcgtaattccctagctactatatgatatcagggcgttcattagttcgcagggcagaaggtgacgtcatagctggaaggtccggagcaggtgaaggtgctggtggcgtcgtcgtaggcgtagctgtaggccgacgggcatgcgctcttgaacacctgcgagtagttggtcgggccgcacatcgccggcgtgccgtactgcccggtgcagcagtagcgcgcgctgccgtaggcgatgcacgcgctcttgcacgctacgacgccgccgccggacgatgcgacgacgcggaggtccccggggcacacggcgtttacgtcgcccgcgcaagccgcggggcggcagtcgccgccgccgcccgagggcgccacgcgcaccggcacgttgaagccgtcgacgaggctgacgtcgtagaagtccggcctgccgctgcccggcgcggcgagcgtgacctcgacgagcgagaccggaggcgccggcccgcggccctggcacgcgacgtcgcccgtgccgcagtcggccgtggcgcaggagaagcgcccggtggcggggtcggccacgcagcccgtgcgcgcccacaacgtgccggaccatgtccccgacgacggcgcgtccatgctggacgtggcggacggcgccaggtagaagcccgaccgcgcgagcggcggcgagctggcgccgtggagcgcgcccacccacaccgcgtgcttgcaggcgttggtgaagatgaacgacgccgctccatccacgcctagcgctgaatcagttatggaacaaagaacttgatgtgtatccaatttgccacacagaccacaagtccagaaccgatgatgaattaatcagatttctcagcagagacgctgaaccagtttaagattaaaaaaatagcaccaaacagagaaacacacaaacaacgtgggaatgaaaaagaatgccaccgcacccgtcaagagaaaaagctgaagaatcaagagaatggccattctgttcctgctagctccattgccttcggcggagagctgaggaagaaggtgagctactgccatggccatggcggcacgcacaagaaacctcggtggatcgatgtcgatctcagatcgacgctggtatctgtctgtacgtgtatttatagcaagtaaaatcaagaagctagctaggcccagcatgtacggtggttgtagctttagtagatatttagatagaccttcacccggatagaatagaaggaagatgcgtggatgagagaaaaaggcaggcaggcagaggcagcacatgaagaaaacgtttaaaccttttcggcgaatttatgtcgttccctcacgcttgg

SEQ ID NO: 25721 - DNA, 4899 bp, Zea Mays
cttctctctccctccgaatccaaacgcggacgcaaatgttgctccacgccggtccctcgttcctgctcgcaccacctccgcgctttgccgccgctccgtcgtcagcttcgccgaggcgatccaggacaccgcaatcctcgccgccgacgtcgcatttcgcgcgccccgctgatcccgtggcccaaagggtgcgtcccgtcgcgccgaggccccccatggcgacggcggaggagggcgccagctctgacgtcggcgtcgccgtcgccgagtccgcacaggggttcttgttggatgcgagggcttactgggtgacaaaatccttgattgcatggaatatcagtgatcagaaaacttctctcttcttatatgcaagcagaaatgctacaatgtgcatgtcgagtcaggatatgaaaggttatgattccaaagttgagctgcaaccagaaaatgatggacttccatccagtgtgacccagaaattcccttttatcagctcttatagagccttcagaattccgagctccgttgatgttgccaccttggtgaaatgtcaacttgctgttgcttcatttgatgctcatgggaacaggcaagatgttactgggttgcaactacctggagtattggatgacatgttcgcctacactggaccgcttggtactatttttagtgaagaagctgtgagtatgtacctatgggctcctacagcacaggatgtaagtgtgagcttctatgatggtccagctggccctttactggaaacagttcaactcaacgagttaaatggtgtttggagtgttactggtccaaggaactgggagaaccggtattatctatatgaagtcacagtatatcatcaaactacaggaaacattgagaaatgtttagccgctgatccttatgctagagggctttctgcaaatagcacacgaacttggttggttgatattaataatgaaacattaaagccacttgcctgggatggattggcggctgaaaagccaaggcttgattccttctctgacataagcatatatgaattgcacattcgtgatttcagtgcccatgatagcacagtggactgtcctttccgaggaggtttctgtgcatttacatttcaggattctgtaggcatagaacacctaaagaaactatctgatgccggtttgactcatgtccatttgttgccaagctttcaatttggtggtgttgatgacataaagagcaattggaaatgtgttgatgagattgaactgtcaaaactccctccagggtcagatttgcaacaagctgcaattgtggctattcaggaagaggacccttataattgggggtataaccctgtggtttggggcgttccaaaaggaagctatgcaagtaacccagatggtccaagtcgtatcattgagtaccggctgatggtgcaggccttgaatcgcttaggtcttcgagttgtcatggatgttgtatacaatcatctatactcaagtggcccttttgccatcacttccgtgcttgacaagattgtacctggatactacctcagaagggactctaatggtcagactgagaacagcgcggctgtgaacaatacagcaagtgagcatttcatggttgatagattaatcgtggatgaccttctgaattgggcagtaaattacaaagttgacgggttcagatttgatctaatgggacatatcatgaaaaagacaatgattagagcaaaatcggctcttcaaagccttacaattgatgaacatggagtagatggttcaaagatatacttgtatggtgaaggatggaacttcggtgaagttgcggaaaatcaacgtgggataaatggatcccagctaaatatgagtggcactgggattggtagtttcaacgatagaatccgtgatgctataaatggtggcagtccgtttgggaatccactgcaacaaggtttctctactggattgttcttagagttttgtcttggtccttttctgcagccaaatggattttatcagggcaatgaaacagagacaaggctcacgcttgctacatacgctgaccatatacagattggattagctggcaatttgaaggactatgtagttatatctcatactggagaagctagaaaaggatctgaaattcgcaccttcgatggctcaccagttggctatgcttcatcccctatagaaacaataaactacgcctctgctcatgacaatgaaacactatttgatattattagtctaaagactccgatggacctctcaattgacgagcgatgcaggataaatcatttgtccacaagcatgattgcattatcccagggaataccattttttcatgctggtgatgagatactacgatctaagtcgcttgatcgagattcatatgactctggtgattggtttaacaagtattactctatcctttggatcttgatgcaaacaccagttaccagctagcaacaactgaattgctttcaaggatgatagttttaagttaaacatttacaattgcttgctattatcataacttctcaatttttatcctatatgaaaaactgtttcaagttgaacaaacgcttcccaatcatgttagaatgtaaacagggtaaatgttctgttctgttgtttgaaggattgattttacctatgaaacaaacaattggggtgttgggcttccaccaagagaaaagaacgaagggagctggcctttgatgaagccaagattggagaacccgtcgttcaaacctgcaaaacatgacattattgctgccttagacaaatttattgatatcctcaagatcagatactcatcacctctctttcgcctaactacagcaagtgatattgtgcaaagggttcactttcacaacacagggccctccttggttccaggagttattgtcatgagcatcgaagatgcacgaaatgataggcatgatatggcccagatagatgaaacattctcttgtgtcgttacagtcttcaatgtatgtccgtacgaagtgtctatagaaatccctgatcttgcatcactgcggcttcagttgcatccagtgcaggtgaattcatcggatgcgttagccaggcagtctgcgtacgacaccgccacaggtcgattcaccgtgccgaaaaggacagcagcagtgttcgtggaacccaggtgctgatggatgcctttcgctagcgagcaagtgcattcggcatccaagtcgaagcaaacgaatgaaataagagaaggccatcgaataaaacgaagtatataaatagattgaataagacgttgcccaagttgccaaggcacgctttgccatatgtatgcgttgaaaaataaataaataaataaataaatgatgttatagaggtacaaaagcattggaacatttctttatagaggtgaaccaccctattttccagtttccatgtgtgaattgtgattagcatatgtatggaataataatataaattaattttatgcatttgtgtgttgtgtcgtggatgacaacatcaacatattgcttctacttgatctctctataattttttttgaagaaatacctagtctagatgtaatatcgtaattccctagctactatatgatatcagggcgttcattagttcgcagggcagaaggtgacgtcatagctggaaggtccggagcaggtgaaggtgctggtggcgtcgtcgtaggcgtagctgtaggccgacgggcatgcgctcttgaacacctgcgagtagttggtcgggccgcacatcgccggcgtgccgtactgcccggtgcagcagtagcgcgcgctgccgtaggcgatgcacgcgctcttgcacgctacgacgccgccgccggacgatgcgacgacgcggaggtccccggggcacacggcgtttacgtcgcccgcgcaagccgcggggcggcagtcgccgccgccgcccgagggcgccacgcgcaccggcacgttgaagccgtcgacgaggctgacgtcgtagaagtccggcctgccgctgcccggcgcggcgagcgtgacctcgacgagcgagaccggaggcgccggcccgcggccctggcacgcgacgtcgcccgtgccgcagtcggccgtggcgcaggagaagcgcccggtggcggggtcggccacgcagcccgtgcgcgcccacaacgtgccggaccatgtccccgacgacggcgcgtccatgctggacgtggcggacggcgccaggtagaagcccgaccgcgcgagcggcggcgagctggcgccgtggagcgcgcccacccacaccgcgtgcttgcaggcgttggtgaagatgaacgacgccgctccatccacgcctagcgctgaatcagttatggaacaaagaacttgatgtgtatccaatttgccacacagaccacaagtccagaaccgatgatgaattaatcagatttctcagcagagacgctgaaccagtttaagattaaaaaaatagcaccaaacagagaaacacacaaacaacgtgggaatgaaaaagaatgccaccgcacccgtcaagagaaaaagctgaagaatcaagagaatggccattctgttcctgctagctccattgccttcggcggagagctgaggaagaaggtgagctactgccatggccatggcggcacgcacaagaaacctcggtggatcgatgtcgatctcagatcgacgctggtatctgtctgtacgtgtatttatagcaagtaaaatcaagaagctagctaggcccagcatgtacggtggttgtagctttagtagatatttagatagaccttcacccggatagaatagaaggaagatgcgtggatgagagaaaaaggcaggcaggcagaggcagcacatgaagaaaacgtttaaaccttttcggcgaatttatgtcgttccctcacgcttgg

SEQ ID NO: 25722 - DNA, 4575 bp, Zea Mays
gccttctctctccctccgaatccaaacgcggacgcaaatgttgctccacgccggtccctcgttcctgctcgcaccacctccgcgctttgccgccgctccgtcgtcagcttcgccgaggcgatccaggacaccgcaatcctcgccgccgacgtcgcatttcgcgcgccccgctgatcccgtggcccaaagggtgcgtcccgtcgcgccgaggccccccatggcgacggcggaggagggcgccagctctgacgtcggcgtcgccgtcgccgagtccgcacaggggttcttgttggatgcgagggcttactgggtgacaaaatccttgattgcatggaatatcagtgatcagaaaacttctctcttcttatatgcaagcagaaatgctacaatgtgcatgtcgagtcaggatatgaaaggttatgattccaaagttgagctgcaaccagaaaatgatggacttccatccagtgtgacccagaaattcccttttatcagctcttatagagccttcagaattccgagctccgttgatgttgccaccttggtgaaatgtcaacttgctgttgcttcatttgatggcaagatgttactgggttgcaactacctggagtattggatgacatgttcgcctacactggaccgcttggtactatttttagtgaagaagctgtgagtatgtacctatgggctcctacagcacaggatgtaagtgtgagcttctatgatggtccagctggccctttactggaaacagttcaactcaacgagttaaatggtgtttggagtgttactggtccaaggaactgggagaaccggtattatctatatgaagtcacagtatatcatcaaactacaggaaacattgagaaatgtttagccgctgatccttatgctagagggctttctgcaaatagcacacgaacttggttggttgatattaataatgaaacattaaagccacttgcctgggatggattggcggctgaaaagccaaggcttgattccttctctgacataagcatatatgaattgcacattcgtgatttcagtgcccatgatagcacagtggactgtcctttccgaggaggtttctgtgcatttacatttcaggattctgtaggcatagaacacctaaagaaactatctgatgccggtttgactcatgtccatttgttgccaagctttcaatttggtggtgttgatgacataaagagcaattggaaatgtgttgatgagattgaactgtcaaaactccctccagggtcagatttgcaacaagctgcaattgtggctattcaggaagaggacccttataattgggggtataaccctgtggtttggggcgttccaaaaggaagctatgcaagtaacccagatggtccaagtcgtatcattgagtaccggctgatggtgcaggccttgaatcgcttaggtcttcgagttgtcatggatgttgtatacaatcatctatactcaagtggcccttttgccatcacttccgtgcttgacaagattgtacctggatactacctcagaagggactctaatggtcagactgagaacagcgcggctgtgaacaatacagcaagttgacgggttcagatttgatctaatgggacatatcatgaaaaagacaatgattagagcaaaatcggctcttcaaagccttacaattgatgaacatggagtagatggttcaaagatatacttgtatggtgaaggatggaacttcggtgaagttgcggaaaatcaacgtgggataaatggatcccagctaaatatgagtggcactgggattggtagtttcaacgatagaatccgtgatgctataaatggtggcagtccgtttgggaatccactgcaacaaggtttctctactggattgttcttagagccaaatggattttatcagggcaatgaaacagagacaaggctcacgcttgctacatacgctgaccatatacagattggattagctggcaatttgaaggactatgtagttatatctcatactggagaagctagaaaaggatctgaaattcgcaccttcgatggctcaccagttggctatgcttcatcccctatagaaacaataaactacgcctctgctcatgacaatgaaacactatttgatattattagtctaaagactccgatggacctctcaattgacgagcgatgcaggataaatcatttgtccacaagcatgattgcattatcccagggaataccattttttcatgctggtgatgagatactacgatctaagtcgcttgatcgagattcatatgactctggtgattggtttaacaagattgattttacctatgaaacaaacaattggggtgttgggcttccaccaagagaaaagaacgaagggagctggcctttgatgaagccaagattggagaacccgtcgttcaaacctgcaaaacatgacattattgctgccttagacaaatttattgatatcctcaagatcagatactcatcacctctctttcgcctaactacagcaagtgatattgtgcaaagggttcactttcacaacacagggccctccttggttccaggagttattgtcatgagcatcgaagatgcacgaaatgataggcatgatatggcccagatagatgaaacattctcttgtgtcgttacagtcttcaatgtatgtccgtacgaagtgtctatagaaatccctgatcttgcatcactgcggcttcagttgcatccagtgcaggtgaattcatcggatgcgttagccaggcagtctgcgtacgacaccgccacaggtcgattcaccgtgccgaaaaggacagcagcagtgttcgtggaacccaggtgctgatggatgcctttcgctagcgagcaagtgcattcggcatccaagtcgaagcaaacgaatgaaataagagaaggccatcgaataaaacgaagtatataaatagattgaataagacgttgcccaagttgccaaggcacgctttgccatatgtatgcgttgaaaaataaataaataaataaataaatgatgttatagaggtacaaaagcattggaacatttctttatagaggtgaaccaccctattttccagtttccatgtgtgaattgtgattagcatatgtatggaataataatataaattaattttatgcatttgtgtgttgtgtcgtggatgacaacatcaacatattgcttctacttgatctctctataattttttttgaagaaatacctagtctagatgtaatatcgtaattccctagctactatatgatatcagggcgttcattagttcgcagggcagaaggtgacgtcatagctggaaggtccggagcaggtgaaggtgctggtggcgtcgtcgtaggcgtagctgtaggccgacgggcatgcgctcttgaacacctgcgagtagttggtcgggccgcacatcgccggcgtgccgtactgcccggtgcagcagtagcgcgcgctgccgtaggcgatgcacgcgctcttgcacgctacgacgccgccgccggacgatgcgacgacgcggaggtccccggggcacacggcgtttacgtcgcccgcgcaagccgcggggcggcagtcgccgccgccgcccgagggcgccacgcgcaccggcacgttgaagccgtcgacgaggctgacgtcgtagaagtccggcctgccgctgcccggcgcggcgagcgtgacctcgacgagcgagaccggaggcgccggcccgcggccctggcacgcgacgtcgcccgtgccgcagtcggccgtggcgcaggagaagcgcccggtggcggggtcggccacgcagcccgtgcgcgcccacaacgtgccggaccatgtccccgacgacggcgcgtccatgctggacgtggcggacggcgccaggtagaagcccgaccgcgcgagcggcggcgagctggcgccgtggagcgcgcccacccacaccgcgtgcttgcaggcgttggtgaagatgaacgacgccgctccatccacgcctagcgctgaatcagttatggaacaaagaacttgatgtgtatccaatttgccacacagaccacaagtccagaaccgatgatgaattaatcagatttctcagcagagacgctgaaccagtttaagattaaaaaaatagcaccaaacagagaaacacacaaacaacgtgggaatgaaaaagaatgccaccgcacccgtcaagagaaaaagctgaagaatcaagagaatggccattctgttcctgctagctccattgccttcggcggagagctgaggaagaaggtgagctactgccatggccatggcggcacgcacaagaaacctcggtggatcgatgtcgatctcagatcgacgctggtatctgtctgtacgtgtatttatagcaagtaaaatcaagaagctagctaggcccagcatgtacggtggttgtagctttagtagatatttagatagaccttcacccggatagaatagaaggaagatgcgtggatgagagaaaaaggcaggcaggcagaggcagcacatgaagaaaacgtttaaaccttttcggcgaatttatgtcgttccctcacgcttgg

SEQ ID NO: 25723 - DNA, 4606 bp, Zea Mays
ctcaccgccttctctctccctccgaatccaaacgcggacgcaaatgttgctccacgccggtccctcgttcctgctcgcaccacctccgcgctttgccgccgctccgtcgtcagcttcgccgaggcgatccaggacaccgcaatcctcgccgccgacgtcgcatttcgcgcgccccgctgatcccgtggcccaaagggtgcgtcccgtcgcgccgaggccccccatggcgacggcggaggagggcgccagctctgacgtcggcgtcgccgtcgccgagtccgcacaggggttcttgttggatgcgagggcttactgggtgacaaaatccttgattgcatggaatatcagtgatcagaaaacttctctcttcttatatgcaagcagaaatgctacaatgtgcatgtcgagtcaggatatgaaaggttatgattccaaagttgagctgcaaccagaaaatgatggacttccatccagtgtgacccagaaattcccttttatcagctcttatagagccttcagaattccgagctccgttgatgttgccaccttggtgaaatgtcaacttgctgttgcttcatttgatgctcatgggaacaggcaagatgttactgggttgcaactacctggagtattggatgacatgttcgcctacactggaccgcttggtactatttttagtgaagaagctgtgagtatgtacctatgggctcctacagcacaggatgtaagtgtgagcttctatgatggtccagctggccctttactggaaacagttcaactcaacgagttaaatggtgtttggagtgttactggtccaaggaactgggagaaccggtattatctatatgaagtcacagtatatcatcaaactacaggaaacattgagaaatgtttagccgctgatccttatgctagagggctttctgcaaatagcacacgaacttggttggttgatattaataatgaaacattaaagccacttgcctgggatggattggcggctgaaaagccaaggcttgattccttctctgacataagcatatatgaattgcacattcgtgatttcagtgcccatgatagcacagtggactgtcctttccgaggaggtttctgtgcatttacatttcaggattctgtaggcatagaacacctaaagaaactatctgatgccggtttgactcatgtccatttgttgccaagctttcaatttggtggtgttgatgacataaagagcaattggaaatgtgttgatgagattgaactgtcaaaactccctccagggtcagatttgcaacaagctgcaattgtggctattcaggaagaggacccttataattgggggtataaccctgtggtttggggcgttccaaaaggaagctatgcaagtaacccagatggtccaagtcgtatcattgagtaccggctgatggtgcaggccttgaatcgcttaggtcttcgagttgtcatggatgttgtatacaatcatctatactcaagtggcccttttgccatcacttccgtgcttgacaagattgtacctggatactacctcagaagggactctaatggtcagactgagaacagcgcggctgtgaacaatacagcaattgttgccttaggttgacgggttcagatttgatctaatgggacatatcatgaaaaagacaatgattagagcaaaatcggctcttcaaagccttacaattgatgaacatggagtagatggttcaaagatatacttgtatggtgaaggatggaacttcggtgaagttgcggaaaatcaacgtgggataaatggatcccagctaaatatgagtggcactgggattggtagtttcaacgatagaatccgtgatgctataaatggtggcagtccgtttgggaatccactgcaacaaggtttctctactggattgttcttagagccaaatggattttatcagggcaatgaaacagagacaaggctcacgcttgctacatacgctgaccatatacagattggattagctggcaatttgaaggactatgtagttatatctcatactggagaagctagaaaaggatctgaaattcgcaccttcgatggctcaccagttggctatgcttcatcccctatagaaacaataaactacgcctctgctcatgacaatgaaacactatttgatattattagtctaaagactccgatggacctctcaattgacgagcgatgcaggataaatcatttgtccacaagcatgattgcattatcccagggaataccattttttcatgctggtgatgagatactacgatctaagtcgcttgatcgagattcatatgactctggtgattggtttaacaagattgattttacctatgaaacaaacaattggggtgttgggcttccaccaagagaaaagaacgaagggagctggcctttgatgaagccaagattggagaacccgtcgttcaaacctgcaaaacatgacattattgctgccttagacaaatttattgatatcctcaagatcagatactcatcacctctctttcgcctaactacagcaagtgatattgtgcaaagggttcactttcacaacacagggccctccttggttccaggagttattgtcatgagcatcgaagatgcacgaaatgataggcatgatatggcccagatagatgaaacattctcttgtgtcgttacagtcttcaatgtatgtccgtacgaagtgtctatagaaatccctgatcttgcatcactgcggcttcagttgcatccagtgcaggtgaattcatcggatgcgttagccaggcagtctgcgtacgacaccgccacaggtcgattcaccgtgccgaaaaggacagcagcagtgttcgtggaacccaggtgctgatggatgcctttcgctagcgagcaagtgcattcggcatccaagtcgaagcaaacgaatgaaataagagaaggccatcgaataaaacgaagtatataaatagattgaataagacgttgcccaagttgccaaggcacgctttgccatatgtatgcgttgaaaaataaataaataaataaataaatgatgttatagaggtacaaaagcattggaacatttctttatagaggtgaaccaccctattttccagtttccatgtgtgaattgtgattagcatatgtatggaataataatataaattaattttatgcatttgtgtgttgtgtcgtggatgacaacatcaacatattgcttctacttgatctctctataattttttttgaagaaatacctagtctagatgtaatatcgtaattccctagctactatatgatatcagggcgttcattagttcgcagggcagaaggtgacgtcatagctggaaggtccggagcaggtgaaggtgctggtggcgtcgtcgtaggcgtagctgtaggccgacgggcatgcgctcttgaacacctgcgagtagttggtcgggccgcacatcgccggcgtgccgtactgcccggtgcagcagtagcgcgcgctgccgtaggcgatgcacgcgctcttgcacgctacgacgccgccgccggacgatgcgacgacgcggaggtccccggggcacacggcgtttacgtcgcccgcgcaagccgcggggcggcagtcgccgccgccgcccgagggcgccacgcgcaccggcacgttgaagccgtcgacgaggctgacgtcgtagaagtccggcctgccgctgcccggcgcggcgagcgtgacctcgacgagcgagaccggaggcgccggcccgcggccctggcacgcgacgtcgcccgtgccgcagtcggccgtggcgcaggagaagcgcccggtggcggggtcggccacgcagcccgtgcgcgcccacaacgtgccggaccatgtccccgacgacggcgcgtccatgctggacgtggcggacggcgccaggtagaagcccgaccgcgcgagcggcggcgagctggcgccgtggagcgcgcccacccacaccgcgtgcttgcaggcgttggtgaagatgaacgacgccgctccatccacgcctagcgctgaatcagttatggaacaaagaacttgatgtgtatccaatttgccacacagaccacaagtccagaaccgatgatgaattaatcagatttctcagcagagacgctgaaccagtttaagattaaaaaaatagcaccaaacagagaaacacacaaacaacgtgggaatgaaaaagaatgccaccgcacccgtcaagagaaaaagctgaagaatcaagagaatggccattctgttcctgctagctccattgccttcggcggagagctgaggaagaaggtgagctactgccatggccatggcggcacgcacaagaaacctcggtggatcgatgtcgatctcagatcgacgctggtatctgtctgtacgtgtatttatagcaagtaaaatcaagaagctagctaggcccagcatgtacggtggttgtagctttagtagatatttagatagaccttcacccggatagaatagaaggaagatgcgtggatgagagaaaaaggcaggcaggcagaggcagcacatgaagaaaacgtttaaaccttttcggcgaatttatgtcgttccctcacgcttgg

SEQ ID NO: 25724 - DNA, 4670 bp, Zea Mays
gtcctcaccgccttctctctccctccgaatccaaacgcggacgcaaatgttgctccacgccggtccctcgttcctgctcgcaccacctccgcgctttgccgccgctccgtcgtcagcttcgccgaggcgatccaggacaccgcaatcctcgccgccgacgtcgcatttcgcgcgccccgctgatcccgtggcccaaagggtgcgtcccgtcgcgccgaggccccccatggcgacggcggaggagggcgccagctctgacgtcggcgtcgccgtcgccgagtccgcacaggggttcttgttggatgcgagggcttactgggtgacaaaatccttgattgcatggaatatcagtgatcagaaaacttctctcttcttatatgcaagcagaaatgctacaatgtgcatgtcgagtcaggatatgaaaggttatgattccaaagttgagctgcaaccagaaaatgatggacttccatccagtgtgacccagaaattcccttttatcagctcttatagagccttcagaattccgagctccgttgatgttgccaccttggtgaaatgtcaacttgctgttgcttcatttgatgctcatgggaacaggcaagatgttactgggttgcaactacctggagtattggatgacatgttcgcctacactggaccgcttggtactatttttagtgaagaagctgtgagtatgtacctatgggctcctacagcacaggatgtaagtgtgagcttctatgatggtccagctggccctttactggaaacagttcaactcaacgagttaaatggtgtttggagtgttactggtccaaggaactgggagaaccggtattatctatatgaagtcacagtatatcatcaaactacaggaaacattgagaaatgtttagccgctgatccttatgctagagggctttctgcaaatagcacacgaacttggttggttgatattaataatgaaacattaaagccacttgcctgggatggattggcggctgaaaagccaaggcttgattccttctctgacataagcatatatgaattgcacattcgtgatttcagtgcccatgatagcacagtggactgtcctttccgaggaggtttctgtgcatttacatttcaggattctgtaggcatagaacacctaaagaaactatctgatgccggtttgactcatgtccatttgttgccaagctttcaatttggtggtgttgatgacataaagagcaattggaaatgtgttgatgagattgaactgtcaaaactccctccagggtcagatttgcaacaagctgcaattgtggctattcaggaagaggacccttataattgggggtataaccctgtggtttggggcgttccaaaaggaagctatgcaagtaacccagatggtccaagtcgtatcattgagtaccggctgatggtgcaggccttgaatcgcttaggtcttcgagttgtcatggatgttgtatacaatcatctatactcaagtggcccttttgccatcacttccgtgcttgacaagattgtacctggatactacctcagaagggactctaatggtcagactgagaacagcgcggctgtgaacaatacagcaagtgagcatttcatggttgatagattaatcgtggatgaccttctgaattgggcagtaaattacaaattgttgccttaggttgacgggttcagatttgatctaatgggacatatcatgaaaaagacaatgattagagcaaaatcggctcttcaaagccttacaattgatgaacatggagtagatggttcaaagatatacttgtatggtgaaggatggaacttcggtgaagttgcggaaaatcaacgtgggataaatggatcccagctaaatatgagtggcactgggattgtttcaacgatagaatccgtgatgctataaatggtggcagtccgtttgggaatccactgcaacaaggtttctctactggattgttcttagagccaaatggattttatcagggcaatgaaacagagacaaggctcacgcttgctacatacgctgaccatatacagattggattagctggcaatttgaaggactatgtagttatatctcatactggagaagctagaaaaggatctgaaattcgcaccttcgatggctcaccagttggctatgcttcatcccctatagaaacaataaactacgcctctgctcatgacaatgaaacactatttgatattattagtctaaagactccgatggacctctcaattgacgagcgatgcaggataaatcatttgtccacaagcatgattgcattatcccagggaataccattttttcatgctggtgatgagatactacgatctaagtcgcttgatcgagattcatatgactctggtgattggtttaacaagattgattttacctatgaaacaaacaattggggtgttgggcttccaccaagagaaaagaacgaagggagctggcctttgatgaagccaagattggagaacccgtcgttcaaacctgcaaaacatgacattattgctgccttagacaaatttattgatatcctcaagatcagatactcatcacctctctttcgcctaactacagcaagtgatattgtgcaaagggttcactttcacaacacagggccctccttggttccaggagttattgtcatgagcatcgaagatgcacgaaatgataggcatgatatggcccagatagatgaaacattctcttgtgtcgttacagtcttcaatgtatgtccgtacgaagtgtctatagaaatccctgatcttgcatcactgcggcttcagttgcatccagtgcaggtgaattcatcggatgcgttagccaggcagtctgcgtacgacaccgccacaggtcgattcaccgtgccgaaaaggacagcagcagtgttcgtggaacccaggtgctgatggatgcctttcgctagcgagcaagtgcattcggcatccaagtcgaagcaaacgaatgaaataagagaaggccatcgaataaaacgaagtatataaatagattgaataagacgttgcccaagttgccaaggcacgctttgccatatgtatgcgttgaaaaataaataaataaataaataaatgatgttatagaggtacaaaagcattggaacatttctttatagaggtgaaccaccctattttccagtttccatgtgtgaattgtgattagcatatgtatggaataataatataaattaattttatgcatttgtgtgttgtgtcgtggatgacaacatcaacatattgcttctacttgatctctctataattttttttgaagaaatacctagtctagatgtaatatcgtaattccctagctactatatgatatcagggcgttcattagttcgcagggcagaaggtgacgtcatagctggaaggtccggagcaggtgaaggtgctggtggcgtcgtcgtaggcgtagctgtaggccgacgggcatgcgctcttgaacacctgcgagtagttggtcgggccgcacatcgccggcgtgccgtactgcccggtgcagcagtagcgcgcgctgccgtaggcgatgcacgcgctcttgcacgctacgacgccgccgccggacgatgcgacgacgcggaggtccccggggcacacggcgtttacgtcgcccgcgcaagccgcggggcggcagtcgccgccgccgcccgagggcgccacgcgcaccggcacgttgaagccgtcgacgaggctgacgtcgtagaagtccggcctgccgctgcccggcgcggcgagcgtgacctcgacgagcgagaccggaggcgccggcccgcggccctggcacgcgacgtcgcccgtgccgcagtcggccgtggcgcaggagaagcgcccggtggcggggtcggccacgcagcccgtgcgcgcccacaacgtgccggaccatgtccccgacgacggcgcgtccatgctggacgtggcggacggcgccaggtagaagcccgaccgcgcgagcggcggcgagctggcgccgtggagcgcgcccacccacaccgcgtgcttgcaggcgttggtgaagatgaacgacgccgctccatccacgcctagcgctgaatcagttatggaacaaagaacttgatgtgtatccaatttgccacacagaccacaagtccagaaccgatgatgaattaatcagatttctcagcagagacgctgaaccagtttaagattaaaaaaatagcaccaaacagagaaacacacaaacaacgtgggaatgaaaaagaatgccaccgcacccgtcaagagaaaaagctgaagaatcaagagaatggccattctgttcctgctagctccattgccttcggcggagagctgaggaagaaggtgagctactgccatggccatggcggcacgcacaagaaacctcggtggatcgatgtcgatctcagatcgacgctggtatctgtctgtacgtgtatttatagcaagtaaaatcaagaagctagctaggcccagcatgtacggtggttgtagctttagtagatatttagatagaccttcacccggatagaatagaaggaagatgcgtggatgagagaaaaaggcaggcaggcagaggcagcacatgaagaaaacgtttaaaccttttcggcgaatttatgtcgttccctcacgcttgg

SEQ ID NO: 25725 - DNA, 4734 bp, Zea Mays
ataatataaatgtcacataagtaaataaacaaataaatcaatcaatattactacgaagctgtcctcaccgccttctctctccctccgaatccaaacgcggacgcaaatgttgctccacgccggtccctcgttcctgctcgcaccacctccgcgctttgccgccgctccgtcgtcagcttcgccgaggcgatccaggacaccgcaatcctcgccgccgacgtcgcatttcgcgcgccccgctgatcccgtggcccaaagggtgcgtcccgtcgcgccgaggccccccatggcgacggcggaggagggcgccagctctgacgtcggcgtcgccgtcgccgagtccgcacaggggttcttgttggatgcgagggcttactgggtgacaaaatccttgattgcatggaatatcagtgatcagaaaacttctctcttcttatatgcaagcagaaatgctacaatgtgcatgtcgagtcaggatatgaaaggttatgattccaaagttgagctgcaaccagaaaatgatggacttccatccagtgtgacccagaaattcccttttatcagctcttatagagccttcagaattccgagctccgttgatgttgccaccttggtgaaatgtcaacttgctgttgcttcatttgatgctcatgggaacaggcaagatgttactgggttgcaactacctggagtattggatgacatgttcgcctacactggaccgcttggtactatttttagtgaagaagctgtgagtatgtacctatgggctcctacagcacaggatgtaagtgtgagcttctatgatggtccagctggccctttactggaaacagttcaactcaacgagttaaatggtgtttggagtgttactggtccaaggaactgggagaaccggtattatctatatgaagtcacagtatatcatcaaactacaggaaacattgagaaatgtttagccgctgatccttatgctagagggctttctgcaaatagcacacgaacttggttggttgatattaataatgaaacattaaagccacttgcctgggatggattggcggctgaaaagccaaggcttgattccttctctgacataagcatatatgaattgcacattcgtgatttcagtgcccatgatagcacagtggactgtcctttccgaggaggtttctgtgcatttacatttcaggattctgtaggcatagaacacctaaagaaactatctgatgccggtttgactcatgtccatttgttgccaagctttcaatttggtggtgttgatgacataaagagcaattggaaatgtgttgatgagattgaactgtcaaaactccctccagggtcagatttgcaacaagctgcaattgtggctattcaggaagaggacccttataattgggggtataaccctgtggtttggggcgttccaaaaggaagctatgcaagtaacccagatggtccaagtcgtatcattgagtaccggctgatggtgcaggccttgaatcgcttaggtcttcgagttgtcatggatgttgtatacaatcatctatactcaagtggcccttttgccatcacttccgtgcttgacaagattgtacctggatactacctcagaagggactctaatggtcagactgagaacagcgcggctgtgaacaatacagcaagtgagcatttcatggttgatagattaatcgtggatgaccttctgaattgggcagtaaattacaaattgttgccttaggttgacgggttcagatttgatctaatgggacatatcatgaaaaagacaatgattagagcaaaatcggctcttcaaagccttacaattgatgaacatggagtagatggttcaaagatatacttgtatggtgaaggatggaacttcggtgaagttgcggaaaatcaacgtgggataaatggatcccagctaaatatgagtggcactgggattggtagtttcaacgatagaatccgtgatgctataaatggtggcagtccgtttgggaatccactgcaacaaggtttctctactggattgttcttagagccaaatggattttatcagggcaatgaaacagagacaaggctcacgcttgctacatacgctgaccatatacagattggattagctggcaatttgaaggactatgtagttatatctcatactggagaagctagaaaaggatctgaaattcgcaccttcgatggctcaccagttggctatgcttcatcccctatagaaacaataaactacgcctctgctcatgacaatgaaacactatttgatattattagtctaaagactccgatggacctctcaattgacgagcgatgcaggataaatcatttgtccacaagcatgattgcattatcccagggaataccattttttcatgctggtgatgagatactacgatctaagtcgcttgatcgagattcatatgactctggtgattggtttaacaagattgattttacctatgaaacaaacaattggggtgttgggcttccaccaagagaaaagaacgaagggagctggcctttgatgaagccaagattggagaacccgtcgttcaaacctgcaaaacatgacattattgctgccttagacaaatttattgatatcctcaagatcagatactcatcacctctctttcgcctaactacagcaagtgatattgtgcaaagggttcactttcacaacacagggccctccttggttccaggagttattgtcatgagcatcgaagatgcacgaaatgataggcatgatatggcccagatagatgaaacattctcttgtgtcgttacagtcttcaatgtatgtccgtacgaagtgtctatagaaatccctgatcttgcatcactgcggcttcagttgcatccagtgcaggtgaattcatcggatgcgttagccaggcagtctgcgtacgacaccgccacaggtcgattcaccgtgccgaaaaggacagcagcagtgttcgtggaacccaggtgctgatggatgcctttcgctagcgagcaagtgcattcggcatccaagtcgaagcaaacgaatgaaataagagaaggccatcgaataaaacgaagtatataaatagattgaataagacgttgcccaagttgccaaggcacgctttgccatatgtatgcgttgaaaaataaataaataaataaataaatgatgttatagaggtacaaaagcattggaacatttctttatagaggtgaaccaccctattttccagtttccatgtgtgaattgtgattagcatatgtatggaataataatataaattaattttatgcatttgtgtgttgtgtcgtggatgacaacatcaacatattgcttctacttgatctctctataattttttttgaagaaatacctagtctagatgtaatatcgtaattccctagctactatatgatatcagggcgttcattagttcgcagggcagaaggtgacgtcatagctggaaggtccggagcaggtgaaggtgctggtggcgtcgtcgtaggcgtagctgtaggccgacgggcatgcgctcttgaacacctgcgagtagttggtcgggccgcacatcgccggcgtgccgtactgcccggtgcagcagtagcgcgcgctgccgtaggcgatgcacgcgctcttgcacgctacgacgccgccgccggacgatgcgacgacgcggaggtccccggggcacacggcgtttacgtcgcccgcgcaagccgcggggcggcagtcgccgccgccgcccgagggcgccacgcgcaccggcacgttgaagccgtcgacgaggctgacgtcgtagaagtccggcctgccgctgcccggcgcggcgagcgtgacctcgacgagcgagaccggaggcgccggcccgcggccctggcacgcgacgtcgcccgtgccgcagtcggccgtggcgcaggagaagcgcccggtggcggggtcggccacgcagcccgtgcgcgcccacaacgtgccggaccatgtccccgacgacggcgcgtccatgctggacgtggcggacggcgccaggtagaagcccgaccgcgcgagcggcggcgagctggcgccgtggagcgcgcccacccacaccgcgtgcttgcaggcgttggtgaagatgaacgacgccgctccatccacgcctagcgctgaatcagttatggaacaaagaacttgatgtgtatccaatttgccacacagaccacaagtccagaaccgatgatgaattaatcagatttctcagcagagacgctgaaccagtttaagattaaaaaaatagcaccaaacagagaaacacacaaacaacgtgggaatgaaaaagaatgccaccgcacccgtcaagagaaaaagctgaagaatcaagagaatggccattctgttcctgctagctccattgccttcggcggagagctgaggaagaaggtgagctactgccatggccatggcggcacgcacaagaaacctcggtggatcgatgtcgatctcagatcgacgctggtatctgtctgtacgtgtatttatagcaagtaaaatcaagaagctagctaggcccagcatgtacggtggttgtagctttagtagatatttagatagaccttcacccggatagaatagaaggaagatgcgtggatgagagaaaaaggcaggcaggcagaggcagcacatgaagaaaacgtttaaaccttttcggcgaatttatgtcgttccctcacgcttgg

SEQ ID NO: 25726 - DNA, 4647 bp, Zea Mays
cccctttatatgaataatataaatgtcacataagtaaataaacaaataaatcaatcaatattactacgaagctgtcctcaccgccttctctctccctccgaatccaaacgcggacgcaaatgttgctccacgccggtccctcgttcctgctcgcaccacctccgcgctttgccgccgctccgtcgtcagcttcgccgaggcgatccaggacaccgcaatcctcgccgccgacgtcgcatttcgcgcgccccgctgatcccgtggcccaaagggtgcgtcccgtcgcgccgaggccccccatggcgacggcggaggagggcgccagctctgacgtcggcgtcgccgtcgccgagtccgcacaggggttcttgttggatgcgagggcttactgggtgacaaaatccttgattgcatggaatatcagtgatcagaaaacttctctcttcttatatgcaagcagaaatgctacaatgtgcatgtcgagtcaggatatgaaaggttatgattccaaagttgagctgcaaccagaaaatgatggacttccatccagtgtgacccagaaattcccttttatcagctcttatagagccttcagaattccgagctccgttgatgttgccaccttggtgaaatgtcaacttgctgttgcttcatttgatgctcatgggaacaggcaagatgttactgggttgcaactacctggagtattggatgacatgttcgcctacactggaccgcttggtactatttttagtgaagaagctgtgagtatgtacctatgggctcctacagcacaggatgtaagtgtgagcttctatgatggtccagctggccctttactggaaacagttcaactcaacgagttaaatggtgtttggagtgttactggtccaaggaactgggagaaccggtattatctatatgaagtcacagtatatcatcaaactacaggaaacattgagaaatgtttagccgctgatccttatgctagagggctttctgcaaatagcacacgaacttggttggttgatattaataatgaaacattaaagccacttgcctgggatggattggcggctgaaaagccaaggcttgattccttctctgacataagcatatatgaattgcacattcgtgatttcagtgcccatgatagcacagtggactgtcctttccgaggaggtttctgtgcatttacatttcaggattctgtaggcatagaacacctaaagaaactatctgatgccggtttgactcatgtccatttgttgccaagctttcaatttggtggtgttgatgacataaagagcaattggaaatgtgttggtaaagattcaactctttctgcatgttttaccagacaaatgtaaatctcttgcagtattgctcaagaatcaagatgatgagattgaactgtcaaaactccctccagggtcagatttgcaacaagctgcaattgtggctattcaggaagaggacccttataattgggggtataaccctgtggtttggggcgttccaaaaggaagctatgcaagtaacccagatggtccaagtcgtatcattgagtaccggctgatggtgcaggccttgaatcgcttaggtcttcgagttgtcatggatgttgtatacaatcatctatactcaagtggcccttttgccatcacttccgtgcttgacaagattgtacctggatactacctcagaagggactctaatggtcagactgagaacagcgcggctgtgaacaatacagcaagtgagcatttcatggttgatagattaatcgtggatgaccttctgaattgggcagtaaattacaaagttgacgggttcagatttgatctaatgggacatatcatgaaaaagacaatgtttcaacgatagaatccgtgatgctataaatggtggcagtccgtttgggaatccactgcaacaaggtttctctactggattgttcttagagccaaatggattttatcagggcaatgaaacagagacaaggctcacgcttgctacatacgctgaccatatacagattggattagctggcaatttgaaggactatgtagttatatctcatactggagaagctagaaaaggatctgaaattcgcaccttcgatggctcaccagttggctatgcttcatcccctatagaaacaataaactacgcctctgctcatgacaatgaaacactatttgatattattagtctaaagactccgatggacctctcaattgacgagcgatgcaggataaatcatttgtccacaagcatgattgcattatcccagggaataccattttttcatgctggtgatgagatactacgatctaagtcgcttgatcgagattcatatgactctggtgattggtttaacaagattgattttacctatgaaacaaacaattggggtgttgggcttccaccaagagaaaagaacgaagggagctggcctttgatgaagccaagattggagaacccgtcgttcaaacctgcaaaacatgacattattgctgccttagacaaatttattgatatcctcaagatcagatactcatcacctctctttcgcctaactacagcaagtgatattgtgcaaagggttcactttcacaacacagggccctccttggttccaggagttattgtcatgagcatcgaagatgcacgaaatgataggcatgatatggcccagatagatgaaacattctcttgtgtcgttacagtcttcaatgtatgtccgtacgaagtgtctatagaaatccctgatcttgcatcactgcggcttcagttgcatccagtgcaggtgaattcatcggatgcgttagccaggcagtctgcgtacgacaccgccacaggtcgattcaccgtgccgaaaaggacagcagcagtgttcgtggaacccaggtgctgatggatgcctttcgctagcgagcaagtgcattcggcatccaagtcgaagcaaacgaatgaaataagagaaggccatcgaataaaacgaagtatataaatagattgaataagacgttgcccaagttgccaaggcacgctttgccatatgtatgcgttgaaaaataaataaataaataaataaatgatgttatagaggtacaaaagcattggaacatttctttatagaggtgaaccaccctattttccagtttccatgtgtgaattgtgattagcatatgtatggaataataatataaattaattttatgcatttgtgtgttgtgtcgtggatgacaacatcaacatattgcttctacttgatctctctataattttttttgaagaaatacctagtctagatgtaatatcgtaattccctagctactatatgatatcagggcgttcattagttcgcagggcagaaggtgacgtcatagctggaaggtccggagcaggtgaaggtgctggtggcgtcgtcgtaggcgtagctgtaggccgacgggcatgcgctcttgaacacctgcgagtagttggtcgggccgcacatcgccggcgtgccgtactgcccggtgcagcagtagcgcgcgctgccgtaggcgatgcacgcgctcttgcacgctacgacgccgccgccggacgatgcgacgacgcggaggtccccggggcacacggcgtttacgtcgcccgcgcaagccgcggggcggcagtcgccgccgccgcccgagggcgccacgcgcaccggcacgttgaagccgtcgacgaggctgacgtcgtagaagtccggcctgccgctgcccggcgcggcgagcgtgacctcgacgagcgagaccggaggcgccggcccgcggccctggcacgcgacgtcgcccgtgccgcagtcggccgtggcgcaggagaagcgcccggtggcggggtcggccacgcagcccgtgcgcgcccacaacgtgccggaccatgtccccgacgacggcgcgtccatgctggacgtggcggacggcgccaggtagaagcccgaccgcgcgagcggcggcgagctggcgccgtggagcgcgcccacccacaccgcgtgcttgcaggcgttggtgaagatgaacgacgccgctccatccacgcctagcgctgaatcagttatggaacaaagaacttgatgtgtatccaatttgccacacagaccacaagtccagaaccgatgatgaattaatcagatttctcagcagagacgctgaaccagtttaagattaaaaaaatagcaccaaacagagaaacacacaaacaacgtgggaatgaaaaagaatgccaccgcacccgtcaagagaaaaagctgaagaatcaagagaatggccattctgttcctgctagctccattgccttcggcggagagctgaggaagaaggtgagctactgccatggccatggcggcacgcacaagaaacctcggtggatcgatgtcgatctcagatcgacgctggtatctgtctgtacgtgtatttatagcaagtaaaatcaagaagctagctaggcccagcatgtacggtggttgtagctttagtagatatttagatagaccttcacccggatagaatagaaggaagatgcgtggatgagagaaaaaggcaggcaggcagaggcagcacatgaagaaaacgtttaaaccttttcggcgaatttatgtcgttccctcacgcttgg

SEQ ID NO: 25727 - DNA, 4907 bp, Zea Mays
cccctttatatgaataatataaatgtcacataagtaaataaacaaataaatcaatcaatattactacgaagctgtcctcaccgccttctctctccctccgaatccaaacgcggacgcaaatgttgctccacgccggtccctcgttcctgctcgcaccacctccgcgctttgccgccgctccgtcgtcagcttcgccgaggcgatccaggacaccgcaatcctcgccgccgacgtcgcatttcgcgcgccccgctgatcccgtggcccaaagggtgcgtcccgtcgcgccgaggccccccatggcgacggcggaggagggcgccagctctgacgtcggcgtcgccgtcgccgagtccgcacaggggttcttgttggatgcgagggcttactgggtgacaaaatccttgattgcatggaatatcagtgatcagaaaacttctctcttcttatatgcaagcagaaatgctacaatgtgcatgtcgagtcaggatatgaaaggttatgattccaaagttgagctgcaaccagaaaatgatggacttccatccagtgtgacccagaaattcccttttatcagctcttatagagccttcagaattccgagctccgttgatgttgccaccttggtgaaatgtcaacttgctgttgcttcatttgatgctcatgggaacaggcaagatgttactgggttgcaactacctggagtattggatgacatgttcgcctacactggaccgcttggtactatttttagtgaagaagctgtgagtatgtacctatgggctcctacagcacaggatgtaagtgtgagcttctatgatggtccagctggccctttactggaaacagttcaactcaacgagttaaatggtgtttggagtgttactggtccaaggaactgggagaaccggtattatctatatgaagtcacagtatatcatcaaactacaggaaacattgagaaatgtttagccgctgatccttatgctagagggtgaacaactctacgagactgtaaatttggtgggatggatctttgcaggctaatatacagaattgaactctctgcttgctgtcaattttttattacagtgcccatgatagcacagtggactgtcctttccgaggaggtttctgtgcatttacatttcaggattctgtaggcatagaacacctaaagaaactatctgatgccggtttgactcatgtccatttgttgccaagctttcaatttggtggtgttgatgacataaagagcaattggaaatgtgttgatgagattgaactgtcaaaactccctccagggtcagatttgcaacaagctgcaattgtggctattcaggaagaggacccttataattgggggtataaccctgtggtttggggcgttccaaaaggaagctatgcaagtaacccagatggtccaagtcgtatcattgagtaccggctgatggtgcaggccttgaatcgcttaggtcttcgagttgtcatggatgttgtatacaatcatctatactcaagtggcccttttgccatcacttccgtgcttgacaagattgtacctggatactacctcagaagggactctaatggtcagactgagaacagcgcggctgtgaacaatacagcaagtgagcatttcatggttgatagattaatcgtggatgaccttctgaattgggcagtaaattacaaagttgacgggttcagatttgatctaatgggacatatcatgaaaaagacaatgattagagcaaaatcggctcttcaaagccttacaattgatgaacatggagtagatggttcaaagatatacttgtatggtgaaggatggaacttcggtgaagttgcggaaaatcaacgtgggataaatggatcccagctaaatatgagtggcactgggattggtagtttcaacgatagaatccgtgatgctataaatggtggcagtccgtttgggaatccactgcaacaaggtttctctactggattgttcttagagccaaatggattttatcagggcaatgaaacagagacaaggctcacgcttgctacatacgctgaccatatacagattggattagctggcaatttgaaggactatgtagttatatctcatactggagaagctagaaaaggatctgaaattcgcaccttcgatggctcaccagttggctatgcttcatcccctatagaaacaataaactacgcctctgctcatgacaatgaaacactatttgatattattagtctaaagactccgatggacctctcaattgacgagcgatgcaggataaatcatttgtccacaagcatgattgcattatcccagggaataccattttttcatgctggtgatgagatactacgatctaagtcgcttgatcgagattcatatgactctggtgattggtttaacaagtattactctatcctttggatcttgatgcaaacaccagttaccagctagcaacaactgaattgctttcaaggatgatagttttaagttaaacatttacaattgcttgctattatcataacttctcaatttttatcctatatgaaaaactgtttcaagttgaacaaacgcttcccaatcatgttagaatgtaaacagggtaaatgttctgttctgttgtttgaaggattgattttacctatgaaacaaacaattggggtgttgggcttccaccaagagaaaagaacgaagggagctggcctttgatgaagccaagattggagaacccgtcgttcaaacctgcaaaacatgacattattgctgccttagacaaatttattgatatcctcaagatcagatactcatcacctctctttcgcctaactacagcaagtgatattgtgcaaagggttcactttcacaacacagggccctccttggttccaggagttattgtcatgagcatcgaagatgcacgaaatgataggcatgatatggcccagatagatgaaacattctcttgtgtcgttacagtcttcaatgtatgtccgtacgaagtgtctatagaaatccctgatcttgcatcactgcggcttcagttgcatccagtgcaggtgaattcatcggatgcgttagccaggcagtctgcgtacgacaccgccacaggtcgattcaccgtgccgaaaaggacagcagcagtgttcgtggaacccaggtgctgatggatgcctttcgctagcgagcaagtgcattcggcatccaagtcgaagcaaacgaatgaaataagagaaggccatcgaataaaacgaagtatataaatagattgaataagacgttgcccaagttgccaaggcacgctttgccatatgtatgcgttgaaaaataaataaataaataaataaatgatgttatagaggtacaaaagcattggaacatttctttatagaggtgaaccaccctattttccagtttccatgtgtgaattgtgattagcatatgtatggaataataatataaattaattttatgcatttgtgtgttgtgtcgtggatgacaacatcaacatattgcttctacttgatctctctataattttttttgaagaaatacctagtctagatgtaatatcgtaattccctagctactatatgatatcagggcgttcattagttcgcagggcagaaggtgacgtcatagctggaaggtccggagcaggtgaaggtgctggtggcgtcgtcgtaggcgtagctgtaggccgacgggcatgcgctcttgaacacctgcgagtagttggtcgggccgcacatcgccggcgtgccgtactgcccggtgcagcagtagcgcgcgctgccgtaggcgatgcacgcgctcttgcacgctacgacgccgccgccggacgatgcgacgacgcggaggtccccggggcacacggcgtttacgtcgcccgcgcaagccgcggggcggcagtcgccgccgccgcccgagggcgccacgcgcaccggcacgttgaagccgtcgacgaggctgacgtcgtagaagtccggcctgccgctgcccggcgcggcgagcgtgacctcgacgagcgagaccggaggcgccggcccgcggccctggcacgcgacgtcgcccgtgccgcagtcggccgtggcgcaggagaagcgcccggtggcggggtcggccacgcagcccgtgcgcgcccacaacgtgccggaccatgtccccgacgacggcgcgtccatgctggacgtggcggacggcgccaggtagaagcccgaccgcgcgagcggcggcgagctggcgccgtggagcgcgcccacccacaccgcgtgcttgcaggcgttggtgaagatgaacgacgccgctccatccacgcctagcgctgaatcagttatggaacaaagaacttgatgtgtatccaatttgccacacagaccacaagtccagaaccgatgatgaattaatcagatttctcagcagagacgctgaaccagtttaagattaaaaaaatagcaccaaacagagaaacacacaaacaacgtgggaatgaaaaagaatgccaccgcacccgtcaagagaaaaagctgaagaatcaagagaatggccattctgttcctgctagctccattgccttcggcggagagctgaggaagaaggtgagctactgccatggccatggcggcacgcacaagaaacctcggtggatcgatgtcgatctcagatcgacgctggtatctgtctgtacgtgtatttatagcaagtaaaatcaagaagctagctaggcccagcatgtacggtggttgtagctttagtagatatttagatagaccttcacccggatagaatagaaggaagatgcgtggatgagagaaaaaggcaggcaggcagaggcagcacatgaagaaaacgtttaaaccttttcggcgaatttatgtcgttccctcacgcttgg

SEQ ID NO: 25728 - DNA, 4835 bp, Zea Mays
ctcactttctcttcctgagaatctcccctttatatgaataatataaatgtcacataagtaaataaacaaataaatcaatcaatattactacgaagctgtcctcaccgccttctctctccctccgaatccaaacgcggacgcaaatgttgctccacgccggtccctcgttcctgctcgcaccacctccgcgctttgccgccgctccgtcgtcagcttcgccgaggcgatccaggacaccgcaatcctcgccgccgacgtcgcatttcgcgcgccccgctgatcccgtggcccaaagggtgcgtcccgtcgcgccgaggccccccatggcgacggcggaggagggcgccagctctgacgtcggcgtcgccgtcgccgagtccgcacaggggttcttgttggatgcgagggcttactgggtgacaaaatccttgattgcatggaatatcagtgatcagaaaacttctctcttcttatatgcaagcagaaatgctacaatgtgcatgtcgagtcaggatatgaaaggttatgattccaaagttgagctgcaaccagaaaatgatggacttccatccagtgtgacccagaaattcccttttatcagctcttatagagccttcagaattccgagctccgttgatgttgccaccttggtgaaatgtcaacttgctgttgcttcatttgatgctcatgggaacaggcaagatgttactgggttgcaactacctggagtattggatgacatgttcgcctacactggaccgcttggtactatttttagtgaagaagctgtgagtatgtacctatgggctcctacagcacaggatgtaagtgtgagcttctatgatggtccagctggccctttactggaaacagttcaactcaacgagttaaatggtgtttggagtgttactggtccaaggaactgggagaaccggtattatctatatgaagtcacagtatatcatcaaactacaggaaacattgagaaatgtttagccgctgatccttatgctagagggctttctgcaaatagcacacgaacttggttggttgatattaataatgaaacattaaagccacttgcctgggatggattggcggctgaaaagccaaggcttgattccttctctgacataagcatatatgaattgcacattcgtgatttcagtgcccatgatagcacagtggactgtcctttccgaggaggtttctgtgcatttacatttcaggattctgtaggcatagaacacctaaagaaactatctgatgccggtttgactcatgtccatttgttgccaagctttcaatttggtggtgttgatgacataaagagcaattggaaatgtgttggtaaagattcaactctttctgcatgttttaccagacaaatgtaaatctcttgcagtattgctcaagaatcaagatgatgagattgaactgtcaaaactccctccagggtcagatttgcaacaagctgcaattgtggctattcaggaagaggacccttataattgggggtataaccctgtggtttggggcgttccaaaaggaagctatgcaagtaacccagatggtccaagtcgtatcattgagtaccggctgatggtgcaggccttgaatcgcttaggtcttcgagttgtcatggatgttgtatacaatcatctatactcaagtggcccttttgccatcacttccgtgcttgacaagattgtacctggatactacctcagaagggactctaatggtcagactgagaacagcgcggctgtgaacaatacagcaagtgagcatttcatggttgatagattaatcgtggatgaccttctgaattgggcagtaaattacaaagttgacgggttcagatttgatctaatgggacatatcatgaaaaagacaatgattagagcaaaatcggctcttcaaagccttacaattgatgaacatggagtagatggttcaaagatatacttgtatggtgaaggatggaacttcggtgaagttgcggaaaatcaacgtgggataaatggatcccagctaaatatgagtggcactgggattggtagtttcaacgatagaatccgtgatgctataaatggtggcagtccgtttgggaatccactgcaacaaggtttctctactggattgttcttagagccaaatggattttatcagggcaatgaaacagagacaaggctcacgcttgctacatacgctgaccatatacagattggattagctggcaatttgaaggactatgtagttatatctcatactggagaagctagaaaaggatctgaaattcgcaccttcgatggctcaccagttggctatgcttcatcccctatagaaacaataaactacgcctctgctcatgacaatgaaacactatttgatattattagtctaaagactccgatggacctctcaattgacgagcgatgcaggataaatcatttgtccacaagcatgattgcattatcccagggaataccattttttcatgctggtgatgagatactacgatctaagtcgcttgatcgagattcatatgactctggtgattggtttaacaagattgattttacctatgaaacaaacaattggggtgttgggcttccaccaagagaaaagaacgaagggagctggcctttgatgaagccaagattggagaacccgtcgttcaaacctgcaaaacatgacattattgctgccttagacaaatttattgatatcctcaagatcagatactcatcacctctctttcgcctaactacagcaagtgatattgtgcaaagggttcactttcacaacacagggccctccttggttccaggagttattgtcatgagcatcgaagatgcacgaaatgataggcatgatatggcccagatagatgaaacattctcttgtgtcgttacagtcttcaatgtatgtccgtacgaagtgtctatagaaatccctgatcttgcatcactgcggcttcagttgcatccagtgcaggtgaattcatcggatgcgttagccaggcagtctgcgtacgacaccgccacaggtcgattcaccgtgccgaaaaggacagcagcagtgttcgtggaacccaggtgctgatggatgcctttcgctagcgagcaagtgcattcggcatccaagtcgaagcaaacgaatgaaataagagaaggccatcgaataaaacgaagtatataaatagattgaataagacgttgcccaagttgccaaggcacgctttgccatatgtatgcgttgaaaaataaataaataaataaataaatgatgttatagaggtacaaaagcattggaacatttctttatagaggtgaaccaccctattttccagtttccatgtgtgaattgtgattagcatatgtatggaataataatataaattaattttatgcatttgtgtgttgtgtcgtggatgacaacatcaacatattgcttctacttgatctctctataattttttttgaagaaatacctagtctagatgtaatatcgtaattccctagctactatatgatatcagggcgttcattagttcgcagggcagaaggtgacgtcatagctggaaggtccggagcaggtgaaggtgctggtggcgtcgtcgtaggcgtagctgtaggccgacgggcatgcgctcttgaacacctgcgagtagttggtcgggccgcacatcgccggcgtgccgtactgcccggtgcagcagtagcgcgcgctgccgtaggcgatgcacgcgctcttgcacgctacgacgccgccgccggacgatgcgacgacgcggaggtccccggggcacacggcgtttacgtcgcccgcgcaagccgcggggcggcagtcgccgccgccgcccgagggcgccacgcgcaccggcacgttgaagccgtcgacgaggctgacgtcgtagaagtccggcctgccgctgcccggcgcggcgagcgtgacctcgacgagcgagaccggaggcgccggcccgcggccctggcacgcgacgtcgcccgtgccgcagtcggccgtggcgcaggagaagcgcccggtggcggggtcggccacgcagcccgtgcgcgcccacaacgtgccggaccatgtccccgacgacggcgcgtccatgctggacgtggcggacggcgccaggtagaagcccgaccgcgcgagcggcggcgagctggcgccgtggagcgcgcccacccacaccgcgtgcttgcaggcgttggtgaagatgaacgacgccgctccatccacgcctagcgctgaatcagttatggaacaaagaacttgatgtgtatccaatttgccacacagaccacaagtccagaaccgatgatgaattaatcagatttctcagcagagacgctgaaccagtttaagattaaaaaaatagcaccaaacagagaaacacacaaacaacgtgggaatgaaaaagaatgccaccgcacccgtcaagagaaaaagctgaagaatcaagagaatggccattctgttcctgctagctccattgccttcggcggagagctgaggaagaaggtgagctactgccatggccatggcggcacgcacaagaaacctcggtggatcgatgtcgatctcagatcgacgctggtatctgtctgtacgtgtatttatagcaagtaaaatcaagaagctagctaggcccagcatgtacggtggttgtagctttagtagatatttagatagaccttcacccggatagaatagaaggaagatgcgtggatgagagaaaaaggcaggcaggcagaggcagcacatgaagaaaacgtttaaaccttttcggcgaatttatgtcgttccctcacgcttgg

SEQ ID NO: 25729 - DNA, 4766 bp, Zea Mays
ttctcactttctcttcctgagaatctcccctttatatgaataatataaatgtcacataagtaaataaacaaataaatcaatcaatattactacgaagctgtcctcaccgccttctctctccctccgaatccaaacgcggacgcaaatgttgctccacgccggtccctcgttcctgctcgcaccacctccgcgctttgccgccgctccgtcgtcagcttcgccgaggcgatccaggacaccgcaatcctcgccgccgacgtcgcatttcgcgcgccccgctgatcccgtggcccaaagggtgcgtcccgtcgcgccgaggccccccatggcgacggcggaggagggcgccagctctgacgtcggcgtcgccgtcgccgagtccgcacaggggttcttgttggatgcgagggcttactgggtgacaaaatccttgattgcatggaatatcagtgatcagaaaacttctctcttcttatatgcaagcagaaatgctacaatgtgcatgtcgagtcaggatatgaaaggttatgattccaaagttgagctgcaaccagaaaatgatggacttccatccagtgtgacccagaaattcccttttatcagctcttatagagccttcagaattccgagctccgttgatgttgccaccttggtgaaatgtcaacttgctgttgcttcatttgatgctcatgggaacaggcaagatgttactgggttgcaactacctggagtattggatgacatgttcgcctacactggaccgcttggtactatttttagtgaagaagctgtgagtatgtacctatgggctcctacagcacaggatgtaagtgtgagcttctatgatggtccagctggccctttactggaaacagttcaactcaacgagttaaatggtgtttggagtgttactggtccaaggaactgggagaaccggtattatctatatgaagtcacagtatatcatcaaactacaggaaacattgagaaatgtttagccgctgatccttatgctagagggctttctgcaaatagcacacgaacttggttggttgatattaataatgaaacattaaagccacttgcctgggatggattggcggctgaaaagccaaggcttgattccttctctgacataagcatatatgaattgcacattcgtgatttcagtgcccatgatagcacagtggactgtcctttccgaggaggtttctgtgcatttacatttcaggattctgtaggcatagaacacctaaagaaactatctgatgccggtttgactcatgtccatttgttgccaagctttcaatttggtggtgttgatgacataaagagcaattggaaatgtgttggtaaagattcaactctttctgcatgttttaccagacaaatgtaaatctcttgcagtattgctcaagaatcaagatgatgagattgaactgtcaaaactccctccagggtcagatttgcaacaagctgcaattgtggctattcaggaagaggacccttataattgggggtataaccctgtggtttggggcgttccaaaaggaagctatgcaagtaacccagatggtccaagtcgtatcattgagtaccggctgatggtgcaggccttgaatcgcttaggtcttcgagttgtcatggatgttgtatacaatcatctatactcaagtggcccttttgccatcacttccgtgcttgacaagattgtacctggatactacctcagaagggactctaatggtcagactgagaacagcgcggctgtgaacaatacagcaagtgagcatttcatggttgatagattaatcgtggatgaccttctgaattgggcagtaaattacaaagttgacgggttcagatttgatctaatgggacatatcatgaaaaagacaatggtatggtgaaggatggaacttcggtgaagttgcggaaaatcaacgtgggataaatggatcccagctaaatatgagtggcactgggattggtagtttcaacgatagaatccgtgatgctataaatggtggcagtccgtttgggaatccactgcaacaaggtttctctactggattgttcttagagccaaatggattttatcagggcaatgaaacagagacaaggctcacgcttgctacatacgctgaccatatacagattggattagctggcaatttgaaggactatgtagttatatctcatactggagaagctagaaaaggatctgaaattcgcaccttcgatggctcaccagttggctatgcttcatcccctatagaaacaataaactacgcctctgctcatgacaatgaaacactatttgatattattagtctaaagactccgatggacctctcaattgacgagcgatgcaggataaatcatttgtccacaagcatgattgcattatcccagggaataccattttttcatgctggtgatgagatactacgatctaagtcgcttgatcgagattcatatgactctggtgattggtttaacaagattgattttacctatgaaacaaacaattggggtgttgggcttccaccaagagaaaagaacgaagggagctggcctttgatgaagccaagattggagaacccgtcgttcaaacctgcaaaacatgacattattgctgccttagacaaatttattgatatcctcaagatcagatactcatcacctctctttcgcctaactacagcaagtgatattgtgcaaagggttcactttcacaacacagggccctccttggttccaggagttattgtcatgagcatcgaagatgcacgaaatgataggcatgatatggcccagatagatgaaacattctcttgtgtcgttacagtcttcaatgtatgtccgtacgaagtgtctatagaaatccctgatcttgcatcactgcggcttcagttgcatccagtgcaggtgaattcatcggatgcgttagccaggcagtctgcgtacgacaccgccacaggtcgattcaccgtgccgaaaaggacagcagcagtgttcgtggaacccaggtgctgatggatgcctttcgctagcgagcaagtgcattcggcatccaagtcgaagcaaacgaatgaaataagagaaggccatcgaataaaacgaagtatataaatagattgaataagacgttgcccaagttgccaaggcacgctttgccatatgtatgcgttgaaaaataaataaataaataaataaatgatgttatagaggtacaaaagcattggaacatttctttatagaggtgaaccaccctattttccagtttccatgtgtgaattgtgattagcatatgtatggaataataatataaattaattttatgcatttgtgtgttgtgtcgtggatgacaacatcaacatattgcttctacttgatctctctataattttttttgaagaaatacctagtctagatgtaatatcgtaattccctagctactatatgatatcagggcgttcattagttcgcagggcagaaggtgacgtcatagctggaaggtccggagcaggtgaaggtgctggtggcgtcgtcgtaggcgtagctgtaggccgacgggcatgcgctcttgaacacctgcgagtagttggtcgggccgcacatcgccggcgtgccgtactgcccggtgcagcagtagcgcgcgctgccgtaggcgatgcacgcgctcttgcacgctacgacgccgccgccggacgatgcgacgacgcggaggtccccggggcacacggcgtttacgtcgcccgcgcaagccgcggggcggcagtcgccgccgccgcccgagggcgccacgcgcaccggcacgttgaagccgtcgacgaggctgacgtcgtagaagtccggcctgccgctgcccggcgcggcgagcgtgacctcgacgagcgagaccggaggcgccggcccgcggccctggcacgcgacgtcgcccgtgccgcagtcggccgtggcgcaggagaagcgcccggtggcggggtcggccacgcagcccgtgcgcgcccacaacgtgccggaccatgtccccgacgacggcgcgtccatgctggacgtggcggacggcgccaggtagaagcccgaccgcgcgagcggcggcgagctggcgccgtggagcgcgcccacccacaccgcgtgcttgcaggcgttggtgaagatgaacgacgccgctccatccacgcctagcgctgaatcagttatggaacaaagaacttgatgtgtatccaatttgccacacagaccacaagtccagaaccgatgatgaattaatcagatttctcagcagagacgctgaaccagtttaagattaaaaaaatagcaccaaacagagaaacacacaaacaacgtgggaatgaaaaagaatgccaccgcacccgtcaagagaaaaagctgaagaatcaagagaatggccattctgttcctgctagctccattgccttcggcggagagctgaggaagaaggtgagctactgccatggccatggcggcacgcacaagaaacctcggtggatcgatgtcgatctcagatcgacgctggtatctgtctgtacgtgtatttatagcaagtaaaatcaagaagctagctaggcccagcatgtacggtggttgtagctttagtagatatttagatagaccttcacccggatagaatagaaggaagatgcgtggatgagagaaaaaggcaggcaggcagaggcagcacatgaagaaaacgtttaaaccttttcggcgaatttatgtcgttccctcacgcttgg

SEQ ID NO: 25730 - DNA, 5419 bp, Zea Mays
caaacaagcactcttctagttcttccgtttctcactttctcttcctgagaatctcccctttatatgaataatataaatgtcacataagtaaataaacaaataaatcaatcaatattactacgaagctgtcctcaccgccttctctctccctccgaatccaaacgcggacgcaaatgttgctccacgccggtccctcgttcctgctcgcaccacctccgcgctttgccgccgctccgtcgtcagcttcgccgaggcgatccaggacaccgcaatcctcgccgccgacgtcgcatttcgcgcgccccgctgatcccgtggcccaaagggtgcgtcccgtcgcgccgaggccccccatggcgacggcggaggagggcgccagctctgacgtcggcgtcgccgtcgccgagtccgcacaggggttcttgttggatgcgagggcttactgggtgacaaaatccttgattgcatggaatatcagtgatcagaaaacttctctcttcttatatgcaagcagaaatgctacaatgtgcatgtcgagtcaggatatgaaaggttatgattccaaagttgagctgcaaccagaaaatgatggacttccatccagtgtgacccagaaattcccttttatcagctcttatagagccttcagaattccgagctccgttgatgttgccaccttggtgaaatgtcaacttgctgttgcttcatttgatggtactttttaatctggactgccttttccgtaaataccttcaccaaaactttcatcaggacaatatgtattattacaagcagctcatgggaacaggcaagatgttactgggttgcaactacctggagtattggatgacatgttcgcctacactggaccgcttggtactatttttagtgaagaagctgtgagtatgtacctatgggctcctacagcacaggatgtaagtgtgagcttctatgatggtccagctggccctttactggaaacagttcaactcaacgagttaaatggtgtttggagtgttactggtccaaggaactgggagaaccggtattatctatatgaagtcacagtatatcatcaaactacaggaaacattgagaaatgtttagccgctgatccttatgctagagggctttctgcaaatagcacacgaacttggttggttgatattaataatgaaacattaaagccacttgcctgggatggattggcggctgaaaagccaaggcttgattccttctctgacataagcatatatgaattgcacattcgtgatttcagtgcccatgatagcacagtggactgtcctttccgaggaggtttctgtgcatttacatttcaggattctgtaggcatagaacacctaaagaaactatctgatgccggtttgactcatgtccatttgttgccaagctttcaatttggtggtgttgatgacataaagagcaattggaaatgtgttgatgagattgaactgtcaaaactccctccagggtcagatttgcaacaagctgcaattgtggctattcaggaagaggacccttataattgggggtataaccctgtggtttggggcgttccaaaaggaagctatgcaagtaacccagatggtccaagtcgtatcattgagtaccggctgatggtgcaggccttgaatcgcttaggtcttcgagttgtcatggatgttgtatacaatcatctatactcaagtggcccttttgccatcacttccgtgcttgacaagattgtacctggatactacctcagaagggactctaatggtcagactgagaacagcgcggctgtgaacaatacagcaagtgagcatttcatggttgatagattaatcgtggatgaccttctgaattgggcagtaaattacaaagttgacgggttcagatttgatctaatgggacatatcatgaaaaagacaatgattagagcaaaatcggctcttcaaagccttacaattgatgaacatggagtagatggttcaaagatatacttgtatggtgaaggatggaacttcggtgaagttgcggaaaatcaacgtgggataaatggatcccagctaaatatgagtggcactgggattggtagtttcaacgatagaatccgtgatgctataaatggtggcagtccgtttgggaatccactgcaacaaggtttctctactggattgttcttagagccaaatggattttatcagggcaatgaaacagagacaaggctcacgcttgctacatacgctgaccatatacagattggattagctggcaatttgaaggactatgtagttatatctcatactggagaagctagaaaaggatctgaaattcgcaccttcgatggctcaccagttggctatgcttcatcccctatagaaacaataaactacgcctctgctcatgacaatgaaacactatttgatattattagtctaaagactccgatggacctctcaattgacgagcgatgcaggataaatcatttgtccacaagcatgattgcattatcccagggaataccattttttcatgctggtgatgagatactacgatctaagtcgcttgatcgagattcatatgactctggtgattggtttaacaagattgattttacctatgaaacaaacaattggggtgttgggcttccaccaagagaaaagaacgaagggagctggcctttgatgaagccaagattggagaacccgtcgttcaaacctgcaaaacatgacattattgctgccttagacaaatttattgatatcctcaagatcagatactcatcacctctctttcgcctaactacagcaagtgatattgtggtacatggattctttgtgaacctcaccagactgttgtactgctatcatatagatgagtagcttttccttgctagatgataaaccacctttctgcaacctttgatctatgtatcaagtaaaatttacatatcccatggagctatactttgcaatgggacacaaatgtatgccaattgccaacttacaccctgcagttcgaaatcaattattgcctgaaaattagagtaaacaataatcatcctgtaacatttgtttttttcagatccacagcataggtacaacaaatgaactagtaaaaactaactgccgtgccctaaaaaaggctgctgtgtcgactttatctgtttttggtggttctgtcgctagctgtagtcatgagtcctgttcatgtaatgtgttttgtgtctttagtttgtgtatttgttgttttggatggcatgtttcctgttaatataatgagctgtgttcgaggggaaaagaattagcatttgttcatttgatatctggctctttatcccatactgattgtcatgagctgtcgtatttcagcaaagggttcactttcacaacacagggccctccttggttccaggagttattgtcatgagcatcgaagatgcacgaaatgataggcatgatatggcccagatagatgaaacattctcttgtgtcgttacagtcttcaatgtatgtccgtacgaagtgtctatagaaatccctgatcttgcatcactgcggcttcagttgcatccagtgcaggtgaattcatcggatgcgttagccaggcagtctgcgtacgacaccgccacaggtcgattcaccgtgccgaaaaggacagcagcagtgttcgtggaacccaggtgctgatggatgcctttcgctagcgagcaagtgcattcggcatccaagtcgaagcaaacgaatgaaataagagaaggccatcgaataaaacgaagtatataaatagattgaataagacgttgcccaagttgccaaggcacgctttgccatatgtatgcgttgaaaaataaataaataaataaataaatgatgttatagaggtacaaaagcattggaacatttctttatagaggtgaaccaccctattttccagtttccatgtgtgaattgtgattagcatatgtatggaataataatataaattaattttatgcatttgtgtgttgtgtcgtggatgacaacatcaacatattgcttctacttgatctctctataattttttttgaagaaatacctagtctagatgtaatatcgtaattccctagctactatatgatatcagggcgttcattagttcgcagggcagaaggtgacgtcatagctggaaggtccggagcaggtgaaggtgctggtggcgtcgtcgtaggcgtagctgtaggccgacgggcatgcgctcttgaacacctgcgagtagttggtcgggccgcacatcgccggcgtgccgtactgcccggtgcagcagtagcgcgcgctgccgtaggcgatgcacgcgctcttgcacgctacgacgccgccgccggacgatgcgacgacgcggaggtccccggggcacacggcgtttacgtcgcccgcgcaagccgcggggcggcagtcgccgccgccgcccgagggcgccacgcgcaccggcacgttgaagccgtcgacgaggctgacgtcgtagaagtccggcctgccgctgcccggcgcggcgagcgtgacctcgacgagcgagaccggaggcgccggcccgcggccctggcacgcgacgtcgcccgtgccgcagtcggccgtggcgcaggagaagcgcccggtggcggggtcggccacgcagcccgtgcgcgcccacaacgtgccggaccatgtccccgacgacggcgcgtccatgctggacgtggcggacggcgccaggtagaagcccgaccgcgcgagcggcggcgagctggcgccgtggagcgcgcccacccacaccgcgtgcttgcaggcgttggtgaagatgaacgacgccgctccatccacgcctagcgctgaatcagttatggaacaaagaacttgatgtgtatccaatttgccacacagaccacaagtccagaaccgatgatgaattaatcagatttctcagcagagacgctgaaccagtttaagattaaaaaaatagcaccaaacagagaaacacacaaacaacgtgggaatgaaaaagaatgccaccgcacccgtcaagagaaaaagctgaagaatcaagagaatggccattctgttcctgctagctccattgccttcggcggagagctgaggaagaaggtgagctactgccatggccatggcggcacgcacaagaaacctcggtggatcgatgtcgatctcagatcgacgctggtatctgtctgtacgtgtatttatagcaagtaaaatcaagaagctagctaggcccagcatgtacggtggttgtagctttagtagatatttagatagaccttcacccggatagaatagaaggaagatgcgtggatgagagaaaaaggcaggcaggcagaggcagcacatgaagaaaacgtttaaaccttttcggcgaatttatgtcgttccctcacgcttgg

SEQ ID NO: 25731 - DNA, 4833 bp, Zea Mays
gtgtatagaaatgagaagataaagaaaagagataagatggccacggtagctattagccaaacaagcactcttctagttcttccgtttctcactttctcttcctgagaatctcccctttatatgaataatataaatgtcacataagtaaataaacaaataaatcaatcaatattactacgaagctgtcctcaccgccttctctctccctccgaatccaaacgcggacgcaaatgttgctccacgccggtccctcgttcctgctcgcaccacctccgcgctttgccgccgctccgtcgtcagcttcgccgaggcgatccaggacaccgcaatcctcgccgccgacgtcgcatttcgcgcgccccgctgatcccgtggcccaaagggtgcgtcccgtcgcgccgaggccccccatggcgacggcggaggagggcgccagctctgacgtcggcgtcgccgtcgccgagtccgcacaggggttcttgttggatgcgagggcttactgggtgacaaaatccttgattgcatggaatatcagtgatcagaaaacttctctcttcttatatgcaagcagaaatgctacaatgtgcatgtcgagtcaggatatgaaaggttatgattccaaagttgagctgcaaccagaaaatgatggacttccatccagtgtgacccagaaattcccttttatcagctcttatagagccttcagaattccgagctccgttgatgttgccaccttggtgaaatgtcaacttgctgttgcttcatttgatggcaagatgttactgggttgcaactacctggagtattggatgacatgttcgcctacactggaccgcttggtactatttttagtgaagaagctgtgagtatgtacctatgggctcctacagcacaggatgtaagtgtgagcttctatgatggtccagctggccctttactggaaacagttcaactcaacgagttaaatggtgtttggagtgttactggtccaaggaactgggagaaccggtattatctatatgaagtcacagtatatcatcaaactacaggaaacattgagaaatgtttagccgctgatccttatgctagagggctttctgcaaatagcacacgaacttggttggttgatattaataatgaaacattaaagccacttgcctgggatggattggcggctgaaaagccaaggcttgattccttctctgacataagcatatatgaattgcacattcgtgatttcagtgcccatgatagcacagtggactgtcctttccgaggaggtttctgtgcatttacatttcaggattctgtaggcatagaacacctaaagaaactatctgatgccggtttgactcatgtccatttgttgccaagctttcaatttggtggtgttgatgacataaagagcaattggaaatgtgttgatgagattgaactgtcaaaactccctccagggtcagatttgcaacaagctgcaattgtggctattcaggaagaggacccttataattgggggtataaccctgtggtttggggcgttccaaaaggaagctatgcaagtaacccagatggtccaagtcgtatcattgagtaccggctgatggtgcaggccttgaatcgcttaggtcttcgagttgtcatggatgttgtatacaatcatctatactcaagtggcccttttgccatcacttccgtgcttgacaagattgtacctggatactacctcagaagggactctaatggtcagactgagaacagcgcggctgtgaacaatacagcaagtgagcatttcatggttgatagattaatcgtggatgaccttctgaattgggcagtaaattacaaagttgacgggttcagatttgatctaatgggacatatcatgaaaaagacaatgattagagcaaaatcggctcttcaaagccttacaattgatgaacatggagtagatggttcaaagatatacttgtatggtgaaggatggaacttcggtgaagttgcggaaaatcaacgtgggataaatggatcccagctaaatatgagtggcactgggattggtagtttcaacgatagaatccgtgatgctataaatggtggcagtccgtttgggaatccactgcaacaaggtttctctactggattgttcttagagccaaatggattttatcagggcaatgaaacagagacaaggctcacgcttgctacatacgctgaccatatacagattggattagctggcaatttgaaggactatgtagttatatctcatactggagaagctagaaaaggatctgaaattcgcaccttcgatggctcaccagttggctatgcttcatcccctatagaaacaataaactacgcctctgctcatgacaatgaaacactatttgatattattagtctaaagactccgatggacctctcaattgacgagcgatgcaggataaatcatttgtccacaagcatgattgcattatcccagggaataccattttttcatgctggtgatgagatactacgatctaagtcgcttgatcgagattcatatgactctggtgattggtttaacaagattgattttacctatgaaacaaacaattggggtgttgggcttccaccaagagaaaagaacgaagggagctggcctttgatgaagccaagattggagaacccgtcgttcaaacctgcaaaacatgacattattgctgccttagacaaatttattgatatcctcaagatcagatactcatcacctctctttcgcctaactacagcaagtgatattgtgcaaagggttcactttcacaacacagggccctccttggttccaggagttattgtcatgagcatcgaagatgcacgaaatgataggcatgatatggcccagatagatgaaacattctcttgtgtcgttacagtcttcaatgtatgtccgtacgaagtgtctatagaaatccctgatcttgcatcactgcggcttcagttgcatccagtgcaggtgaattcatcggatgcgttagccaggcagtctgcgtacgacaccgccacaggtcgattcaccgtgccgaaaaggacagcagcagtgttcgtggaacccaggtgctgatggatgcctttcgctagcgagcaagtgcattcggcatccaagtcgaagcaaacgaatgaaataagagaaggccatcgaataaaacgaagtatataaatagattgaataagacgttgcccaagttgccaaggcacgctttgccatatgtatgcgttgaaaaataaataaataaataaataaatgatgttatagaggtacaaaagcattggaacatttctttatagaggtgaaccaccctattttccagtttccatgtgtgaattgtgattagcatatgtatggaataataatataaattaattttatgcatttgtgtgttgtgtcgtggatgacaacatcaacatattgcttctacttgatctctctataattttttttgaagaaatacctagtctagatgtaatatcgtaattccctagctactatatgatatcagggcgttcattagttcgcagggcagaaggtgacgtcatagctggaaggtccggagcaggtgaaggtgctggtggcgtcgtcgtaggcgtagctgtaggccgacgggcatgcgctcttgaacacctgcgagtagttggtcgggccgcacatcgccggcgtgccgtactgcccggtgcagcagtagcgcgcgctgccgtaggcgatgcacgcgctcttgcacgctacgacgccgccgccggacgatgcgacgacgcggaggtccccggggcacacggcgtttacgtcgcccgcgcaagccgcggggcggcagtcgccgccgccgcccgagggcgccacgcgcaccggcacgttgaagccgtcgacgaggctgacgtcgtagaagtccggcctgccgctgcccggcgcggcgagcgtgacctcgacgagcgagaccggaggcgccggcccgcggccctggcacgcgacgtcgcccgtgccgcagtcggccgtggcgcaggagaagcgcccggtggcggggtcggccacgcagcccgtgcgcgcccacaacgtgccggaccatgtccccgacgacggcgcgtccatgctggacgtggcggacggcgccaggtagaagcccgaccgcgcgagcggcggcgagctggcgccgtggagcgcgcccacccacaccgcgtgcttgcaggcgttggtgaagatgaacgacgccgctccatccacgcctagcgctgaatcagttatggaacaaagaacttgatgtgtatccaatttgccacacagaccacaagtccagaaccgatgatgaattaatcagatttctcagcagagacgctgaaccagtttaagattaaaaaaatagcaccaaacagagaaacacacaaacaacgtgggaatgaaaaagaatgccaccgcacccgtcaagagaaaaagctgaagaatcaagagaatggccattctgttcctgctagctccattgccttcggcggagagctgaggaagaaggtgagctactgccatggccatggcggcacgcacaagaaacctcggtggatcgatgtcgatctcagatcgacgctggtatctgtctgtacgtgtatttatagcaagtaaaatcaagaagctagctaggcccagcatgtacggtggttgtagctttagtagatatttagatagaccttcacccggatagaatagaaggaagatgcgtggatgagagaaaaaggcaggcaggcagaggcagcacatgaagaaaacgtttaaaccttttcggcgaatttatgtcgttccctcacgcttgg

SEQ ID NO: 25732 - DNA, 2066 bp, Zea Mays
atgttgctccacgccggtccctcgttcctgctcgcaccacctccgcgctttgccgccgctccgtcgtcagcttcgccgaggcgatccaggacaccgcaatcctcgccgccgacgtcgcatttcgcgcgccccgctgatcccgtggcccaaagggtgcgtcccgtcgcgccgaggccccccatggcgacggcggaggagggcgccagctctgacgtcggcgtcgccgtcgccgagtccgcacaggggttcttgttggatgcgagggcttactgggtgacaaaatccttgattgcatggaatatcagtgatcagaaaacttctctcttcttatatgcaagcagaaatgctacaatgtgcatgtcgagtcaggatatgaaaggttatgattccaaagttgagctgcaaccagaaaatgatggacttccatccagtgtgacccagaaattcccttttatcagctcttatagagccttcagaattccgagctccgttgatgttgccaccttggtgaaatgtcaacttgctgttgcttcatttgatgctcatgggaacaggcaagatgttactgggttgcaactacctggagtattggatgacatgttcgcctacactggaccgcttggtactatttttagtgaagaagctgtgagtatgtacctatgggctcctacagcacaggatgtaagtgtgagcttctatgatggtccagctggccctttactggaaacagttcaactcaacgagttaaatggtgtttggagtgttactggtccaaggaactgggagaaccggtattatctatatgaagtcacagtatatcatcaaactacaggaaacattgagaaatgtttagccgctgatccttatgctagagggctttctgcaaatagcacacgaacttggttggttgatattaataatgaaacattaaagccacttgcctgggatggattggcggctgaaaagccaaggcttgattccttctctgacataagcatatatgaattgcacattcgtgatttcagtgcccatgatagcacagtggactgtcctttccgaggaggtttctgtgcatttacatttcaggattctgtaggcatagaacacctaaagaaactatctgatgccggtttgactcatgtccatttgttgccaagctttcaatttggtggtgttgatgacataaagagcaattggaaatgtgttgatgagattgaactgtcaaaactccctccagggtcagatttgcaacaagctgcaattgtggctattcaggaagaggacccttataattgggggtataaccctgtggtttggggcgttccaaaaggaagctatgcaagtaacccagatggtccaagtcgtatcattgagtaccggctgatggtgcaggccttgaatcgcttaggtcttcgagttgtcatggatgttgtatacaatcatctatactcaagtggcccttttgccatcacttccgtgcttgacaagattgtacctggatactacctcagaagggactctaatggtcagactgagaacagcgcggctgtgaacaatacagcaagtgagcatttcatggttgatagattaatcgtggatgaccttctgaattgggcagtaaattacaaagttgacgggttcagatttgatctaatgggacatatcatgaaaaagacaatgccaaatggattttatcagggcaatgaaacagagacaaggctcacgcttgctacatacgctgaccatatacagattggattagctggcaatttgaaggactatgtagttatatctcatactggagaagctagaaaaggatctgaaattcgcaccttcgatggctcaccagttggctatgcttcatcccctatagaaacaataaactacgcctctgctcatgacaatgaaacactatttgatattattagtctaaagactccgatggacctctcaattgacgagcgatgcaggataaatcatttgtccacaagcatgattgcattatcccagatatcgcaattccagccaatacagtgggtataggttctgaatggtgagatacagac

SEQ ID NO: 25733 - DNA, 613 bp, Zea Mays
taccaaaccctaacttatgctatttggctacctgcatccggatctgatctagtagttactagtgcgacccagtggtgtgttcgggaacgtttccgcgggcgggcggcggcccccagtggcgaagatgatctgactaccgacgtacgcagcacgaggcgttcgttgccatcttcttctcctttgagtatatgatactagcaacatccacggtatcaacattcgtgaagtatatattctatgttagtgacatgctaatggaaggtcaatgggagaaaaaggcagtgtatacattttacttggagctcataagtgaccttgtgcacttgtcattatacatgctcttcttcatagttatcttcctgaactatggtgatcggcgaccgtgatcttccatgttattatgttctgatacttgagacttttattatgactatgtatgagatattgtctcttattagtactggttgatgagatgtgtcttattatgactatggatgagacttttgtgatgtaattgataagactatggatgagacttttgtgatgtaatcgatgagactatggatttaaatattgttatgtgattgtgtgtgagatgttttgtgtgaaaata

SEQ ID NO: 25734 - DNA, 790 bp, Zea Mays
aggcaaaacagccccagaccgcgtgcgtttcgcttctgcccctgctgtttctgtttcttggcgtccatcccctctttctctcgtggcgacgacggcgaccgtcacaccccccctatgtgctaggtgccagggtccgtcgggtccttcgctggcgacgagcaactaccagtggtgtgttcgggaacgtttccgcgggcgggcggcggcccccagtggcgaagatgatctgactaccgacgtacgcagcacgaggcgttcgttgccatcttcttctcctttgagtatatgatactagcaacatccacggtatcaacattcgtgaagtatatattctatgttagtgacatgctaatggaaggtcaatgggagaaaaaggcagtgtatacattttacttggagctcataagtgaccttgtgcacttgtcattatacatgctcttcttcatagttatcttcctgtaagatctcttattatggtagtttgatactataatgtaaagttgtaaactatggttattgattcgttatgtgataccaggaactatggtgatcggcgaccgtgatcttccatgttattatgttctgatacttgagacttttattatgactatgtatgagatattgtctcttattagtactggttgatgagatgtgtcttattatgactatggatgagacttttgtgatgtaattgataagactatggatgagacttttgtgatgtaatcgatgagactatggatttaaatattgttatgtgattgtgtgtgagatgttttgtgtgaaaata

SEQ ID NO: 25735 - DNA, 1197 bp, Zea Mays
tagaatccaaatcagaacatgtcggttgcttgtgctgaggtgatgctcctgggccacagtgactcctatgtgaaggacaaggcgatgcaggtcacgatagccttcaaccatttcggcgaaggcctcattcagagaatgccaaggtgccggcacggctacttccacgttgtgaacaacgactacacccactgggagatgtacgccattgggggcagcgcggagccaaccatcaacagccagggcaaccgctaccttgctccgacgaacccgttcgccaaggaggtgaccaagagggtggagactgcccagaccgtgtggaagagctggaactggaggtcagagggcgacctgctgctgaacggcgcctacttcaccccgtccggcgcgggcgcctcggccagctactcgcgcgcgtccagcctcggcgccaagtcgtcgtccatggtcggcaccatcacctcggacgccggcgcactgtcgtgccgcaagggcgcggcctgctagcgcggatcgcgctccctctccagcaacaggaaaagaaacaggacaacaggaaactaagccacctcaacaccaccaccaccatggttacagtttcttcttcccttctttttaggggtcgcttttgacaagggttatattatatatatatatgatggtcctccttgatattttcaccatttgctcaacctcccccctgctcccgacatggaaagctacctggagcagcaggcgtgaagcgttgctgattggtcgctcggtctctctattagtcgtctgatctgagtgttgcgtgttgttccctctgcctacaagcaagtggtgtatgttgagggcagggggtgcgtgcgtgcgtgttgtgtgtgatacttactcacttggttgttgtgttgagaaaaaaagggtcagattgttagtagtggtagtactacatgttacgcctggacagactgggatggaatggatgtacaagacatggaggaatacccatgttcttaactcttcttcttcttcagtgaaaaaagctaaaacgttacagtttagctgaatattttgatctcgaagaacagcatgtgctgcttcggaaaggacactagcaccagcacattgatatgcccagttccatatcaagttttttcactatcctcggaagtagtacttgtgtacatgaggagggatcggggatggatctggcgg

SEQ ID NO: 25736 - DNA, 2351 bp, Zea Mays
ggacatatccctttgctatcactatatatattttctctcaatctcgtttccatcaggatctatggatcggtcggttcaattttcgatcggttggcgcagtgttgccacgtgtctcccgtttgaagtctaaaaagaaaaattagatgctcagctcagtcatgtattccatgtcacaagaataatcccttacaaagccacatagtaggcatgactaactccaccagcagcaacaacaaatagcaatcacttgtgacaaaaaaaagaacttgtttgtgtatcatattctttgatctgctcctggtcgctcataaaaagatggtgattcaacttcacttcttgcagtgttcttagcatactatgaatatcgaggcagcacctgaggcggccatcaactgctcagtcataacagccttacctccatcggcgatgcatcacaagaacagaggaggctgccatgtcgttattaggacctccggcacggggagccatctgcttgctagttgtgtcgtcgtcgatcgtggtcctcagcacggccggtggtctcggatccgatgccactagtaggtccgccgctgcctatctctcagttgacgacgactacggggaggaggacgagagcggcgactcctccttctccttccccgaccccgagacgagttcagcttcaaccgggctagtgttcgggttctacgacgacaagtgcccggacgccgaggagatggtgtcgtccatggtgcggaagctctaccacgcggaccccaacgtcgcagccgcactcgtccgcctcttcttccacgactgcttcatccacggctgcgacgcctcggtgctgctggaccgcgtcggcggccagagatcggagcgcgacgccggcccgaaccagtcgcttcgcggcctgggcgccgtcgaggccatcaaacggggagtggagaaggcgtgccccgggaccgtctcctgcgcggacatcctggcgctggccgcgcgggacagcctcgtgctggtgggcgggcctacctacccagtgctcacgggccgccgcgacagcgcccagagcttctactacgacgcggacggaggtggcatcccgccgccgaacgccacctacgccatgacgctcgacgcgttcgcgcgccgcgggcagttcacggagctgacgcaaaaggcagtcttgctctgcgcgcaggagcccacagcatcgggaaggtgcggtgcaggttcatcgcggacaggatctacaacttcgccgggaccggcgcgccggacgactccatcgacccggacatggtcggcgagatgcgcgcggcgtgcggcggcggcgacggcgcggcgccgatggagatggggtactacaggcagggccgggaggtgggcttcggcgcgcactactacgccgagctgttggagggccggggcatcctgcgcgccgaccagcagctcacggcggggagcaccgtgcggtgggtgcgcgtgtacgcgtccggagcgcgcggcgaggagctgttccgcgacgacttcgcgcacgccatggtgaagctgtcggcgctcgcgccgctcacggggtcggctggccaggtccggatcacctgctccaaccccgtccgtcccaactgaaccgacctaggactagagtttgaagggaaaggaggcttgatgcccttttgatgactcgtcagtgtatgtttgttcaaataaaggcgaggatttggttgcatccctatgcagatgtgcaagatctgctgacgagaggcagtgcctgcctgtgcgcagcgcaagcatcagattcagagctgtaaaatggctgagttctgactttcagcgtactccttccatctattaaaaaaagtgtaaattcatgtttgaaaccgatcatatttcattaaatttaagtaaactaataaaaaaatagcaccaacgtttacatccataaacacatttgttaccaaaacatttaataatacagatgggcaagtttaggcctaatatgaagcccttgtgccaaaaataaaaaaaaaaggaaaacagtcttggatcctctttttttctaaataaaaacggaaaggtgttggatcagcattccttcgaataacagttcaacccattcaagtacgcctcaggtactgaaaccctaaacacattatagtgatggtttagactcctctccccatgcaacctgtagactccaccgagtgctccggccacaggattggggaaggcgtagaacacgcgcttgaacctatgatgcacaagcgccatcgcacaccttcaaattaaagcagcaaacgagtaagattggtcagcagtaagaggagaaactatgtgcaggctggaggatggttgagcatacattgtgc

SEQ ID NO: 25737 - DNA, 2314 bp, Zea Mays
cgaatggacatatccctttgctatcactatatatattttctctcaatctcgtttccatcaggatctatggatcggtcggttcaattttcgatcggttggcgcagtgttgccacgtgtctcccgtttgaagtctaaaaagaaaaattagatgctcagctcagtcatgtattccatgtcacaagaataatcccttacaaagccacatagtaggcatgactaactccaccagcagcaacaacaaatagcaatcacttgtgacaaaaaaaagaacttgtttgtgtatcatattctttgatctgctcctggtcgctcataaaaagatggtgattcaacttcacttcttgcagtgttcttagcatactatgaatatcgaggcagcacctgaggcggccatcaactgctcagtcataacagccttacctccatcggcgatgcatcacaagaacagaggaggctgccatgtcgttattaggacctccggcacggggagccatctgcttgctagttgtgtcgtcgtcgatcgtggtcctcagcacggccggtggtctcggatccgatgccactagtaggtccgccgctgcctatctctcagttgacgacgactacggggaggaggacgagagcggcgactcctccttctccttccccgaccccgagacgagttcagcttcaaccgggctagtgttcgggttctacgacgacaagtgcccggacgccgaggagatggtgtcgtccatggtgcggaagctctaccacgcggaccccaacgtcgcagccgcactcgtccgcctcttcttccacgactgcttcatccacggctgcgacgcctcggtgctgctggaccgcgtcggcggccagagatcggagcgcgacgccggcccgaaccagtcgcttcgcggcctgggcgccgtcgaggccatcaaacggggagtggagaaggcgtgccccgggaccgtctcctgcgcggacatcctggcgctggccgcgcgggacagcctcgtgctggtgggcgggcctacctacccagtgctcacgggccgccgcgacagcgcccagagcttctactacgacgcggacggaggtggcatcccgccgccgaacgccacctacgccatgacgctcgacgcgttcgcgcgccgcgggcagttcacggagctgacgcaaaaggcagtcttgctctgcgcgcaggagcccacagcatcgggaaggtgcggtgcaggttcatcgcggacaggatctacaacttcgccgggaccggcgcgccggacgactccatcgacccggacatggtcggcgagatgcgcgcggcgtgcggcggcggcgacggcgcggcgccgatggagatggggtactacaggcagggccgggaggtgggcttcggcgcgcactactacgccgagctgttggagggccggggcatcctgcgcgccgaccagcagctcacggcggggagcaccgtgcggtgggtgcgcgtgtacgcgtccggagcgcgcggcgaggagctgttccgcgacgacttcgcgcacgccatggtgaagctgtcggcgctcgcgccgctcacggggtcggctggccaggacctaggactagagtttgaagggaaaggaggcttgatgcccttttgatgactcgtcagtgtatgtttgttcaaataaaggcgaggatttggttgcatccctatgcagatgtgcaagatctgctgacgagaggcagtgcctgcctgtgcgcagcgcaagcatcagattcagagctgtaaaatggctgagttctgactttcagcgtactccttccatctattaaaaaaagtgtaaattcatgtttgaaaccgatcatatttcattaaatttaagtaaactaataaaaaaatagcaccaacgtttacatccataaacacatttgttaccaaaacatttaataatacagatgggcaagtttaggcctaatatgaagcccttgtgccaaaaataaaaaaaaaaggaaaacagtcttggatcctctttttttctaaataaaaacggaaaggtgttggatcagcattccttcgaataacagttcaacccattcaagtacgcctcaggtactgaaaccctaaacacattatagtgatggtttagactcctctccccatgcaacctgtagactccaccgagtgctccggccacaggattggggaaggcgtagaacacgcgcttgaacctatgatgcacaagcgccatcgcacaccttcaaattaaagcagcaaacgagtaagattggtcagcagtaagaggagaaactatgtgcaggctggaggatggttgagcatacattgtgc

SEQ ID NO: 25738 - DNA, 1748 bp, Zea Mays
aagaagactatgggcttctagcaattcacgtggttgaagacgtcttgtcccgttccagaacactcgcgctctcgcacgacggcacgagcgcgctactgccatagtgccatggcgagcggcggcggtgctgcggcgcggatggacccggaggtagcaacagagctggtgcggaagggtgccaccctcctcctcctcgatgtcccccagcgcaccctcttcggaatcgatacccagatgttctctgttggacccaagttcaaagggatgaagatggtgccaccgggagcccatttcgtctactactgctccccaaacaggcatgggaatgagtttgcacctactgtcgggttctttcttactacacaccaatctgaggtgattgttcgaaagtgggatgtgcaagaggaacgattaatcaaattatcagaagaagaggatatcagatactcagaagctgtaagacattttgaatttgatgatcaacttggaccatacaatttagattcttatggagattggaaacaactttcggactacttgtcaccgaatgtcattgagcgtcttgaaccaattggaggagaaatcacaattgcgtgggagtcatcatggatggataaagctccccaaagtgacatggagagacgtttggtggaacaactaagagaaggaaagtttgcaaagaatgctcctgtacagtctgggcggagaggatgctactacacaagtatccctgcttcagttaagcataaggacatctctgggggtgacttgacagccctaaacttggacaaaacaagtttgctggagactattttggccaaaaattatgaaggtcaagaagatctattcttgggggagcttcagtttgctttcatagcttttatgatgggtcaatcactagaggcttttatgcagtggaaagcactagtcagccttcttttgagctgcagtgatgctccccttcatacaaggactaacatgtttataaagtttataaggacattatactatcaactcaagcatggttttcaacatacccaagattccaaaagtggggatatgggcaattctctgtgtttggatgaaacatggttttcaagagacatattcctgtaccgtctttcaaaggatttctttacagttgtatttgaagccccagtcgtggatggagaccttctgtcatgggctaggaaactaaaatcgcttctggagactacgtttgggtgggatcttgaggacgacgcagtgaaccttattgatgaagatgacgagtttgctcctgtcgttgtggagatggatggatcataagctaatgaagccagattccatgcagagaagtcagcagttgttcagcgtttctaccttttgtggtgcgctgacttgtatgaagttttactgcttgtgctgacattgaatatacgtgctaattatcgacttggtttccacttgactgtttaaagatgtagataattaagggggtgtttggtttctagggattaatgtttagtccctacattttattccattttagttccaaaattaccaaatatagaaactaaaactttattttagtttctatattagcaatttatagactaaaaaagaataaaacgaagggactaaacattagtccctagaaaccaaacaccccctaagtctcgcttgtttagtgcatgttattgcatctttatgtaatatgcctaatactaagggctagtttggaaattccattttcccaagttattttt

SEQ ID NO: 25739 - DNA, 1419 bp, Zea Mays
aagaagactatgggcttctagcaattcacgtggttgaagacgtcttgtcccgttccagaacactcgcgctctcgcacgacggcacgagcgcgctactgccatagtgccatggcgagcggcggcggtgctgcggcgcggatggacccggaggtagcaacagagctggtgcggaagggtgccaccctcctcctcctcgatgtcccccagcgcaccctcttcggaatcgatacccagatgttctctgttggacccaagttcaaagggatgaagatggtgccaccgggagcccatttcgtctactactgctccccaaacaggcatgggaatgagtttgcacctactgtcgggttctttcttactacacaccaatctgaggtgattgttcgaaagtgggatgtgcaagaggaacgattaatcaaattatcagaagaagagatactcagaagctgtaagacattttgaatttgatgatcaacttggaccatacaatttagattcttatggagattggaaacaactttcggactacttgtcaccgaatgtcattgagcgtcttgaaccaattggaggagaaatcacaattgcgtgggagtcatcatggatggataaagctccccaaagtgacatggagagacgtttggtggaacaactaagagaaggaaagtttgcaaagaatgctcctgtacagtctgggcggagaggatgctactacacaagtatccctgcttcaacaagtttgctggagactattttggccaaaaattatgaaggtcaagaagatctattcttgggggagcttcagtttgctttcatagcttttatgatgggtcaatcactagaggcttttatgcagtggaaagcactagtcagccttcttttgagctgcagtgatgctccccttcatacaaggactaacatgtttataaagtttataaggacattatactatcaactcaagcatggttttcaacatacccaagattccaaaagtggggatatgggcaattctctgtgtttggatgaaacatggttttcaagagacatattcctgtaccgtctttcaaaggatttctttacagttgtatttgaagccccagtcgtggatggagaccttctgtcatgggctaggaaactaaaatcgcttctggagactacgtttgggtgggatcttgaggacgacgcagtgaaccttattgatgaagatgacgagtttgctcctgtcgttgtggagatggatggatcataagctaatgaagccagattccatgcagagaagtcagcagttgttcagcgtttctaccttttggtacagtggtgcgctgacttgtatgaagttttactgcttgtgctgacattgaatatacgtgctaattatcgacttggtttccacttgactgtttaaagatgtagataattaag

SEQ ID NO: 25740 - DNA, 1473 bp, Zea Mays
aagaagactatgggcttctagcaattcacgtggttgaagacgtcttgtcccgttccagaacactcgcgctctcgcacgacggcacgagcgcgctactgccatagtgccatggcgagcggcggcggtgctgcggcgcggatggacccggaggtagcaacagagctggtgcggaagggtgccaccctcctcctcctcgatgtcccccagcgcaccctcttcggaatcgatacccagatgttctctgttggacccaagttcaaagggatgaagatggtgccaccgggagcccatttcgtctactactgctccccaaacaggcatgggaatgagtttgcacctactgtcgggttctttcttactacacaccaatctgaggtgattgttcgaaagtgggatgtgcaagaggaacgattaatcaaattatcagaagaagagatactcagaagctgtaagacattttgaatttgatgatcaacttggaccatacaatttagattcttatggagattggaaacaactttcggactacttgtcaccgaatgtcattgagcgtcttgaaccaattggaggagaaatcacaattgcgtgggagtcatcatggatggataaagctccccaaagtgacatggagagacgtttggtggaacaactaagagaaggaaagtttgcaaagaatgctcctgtacagtctgggcggagaggatgctactacacaagtatccctgcttcagttaagcataaggacatctctgggggtgacttgacagccctaaacttggacaaaacaagtttgctggagactattttggccaaaaattatgaaggtcaagaagatctattcttgggggagcttcagtttgctttcatagcttttatgatgggtcaatcactagaggcttttatgcagtggaaagcactagtcagccttcttttgagctgcagtgatgctccccttcatacaaggactaacatgtttataaagtttataaggacattatactatcaactcaagcatggttttcaacatacccaagattccaaaagtggggatatgggcaattctctgtgtttggatgaaacatggttttcaagagacatattcctgtaccgtctttcaaaggatttctttacagttgtatttgaagccccagtcgtggatggagaccttctgtcatgggctaggaaactaaaatcgcttctggagactacgtttgggtgggatcttgaggacgacgcagtgaaccttattgatgaagatgacgagtttgctcctgtcgttgtggagatggatggatcataagctaatgaagccagattccatgcagagaagtcagcagttgttcagcgtttctaccttttggtacagtggtgcgctgacttgtatgaagttttactgcttgtgctgacattgaatatacgtgctaattatcgacttggtttccacttgactgtttaaagatgtagataattaag

SEQ ID NO: 25741 - DNA, 1370 bp, Zea Mays
aagaagactatgggcttctagcaattcacgtggttgaagacgtcttgtcccgttccagaacactcgcgctctcgcacgacggcacgagcgcgctactgccatagtgccatggcgagcggcggcggtgctgcggcgcggatggacccggaggtagcaacagagctggtgcggaagggtgccaccctcctcctcctcgatgtcccccagcgcaccctcttcggaatcgatacccagatgttctctgttggacccaagttcaaagggatgaagatggtgccaccgggagcccatttcgtctactactgctccccaaacaggcatgggaatgagtttgcacctactgtcgggttctttcttactacacaccaatctgaggtgattgttcgaaagtgggatgtgcaagaggaacgattaatcaaattatcagaagaagaggatatcagatactcagaagctgtaagacattttgaatttgatgatcaacttggaccatacaatttagattcttatggagattggaaacaactttcggactacttgtcaccgaatgtcattgagcgtcttgaaccaattggaggagaaatcacaattgcgtgggagtcatcatggatggataaagctccccaaagtgacatggagagacgtttggtggaacaactaagagaaggaaagtttgcaaagaatgctcctgtacagtctgggcggagaggatgctactacacaagtatccctgcttcaacaagtttgctggagactattttggccaaaaattatgaaggtcaagaagatctattcttgggggagcttcagtttgctttcatagcttttatgatgggtcaatcactagaggcttttatgcagtggaaagcactagtcagccttcttttgagctgcagtgatgctccccttcatacaaggactaacatgtttataaagtttataaggacattatactatcaactcaagcatggttttcaacatacccaagattccaaaagtggggatatgggcaattctctgtgtttggatgaaacatggttttcaagagacatattcctgtaccgtctttcaaaggctaggaaactaaaatcgcttctggagactacgtttgggtgggatcttgaggacgacgcagtgaaccttattgatgaagatgacgagtttgctcctgtcgttgtggagatggatggatcataagctaatgaagccagattccatgcagagaagtcagcagttgttcagcgtttctaccttttggtacagtggtgcgctgacttgtatgaagttttactgcttgtgctgacattgaatatacgtgctaattatcgacttggtttccacttgactgtttaaagatgtagataattaag

SEQ ID NO: 25742 - DNA, 1600 bp, Zea Mays
aagaagactatgggcttctagcaattcacgtggttgaagacgtcttgtcccgttccagaacactcgcgctctcgcacgacggcacgagcgcgctactgccatagtgccatggcgagcggcggcggtgctgcggcgcggatggacccggaggtagcaacagagctggtgcggaagggtgccaccctcctcctcctcgatgtcccccagcgcaccctcttcggaatcgatacccagatgttctctgttggacccaagttcaaagggatgaagatggtgccaccgggagcccatttcgtctactactgctccccaaacaggcatgggaatgagtttgcacctactgtcgggttctttcttactacacaccaatctgaggtgattgttcgaaagtgggatgtgcaagaggaacgattaatcaaattatcagaagaagaggatatcagatactcagaagctgtaagacattttgaatttgatgatcaacttggaccatacaatttagattcttatggagattggaaacaactttcggactacttgtcaccgaatgtcattgagcgtcttgaaccaattggaggagaaatcacaattgcgtgggagtcatcatggatggataaagctccccaaagtgacatggagagacgtttggtggaacaactaagagaaggaaagtttgcaaagaatgctcctgtacagtctgggcggagaggatgctactacacaagtatccctgcttcagttaagcataaggacatctctgggggtgacttgacagccctaaacttggacaaaacaagtttgctggagactattttggccaaaaattatgaaggtcaagaagatctattcttgggggagcttcagtttgctttcatagcttttatgatgggtcaatcactagaggcttttatgcagtggaaagcactagtcagccttcttttgagctgcagtgatgctgtgctttgctgacataaacttgccaactttgaagtttggaaggccctctcaggagtcaggacacatgttgctgaaattgtgaaaccatgcttccacatgtattaacaacaaacagtagacatttaccccttcatacaaggactaacatgtttataaagtttataaggacattatactatcaactcaagcatggttttcaacatacccaagattccaaaagtggggatatgggcaattctctgtgtttggatgaaacatggttttcaagagacatattcctgtaccgtctttcaaaggatttctttacagttgtatttgaagccccagtcgtggatggagaccttctgtcatgggctaggaaactaaaatcgcttctggagactacgtttgggtgggatcttgaggacgacgcagtgaaccttattgatgaagatgacgagtttgctcctgtcgttgtggagatggatggatcataagctaatgaagccagattccatgcagagaagtcagcagttgttcagcgtttctaccttttgtggtgcgctgacttgtatgaagttttactgcttgtgctgacattgaatatacgtgctaattatcgacttggtttccacttgactgtttaaagatgtagataattaag

SEQ ID NO: 25743 - DNA, 1427 bp, Zea Mays
aagaagactatgggcttctagcaattcacgtggttgaagacgtcttgtcccgttccagaacactcgcgctctcgcacgacggcacgagcgcgctactgccatagtgccatggcgagcggcggcggtgctgcggcgcggatggacccggaggtagcaacagagctggtgcggaagggtgccaccctcctcctcctcgatgtcccccagcgcaccctcttcggaatcgatacccagatgttctctgttggacccaagttcaaagggatgaagatggtgccaccgggagcccatttcgtctactactgctccccaaacaggcatgggaatgagtttgcacctactgtcgggttctttcttactacacaccaatctgaggtgattgttcgaaagtgggatgtgcaagaggaacgattaatcaaattatcagaagaagaggatatcagatactcagaagctgtaagacattttgaatttgatgatcaacttggaccatacaatttagattcttatggagattggaaacaactttcggactacttgtcaccgaatgtcattgagcgtcttgaaccaattggaggagaaatcacaattgcgtgggagtcatcatggatggataaagctccccaaagtgacatggagagacgtttggtggaacaactaagagaaggaaagtttgcaaagaatgctcctgtacagtctgggcggagaggatgctactacacaagtatccctgcttcaacaagtttgctggagactattttggccaaaaattatgaaggtcaagaagatctattcttgggggagcttcagtttgctttcatagcttttatgatgggtcaatcactagaggcttttatgcagtggaaagcactagtcagccttcttttgagctgcagtgatgctccccttcatacaaggactaacatgtttataaagtttataaggacattatactatcaactcaagcatggttttcaacatacccaagattccaaaagtggggatatgggcaattctctgtgtttggatgaaacatggttttcaagagacatattcctgtaccgtctttcaaaggatttctttacagttgtatttgaagccccagtcgtggatggagaccttctgtcatgggctaggaaactaaaatcgcttctggagactacgtttgggtgggatcttgaggacgacgcagtgaaccttattgatgaagatgacgagtttgctcctgtcgttgtggagatggatggatcataagctaatgaagccagattccatgcagagaagtcagcagttgttcagcgtttctaccttttggtacagtggtgcgctgacttgtatgaagttttactgcttgtgctgacattgaatatacgtgctaattatcgacttggtttccacttgactgtttaaagatgtagataattaag

SEQ ID NO: 25744 - DNA, 730 bp, Zea Mays
ctattgggcttgtcgtttatttccccttccgcaaaccaaaatgttggcggctcgccggctgtccgccgccacctctccgctcctcctccgccgcctttccgcacagacccaccccacggcatcgtcggcgcagcccccgccggaggtgaccgattcgggtccgggagcgtgggccggccgcgcggtgacgctctcgctgctgggtctgacgggcgccgtcgcagccagtgctgtcagcgacctctccgtcttcctctcatgctccagccaggcaatagagaaggccacccagaaccagcagatagtcaatgctatcggtaaaccaatcatgcggggaccctggtacagtgcttccattgctgtgaatcacgcgaagcattctgtctcctgcactttcccggtgtcaggaccccaaggaaatggtctgctcaagctcaaagctgtgcgcttgggagatgaatcttggtattcgtatgtgcagcccaccgagtgggagatactgataatggatgccatccttgatgtccatacggaagatggtaagcacacgacaatgcgggtaacaattccagacaacacacctgctccgccaccagcagactgcaccgcgtgcaagtcccatgcagcggagaagtgaatccattgacagatgttctttccacagtttcttacgaaaataatttattcacacatttctgatgcaaccggctattatcggaaaataattctt

SEQ ID NO: 25745 - DNA, 915 bp, Zea Mays
ctattgggcttgtcgtttatttccccttccgcaaaccaaaatgttggcggctcgccggctgtccgccgccacctctccgctcctcctccgccgcctttccgcacagacccaccccacggcatcgtcggcgcagcccccgccggaggtgaccgattcgggtccgggagcgtgggccggccgcgcggtgacgctctcgctgctgggtctgacgggcgccgtcgcagccagtgctgtcagcgacctctccgtcttcctctcatgctccaggcaatagagaaggccacccagaaccagcagatagtcaatgctatcggtaaaccaatcatgcggggaccctggtacagtgcttccattgctgtgaatcacgcgaagcattctgtctcctgcactttcccggtgtcaggaccccaaggaaatggtctgctcaagctcaaagctgtgcgcttgggagatgaatcttggtattcgtatgtgcagcccaccgagtgggagatactgataatggatgccatccttgatgtccatacggaagatggtaagcacacgacaatgcgggtaacaattccagacaacacacctgctccgccaccagcagactgcaccgcgtgcaagtcccatgcagcggagaagtgaatccattgacagatgttctttccacagtttcttacgaaaataatttattcacacatttctgatgcaaccggctattatcggaaaataattcttagcgattcctaaggtcgacatggggtcctcgatttatttattcacattataaatcgaggactccaggtcgaccttaggaatcggtaagagttattttctgatgctagccagaaatccctaaatcggtaagaataaagtgcttgcaacgatgttggacagttggttggatctataatatttgatccatgt

SEQ ID NO: 25746 - DNA, 2460 bp, Zea Mays
gaattagtcccagatctctctaatagtctagtcccccccaagccgactccgcccgactatcttcctgcgatgtttatccccgatctggagcaggcccgatttgctattctccagctccgtgatctactcgaggcaaaggtggagtttgaccaccgatcagcgacaacaatgcgactacaagcggctgcacatggattcctggcacgatgtcaagcacggcaagcggcgacgcggcgtcaagcacgacaagcggtggcaggctgcggtccgccgttctctggcacgacttgcatcgatattgcacgttgaacaacacacacatggggaggcaaggccttcaataggtcttctttgtcacagcctcaaatgatggtggttactgatttggatgatgtttttctgccattgcctgatgacctcttggttaatttggtcgactcaagacatgttgtggaatcatttcttgatagcttgccaaatatgtttcatgacaatgtaaatgtggagtctgctcttggtccagcacttaaagcagctttcatggttatgagtcaaattggggggaagttgcttgtcttccagagtactttgccatctcttggtattggtcgtttgaggttacgaggagacgatgtccgtgcatatggaacggataaggagcatactctgagggtaccagaagattccttctacaaacagatggctgctgaattcacaaaatatcagattgcagtggacatattttctttcagcgataagtactcagatatagcgtctttaggatctttggcgaagtatactggtggtcaggtgtaccactatgcatcattccagacacctacacatggtgacaaacttaaacttgagcttagtagggaccttacacgagagactgcatgggaatctgttatgcgtatcagatgtggaaaaggagtacggttcacaacctatcatggtcatttcatgctacggtccacagacctgttagcccttccagctgttgactctgataaagcttttgcaatgcaactgtcgctagaggagacattaatgaccacccagactgtatacttccaagtggcgttgctatatacatcatcctctggtgaaaggcgtatcagggtccacacagcagctgcacctgtggtcacagatcttagtgaaatgtatcgtcaagcagatactggtgccattgtgtcattgttgggtagaattgcgattgaaaattcactgtctgataagctggacagtgtccggcagcagttacagttgaagctcgttaaaagtttgaaggaataccgcaatttatatgttgtacaacaccggataggcgggagactgatttttcccgaatctctaaggtttttgccattgtacatcctggctatctgcaaatctcttgctcttcgtggaggttatgcagatgtttctcttgacgaacgatgcgctgctggtttctgcatgatgatattgcctgtaaaaaggctgctcaattttatctatccttctctgtacagagttgatgaagtactcacaatggaaccaaacaaggttgatgatgtttcattgaagcgattgccattaacgtttcagtgtttagatactggaggtttgtacctccttgatgatggcttcactttcctagtgtggttaggtaggatgctcccgcctgaacttgtgaacaacattcttggagtgagcttggcaaacttccctgacctatcaaagattgtattgagagagtgtgacaatgaattgtcaagaaatttcatgaaaatactaagatccctgcgggagaaggatccttcctatcaccagctatgccgtgtggtgcgacagggtgaacagccaagagaaggctatctgcttctatctaaccttgttgaggaccagatggctggaacaagtagttacgttgattggatacagcaaattcaccgtcaaacgcaaagctaatgacgaagaaccaacaggaagtgatgcttggaatttttgccttagtgtaaactgctgcaggatgtagattcagctgctgccggttccaaatcaatctcgcaaccccgtggcagatcttgttcagaagccagcggcccaacatgccggcttgtaagcagcatttgtctggcaaaaaaaatgctgttaatatctgtccatgtgattattctatttttgcacagtgagaatacagctgttgtatcggaataagtaggcaacaataccgtgggtattatacaactgggttcgtgtagtggcctgtgcgtttattaatcgcgttctttcctcatctggattcagttacttgccatttgggttataaatagttcatcgtgtaaactaactttttggctactttagtctgtttgtaatgggatatctcatttaatttaactgacattccattattcggacgttcctttatccgtggtttatttgtataaccactaaaacttgtagctttag

SEQ ID NO: 25747 - DNA, 2564 bp, Zea Mays
gagctattaaggatgaagtcccagttatcaactttgggtctgccggtgtcattcgctgtcgaagatgcaggacgtatataaatccttatgcgacatttgcagatgctggaaggaaatggcgctgcaatctttgcgcgttgctcaatgacgttcctggagagtacttttgtggtcttgatgctagtggcagaaggtacgatactgatcaaagacctgaactctctaagggaactgtagagtttgttgctccaacagaatatatggtgcggccaccgatgccgccttcctatttctttattattgatgtgtctgtatccgcagtacagagtggattgcttgaggttgttgcaaagaccatcaaatcatgccttgatgaacttccaggctttccacgaacacagattggattcttaacctttgacagcaccttgcattttcataacttcaagtcttctttgtcacagcctcaaatgatggtggttactgatttggatgatgtttttctgccattgcctgatgacctcttggttaatttggtcgactcaagacatgttgtggaatcatttcttgatagcttgccaaatatgtttcatgacaatgtaaatgtggagtctgctcttggtccagcacttaaagcagctttcatggttatgagtcaaattggggggaagttgcttgtcttccagagtactttgccatctcttggtattggtcgtttgaggttacgaggagacgatgtccgtgcatatggaacggataaggagcatactctgagggtaccagaagattccttctacaaacagatggctgctgaattcacaaaatatcagattgcagtggacatattttctttcagcgataagtactcagatatagcgtctttaggatctttggcgaagtatactggtggtcaggtgtaccactatgcatcattccagacacctacacatggtgacaaacttaaacttgagcttagtagggaccttacacgagagactgcatgggaatctgttatgcgtatcagatgtggaaaaggagtacggttcacaacctatcatggtcatttcatgctacggtccacagacctgttagcccttccagctgttgactctgataaagcttttgcaatgcaactgtcgctagaggagacattaatgaccacccagactgtatacttccaagtggcgttgctatatacatcatcctctggtgaaaggcgtatcagggtccacacagcagctgcacctgtggtcacagatcttagtgaaatgtatcgtcaagcagatactggtgccattgtgtcattgttgggtagaattgcgattgaaaattcactgtctgataagctggacagtgtccggcagcagttacagttgaagctcgttaaaagtttgaaggaataccgcaatttatatgttgtacaacaccggataggcgggagactgatttttcccgaatctctaaggtttttgccattgtacatcctggctatctgcaaatctcttgctcttcgtggaggttatgcagatgtttctcttgacgaacgatgcgctgctggtttctgcatgatgatattgcctgtaaaaaggctgctcaattttatctatccttctctgtacagagttgatgaagtactcacaatggaaccaaacaaggttgatgatgtttcattgaagcgattgccattaacgtttcagtgtttagatactggaggtttgtacctccttgatgatggcttcactttcctagtgtggttaggtaggatgctcccgcctgaacttgtgaacaacattcttggagtgagcttggcaaacttccctgacctatcaaagattgtattgagagagtgtgacaatgaattgtcaagaaatttcatgaaaatactaagatccctgcgggagaaggatccttcctatcaccagctatgccgtgtggtgcgacagggtgaacagccaagagaaggctatctgcttctatctaaccttgttgaggaccagatggctggaacaagtagttacgttgattggatacagcaaattcaccgtcaaacgcaaagctaatgacgaagaaccaacaggaagtgatgcttggaatttttgccttagtgtaaactgctgcaggatgtagattcagctgctgccggttccaaatcaatctcgcaaccccgtggcagatcttgttcagaagccagcggcccaacatgccggcttgtaagcagcatttgtctggcaaaaaaaatgctgttaatatctgtccatgtgattattctatttttgcacagtgagaatacagctgttgtatcggaataagtaggcaacaataccgtgggtattatacaactgggttcgtgtagtggcctgtgcgtttattaatcgcgttctttcctcatctggattcagttacttgccatttgggttataaatagttcatcgtgtaaactaactttttggctactttagtctgtttgtaatgggatatctcatttaatttaactgacattccattattcggacgttcctttatccgtggtttatttgtataaccactaaaacttgtagctttag

SEQ ID NO: 25748 - DNA, 3672 bp, Zea Mays
taccctcgcttcgcgtcgcgtcttccttctccctcctccgcatccggctgctgcccctgagcctgcccccaccccctcggcgcccccgccggagcgccgcctctacccttcgatcccggttccacgatgcagccgccgatggggagcgagaggaggacgccgcccggccgccctgtttcagccttcgtgccgggcgccgctgtcccgcctccaccgtttgccgccggtggcccgttcgctccgccgccgcggcagggagtgccgcctcctcagtctggtgctgcggcgcctgctttcggggctgcaccacccgccgcaatggggggtgggttcaggggtccaccgccgtcgcagggcccctacggtgcgggcacactgccccacggcccttttgcttccgcgccaccgcctcagggctctttcacctccgcgccaccgtctcagggctcctttgcctccgctccaccgtcccagagtccctttacttcccctccaccgtctcagggccccttcgctgctggaccaccgcctacgggcccttttgctgctacaccagcaccttttcgccctccaccgtcatcccttgcgcagccacaatctcccacgggaggcgctttgcctgcaccaccaacatatgcgaggccgccaccgccactacagtcacaagggtattaccctggtgcaccacctgcgaaccctcaatactcaatgtcaaggccagcatttcaacaaccaatgcagaatatgccacctcctccaatgggaccagctaccacatttggtaatcaggcagcttatccaagtgccgggcctccagtcggaggcacacttcagagcttagtggaggacttccagtcactgtcactgagctctacgcctgggtcacttgaccctggtgttgatgtaaaagggctgccaaggccattggatggtgacgaggaaccagttaagcttatggaggcatacccattgaattgccacccgaggtacttccgtctgacaacccatgcgattccggcatctcagtcattggtctccaggtggcatttgcctcttggagctgtggtgcacccacttgcagaatcacctgatggggatgaagtcccagttatcaactttgggtctgccggtgtcattcgctgtcgaagatgcaggacgtatataaatccttatgcgacatttgcagatgctggaaggaaatggcgctgcaatctttgcgcgttgctcaatgacgttcctggagagtacttttgtggtcttgatgctagtggcagaaggtacgatactgatcaaagacctgaactctctaagggaactgtagagtttgttgctccaacagaatatatggtgcggccaccgatgccgccttcctatttctttattattgatgtgtctgtatccgcagtacagagtggattgcttgaggttgttgcaaagaccatcaaatcatgccttgatgaacttccaggctttccacgaacacagattggattcttaacctttgacagcaccttgcattttcataacttcaagtcttctttgtcacagcctcaaatgatggtggttactgatttggatgatgtttttctgccattgcctgatgacctcttggttaatttggtcgactcaagacatgttgtggaatcatttcttgatagcttgccaaatatgtttcatgacaatgtaaatgtggagtctgctcttggtccagcacttaaagcagctttcatggttatggacaattatgaaatccctttgtagagtcaaattggggggaagttgcttgtcttccagagtactttgccatctcttggtattggtcgtttgaggttacgaggagacgatgtccgtgcatatggaacggataaggagcatactctgagggtaccagaagattccttctacaaacagatggctgctgaattcacaaaatatcagattgcagtggacatattttctttcagcgataagtactcagatatagcgtctttaggatctttggcgaagtatactggtggtcaggtgtaccactatgcatcattccagacacctacacatggtgacaaacttaaacttgagcttagtagggaccttacacgagagactgcatgggaatctgttatgcgtatcagatgtggaaaaggagtacggttcacaacctatcatggtcatttcatgctacggtccacagacctgttagcccttccagctgttgactctgataaagcttttgcaatgcaactgtcgctagaggagacattaatgaccacccagactgtatacttccaagtggcgttgctatatacatcatcctctggtgaaaggcgtatcagggtccacacagcagctgcacctgtggtcacagatcttagtgaaatgtatcgtcaagcagatactggtgccattgtgtcattgttgggtagaattgcgattgaaaattcactgtctgataagctggacagtgtccggcagcagttacagttgaagctcgttaaaagtttgaaggaataccgcaatttatatgttgtacaacaccggataggcgggagactgatttttcccgaatctctaaggtttttgccattgtacatcctggctatctgcaaatctcttgctcttcgtggaggttatgcagatgtttctcttgacgaacgatgcgctgctggtttctgcatgatgatattgcctgtaaaaaggctgctcaattttatctatccttctctgtacagagttgatgaagtactcacaatggaaccaaacaaggttgatgatgtttcattgaagcgattgccattaacgtttcagtgtttagatactggaggtttgtacctccttgatgatggcttcactttcctagtgtggttaggtaggatgctcccgcctgaacttgtgaacaacattcttggagtgagcttggcaaacttccctgacctatcaaagattgtattgagagagtgtgacaatgaattgtcaagaaatttcatgaaaatactaagatccctgcgggagaaggatccttcctatcaccagctatgccgtgtggtgcgacagggtgaacagccaagagaaggctatctgcttctatctaaccttgttgaggaccagatggctggaacaagtagttacgttgattggatacagcaaattcaccgtcaaacgcaaagctaatgacgaagaaccaacaggaagtgatgcttggaatttttgccttagtgtaaactgctgcaggatgtagattcagctgctgccggttccaaatcaatctcgcaaccccgtggcagatcttgttcagaagccagcggcccaacatgccggcttgtaagcagcatttgtctggcaaaaaaaatgctgttaatatctgtccatgtgattattctatttttgcacagtgagaatacagctgttgtatcggaataagtaggcaacaataccgtgggtattatacaactgggttcgtgtagtggcctgtgcgtttattaatcgcgttctttcctcatctggattcagttacttgccatttgggttataaatagttcatcgtgtaaactaactttttggctactttagtctgtttgtaatgggatatctcatttaatttaactgacattccattattcggacgttcctttatccgtggtttatttgtataaccactaaaacttgtagctttag

SEQ ID NO: 25749 - DNA, 3688 bp, Zea Mays
agccaagccggcagacgtctgcttctcttttgttcgtttttaccctcgcttcgcgtcgcgtcttccttctccctcctccgcatccggctgctgcccctgagcctgcccccaccccctcggcgcccccgccggagcgccgcctctacccttcgatcccggttccacgatgcagccgccgatggggagcgagaggaggacgccgcccggccgccctgtttcagccttcgtgccgggcgccgctgtcccgcctccaccgtttgccgccggtggcccgttcgctccgccgccgcggcagggagtgccgcctcctcagtctggtgctgcggcgcctgctttcggggctgcaccacccgccgcaatggggggtgggttcaggggtccaccgccgtcgcagggcccctacggtgcgggcacactgccccacggcccttttgcttccgcgccaccgcctcagggctctttcacctccgcgccaccgtctcagggctcctttgcctccgctccaccgtcccagagtccctttacttcccctccaccgtctcagggccccttcgctgctggaccaccgcctacgggcccttttgctgctacaccagcaccttttcgccctccaccgtcatcccttgcgcagccacaatctcccacgggaggcgctttgcctgcaccaccaacatatgcgaggccgccaccgccactacagtcacaagggtattaccctggtgcaccacctgcgaaccctcaatactcaatgtcaaggccagcatttcaacaaccaatgcagaatatgccacctcctccaatgggaccagctaccacatttggtaatcaggcagcttatccaagtgccgggcctccagtcggaggcacacttcagagcttagtggaggacttccagtcactgtcactgagctctacgcctgggtcacttgaccctggtgttgatgtaaaagggctgccaaggccattggatggtgacgaggaaccagttaagcttatggaggcatacccattgaattgccacccgaggtacttccgtctgacaacccatgcgattccggcatctcagtcattggtctccaggtggcatttgcctcttggagctgtggtgcacccacttgcagaatcacctgatggggatgaagtcccagttatcaactttgggtctgccggtgtcattcgctgtcgaagatgcaggacgtatataaatccttatgcgacatttgcagatgctggaaggaaatggcgctgcaatctttgcgcgttgctcaatgacgttcctggagagtacttttgtggtcttgatgctagtggcagaaggtacgatactgatcaaagacctgaactctctaagggaactgtagagtttgttgctccaacagaatatatggtgcggccaccgatgccgccttcctatttctttattattgatgtgtctgtatccgcagtacagagtggattgcttgaggttgttgcaaagaccatcaaatcatgccttgatgaacttccaggctttccacgaacacagattggattcttaacctttgacagcaccttgcattttcataacttcaagtcttctttgtcacagcctcaaatgatggtggttactgatttggatgatgtttttctgccattgcctgatgacctcttggttaatttggtcgactcaagacatgttgtggaatcatttcttgatagcttgccaaatatgtttcatgacaatgtaaatgtggagtctgctcttggtccagcacttaaagcagctttcatggttatgagtcaaattggggggaagttgcttgtcttccagagtactttgccatctcttggtattggtcgtttgaggttacgaggagacgatgtccgtgcatatggaacggataaggagcatactctgagggtaccagaagattccttctacaaacagatggctgctgaattcacaaaatatcagattgcagtggacatattttctttcagcgataagtactcagatatagcgtctttaggatctttggcgaagtatactggtggtcaggtgtaccactatgcatcattccagacacctacacatggtgacaaacttaaacttgagcttagtagggaccttacacgagagactgcatgggaatctgttatgcgtatcagatgtggaaaaggagtacggttcacaacctatcatggtcatttcatgctacggtccacagacctgttagcccttccagctgttgactctgataaagcttttgcaatgcaactgtcgctagaggagacattaatgaccacccagactgtatacttccaagtggcgttgctatatacatcatcctctggtgaaaggcgtatcagggtccacacagcagctgcacctgtggtcacagatcttagtgaaatgtatcgtcaagcagatactggtgccattgtgtcattgttgggtagaattgcgattgaaaattcactgtctgataagctggacagtgtccggcagcagttacagttgaagctcgttaaaagtttgaaggaataccgcaatttatatgttgtacaacaccggataggcgggagactgatttttcccgaatctctaaggtttttgccattgtacatcctggctatctgcaaatctcttgctcttcgtggaggttatgcagatgtttctcttgacgaacgatgcgctgctggtttctgcatgatgatattgcctgtaaaaaggctgctcaattttatctatccttctctgtacagagttgatgaagtactcacaatggaaccaaacaaggttgatgatgtttcattgaagcgattgccattaacgtttcagtgtttagatactggaggtttgtacctccttgatgatggcttcactttcctagtgtggttaggtaggatgctcccgcctgaacttgtgaacaacattcttggagtgagcttggcaaacttccctgacctatcaaagattgtattgagagagtgtgacaatgaattgtcaagaaatttcatgaaaatactaagatccctgcgggagaaggatccttcctatcaccagctatgccgtgtggtgcgacagggtgaacagccaagagaaggctatctgcttctatctaaccttgttgaggaccagatggctggaacaagtagttacgttgattggatacagcaaattcaccgtcaaacgcaaagctaatgacgaagaaccaacaggaagtgatgcttggaatttttgccttagtgtaaactgctgcaggatgtagattcagctgctgccggttccaaatcaatctcgcaaccccgtggcagatcttgttcagaagccagcggcccaacatgccggcttgtaagcagcatttgtctggcaaaaaaaatgctgttaatatctgtccatgtgattattctatttttgcacagtgagaatacagctgttgtatcggaataagtaggcaacaataccgtgggtattatacaactgggttcgtgtagtggcctgtgcgtttattaatcgcgttctttcctcatctggattcagttacttgccatttgggttataaatagttcatcgtgtaaactaactttttggctactttagtctgtttgtaatgggatatctcatttaatttaactgacattccattattcggacgttcctttatccgtggtttatttgtataaccactaaaacttgtagctttag

SEQ ID NO: 25750 - DNA, 1422 bp, Zea Mays
caggttttgacaatgtggctaagtacctgatccctaccgccgtgtcttagacaatgtgagggcaagacgccaacaaatatcattcagcggtaagatagtttactgcaggacacctacagaggcggagaaagctgcaactgacatcttactcaaaattgagaggatgaaaaccccaggccaggtttctcttggatttgatctcgagtggaggccctttccaagaagaggagaaccaccttgtaaggttgctgtaatgcaactatgcatggagaaaactctgtgctatgtcctgcatattgctcactctggggtaccgcctatactgaaaactcttttggaggatagttcgtccattaaagttggaatatgcatagacaatgatgcaaggaaaatgttgaatgactataatgtctgtgtacaaccactgatggatttgtcgaccttggcaaatgtcaagttagcttctcccaaaagatggagccttgcttctttaaccgaaatgatcacatgcaaagagttgccaaagccgagcaacataagaatggggaactgggaggctgatgtcctctccaaacaacaacttcaatatgctgctacagatgcttatatctcatggtacttgtatgaggcactgcagactcttccagattacacgattgaagctgagtctgtaaaggcacaataacttcaagtggattctattgggaactgttgtgttagtctattatcttcacatctcaatcaggtgcgagtagacttgcaagctgcatacaaacacgattgtgtaggactccatgagtatgaataagtgtccaaggcagggggttgagtaggaactgggaagctcctttgtcgcaacaaatggatggtgaattccgtgtgagtatgtgtgttgtgcacttccagtttgcacttgtaaatttattctcctcgtatgtgaagggcgtgtctgttttttttttatttaaagaacttgactgttgtatgagttcgcaccccattttttttttgttaatacaacaatgatatgcagctctcttgcgtatcgagagggaaaaaaaagagatggttagttcctttgtcattgcttaaggtaaaaaacatgaattggactattggtattggactgtattttgctcgggaccattggaattactgtacggcaacctatttgccttgtattaacgtaaagctgtgcagttctctttatgtatggtttaaaaatgaagactgatttgtaaagagcgttatgatcagtggcgttataatcaggaaatcaaaaaaaaaaaaaaaccaggttgccttgcggatatcctgcgtgttcagttcgcggcgtaaacaggtggcgcgttttgaatcgcatattttaatttgacccactgtatctctgatgtatacgtgtcacgtattctttaagaatcg

SEQ ID NO: 25751 - DNA, 1728 bp, Zea Mays
attgtgaattataactcgattggcgaatatctgaaaaaaacccaaaatacaaagtagccgccgccgtgctcgtgctccagcgacctcgatggccatgcatcccgttgccggcgccggcgcgccccccgcgtcgtcggtccacggcaacgttgagtacgacgacttccactgggacgacgcagccgaggcggagcttcaggccttcgaggccgcctacgcctcggcttccgcctccgcaaagcgccgccgcttacccgactggacctctccatccccttccccctcctaccacctccatcgcagccaaaacccggtgtccagtggatccacgccatcgtggaccctcacgccccacacaccccaagacaatgtgagggcaagacgccaacaaatatcattcagcggtaagatagtttactgcaggacacctacagaggcggagaaagctgcaactgacatcttactcaaaattgagaggatgaaaaccccaggccaggtttctcttggatttgatctcgagtggaggccctttccaagaagaggagaaccaccttgtaaggttgctgtaatgcaactatgcatggagaaaactctgtgctatgtcctgcatattgctcactctggggtaccgcctatactgaaaactcttttggaggatagttcgtccattaaagttggaatatgcatagacaatgatgcaaggaaaatgttgaatgactataatgtctgtgtacaaccactgatggatttgtcgaccttggcaaatgtcaagttagcttctcccaaaagatggagccttgcttctttaaccgaaatgatcacatgcaaagagttgccaaagccgagcaacataagaatggggaactgggaggctgatgtcctctccaaacaacaacttcaatatgctgctacagatgcttatatctcatggtacttgtatgagactcttccagattacacgattgaagctgagtctgtaaaggcacaataacttcaagtggattctattgggaactgttgtgttagtctattatcttcacatctcaatcaggtgcgagtagacttgcaagctgcatacaaacacgattgtgtaggactccatgagtatgaataagtgtccaaggcagggggttgagtaggaactgggaagctcctttgtcgcaacaaatggatggtgaattccgtgtgagtatgtgtgttgtgcacttccagtttgcacttgtaaatttattctcctcgtatgtgaagggcgtgtctgttttttttttatttaaagaacttgactgttgtatgagttcgcaccccattttttttttgttaatacaacaatgatatgcagctctcttgcgtatcgagagggaaaaaaaagagatggttagttcctttgtcattgcttaaggtaaaaaacatgaattggactattggtattggactgtattttgctcgggaccattggaattactgtacggcaacctatttgccttgtattaacgtaaagctgtgcagttctctttatgtatggtttaaaaatgaagactgatttgtaaagagcgttatgatcagtggcgttataatcaggaaatcaaaaaaaaaaaaaaaccaggttgccttgcggatatcctgcgtgttcagttcgcggcgtaaacaggtggcgcgttttgaatcgcatattttaatttgacccactgtatctctgatgtatacgtgtcacgtattctttaagaatcg

SEQ ID NO: 25752 - DNA, 1423 bp, Zea Mays
atcagagatatccaaacaatactgtctattggatttgaatgagtaagagagacaatgtgagggcaagacgccaacaaatatcattcagcggtaagatagtttactgcaggacacctacagaggcggagaaagctgcaactgacatcttactcaaaattgagaggatgaaaaccccaggccaggtttctcttggatttgatctcgagtggaggccctttccaagaagaggagaaccaccttgtaaggttgctgtaatgcaactatgcatggagaaaactctgtgctatgtcctgcatattgctcactctggggtaccgcctatactgaaaactcttttggaggatagttcgtccattaaagttggaatatgcatagacaatgatgcaaggaaaatgttgaatgactataatgtctgtgtacaaccactgatggatttgtcgaccttggcaaatgtcaagttagcttctcccaaaagatggagccttgcttctttaaccgaaatgatcacatgcaaagagttgccaaagccgagcaacataagaatggggaactgggaggctgatgtcctctccaaacaacaacttcaatatgctgctacagatgcttatatctcatggtacttgtatgaggcactgcagactcttccagattacacgattgaagctgagtctgtaaaggcacaataacttcaagtggattctattgggaactgttgtgttagtctattatcttcacatctcaatcaggtgcgagtagacttgcaagctgcatacaaacacgattgtgtaggactccatgagtatgaataagtgtccaaggcagggggttgagtaggaactgggaagctcctttgtcgcaacaaatggatggtgaattccgtgtgagtatgtgtgttgtgcacttccagtttgcacttgtaaatttattctcctcgtatgtgaagggcgtgtctgttttttttttatttaaagaacttgactgttgtatgagttcgcaccccattttttttttgttaatacaacaatgatatgcagctctcttgcgtatcgagagggaaaaaaaagagatggttagttcctttgtcattgcttaaggtaaaaaacatgaattggactattggtattggactgtattttgctcgggaccattggaattactgtacggcaacctatttgccttgtattaacgtaaagctgtgcagttctctttatgtatggtttaaaaatgaagactgatttgtaaagagcgttatgatcagtggcgttataatcaggaaatcaaaaaaaaaaaaaaaccaggttgccttgcggatatcctgcgtgttcagttcgcggcgtaaacaggtggcgcgttttgaatcgcatattttaatttgacccactgtatctctgatgtatacgtgtcacgtattctttaagaatcg

SEQ ID NO: 25753 - DNA, 1923 bp, Zea Mays
gttttttttcacgccgtccgctgcaccatttccccttccgttccgtccgctgcatcctcgtcgtacgttctgtctgtctttctcgccccctctcgctctccgacggctggtcggccgccgccgccgtaagccgccaggtgctgaggctttcgttggtctcttcgccggggacgagcacccactagatggcaaatgaagagaagttgttcaagatgggaaatgcagatacagatactgctgcactgcacaatgaatgggatgatgctctctgtccgatatgcatggaccatccacacaatgctgtccttctgttgtgcagctcccatgacaaaggatgccgatcctatatatgtgatacaagctataggcattcaaattgcttagacaggttcaagaaaatgaaagtgaatgatggggacagtccttcacagtcaagctcatccatgcctaggggtacaagaaaccaaaatgttgtccacggatctcgttttggtcttactagagagagccgcagactacacatagacatatctgaacccaatgaagcttccaatcatcaaggtgccagccatagacctgctgccataggtggagaacaggaagataacagctacaatgaaggcacagatttgacattggaaggtcaagaggttgagatcaatggtacttcagagtcaagtgatatgtcaagcttaaaccaattgttgtgcccactgtgtaggggggctgttagtggctggaagatcatcgaagaagctagacagtatttggatgagaaatccagagcttgctcacgagaagcctgcatgttttctggcaactacagggagatccgtagacatgccagaagggtgcaccccactacaaggcctgctgatgttgatccatcaagacgccgtgcatggcaccgcctggagcatcagcgggagtatgctgatatagtaagtgcaatcaggtcggctatgcctggggcagttgtgtttggtgattatgctatcgaaggtggtgaaatgttttcacatgaccgggaaaccagtggcccaagtgaaccgagtgggtctcttctgacaacattctttctatttcatatgctcagcagtagtccgattagatcaggtgatgagccaggaggcacatcaaggggcctgagaaggcatagaagacgctatctgtggggagagaatttgttaagtcttcaatacaatgataatgatgatgatgatgatgatgatgatgatgatgatgagggggaggagggcgaaggagatgctgtagatgaagaagttcagagaccaaggagccgccggaggttcataagatcaagatcggaggagcgagtataatacattggtggcttgtggtaattacattcttcgctgctgtgaagttcttttgccgtgaacccatgatgactccttgcatggcagtggatgatgtgcttccttgcattgttaaaatgctgcgcacatccttgcaatcaaagacctaaaggcttgtggacctcaagttcaagtttagatgactcaaatgtgtttaacaccatccatgagaccctcttgaatccgacacttacggggaacactcgttcttatggcaaagctggactgatctcagcacaattacacaagtgatactagaagctagcttttggagatgctcgctccatcacagttggtgctgtcgctggtgcaccatgtctttttaccttatgcactgtgtgtcatctgcatttgttgtatattcttcacatattacattccattgagttcatgctgctactattctggttcatatcgggtgtgtttggttgcctggatatgatctggccagactcatgagacgcagctttattctgtttggttgcctgatcagcctcttcagcctggctcgcgggatgcaaatattcctcttgagcctggctcc

SEQ ID NO: 25754 - DNA, 726 bp, Zea Mays
agaacatcacctgttcctagcccaagtctcgatttaagtacttccatccttaggattgtttctgttccttaggaagaagagagcatcacagggaactttgcagtaagatcccaccattgctctaaatgaaaatattatttcaggtagaagccatcctttctcgagctaggctaaggacaacctctatccacaagatctaagcagggctaagcatttttgtaaatcatgttttgatacttcaccagaagtatctataaaggtatggatatcaaggaagacaatgcatcaaaggttccaagcaactcctataaacctaatgcacatttcactagacttaaagtgtgcgaaaattatttaaaaacacaaggaaaggggttgcatgcaccagggcttgcctgagtaacactaggttagtgttgttagacgacgacttggcgagtatcctttggcttggcactcgtttagattatccatcttctggttcgtccatcagcatcatcctgcggattggtcctcgcttggggtcgacttgagccattttccgcatcacgcgattaattaacgtacctgaatggaatgcattatgcacatgaatgcatatcgatggaaatattacaaacctaaatagtgctacgcgatggcgaatttaaacacctagcggcgatgcgttgtacaattttgtacgaaatcagtagttattaatatacgactacacgcaataattac

SEQ ID NO: 25755 - DNA, 2238 bp, Zea Mays
cccgctgctttaaatctcggcgttttcgtggcgcgtgcaggcggagaggaagaggacgccaatccaaatccttatccccacgtgtgttatccttccattttgtgggcgggggtgagctcctgcctcctgccgccctgcttcgcaatcctcctccacctcgacaacgacgccgtcgcacctcgctgctcgccgccacagcggtctcacctcatcagcttgtgtcggccacgggacgcgaccgaggcgagggcgggcagtctttgtccggtcggcgatgcagaccctccgtcccgcgcccgcctccttcctcgtgccgcccgctccccagctcctccgcacagcgccgccaccagccccgagagcaaacgctgctgctcttgccgcggcgtcgcacggctggttcccctcgccgcaccgtgcctgccggcgccgtcgacgcgtgacaaggtctgcgtcgtccggtgctagcgccaccgtggcctccgtggatgatgccaagaaggacgtgctcatagcgctctcccaaatcatcgatcctgatttcggcacggacatcgtgtcctgtgggtttatcaaggatttggaggtcagtgaggccttggaagaggtctcatttcgtctggagctgacgactcccgcttgcccaatcaaagacgagttcgaacagaaggcgaacgaggtcgtcgcagcacttccatgggtcaagaaggtagacgtcacaatgtctgcgcaacctgcacagccggtatatggaggggagcttccagaagggctacagaagatctccaacatcatagcagtttcaagctgcaagggaggggtagggaaatcaactgttgctgtaaatcttgcgtacacactagctgggatgggagctcgggttggaatctttgatgctgacgtctttggcccaagcttaccgactatggtttctcctgaaaaccggttgctagtgatgaacccagaaagcaaatatattcttccgaccgagtatttgggcgtcaaaatggtgtccttcgggtttgctggacaaggaagggcgatcatgcggggtccaatggtttcaggagtcatcaatcagctgctgaccactactgactggggtgaacttgactaccttgtcatcgatatgcctcctggaacaggcgacatacacttaacactctgtcaggtggctccattgactgcagcagtgattgttaccacccctcaaaagctggctttcattgatgttgccaagggagtaaggatgttctctaaactgaaggttccttgtgttgcggttgtagagaacatgtgctattttgatgctgatggaaaacgttattacccatttggacaaggttctggaactcaggttgtgcagcagtttggaatacctcacctctttgatttgccaatacggccaactctttcggcttccggagatactggaattcctgaggttgtggctgatccgcaaggggatgtggctaatacatttcagaatcttggggcatgtgttgttcaacagtgtgctaaaatcaggcaacaagtttctacagcggtgtcctacgatagatccattaaagcaatcagagtgaaagtgccagattcagacgaagagttcttgctgcatccagcaacagttagacggaatgaccgatccgctcaaagcgtggatgaatggacaggggagcagaaggttcagtacagtgacataccagatgacatcgagccagaagagattaggccgatgggaaactatgcagtttctataacttggcctgatggatttagtcagatagcaccttatgaccaattggaaatgctggagcggttggtggaggctccgagtccagcagcagcgtctgcagtggcctcgtcatgatacagcagaaagaatgttcagttagcaaggggcaagaaggccgacttttagctcccagaaaatttatagctctgctacaaattttgaaagaattttacagtactgtagaaccatgctcattgaattttaaaaaaaggcagcagctttcgttcctcttaaaccattgtgcagacccccgttctcactaaaccacaggctagccttgacaataccaaaccataaaagaaaacggttactgttataaagatagttttttttcccagttatatagaaaattgatataaaactagtgacaaacagaaggtgcatgggtggatctaatatgtttgttacatatgaatatagtgaatacaagtattattgataac

SEQ ID NO: 25756 - DNA, 2664 bp, Zea Mays
cccgctgctttaaatctcggcgttttcgtggcgcgtgcaggcggagaggaagaggacgccaatccaaatccttatccccacgtgtgttatccttccattttgtgggcgggggtgagctcctgcctcctgccgccctgcttcgcaatcctcctccacctcgacaacgacgccgtcgcacctcgctgctcgccgccacagcggtctcacctcatcagcttgtgtcggccacgggacgcgaccgaggcgagggcgggcagtctttgtccggtcggcgatgcagaccctccgtcccgcgcccgcctccttcctcgtgccgcccgctccccagctcctccgcacagcgccgccaccagccccgagagcaaacgctgctgctcttgccgcggcgtcgcacggctggttcccctcgccgcaccgtgcctgccggcgccgtcgacgcgtgacaaggtctgcgtcgtccggtgctagcgccaccgtggcctccgtggatgatgccaagaaggacgtgctcatagcgctctcccaaatcatcgatcctgatttcggcacggacatcgtgtcctgtgggtttatcaaggatttggaggtcagtgaggccttggaagaggtctcatttcgtctggagctgacgactcccgcttgcccaatcaaagacgagttcgaacagaaggcgaacgaggtcgtcgcagcacttccatgggtcaagaaggtagacgtcacaatgtctgcgcaacctgcacagccggtatatggaggggagcttccagaagggctacagaagatctccaacatcatagcagtttcaagctgcaagggaggggtagggaaatcaactgttgctgtaaatcttgcgtacacactagctgggatgggagctcgggttggaatctttgatgctgacgtctttggcccaagcttaccgactatggtttctcctgaaaaccggttgctagtgatggtacacctcctatgaacctctatgttagcatgaaattttgtacctgcactaataatggtaaacagacttacctttagaacccagaaagcaaatatattcttccgaccgagtatttgggcgtcaaaatggtgtccttcgggtttgctggacaaggaagggcgatcatgcggggtccaatggtttcaggagtcatcaatcagctgctgaccactactgactggggtgaacttgactaccttgtcatcgatatgcctcctggaacaggcgacatacacttaacactctgtcaggtggctccattgactgcagcagtgattgttaccacccctcaaaagctggctttcattgatgttgccaagggagtaaggatgttctctaaactgaaggttccttgtgttgcggttgtagagaacatgtgctattttgatgctgatggaaaacgttattacccatttggacaaggttctggaactcaggttgtgcagcagtttggaatacctcacctctttgatttgccaatacggccaactgtaagttcagtaatagctacttatcatgaactaagggggtgtttggattccttggattatagtaattagataaaataatctgaatatgatacaaacatcctagattatggcatggattaaagtattccaaccaccggattattatactcattatttatactccaactaacaatgatccacctctataatgtagggatccaatccaaatactccgattaacagtggtccacccctatagaataatctagggattcaaatggactaatgattaaaatctacaatccagattactgtaatccgattgggatctgaacaagcccctaaataagagagcaaaaatcacagtttggtaagttatgcagctttcggcttccggagatactggaattcctgaggttgtggctgatccgcaaggggatgtggctaatacatttcagaatcttggggcatgtgttgttcaacagtgtgctaaaatcaggcaacaagtttctacagcggtgtcctacgatagatccattaaagcaatcagagtgaaagtgccagattcagacgaagagttcttgctgcatccagcaacagttagacggaatgaccgatccgctcaaagcgtggggagcagaaggttcagtacagtgacataccagatgacatcgagccagaagagattaggccgatgggaaactatgcagtttctataacttggcctgatggatttagtcagatagcaccttatgaccaattggaaatgctggagcggttggtggaggctccgagtccagcagcagcgtctgcagtggcctcgtcatgatacagcagaaagaatgttcagttagcaaggggcaagaaggccgacttttagctcccagaaaatttatagctctgctacaaattttgaaagaattttacagtactgtagaaccatgctcattgaattttaaaaaaaggcagcagctttcgttcctcttaaaccattgtgcagacccccgttctcactaaaccacaggctagccttgacaataccaaaccataaaagaaaacggttactgttataaagatagttttttttcccagttatatagaaaattgatataaaactagtgacaaacagaaggtgcatgggtggatctaatatgtttgttacatatgaatatagtgaatacaagtattattgataac

SEQ ID NO: 25757 - DNA, 2129 bp, Zea Mays
cccgctgctttaaatctcggcgttttcgtggcgcgtgcaggcggagaggaagaggacgccaatccaaatccttatccccacgtgtgttatccttccattttgtgggcgggggtgagctcctgcctcctgccgccctgcttcgcaatcctcctccacctcgacaacgacgccgtcgcacctcgctgctcgccgccacagcggtctcacctcatcagcttgtgtcggccacgggacgcgaccgaggcgagggcgggcagtctttgtccggtcggcgatgcagaccctccgtcccgcgcccgcctccttcctcgtgccgcccgctccccagctcctccgcacagcgccgccaccagccccgagagcaaacgctgctgctcttgccgcggcgtcgcacggctggttcccctcgccgcaccgtgcctgccggcgccgtcgacgcgtgacaaggtctgcgtcgtccggtgcagctagcgccaccgtggcctccgtggatgatgccaagaaggacgtgctcatagcgctctcccaaatcatcgatcctgatttcggcacggacatcgtgtcctgtgggtttatcaaggatttggaggtcagtgaggccttggaagaggtctcatttcgtctggagctgacgactcccgcttgcccaatcaaagacgagttcgaacagaaggcgaacgaggtcgtcgcagcacttccatgggtcaagaaggtagacgtcacaatgtctgcgcaacctgcacagccggtatatggaggggagcttccagaagggctacagaagatctccaacatcatagcagtttcaagctgcaagggaggggtagggaaatcaactgttgctgtaaatcttgcgtacacactagctgggatgggagctcgggttggaatctttgatgctgacgtctttggcccaagcttaccgactatggtttctcctgaaaaccggttgctagtgatgacttacctttagaacccagaaagcaaatatattcttccgaccgagtatttgggcgtcaaaatggtgtccttcgggtttgctggacaaggaagggcgatcatgcggggtccaatggtttcaggagtcatcaatcagctgctgaccactactgactggggtgaacttgactaccttgtcatcgatatgcctcctggaacaggcgacatacacttaacactctgtcaggtggctccattgactgcagcagtgattgttaccacccctcaaaagctggctttcattgatgttgccaagggagtaaggatgttctctaaactgaaggttccttgtgttgcggttgtagagaacatgtgctattttgatgctgatggaaaacgttattacccatttggacaaggttctggaactcaggttgtgcagcagtttggaatacctcacctctttgatttgccaatacggccaacttttctacagcggtgtcctacgatagatccattaaagcaatcagagtgaaagtgccagattcagacgaagagttcttgctgcatccagcaacagttagacggaatgaccgatccgctcaaagcgtggatgaatggacaggggagcagaaggttcagtacagtgacataccagatgacatcgagccagaagagattaggccgatgggaaactatgcagtttctataacttggcctgatggatttagtcagatagcaccttatgaccaattggaaatgctggagcggttggtggaggctccgagtccagcagcagcgtctgcagtggcctcgtcatgatacagcagaaagaatgttcagttagcaaggggcaagaaggccgacttttagctcccagaaaatttatagctctgctacaaattttgaaagaattttacagtactgtagaaccatgctcattgaattttaaaaaaaggcagcagctttcgttcctcttaaaccattgtgcagacccccgttctcactaaaccacaggctagccttgacaataccaaaccataaaagaaaacggttactgttataaagatagttttttttcccagttatatagaaaattgatataaaactagtgacaaacagaaggtgcatgggtggatctaatatgtttgttacatatgaatatagtgaatacaagtattattgataac

SEQ ID NO: 25758 - DNA, 2812 bp, Zea Mays
cccgctgctttaaatctcggcgttttcgtggcgcgtgcaggcggagaggaagaggacgccaatccaaatccttatccccacgtgtgttatccttccattttgtgggcgggggtgagctcctgcctcctgccgccctgcttcgcaatcctcctccacctcgacaacgacgccgtcgcacctcgctgctcgccgccacagcggtctcacctcatcagcttgtgtcggccacgggacgcgaccgaggcgagggcgggcagtctttgtccggtcggcgatgcagaccctccgtcccgcgcccgcctccttcctcgtgccgcccgctccccagctcctccgcacagcgccgccaccagccccgagagcaaacgctgctgctcttgccgcggcgtcgcacggctggttcccctcgccgcaccgtgcctgccggcgccgtcgacgcgtgacaaggtctgcgtcgtccggtgcagctagcgccaccgtggcctccgtggatgatgccaagaaggacgtgctcatagcgctctcccaaatcatcgatcctgatttcggcacggacatcgtgtcctgtgggtttatcaaggatttggaggtcagtgaggccttggaagaggtctcatttcgtctggagctgacgactcccgcttgcccaatcaaagacgagttcgaacagaaggcgaacgaggtcgtcgcagcacttccatgggtcaagaaggtagacgtcacaatgtctgcgcaacctgcacagccggtatatggaggggagcttccagaagggctacagaagatctccaacatcatagcagtttcaagctgcaagggaggggtagggaaatcaactgttgctgtaaatcttgcgtacacactagctgggatgggagctcgggttggaatctttgatgctgacgtctttggcccaagcttaccgactatggtttctcctgaaaaccggttgctagtgatggtacacctcctatgaacctctatgttagcatgaaattttgtacctgcactaataatggtaaacagacttacctttagaacccagaaagcaaatatattcttccgaccgagtatttgggcgtcaaaatggtgtccttcgggtttgctggacaaggaagggcgatcatgcggggtccaatggtttcaggagtcatcaatcagctgctgaccactactgactggggtgaacttgactaccttgtcatcgatatgcctcctggaacaggcgacatacacttaacactctgtcaggtggctccattgactgcagcagtgattgttaccacccctcaaaagctggctttcattgatgttgccaagggagtaaggatgttctctaaactgaaggttccttgtgttgcggttgtagagaacatgtgctattttgatgctgatggaaaacgttattacccatttggacaaggttctggaactcaggttgtgcagcagtttggaatacctcacctctttgatttgccaatacggccaactggatccaatccaaatactccgattaacagtggtccacccctatagaataatctagggattcaaatggactaatgattaaaatctacaatccagattactgtaatccgattgggatctgaacaagcccctaaataagagagcaaaaatcacagtttggtaagttatgcagctttcggcttccggagatactggaattcctgaggttgtggctgatccgcaaggggatgtggctaatacatttcagaatcttggggcatgtgttgttcaacagtgtgctaaaatcaggcaacaagtttctacagcggtgtcctacgatagatccattaaagcaatcagagtgaaagtgccagattcagacgaagagttcttgctgcatccagcaacagttagacggaatgaccgatccgctcaaagcgtggtgtgtatatatgcttttcagcattcagtatgtgggatatatgtggttctaacatcagttcttaaggatggcaagtcaaaagtgtcttcatgtcattaaattgtgaaagtttcatttctacttgatcatagttggtcgccatcataaatgtacaagatctaccggtagtcctttctatattttttttatttctacttaatgaataggcagtgcggttgccatttatatatttttctaaaaaaaacttaggtcatgcatggtaaacatatttggcatagctttgtttctccttgtgtataactacggattccttaaatttctgcaggatgaatggacaggggagcagaaggttcagtacagtgacataccagatgacatcgagccagaagagattaggccgatgggaaactatgcagtttctataacttggcctgatggatttagtcagatagcaccttatgaccaattggaaatgctggagcggttggtggaggctccgagtccagcagcagcgtctgcagtggcctcgtcatgatacagcagaaagaatgttcagttagcaaggggcaagaaggccgacttttagctcccagaaaatttatagctctgctacaaattttgaaagaattttacagtactgtagaaccatgctcattgaattttaaaaaaaggcagcagctttcgttcctcttaaaccattgtgcagacccccgttctcactaaaccacaggctagccttgacaataccaaaccataaaagaaaacggttactgttataaagatagttttttttcccagttatatagaaaattgatataaaactagtgacaaacagaaggtgcatgggtggatctaatatgtttgttacatatgaatatagtgaatacaagtattattgataac

SEQ ID NO: 25759 - DNA, 2410 bp, Zea Mays
cccgctgctttaaatctcggcgttttcgtggcgcgtgcaggcggagaggaagaggacgccaatccaaatccttatccccacgtgtgttatccttccattttgtgggcgggggtgagctcctgcctcctgccgccctgcttcgcaatcctcctccacctcgacaacgacgccgtcgcacctcgctgctcgccgccacagcggtctcacctcatcagcttgtgtcggccacgggacgcgaccgaggcgagggcgggcagtctttgtccggtcggcgatgcagaccctccgtcccgcgcccgcctccttcctcgtgccgcccgctccccagctcctccgcacagcgccgccaccagccccgagagcaaacgctgctgctcttgccgcggcgtcgcacggctggttcccctcgccgcaccgtgcctgccggcgccgtcgacgcgtgacaaggtctgcgtcgtccggtgcagctagcgccaccgtggcctccgtggatgatgccaagaaggacgtgctcatagcgctctcccaaatcatcgatcctgatttcggcacggacatcgtgtcctgtgggtttatcaaggatttggaggtcagtgaggccttggaagaggtctcatttcgtctggagctgacgactcccgcttgcccaatcaaagacgagttcgaacagaaggcgaacgaggtcgtcgcagcacttccatgggtcaagaaggtagacgtcacaatgtctgcgcaacctgcacagccggtatatggaggggagcttccagaagggctacagaagatctccaacatcatagcagtttcaagctgcaagggaggggtagggaaatcaactgttgctgtaaatcttgcgtacacactagctgggatgggagctcgggttggaatctttgatgctgacgtctttggcccaagcttaccgactatggtttctcctgaaaaccggttgctagtgatgaacccagaaagcaaatatattcttccgaccgagtatttgggcgtcaaaatggtgtccttcgggtttgctggacaaggaagggcgatcatgcggggtccaatggtttcaggagtcatcaatcagctgctgaccactactgactggggtgaacttgactaccttgtcatcgatatgcctcctggaacaggcgacatacacttaacactctgtcaggtggctccattgactgcagcagtgattgttaccacccctcaaaagctggctttcattgatgttgccaagggagtaaggatgttctctaaactgaaggttccttgtgttgcggttgtagagaacatgtgctattttgatgctgatggaaaacgttattacccatttggacaaggttctggaactcaggttgtgcagcagtttggaatacctcacctctttgatttgccaatacggccaactggatccaatccaaatactccgattaacagtggtccacccctatagaataatctagggattcaaatggactaatgattaaaatctacaatccagattactgtaatccgattgggatctgaacaagcccctaaataagagagcaaaaatcacagtttggtaagttatgcagctttcggcttccggagatactggaattcctgaggttgtggctgatccgcaaggggatgtggctaatacatttcagaatcttggggcatgtgttgttcaacagtgtgctaaaatcaggcaacaagtttctacagcggtgtcctacgatagatccattaaagcaatcagagtgaaagtgccagattcagacgaagagttcttgctgcatccagcaacagttagacggaatgaccgatccgctcaaagcgtggatgaatggacaggggagcagaaggttcagtacagtgacataccagatgacatcgagccagaagagattaggccgatgggaaactatgcagtttctataacttggcctgatggatttagtcagatagcaccttatgaccaattggaaatgctggagcggttggtggaggctccgagtccagcagcagcgtctgcagtggcctcgtcatgatacagcagaaagaatgttcagttagcaaggggcaagaaggccgacttttagctcccagaaaatttatagctctgctacaaattttgaaagaattttacagtactgtagaaccatgctcattgaattttaaaaaaaggcagcagctttcgttcctcttaaaccattgtgcagacccccgttctcactaaaccacaggctagccttgacaataccaaaccataaaagaaaacggttactgttataaagatagttttttttcccagttatatagaaaattgatataaaactagtgacaaacagaaggtgcatgggtggatctaatatgtttgttacatatgaatatagtgaatacaagtattattgataac

SEQ ID NO: 25760 - DNA, 2326 bp, Zea Mays
cccgctgctttaaatctcggcgttttcgtggcgcgtgcaggcggagaggaagaggacgccaatccaaatccttatccccacgtgtgttatccttccattttgtgggcgggggtgagctcctgcctcctgccgccctgcttcgcaatcctcctccacctcgacaacgacgccgtcgcacctcgctgctcgccgccacagcggtctcacctcatcagcttgtgtcggccacgggacgcgaccgaggcgagggcgggcagtctttgtccggtcggcgatgcagaccctccgtcccgcgcccgcctccttcctcgtgccgcccgctccccagctcctccgcacagcgccgccaccagccccgagagcaaacgctgctgctcttgccgcggcgtcgcacggctggttcccctcgccgcaccgtgcctgccggcgccgtcgacgcgtgacaaggtctgcgtcgtccggtgcagctagcgccaccgtggcctccgtggatgatgccaagaaggacgtgctcatagcgctctcccaaatcatcgatcctgatttcggcacggacatcgtgtcctgtgggtttatcaaggatttggaggtcagtgaggccttggaagaggtctcatttcgtctggagctgacgactcccgcttgcccaatcaaagacgagttcgaacagaaggcgaacgaggtcgtcgcagcacttccatgggtcaagaaggtagacgtcacaatgtctgcgcaacctgcacagccggtatatggaggggagcttccagaagggctacagaagatctccaacatcatagcagtttcaagctgcaagggaggggtagggaaatcaactgttgctgtaaatcttgcgtacacactagctgggatgggagctcgggttggaatctttgatgctgacgtctttggcccaagcttaccgactatggtttctcctgaaaaccggttgctagtgatggtacacctcctatgaacctctatgttagcatgaaattttgtacctgcactaataatggtaaacagacttacctttagaacccagaaagcaaatatattcttccgaccgagtatttgggcgtcaaaatggtgtccttcgggtttgctggacaaggaagggcgatcatgcggggtccaatggtttcaggagtcatcaatcagctgctgaccactactgactggggtgaacttgactaccttgtcatcgatatgcctcctggaacaggcgacatacacttaacactctgtcaggtggctccattgactgcagcagtgattgttaccacccctcaaaagctggctttcattgatgttgccaagggagtaaggatgttctctaaactgaaggttccttgtgttgcggttgtagagaacatgtgctattttgatgctgatggaaaacgttattacccatttggacaaggttctggaactcaggttgtgcagcagtttggaatacctcacctctttgatttgccaatacggccaactttatgcagctttcggcttccggagatactggaattcctgaggttgtggctgatccgcaaggggatgtggctaatacatttcagaatcttggggcatgtgttgttcaacagtgtgctaaaatcaggcaacaagtttctacagcggtgtcctacgatagatccattaaagcaatcagagtgaaagtgccagattcagacgaagagttcttgctgcatccagcaacagttagacggaatgaccgatccgctcaaagcgtggatgaatggacaggggagcagaaggttcagtacagtgacataccagatgacatcgagccagaagagattaggccgatgggaaactatgcagtttctataacttggcctgatggatttagtcagatagcaccttatgaccaattggaaatgctggagcggttggtggaggctccgagtccagcagcagcgtctgcagtggcctcgtcatgatacagcagaaagaatgttcagttagcaaggggcaagaaggccgacttttagctcccagaaaatttatagctctgctacaaattttgaaagaattttacagtactgtagaaccatgctcattgaattttaaaaaaaggcagcagctttcgttcctcttaaaccattgtgcagacccccgttctcactaaaccacaggctagccttgacaataccaaaccataaaagaaaacggttactgttataaagatagttttttttcccagttatatagaaaattgatataaaactagtgacaaacagaaggtgcatgggtggatctaatatgtttgttacatatgaatatagtgaatacaagtattattgataac

SEQ ID NO: 25761 - DNA, 2253 bp, Zea Mays
cccgctgctttaaatctcggcgttttcgtggcgcgtgcaggcggagaggaagaggacgccaatccaaatccttatccccacgtgtgttatccttccattttgtgggcgggggtgagctcctgcctcctgccgccctgcttcgcaatcctcctccacctcgacaacgacgccgtcgcacctcgctgctcgccgccacagcggtctcacctcatcagcttgtgtcggccacgggacgcgaccgaggcgagggcgggcagtctttgtccggtcggcgatgcagaccctccgtcccgcgcccgcctccttcctcgtgccgcccgctccccagctcctccgcacagcgccgccaccagccccgagagcaaacgctgctgctcttgccgcggcgtcgcacggctggttcccctcgccgcaccgtgcctgccggcgccgtcgacgcgtgacaaggtctgcgtcgtccggtgcagctagcgccaccgtggcctccgtggatgatgccaagaaggacgtgctcatagcgctctcccaaatcatcgatcctgatttcggcacggacatcgtgtcctgtgggtttatcaaggatttggaggtcagtgaggccttggaagaggtctcatttcgtctggagctgacgactcccgcttgcccaatcaaagacgagttcgaacagaaggcgaacgaggtcgtcgcagcacttccatgggtcaagaaggtagacgtcacaatgtctgcgcaacctgcacagccggtatatggaggggagcttccagaagggctacagaagatctccaacatcatagcagtttcaagctgcaagggaggggtagggaaatcaactgttgctgtaaatcttgcgtacacactagctgggatgggagctcgggttggaatctttgatgctgacgtctttggcccaagcttaccgactatggtttctcctgaaaaccggttgctagtgatgacttacctttagaacccagaaagcaaatatattcttccgaccgagtatttgggcgtcaaaatggtgtccttcgggtttgctggacaaggaagggcgatcatgcggggtccaatggtttcaggagtcatcaatcagctgctgaccactactgactggggtgaacttgactaccttgtcatcgatatgcctcctggaacaggcgacatacacttaacactctgtcaggtggctccattgactgcagcagtgattgttaccacccctcaaaagctggctttcattgatgttgccaagggagtaaggatgttctctaaactgaaggttccttgtgttgcggttgtagagaacatgtgctattttgatgctgatggaaaacgttattacccatttggacaaggttctggaactcaggttgtgcagcagtttggaatacctcacctctttgatttgccaatacggccaactctttcggcttccggagatactggaattcctgaggttgtggctgatccgcaaggggatgtggctaatacatttcagaatcttggggcatgtgttgttcaacagtgtgctaaaatcaggcaacaagtttctacagcggtgtcctacgatagatccattaaagcaatcagagtgaaagtgccagattcagacgaagagttcttgctgcatccagcaacagttagacggaatgaccgatccgctcaaagcgtggatgaatggacaggggagcagaaggttcagtacagtgacataccagatgacatcgagccagaagagattaggccgatgggaaactatgcagtttctataacttggcctgatggatttagtcagatagcaccttatgaccaattggaaatgctggagcggttggtggaggctccgagtccagcagcagcgtctgcagtggcctcgtcatgatacagcagaaagaatgttcagttagcaaggggcaagaaggccgacttttagctcccagaaaatttatagctctgctacaaattttgaaagaattttacagtactgtagaaccatgctcattgaattttaaaaaaaggcagcagctttcgttcctcttaaaccattgtgcagacccccgttctcactaaaccacaggctagccttgacaataccaaaccataaaagaaaacggttactgttataaagatagttttttttcccagttatatagaaaattgatataaaactagtgacaaacagaaggtgcatgggtggatctaatatgtttgttacatatgaatatagtgaatacaagtattattgataac

SEQ ID NO: 25762 - DNA, 2403 bp, Zea Mays
cccgctgctttaaatctcggcgttttcgtggcgcgtgcaggcggagaggaagaggacgccaatccaaatccttatccccacgtgtgttatccttccattttgtgggcgggggtgagctcctgcctcctgccgccctgcttcgcaatcctcctccacctcgacaacgacgccgtcgcacctcgctgctcgccgccacagcggtctcacctcatcagcttgtgtcggccacgggacgcgaccgaggcgagggcgggcagtctttgtccggtcggcgatgcagaccctccgtcccgcgcccgcctccttcctcgtgccgcccgctccccagctcctccgcacagcgccgccaccagccccgagagcaaacgctgctgctcttgccgcggcgtcgcacggctggttcccctcgccgcaccgtgcctgccggcgccgtcgacgcgtgacaaggtctgcgtcgtccggtgcagctagcgccaccgtggcctccgtggatgatgccaagaaggacgtgctcatagcgctctcccaaatcatcgatcctgatttcggcacggacatcgtgtcctgtgggtttatcaaggatttggaggtcagtgaggccttggaagaggtctcatttcgtctggagctgacgactcccgcttgcccaatcaaagacgagttcgaacagaaggcgaacgaggtcgtcgcagcacttccatgggtcaagaaggtagacgtcacaatgtctgcgcaacctgcacagccggtatatggaggggagcttccagaagggctacagaagatctccaacatcatagcagtttcaagctgcaagggaggggtagggaaatcaactgttgctgtaaatcttgcgtacacactagctgggatgggagctcgggttggaatctttgatgctgacgtctttggcccaagcttaccgactatggtttctcctgaaaaccggttgctagtgatgacttacctttagaacccagaaagcaaatatattcttccgaccgagtatttgggcgtcaaaatggtgtccttcgggtttgctggacaaggaagggcgatcatgcggggtccaatggtttcaggagtcatcaatcagctgctgaccactactgactggggtgaacttgactaccttgtcatcgatatgcctcctggaacaggcgacatacacttaacactctgtcagcagtgattgttaccacccctcaaaagctggctttcattgatgttgccaagggagtaaggatgttctctaaactgaaggttccttgtgttgcggttgtagagaacatgtgctattttgatgctgatggaaaacgttattacccatttggacaaggttctggaactcaggttgtgcagcagtttggaatacctcacctctttgatttgccaatacggccaactggatccaatccaaatactccgattaacagtggtccacccctatagaataatctagggattcaaatggactaatgattaaaatctacaatccagattactgtaatccgattgggatctgaacaagcccctaaataagagagcaaaaatcacagtttggtaagttatgcagctttcggcttccggagatactggaattcctgaggttgtggctgatccgcaaggggatgtggctaatacatttcagaatcttggggcatgtgttgttcaacagtgtgctaaaatcaggcaacaagtttctacagcggtgtcctacgatagatccattaaagcaatcagagtgaaagtgccagattcagacgaagagttcttgctgcatccagcaacagttagacggaatgaccgatccgctcaaagcgtggatgaatggacaggggagcagaaggttcagtacagtgacataccagatgacatcgagccagaagagattaggccgatgggaaactatgcagtttctataacttggcctgatggatttagtcagatagcaccttatgaccaattggaaatgctggagcggttggtggaggctccgagtccagcagcagcgtctgcagtggcctcgtcatgatacagcagaaagaatgttcagttagcaaggggcaagaaggccgacttttagctcccagaaaatttatagctctgctacaaattttgaaagaattttacagtactgtagaaccatgctcattgaattttaaaaaaaggcagcagctttcgttcctcttaaaccattgtgcagacccccgttctcactaaaccacaggctagccttgacaataccaaaccataaaagaaaacggttactgttataaagatagttttttttcccagttatatagaaaattgatataaaactagtgacaaacagaaggtgcatgggtggatctaatatgtttgttacatatgaatatagtgaatacaagtattattgataac

SEQ ID NO: 25763 - DNA, 2388 bp, Zea Mays
cccgctgctttaaatctcggcgttttcgtggcgcgtgcaggcggagaggaagaggacgccaatccaaatccttatccccacgtgtgttatccttccattttgtgggcgggggtgagctcctgcctcctgccgccctgcttcgcaatcctcctccacctcgacaacgacgccgtcgcacctcgctgctcgccgccacagcggtctcacctcatcagcttgtgtcggccacgggacgcgaccgaggcgagggcgggcagtctttgtccggtcggcgatgcagaccctccgtcccgcgcccgcctccttcctcgtgccgcccgctccccagctcctccgcacagcgccgccaccagccccgagagcaaacgctgctgctcttgccgcggcgtcgcacggctggttcccctcgccgcaccgtgcctgccggcgccgtcgacgcgtgacaaggtctgcgtcgtccggtgctagcgccaccgtggcctccgtggatgatgccaagaaggacgtgctcatagcgctctcccaaatcatcgatcctgatttcggcacggacatcgtgtcctgtgggtttatcaaggatttggaggtcagtgaggccttggaagaggtctcatttcgtctggagctgacgactcccgcttgcccaatcaaagacgagttcgaacagaaggcgaacgaggtcgtcgcagcacttccatgggtcaagaaggtagacgtcacaatgtctgcgcaacctgcacagccggtatatggaggggagcttccagaagggctacagaagatctccaacatcatagcagtttcaagctgcaagggaggggtagggaaatcaactgttgctgtaaatcttgcgtacacactagctgggatgggagctcgggttggaatctttgatgctgacgtctttggcccaagcttaccgactatggtttctcctgaaaaccggttgctagtgatgaacccagaaagcaaatatattcttccgaccgagtatttgggcgtcaaaatggtgtccttcgggtttgctggacaaggaagggcgatcatgcggggtccaatggtttcaggagtcatcaatcagctgctgaccactactgactggggtgaacttgactaccttgtcatcgatatgcctcctggaacaggcgacatacacttaacactctgtcagcagtgattgttaccacccctcaaaagctggctttcattgatgttgccaagggagtaaggatgttctctaaactgaaggttccttgtgttgcggttgtagagaacatgtgctattttgatgctgatggaaaacgttattacccatttggacaaggttctggaactcaggttgtgcagcagtttggaatacctcacctctttgatttgccaatacggccaactggatccaatccaaatactccgattaacagtggtccacccctatagaataatctagggattcaaatggactaatgattaaaatctacaatccagattactgtaatccgattgggatctgaacaagcccctaaataagagagcaaaaatcacagtttggtaagttatgcagctttcggcttccggagatactggaattcctgaggttgtggctgatccgcaaggggatgtggctaatacatttcagaatcttggggcatgtgttgttcaacagtgtgctaaaatcaggcaacaagtttctacagcggtgtcctacgatagatccattaaagcaatcagagtgaaagtgccagattcagacgaagagttcttgctgcatccagcaacagttagacggaatgaccgatccgctcaaagcgtggatgaatggacaggggagcagaaggttcagtacagtgacataccagatgacatcgagccagaagagattaggccgatgggaaactatgcagtttctataacttggcctgatggatttagtcagatagcaccttatgaccaattggaaatgctggagcggttggtggaggctccgagtccagcagcagcgtctgcagtggcctcgtcatgatacagcagaaagaatgttcagttagcaaggggcaagaaggccgacttttagctcccagaaaatttatagctctgctacaaattttgaaagaattttacagtactgtagaaccatgctcattgaattttaaaaaaaggcagcagctttcgttcctcttaaaccattgtgcagacccccgttctcactaaaccacaggctagccttgacaataccaaaccataaaagaaaacggttactgttataaagatagttttttttcccagttatatagaaaattgatataaaactagtgacaaacagaaggtgcatgggtggatctaatatgtttgttacatatgaatatagtgaatacaagtattattgataac

SEQ ID NO: 25764 - DNA, 2290 bp, Zea Mays
acagggaggaactgatttgatccaacaaaatttcctttttttttcttttcccgctgctttaaatctcggcgttttcgtggcgcgtgcaggcggagaggaagaggacgccaatccaaatccttatccccacgtgtgttatccttccattttgtgggcgggggtgagctcctgcctcctgccgccctgcttcgcaatcctcctccacctcgacaacgacgccgtcgcacctcgctgctcgccgccacagcggtctcacctcatcagcttgtgtcggccacgggacgcgaccgaggcgagggcgggcagtctttgtccggtcggcgatgcagaccctccgtcccgcgcccgcctccttcctcgtgccgcccgctccccagctcctccgcacagcgccgccaccagccccgagagcaaacgctgctgctcttgccgcggcgtcgcacggctggttcccctcgccgcaccgtgcctgccggcgccgtcgacgcgtgacaaggtctgcgtcgtccggtgcagctagcgccaccgtggcctccgtggatgatgccaagaaggacgtgctcatagcgctctcccaaatcatcgatcctgatttcggcacggacatcgtgtcctgtgggtttatcaaggatttggaggtcagtgaggccttggaagaggtctcatttcgtctggagctgacgactcccgcttgcccaatcaaagacgagttcgaacagaaggcgaacgaggtcgtcgcagcacttccatgggtcaagaaggtagacgtcacaatgtctgcgcaacctgcacagccggtatatggaggggagcttccagaagggctacagaagatctccaacatcatagcagtttcaagctgcaagggaggggtagggaaatcaactgttgctgtaaatcttgcgtacacactagctgggatgggagctcgggttggaatctttgatgctgacgtctttggcccaagcttaccgactatggtttctcctgaaaaccggttgctagtgatgaacccagaaagcaaatatattcttccgaccgagtatttgggcgtcaaaatggtgtccttcgggtttgctggacaaggaagggcgatcatgcggggtccaatggtttcaggagtcatcaatcagctgctgaccactactgactggggtgaacttgactaccttgtcatcgatatgcctcctggaacaggcgacatacacttaacactctgtcaggtggctccattgactgcagcagtgattgttaccacccctcaaaagctggctttcattgatgttgccaagggagtaaggatgttctctaaactgaaggttccttgtgttgcggttgtagagaacatgtgctattttgatgctgatggaaaacgttattacccatttggacaaggttctggaactcaggttgtgcagcagtttggaatacctcacctctttgatttgccaatacggccaactctttcggcttccggagatactggaattcctgaggttgtggctgatccgcaaggggatgtggctaatacatttcagaatcttggggcatgtgttgttcaacagtgtgctaaaatcaggcaacaagtttctacagcggtgtcctacgatagatccattaaagcaatcagagtgaaagtgccagattcagacgaagagttcttgctgcatccagcaacagttagacggaatgaccgatccgctcaaagcgtggatgaatggacaggggagcagaaggttcagtacagtgacataccagatgacatcgagccagaagagattaggccgatgggaaactatgcagtttctataacttggcctgatggatttagtcagatagcaccttatgaccaattggaaatgctggagcggttggtggaggctccgagtccagcagcagcgtctgcagtggcctcgtcatgatacagcagaaagaatgttcagttagcaaggggcaagaaggccgacttttagctcccagaaaatttatagctctgctacaaattttgaaagaattttacagtactgtagaaccatgctcattgaattttaaaaaaaggcagcagctttcgttcctcttaaaccattgtgcagacccccgttctcactaaaccacaggctagccttgacaataccaaaccataaaagaaaacggttactgttataaagatagttttttttcccagttatatagaaaattgatataaaactagtgacaaacagaaggtgcatgggtggatctaatatgtttgttacatatgaatatagtgaatacaagtattattgataac

SEQ ID NO: 25765 - DNA, 934 bp, Zea Mays
ataccatgtctaatatttaccatcgtatcgtctccatggtgctgcaccaattcaacgctcctccttattataggtcagcttagtagttggtggtgactcgatcggcgagatgggcatggtcgcttccatgtgcacggagcccatcaagcggcaccgggtggagagagacctcgacggcaaggtggcggacgcgctccgggagcggacgaggtcccggcagaggaccttcaggtcggtgaacagcatcaccatgcgcctgcccaggttcaaggaagggctcagggacgtcaagaacatcttcgaccagtacgacgaggattcagatggcacgatcgacagcgaagagctgcagagcttcggaagcagagtccgggtgcacatgtccgaggaggagatgagcaacctgcaccggtactgcgacatcgacagcaggaagggcgtccagttccaggagttcgtcgtgctcctctgcctcgcgtacctgctcttcgggccagacgtcacacgacgcgtacgtttcggagttcgagtccggcaagctcaattacgtcttcgacgagctcatcgacgcgtacatcttcttcgacaaggacggggacggcatgctgcggaggagagacgtcacccacaggatgaacgaggcgtcgcaccaggagaggacacccagccacataacagcacagctattcaaggagatggatctgaacaggaacgggaaggtgaacctcaaggagttcctctactccatgatcagatgggctggtctcgggaccgaagacgatggcagcgatgaggcctcaccatgatgtaacttttttttttcttttcttttggtctgcattttaacagttgaataagtaaaatgtatgttgacaattgaaagtaaaaataaaaaatatcatgaagaaaatcgaaggtccaaatctgattcgat

SEQ ID NO: 25766 - DNA, 1959 bp, Zea Mays
gaaaaggataattggcgcaaatcttcaatgaagggcattgactcaatatcacctaaaataaaaagtgaaatcaatttatctgctatattataataattacataagtgtcatattgtaagatgtcataaaaccctacacacagtgcctcctaattcaataacacaaacatcagctggatagatctgcccatccacaagaactaaagacactgactgtatccactattttatttcatcagtgacatgaggaacaacctggatatttgaaaccataggtattttaaattatgtgatatggacagtccaatgcaacatgagtaataaatgccacagaaaaattacctataaagtctttccaatataatcaccccttctctccttctcaatgacagaccgaaagaagtagaaactatcagttacaatctcaaatgagaaaacacaagtatttccttgagctagaagatactggtatatatttctagaggtaatattatccctcgtcagagtaacatctatgaaacactcataattccccaaatccaagtcaacctacaaataccacaggttaggtagataccatcgaggctgcaaattttaaaaatgtgtattaaatggaagtattagggagatgtacctatccaccgttatcaagaaaatcaagaacagacacctcaccatgctcaaagggggacattgtacctgtatctgtgttcaagtatggatctacaaaaataggaaaccaaagtagtaagaccaatgccgagcaaagctttgctccctccaaacagtttaacattagaaagttgaaattttgacttaaccatttacaaatagtcagttttaattttctcgtttgccacctgtggataatgtgaattcttagtgacacatttcagacttcgatcaataacgagtgctgatgctattagctaatgctgccatattcatcttttaaaagcatgttccattcatcctagaaaggtgccttcattcgtgcaagggtgttggttgaggatgttcatctggttggtctgatggtctcccaccactttcaaccttttatgtgtgtttctactcaacatcttctacaataattggcagctatattgtttccatggtgaagttgcgagaacgatgtgtatatctggatgactttagggatgagtctcctctgacttaagtgagagggacttgaatcattaactgtacatggatcacagtgagatatatttccaatctgcaaaaggtactaacattacttcagtatctaaatcacccaaagcatttccagtctaaaattaggaatgcactacgacatgcgttcattggttccctaatttaaaacacagactaagaaattttctaaacccacggcggaacagtcctagtagagacactacactgtctcgcataatttcatgaacaacaatttacaagcactacaaaccgacccttgaatcatccacttgcaaatagaagaaagcggtgatgcggcacgtactggacggcggaccgcatcagcagtcgctgggggcaggggggcacggaccagagccacggaggcgacgaacgaatcgaagacgatcccaagaatgagccagcaaacctaccgtccagccatgccattgaggtcgacaacgctggccaggtgctccatcaggccggagaagttctgcaggtccgagagcactccccgccccatcatcttctcgaggaggtccatggcgtcgggccctctcagggcagggcggtggtagcaacggtgtggcaggaaggaagagggtgagatgggggttgcgcgagctgcagcagcagggagaggaagtggatgggtgacgccgtgacggcggggacgcgagggtgggggaggaaacgggcacgacctaggggtaggggcgtcggctaccgtatcgccgggtggggcgtggggttgttgcgcatgcaggggaggtgggagcac

SEQ ID NO: 25767 - DNA, 1163 bp, Zea Mays
gttcaacacttagcacacttgttagtcctttaattgggttgtcatccaaaccaccaaaacccacaagagagctttcacatagctgacacttccacaaattcaaatatgttgaaatgtacaactgataatatatggcaacagactttggatctgagcccattatcaaaacaaacaaaaccatatagttgtgataataagtgtccacattgattgtgatttcaaggcaagtaagtgatcgttataatttttctggtgagtttaatgcctgaaacacagacgcaacaggaagttcccctaaggcaagtaattaatgcatcttcatggtaatatgttaagcaggacctcatggccgattcacaaaaaagaaaactaaaatctatctacacccaaaacaaaaaaaacatcctagtaaaataatgtgaaatgatggaaaagaaaatgagctcgaactttggcataccagttatacctactacagagtgataacttcttcaacataattcagccactccctcctttctaaattgtaggtcgttttggcttttatagtgtatataggcatttttgtcctttttaggttcataacttttactgtgtatgtagatacactgtagaataagacacatagcaaaagctttgtatttagaaaagctaaaatgacttctaatttggtattgaaggagtacctaaaatcaagtctatccacctagaaacattgttttttgctcattgccataaggtcaccaggtttgagtattcttttagaataaattttttaaggtagtagaatcaattggctgaaatttgtgaaattgtttctctttgtcctaaagaatatcatacatttgtctttactcctaaacaatgaatgagcttaattattttcttgtctagtaaattcaatttcacacgccctatcaagcaatttgaaaggagatggcaatacatttgaaggagttcttgcacacttaaataacactgcattggaactgatggcagtgttaatacaactgcttgcatcttaaacaaatgaaaaaatttggagttttaccttccattctctagtctttttttgctaatgaccagtgaagaataagtggctttgtatagtttgttgccaagtgaacttctgtttcattttgaaccctggtggaaattgcctt

SEQ ID NO: 25768 - DNA, 5544 bp, Zea Mays
cctgctaatttttctgagcacctccatgatgggtcctgatcttggcatgtattgatcgacagctactacacatcatcttacgaaaaagctaatcagacagctgtaaatcgatgcacagactacacgagtctattgttgagcgagtgaagcgtgtttctctgtaatctgaagtttttttttttgttattcctatcaatcgctgtacaacaccaagaatcaagaaacaggagggtgcccagatcgacaccagtaacctctagaacttggcaaagagaattttatagtgtgatggatcccagcaaagggaaggtaaaaagctgagctttatatgtttgagcagaatgagatgccagattaaccacgggtacaagctgttgtgcatgcctaattggagcctggaggagcgccacctttggtgtttggcaggagttaggtccagaggttggagttccttaggactctagtgtgtggtgtgtgtggtggtcaagtgtttctccttccttcgtccaggtctttctttagtttgtttcggttcaacccctcattcttggtttggagtagggtgtagtcttttcttttgtaagaaccctctttttctcttctaccttaacgtaatgatatgcagctctcatacatattcaagaaaaaaaaagatgccaggtttttctggtgattaggcaaatagaaaaaaaagttcattggcccaaaaaaaattcgcaaacatgccttggctgcatttcttatggttcgtttctgttcgcagatccacagccatgattgcacattttatattttagttagggggaaagcgcatggttcttgtttggaaaaggcctatcattgccttctggcacaaaaaactaaggaggtgtttagtttatagggactaatttgtagtcccaccatttcatttcattttagttactaaattactaaatacagaaactaaaactctattttagtttctatatttgataatttagagattaaaatgaaataaaatagagggactaaaaattagtccctagaaactaaacaacccctaagtagttcattgtcttataccattcatagctagctatcgatgtaaagatcacctttcaacaatgagtagttagattgtatgtaacctacaaagaatgaaagatgactaaggccctgttcgttttcacttatagattatataatctaaattatactctagattgtataatctggattatttgctctagattaaataagctaggtgctgctgtttgttagctcagattatttggacttggcttattattcatatgcatacaaatacaacaataccctcggctgttttatttgtctggtgggtgagaacgtctatagacaggtggatggcaattggaagtaattttaatcaacttgccatgtgtagtgggtctttcataaaaaataaactgaaataagcaccttttgatgagtttatagattatcataatctcaattgctagattatataatcttatcagataagttgcttgtttgtttcctcactagcttatttacattggattatataatctacctagattataatcccaaacaaacagggcctaaataatgtagatcagctgcaaggtgcccttgctatgtactatgatgagtatccattgccttgagcataattttccaggaaccagaatgatcatgaagtaacttcaacatgtaggaccaggacatggcaggatgtcaataagcgcctaagtgtagttggataaggatccatccaaaaaattaatcaagtgtaaatattagaagaatcgattccataagttaccttgtgatcgatcaagcaagcaagattccataagcgatctgatccatcaagcattgagcttcaggactgcttgtccatgcaagatcaattcattcaataacatcgagaaacacctgtcacaacacgtttggtttcgaggatatcaaagattagtgggaatcttaataatattccaggaaaaacaattcctaggaaaatgatcgcaatcaaaaggatatatcaataggtgaggctctaaagctgttccctgcagcaacaagagagaagcgcgcgaataaaccgaggaataaagagtagcaactgaatatttattttcctggtgaccaaagggagtagtatatttattttcatcataaaactaatcagattccaccagcaaaaactgcaaaccagtccttaagcatattaaagcacattttccgcatccacaatctgttggagatatgacactaaggctgtctactgtccattgtagccccctgtcccctcaaagttcttaaattttttttggagcaactaccctcttccaaacatgccagagagttttgcttcttgtgctttgtaagctattgtgacagctcttatttatcactattttgtagtttcagtaaacaaaagagtgaatcttaatttttgaaaaagtaacaacaaaaccttaaaagatacttccttcagtcgtcaaaaaaaaaagatccatttttggacatcttcatggtctccgaaacctttctagtacataacataattgtaaaaaagtagtgactgaatactgttccgaaactgttcttctaatagaaaggatcaatgaatcacgaaattcaaagagaaatcaatgctggaagctcaaaataatgtcgcttcctggtgagcttcagggctgcttgtccgtgcaagaccaattcattcaataacctcaagaaacatctgtcacaaatcgtttggtttagaggatatcaaagattagtgggaaacttaatagtattcccccccaaaaaaaatattcataggaaaataataacagacaaaaggagacatcaaaaggtgatggtctaaagctgtttaaaacaaatggtacttatccaggactcagaaccctgcaacaacaagatagaagtgaataatccgaggaataaaagggaacatatacataaagcgaacacaaagatatggcctcgatcgtgtaccaaacaagctggaccacatcgtcacgtagcaaattccatgatggacattgttcttgagtattcgagaaggacattgttcttgcaatacaccccagattactaatttgtagttgcagtgaacatgaacagaagagtgagtcttaatttttttgagaaagtaactaaaaccttaaaagttactcccttcagttgcaacaaaaaagatccatttcggatatctacatggtctctgaaatctttctagttcataacataactataaaaagtagcaactgaatattgttctggaactgcttccctaatgcaaatatggccatataccataccaaaggatccatatatctcaaaattcaaagaggaatcgatgctcgaagctcaaacattctggctgcacactactcaaaataatgtgacctcctgattaccaaaggggtagcaagtatatttattttcatcataaaactaatcagattccatcagcaaaaaactgcaaaccagcctttaagcatatttaaggggtgtttgaaggcgctaaagttaatagttaatgcctaaaattagctggagaaatccaaacactctagctaatagttcaactattagctatttttagtaaattagttaatagttagctagctaattccactgacaaattttagccaattaactgttagctctagttgatcaaaccctctccccctgtaagcacatcgggacctgcttatgcttcaagttgaagccaccacctgatcacctatatatatagggagccaaaattaaatcctgacagagatcgatcagtcgtagcatggcataccgggagttggagctgagcctcctgtcagcgcaggagctgaagagcgtgaacctgatgacgcgcatgcacgtgtacgccgtggtgagcatctccggcgacccgctgacgcggcagtgcacggagccggacccatacggcgggcggaacccgtgctggaacgcgacgttccggttcgccgtccctccgacggcgtccggcgcgtccctccacgtgctgctccgggccgagcggctcctgggtgaccgcgacgtgggcgaggtcgtcgtcccgctcgccgacatcctcgccggcgcgaccggcgccgggccccagccgccgcaggtggcgtcgtaccaggtccggaaggtgcaccggtgggaaccgcgcggcgtgctgaacgtgtcctaccgcctgggccccgtcgtcgcgccggtggtaaagcgggtcccggacaaggcggccaacttcagcgcctatgcaccggtgggcgtgccgcagcacgacgaggcggctcagaataagtcacccgtcatggcctacccggtaggcgtgccgcagcaggcgtcgcatcctccggcgaaaccggatccataccggacgccgacgccgccgcgtccacgtactgcgaccgtccacgaggcttcttctgctccggctccgccgccgatgaacgggcttggccagccgggccctactcatgtctatatgggcccccaaacgcagatcatatttggcggtgcccccacctcgacggcgacgtctcccgctcgatccatcgtcagcccaagaagcagaaaggaagatcgttggaggcccagtgtgctctcacagtcacatcacgacacagaatcttcttccccgttctcctcccgcagctcctccttttcgtcgtcaccattatcgcctcgcccttccaccaccacttcccctcgcccaccggccgtcagtgacgacgcagaggttgccaccttccgccgctccacctccgtgtcgccttattcgtcctcccctctggctcccgtcctacctaagccagccatctcttcgccgttgcctagcgtggcgccctcgctctcaactcaccattaagacccacaaagacaaatcctacatctgtctacgtgtcgtatggtatggcattgcgcatagtgtatgcatgggcaagtctgtttgtacgtatgtagttgtgttctcaaagaaataaaaaaaataaagttcaagtttgtatatgaaaaataaccctccttttcaaggtagtctgtaactctgtatggatgaatagcatttactttccttttagtgtaaatggcgtggcgccaatgaacaaactggataaggttgatctgaataccaaaccgtatatgatctaaagacaaaacaaccaggaactggttctgatttttagccataccaacaagtcattgtaatgtcaattgttacaagtattatggtgttgtttggctaggattacgtgaatggaatcttcagcatgctagaaccaaacacaaagtaacgtaatcgtcttgcgttggagcaaaccggacgaaccaaacagcacctatgtttctgaatattcaggtaacttgtggtgatgcattgccccccaaaaacctaacaccccatttggatgctggcattaagctaggatttggagaattggaattgtatatctccaataccaccacgtgtttggatgtcttggaattgagccttagaatttgaccctcaattcaccatgatatcagtacagaagc

SEQ ID NO: 25769 - DNA, 214 bp, Zea Mays
gagacaacgttttctgtttgttctctatctctatataaagaaattacacgcagttgtatatggtaagtaaatcacaatacctggaaggtgattgtgtgctaatctacttgctaagaaagaaacactaatcctgggcttactataacatccgtgccgtgaatggtcccagccgtttggtgcaccccgaagcgacacctctgatccacgagcaaag

SEQ ID NO: 25770 - DNA, 483 bp, Zea Mays
gaacccttccacttccacaaaaaaatattctaaaataaaatagcatcagtaagaggtcaaccaacaccatctagagcttatcaacaaatagttacggtctttcaaacatcgatacagagaaaattattgtttccatgaaatgtcatacaggagagccaaaaaattgtatgcctcataattaggctgtcaaccttaaaaaatcggtctctgtctagcaccttctaaacccaacccatattcattatatgtggagaaacattcaaaaacagaagcatcaacctgagttcaaaaaatagaggttgttgcaccaaaatacactttccaaagagaacacaggcatacactctatctattctacaagacaccatgagcacgaacagaacataaatgaatctaaccagcaacattcgattcctggtacgatcgaagaaaacgcatgtatgagttcattgagacaacaccattaatcgctacaaaacactg

SEQ ID NO: 25771 - DNA, 618 bp, Zea Mays
cgattttaaaaatgctaatccgacttcttacattattaatttaatcgttccttacatacaagtctaacaacacatgacacgactactgtataggaaatatttctataatacaacatataacacataaaagaaatgagaaaggtattcttcctagagcatcgccataatataactaaccaatccaattaaccgttaaaacaaatcggcataccataaccgaatcgactagttagatgagagacgacgatgatctccggctcatttattttactaaacagggagctccaagggtgtacggccaacgggtacggtgaagcgacgacaacggggatcgagtttacgataggaggtgatgatagcgcggcacgacatccctggacgcgagctgaagtagagcgagcggtctaccgaggaagatgcaagggaggcgaggagccgagcaatcacttgaacatagtcgatggcgaggtctgccggaagagaatatcggcacacaacacgacacgacgaacgcgcagagcttcaaaatcacgcgcgcgagacctggccggaaccgaggacaagcgaacagagaggaacatgtctgggagttcaacggcgatggggacgcggatgtgg

SEQ ID NO: 25772 - DNA, 1906 bp, Zea Mays
ccttagtccagctcaatgtctgacaggaaaattatcagtccaatcatatcccagcacgaagagccgccgcaatcctcctccccgtcccctaccttcgtcggtgctctcacccgccgctggtcgccattcctccagatcggcgcccagctcgcagcccactaggcgttgcgctccctctccaaccccaacgaaaccccaggggaaccctcatccccctgtcgtctcccttattgggggccagacatggagagcaagcagtgggggaagacgccccaggaggcggtgggcgcaggcggcggtcgccaagtggatctagatgaagaggatgacctggaggagttccggctgcccatgggccaccgccccaccgagaacctcgacacggatgggctccagcaagcctctgtctacacccagctcaccgcgtccaacgtcggtttcaggctactgcagaagatgggctggaagaccggcaaggggctcggcaagaacgagcaaggtatactagagccaataagagctgacatgagagatgcaaaattaggtgttgggaagcaagaggaagatgacttcttcacatctgaagagaatgtgcaacgaaagaaattgaatattgaacttgaggagactgaggaacatataaagaaacgggaggtatgcaatctaacacctggtgctagtttctctacattcatgcagttttttccctgggctgatgcttgacatgctggaacctagatataatagttgtaagacctctatagcctagaagtagctgtactttcgtgatgtgaggatagctagcatcaaccattaaagagtcttcagcattttgtgcgctttttatttggtggtttcttttccctgcttggtgcaaatcatgacaatccaggtcatagcagagcgtgagcacaaaatccgcagtgaagtcaaggagatacagaaggtgttcttttgcaacctctgcaataagcagtacaagctggctcatgaatttgagagtcacttgagctcatatgaccacaatcataggaagaggtttaaggaaatgagagaaatgcagagcagcagtggtagtcgagatgacagacagaaacgtgaacaacaacgagaagagaaggagctggcaaaaattgctcaactgaattgtaggttgtatgtgcagcttggatttccttaatgaagcttcagtgcggatgctcataggaagcagcagaaggataagcaagaaaagtcagagacggaggatgcggcacccaaaaacatggcagcctctagcaaccaggatcagaggcaaaccttgaagttcggattctctaaaatggctccttccaaggttctagttggtagtgccagcaagaagccaaaggttgccacgaaagtttcttcggtctttggcaacgagagtgatgaggactcgtgacctttgccagagggtggcagactggcagttgcttcttctgtcgtgcattggtctggggacttgataacagcaccgagaattgtatgaacttttgagggtacactgtataaggaaatctgtactgttgttgctggattttggaagctgtttattaaccattcgcccttgtaggcaggcaatacccttcagtttgggacacacctttgtattgtaggctgtattatcgttgttggcttttaatgttaaaaaaaacctttgtattggatgctacagtggtgtcacattttgtctgtcaaagttggaggcttaattttggacactttttttgttggttgcccttctcgtccgtggagaggatgtcactgcttcagtttaaagtttctttattttttgaacaaaaatcatgtgattatgcttatgtttgagttgagttgcataaacttgcactttcaataaggctgccggctgttgcaaaaaaaaaaa

SEQ ID NO: 25773 - DNA, 1940 bp, Zea Mays
cacacacctagtgctaaacatatggcccaaaatgaaacatatgtcccagctggtagcccgcattatggcccagcccaacccaccttagtccagctcaatgtctgacaggaaaattatcagtccaatcatatcccagcacgaagagccgccgcaatcctcctccccgtcccctaccttcgtcggtgctctcacccgccgctggtcgccattcctccagatcggcgcccagctcgcagcccactaggcgttgcgctccctctccaaccccaacgaaaccccaggggaaccctcatccccctgtcgtctcccttattgggggccagacatggagagcaagcagtgggggaagacgccccaggaggcggtgggcgcaggcggcggtcgccaagtggatctagatgaagaggatgacctggaggagttccggctgcccatgggccaccgccccaccgagaacctcgacacggatgggctccagcaagcctctgtctacacccagctcaccgcgtccaacgtcggtttcaggctactgcagaagatgggctggaagaccggcaaggggctcggcaagaacgagcaaggtatactagagccaataagagctgacatgagagatgcaaaattaggtgttgggaagcaagaggaagatgacttcttcacatctgaagagaatgtgcaacgaaagaaattgaatattgaacttgaggagactgaggaacatataaagaaacgggaggtatgcaatctaacacctggtgctagtttctctacattcatgcagttttttccctgggctgatgcttgacatgctggaacctagatataatagttgtaagacctctatagcctagaagtagctgtactttcgtgatgtgaggatagctagcatcaaccattaaagagtcttcagcattttgtgcgctttttatttggtggtttcttttccctgcttggtgcaaatcatgacaatccaggtcatagcagagcgtgagcacaaaatccgcagtgaagtcaaggagatacagaaggtgttcttttgcaacctctgcaataagcagtacaagctggctcatgaatttgagagtcacttgagctcatatgaccacaatcataggaagaggtttaaggaaatgagagaaatgcagagcagcagtggtagtcgagatgacagacagaaacgtgaacaacaacgagaagagaaggagctggcaaaaattgctcaacttgcggatgctcataggaagcagcagaaggataagcaagaaaagtcagagacggaggatgcggcacccaaaaacatggcagcctctagcaaccaggatcagaggcaaaccttgaagttcggattctctaaaatggctccttccaaggttctagttggtagtgccagcaagaagccaaaggttgccacgaaagtttcttcggtctttggcaacgagagtgatgaggactcgtgacctttgccagagggtggcagactggcagttgcttcttctgtcgtgcattggtctggggacttgataacagcaccgagaattgtatgaacttttgagggtacactgtataaggaaatctgtactgttgttgctggattttggaagctgtttattaaccattcgcccttgtaggcaggcaatacccttcagtttgggacacacctttgtattgtaggctgtattatcgttgttggcttttaatgttaaaaaaaacctttgtattggatgctacagtggtgtcacattttgtctgtcaaagttggaggcttaattttggacactttttttgttggttgcccttctcgtccgtggagaggatgtcactgcttcagtttaaagtttctttattttttgaacaaaaatcatgtgattatgcttatgtttgagttgagttgcataaacttgcactttcaataaggctgccggctgttgcaaaaaaaaaaa

SEQ ID NO: 25774 - DNA, 1300 bp, Zea Mays
ccttagtccagctcaatgtctgacaggaaaattatcagtccaatcatatcccagcacgaagagccgccgcaatcctcctccccgtcccctaccttcgtcggtgctctcacccgccgctggtcgccattcctccagatcggcgcccagctcgcagcccactaggcgttgcgctccctctccaaccccaacgaaaccccaggggaaccctcatccccctgtcgtctcccttattgggggccagacatggagagcaagcagtgggggaagacgccccaggaggcggtgggcgcaggcggcggtcgccaagtggatctagatgaagaggatgacctggaggagttccggctgcccatgggccaccgccccaccgagaacctcgacacggatgggctccagcaagcctctgtctacacccagctcaccgcgtccaacgtcggtttcaggctactgcagaagatgggctggaagaccggcaaggggctcggcaagaacgagcaaggtatactagagccaataagagctgacatgagagatgcaaaattaggtgttgggaagcaagaggaagatgacttcttcacatctgaagagaatgtgcaacgaaagaaattgaatattgaacttgaggagactgaggaacatataaagaaacgggaggtcatagcagagcgtgagcacaaaatccgcagtgaagtcaaggagatacagaaggtgttcttttgcaacctctgcaataagcagtacaagctggctcatgaatttgagagtcacttgagctcatatgaccacaatcataggaagaggtttaaggaaatgagagaaatgcagagcagcagtggtagtcgagatgacagacagaaacgtgaacaacaacgagaagagaaggagctggcaaaaattgctcaacttgcggatgctcataggaagcagcagaaggataagcaagaaaagtcagagacggaggatgcggcacccaaaaacatggcagcctctagcaaccaggatcagaggcaaaccttgaagttcggattctctaaaatggctccttccaaggtggatatctcgaggataccattcaatttgtttgcatttcaggactttgctcgaaatgttggttccatgacctataaattgttgagatgttcgttgttgattggcaaatcttgcagtgctgttgaatttttgtggccacaagccactgctgcaagttcttgtcgaattagactacatatttctttccctagaacctccaatatttagtgttactgcagttttaacctgtaatattgtttgttcaaaatat

SEQ ID NO: 25775 - DNA, 3034 bp, Zea Mays
cagccgagccgagttccgacctatactataaatccagcgtgttacttaacgctggccggagcggagttccattcgaaagtttccagatggaacttctcatcaccaccttgtatgcagtttccctagcaacagtgatagtcctcctcctttggtttcacaagcccgcagtcgtggggaaagccactgccgttcccggcgacgactgccgcctgggccatggacccttccggtcatcggcagcatccaccacgtggtgcgcggcctaggacaccgcaccatgatggagctgtcccgtcggcacggccccctcatgttcctccgccttggcgaggtcccgacgctggtggtgtccagcgccgaggcagcggagctggtgatgaagacccacgacctcgccttctgctcccgcccgaccaccagcgtcaccatcgacatcgtcggctgcaagggcaaaggggctcggcttcgccccctacggcgaccggtggcgtcagatgaagaagatcaccgtcgtggagcttctcagcgccacgcaggtcaagcgcatcgagtccatcagagcccacgaggtgggacgcctcctccagtccgtcgccgccgccgccgcccgtggagccgtcaacgtcagcgccgaggtgaaggcgctcgcgccggacctcgtggcgagggccatgttcggtggcaactgcgccgagaaggccgacttcatctgccggtacaacgaggtcagccagctggtgtcgggcttcttcctggtggacctgttcccgtcgtcgaggctggtacggtggctgagcatcggcgagcgccgtctcctgaggagctacggcggtatccagcgcatcatcgcgtccatcatcgagagccgcaaagctgccagcaccagcgacgatggggacaactgcagcttgcacgaccatcctgcagaggatcttctcggcgtgctgctcaggctgcagaaggagggctcgctagctttccctctcacctccgagattataggcgccgtcatgtttgacatattcggaggtgccaccacaaccctagggtccacgatggagtgggctatgtcagagctaataaagaaatcagagacgatgagaaagacacaagaggacattcgtcgcgtgctaggtgggtcacgacgaggtgtcatcacgaacactgacctcgttggcctcacctacctaccaatggttatcaaggaggttcttcggctgcatcctccaaaccctctgttggtcccgcgtgagtcgagagaggattgccaagtcatgggctaccacattcccaaaggcaccaaggtgctcgtgaacgcatttgcgatctccagggattcaaggtactggaacaaccctgaagattttagcccagagaggtttcagaataacaatgtcgactacaaagggaccgattttgagttcacccccttcggtgctggtcgtcgacgctgccctgcaatcatgtttgccacttctactctagagattgcattggcaaaccttctctaccacttcgactgggctcttccggatggagtgagcccaaagatggtggaaatgtctgagcaatacgggatgggtgtcaccaaaaagttagacctgcatttgagagccatcccatatgtatactctactatggcataggtatggggggtggttaaagctacctgcaccttaacttgaggtcctttgatgatcgatcattgcatcttcctatttctgaataagggtgaacttttctatgcccatcttgtaggccactagtttgttttacatagagcaacttcaggagcttcctaaatgaaacttctactttgttttttgccaaaaagagaaaaagtacccttctaagggtttgaaaaacaactccattaaaagtaagaaattggatgtaactttctatggtggatagcaactccatgtccgctcactttgccttgcacccctgttgcccgcttcatgttcttttttcaacacaagtcaaacatcattactataaaaaatatagggagacatgctccctaattaacagaggcatgcataaaagagtatgaactctctctcaaaaggaagcaccctactcccttagtgtttactaacatttctttctattgaaaagcggttcaaccaatcctttatgcagttcaaccgcatatctcacagacttcacccaaatggctagatgtggatgcccacacatatatatagcctccattttgtttcttcaacctctctccacatgttcaattcacatcaaacttgagacaaaagttgaaaaagagcatttactctctcccttgtcacttgcaccccaaatcttctccccaaatcatggtgggaaaacttggtgtgaggttaagatcttcaatttttgagttccattattccatctcacttgctttgagctttgggcaaacattaaaaccttgagcggatttgttactcttggagcttctagatgtctagtcgtcacttgagagtctcaaagtttgtggaaggcctcaagaagtttgtatcgcttgctcctcgagcatctagtgagtgacctcatcttgatctgtatggtcggtgaggggatgattagtgttgaaaaatactcagctctttgtgggatcctcaatgtggaagtagggcacctaagtggtgtgaccgaaccttagagtaaatcttgtgttcttgtgttttttgcaattatggttgttcttattccatcttactctaatcatagtgcgcaaggattgacacataactttttgtgtataggttttaaggaccactccctcttagatctactacacacatacctttggaaaatcaaggacttcagaaatcaaaggcttacttgttaatctttaagataattttgctttattattgatttaaccagttgaaccagtttagaatggttgaactgctctaggtagtagttgaaccggcctacaccgattgaatcggttcatcttagtttgttttgagtttttgttgatattttcgggtgtagcctattcaccccctctctaggctactttgag

SEQ ID NO: 25776 - DNA, 1311 bp, Zea Mays
  misc_feature (1310)..(1311): n is a, c, g, or t
agcattttcagcattgcaaaagctgaatcagtcagttgaatgagcaaaacagtggagaatattctcaatctgaaaacaacgtagtagaaactgcacaagggcatgataaggagactacccctggacctgtaaaagctacaaagaggataaaaaaactaaaggcttctaaacacaacttgaacaacacaaattctggagcaattgaaggagatgctgatccttctttatcctcattaaaccactgccgctatgacagctcactaagtctgctgacgaagaagttcatcaacctgcttcaaggagctgaagatggagcccttgatttgaataaagcagctgagacgttggaggtgcaaaagaggaggatatatgatataacaaatgttctagaaggtgttcatttaattgaaaagggacttaagaatatggttcgctggaagggatttgacatatcgaagcctaaggatatagaacgccaaatttcttcattgaaggaagaacttgaatctctttatgatgaagagttaaggttggatgacgaaataagggaagcaaaagaaaaactacaagctctcgccctagatggggataaaagaaagtcgttatatcttttgaaggaagatataaataagattcctcactttcagagatccactatgatcgctataaatgctcctcgtggaacttgtgttgaagttccagaccctaatgcggatcagtacatgtatgggaatctgggtttgcaggagaagcactacaaaattgtcctgagaagttcaatgggtcctgttgattgctatttgataagcggtgaccatgaggatatatttaaccagggccagctggtggcagcagacagattaaaacctgcagttgctactgatagttctcaagatttgcagcagatggattgtgatcctaatcaggcaagtaatggtggctgcatgcatgcagcagaaccatccagaaagcaagaaattggcattttgagaatcgttccatcagatgccgacgctgatgctgattactggcttgcttctggcgttgacgttagtatgacagatgcttggggcacgtagtggatggatcctcggagttagggctcttaacctgccccttagacagacaaaatagaatgagtctgcagtgcacaattgcattggggctggatcagtaggatacctttagtctccatgctctaggcccgttaactaacaaatcagagggtacatggtaggcagtagatcttgtacattggcggcatgattgtagttgttactctgtttcatcgacagttaagatagaatcann

SEQ ID NO: 25777 - DNA, 1753 bp, Zea Mays
  misc_feature (1752)..(1753): n is a, c, g, or t
cgcccatagctcttcccccgccccgcgtcccgcgcccgcttcgttttgcttccatctcctccctccccagtcccccttccccaccaaggcagcaacccgcaaatcaaaaccctactccgcgcgcgctctctcacccgcctccatggacggcgcctcctccagcctccctctcccccaaccaccgccgcaggtctacctccgccgccccgtgccgccgcccggcccgccgcttcaggctgctcctagggtccagccgttcagcgcccctgcgcccatccccatcttctcctcgaagccccgcgccgctgtgaggtccccgattcctcctcctcatcttcctgctgctgttacttcagctcccgctcccctggcggccacagcggaggctccatctcggccgccgcccgcatccactgaccagccgccccagcagcaaactggtgcgatgcccccgcctccggctccagcaccggcggggaaggggggacccaagcccaaggcacagttgaatgagcaaaacagtggagaatattctcaatctgaaaacaacgtagtagaaactgcacaagggcatgataaggagactacccctggacctgtaaaagctacaaagaggataaaaaaactaaaggcttctaaacacaacttgaacaacacaaattctggagcaattgaaggagatgctgatccttctttatcctcattaaaccactgccgctatgacagctcactaagtctgctgacgaagaagttcatcaacctgcttcaaggagctgaagatggagcccttgatttgaataaagcagctgagacgttggaggtgcaaaagaggaggatatatgatataacaaatgttctagaaggtgttcatttaattgaaaagggacttaagaatatggttcgctggaagggatttgacatatcgaagcctaaggatatagaacgccaaatttcttcattgaaggaagaacttgaatctctttatgatgaagagttaaggttggatgacgaaataagggaagcaaaagaaaaactacaagctctcgccctagatggggataaaagaaagtcgttatatcttttgaaggaagatataaataagattcctcactttcagagatccactatgatcgctataaatgctcctcgtggaacttgtgttgaagttccagaccctaatgcggatcagtacatgtatgggaatctgggtttgcaggagaagcactacaaaattgtcctgagaagttcaatgggtcctgttgattgctatttgataagggccagctggtggcagcagacagattaaaacctgcagttgctactgatagttctcaagatttgcagcagatggattgtgatcctaatcaggcaagtaatggtggctgcatgcatgcagcagaaccatccagaaagcaagaaattggcattttgagaatcgttccatcagatgccgacgctgatgctgattactggcttgcttctggcgttgacgttagtatgacagatgcttggggcacgtagtggatggatcctcggagttagggctcttaacctgccccttagacagacaaaatagaatgagtctgcagtgcacaattgcattggggctggatcagtaggatacctttagtctccatgctctaggcccgttaactaacaaatcagagggtacatggtaggcagtagatcttgtacattggcggcatgattgtagttgttactctgtttcatcgacagttaagatagaatcann

SEQ ID NO: 25778 - DNA, 2621 bp, Zea Mays
tgcgcatctggttgatatgtgaggtcaacggttagcaggagtaatccactgctggtacgaaaactgaatgacaattgtggcgaacctaccttggttccagagatgaacagaaaatcttgactgcgtgaaggatcaaaaaaggccatctcctttgctactgtatcataagctgctacctgtaagaggatagcaaaacaagagagcattcaagataacaggagatgaaaaatcaaacaagtttttggtaaaacaaacaaattgaatcattagtgcacagcttgtttcttttaaaaaaaactgtggtatctgcattactgaaaatttatcagtttctgaaaaaaattagcgtcgtggtctagattttaccatgacagctgtaataacttaaataataaaacacggtcaacatttattctttgctccattagtattagcatcggtggaactgatggctcatgttcctttgccaaacacaacaaagattctagtgctcgcatactagcagggtaatgatttcttacagagtgtacactctgcaaataccatcactacatcagattcatttaatcatctactattcatgttccagtaaatgcacttaaaacacaaatagacgcataggatccaagaatgtgaggtttgagagacatctaaaatgatgaaagagataaggtgattggtcctgatagtatctcaatcgagacatcaagatgtcttgaggatataactataatatggtgaactaagttgttcaaccatatcttatggtcgaataagatggttggcgagtggagaagtatattggtacaatggtactaatctacaaaaataagggagatattaaaagttgtacaaattatcgggaaattaagttgataagtcatattatgaagctatgagagagttatcaagcagaggaatagcgagaatctctattattgaaagagggtaaatagatggaccagattatttggaggtccaaaggttttaaactcaatagaactaaaaccgaatatatgagatgtagcttctacactactacacgtgaggaagcagatattagtttggaaggtcaagtaatgcccaggaagaatatctttaggtatttaggatcaatgctactaagacacagatattgatgaagatgttaatcatataatcaaagcagggtggatgaaatagtgtcaagtatctagtgtcctatgtgacaagaggatacaataaaagttaaaagccaagttctataggatgaaaattagacctactatatgtatcgtgcagaattttttttcgaaaaaaaaacgcaggaggactgcgttttagatatatattaagaagagagagacaaaggtctaagagacccaaaaacacaacaacgcacttcctatggagacctagaaaaagacgacatgttcaacaaataagtgttgcattgcagaaatatatattttgtgttggatttatgaccatacaagaagggattgagtccggaacgatgatatacgtgataacctaggggtagcaccaattgagaaaagtttatccaaaaccgattgagatagtgtagacatatccaacgaagacatgcagagacaccgtgtgtagtgggatcctaagacatgatagcaatgggaagagacatggaaggccgaaattgacacgagaagtggtagtaaaagaagacttgaaaaaataaaacatgcccaaagatttagtctttaataggagtgcatggaaaacagctatcaacgtgtctaaaccgtgacttatgatttctccccaatttccttgaggtcccgtttgtttattttcattttgaggaattggaatcttactaatggaatatactatttttttaggatgtgacattccaccactttccaaagttatcatataagtctatctcaaattcatggggtgaaaaatgaaaattgattctatagatttacatactatttttccgatgtacaacttatagcacactcttctacttgcttcgatataacataaatatagtatataactatctctctaatatgatttaggataatatacacatatattacatatataaatatatgaacttaattagttttgtctaaattataattattaaaatggaattgaattccaaccacacaaacggggcctgagactaaaaggttttgttgttattgttgcacttaaaacacaaaaaatggaatagttgagaaaggaacggttgttgcaagtcacaaatcaaattaaatgttgtaatgcaactctagagactaataaacacgaaaaataatcaaatgtgttatatttcaacagtttctcaatattttctgtggtcgcgagccactgtagtgccttctagcatagtgtggatgaagacgcgcaaaatgtgcgctcgccctccccataccccaaatctatggtttctctctcctctacgagtctatttgcacatccggatgcgcgctctgatagaaacaccctttcatttgtgcgcagacatgggtactgtgaccgctcaaaatgtgcatccacatgcggtgactgctggacatttcaatgaataggacaatgtcacatggaaatgtatgtgaatcaaataccttgaagggcagtatgttgag

SEQ ID NO: 25779 - DNA, 1324 bp, Zea Mays
gaaggaaatctcttctctcttgccggtcgtgggcaaagccctacggccggcctccccaacgccctaaccctagccggttactggtcatcacgactgttcatcatgttactattcatccgtttccactgttcatccacggatgttcacacgtgaatagtacctcgcctcctccaccagcagcgcccaaacatcgatccccctctccaacccctcaccaattccccaatcccatatctagccataacaatctggtattcggagccaaaaaaaatttcccaccgcccttccaccgcgtctgttcctgcgttgctcgcccgggcgcgcagccccatggtaaatgcgggaagacccatcgctgcccaagccgtggcgcggccccgacaccaacgtcacacggtacgagcggcccgcggtcgcgcctatgcttctcatgggtccttaggttcccgacaagacgtacttcgacgatctgtttgcgaggctcaacgcaatcagcatggtgctctccagcagcacgccagcaccagcggcctggccgtcgtcgcccgctccggcacctacatcttcgtgggcggcgatgcctaccagttggcctggctgacatcgtatcacctcacgggctacgcacatacgtggttctggcggctggaaagcgacgagcgtcaggtcacgtggccacagttcaagatcatgtgccagcaacactttggttccctcgcagcagtggcggcttttgctgccacgtttgtcatgctctcggtgctgataccacccccgtcatcaggggcagccatcaccgctacccttgaccccaagagcgacgtccaggagagggtgattgctccgcgatagacagcggcggtcgtccacctgcaggctgcagcacgcggttttctagcgcgtcagcgggtgaaacagatgttggtggtgctccattgcggaggagtcgtagctgcaccagcgaggccgagcaacgtggtggttgttcacctccgcgtacgagaggctgcaatacatggtgccccctacatcgctccgtccggcgctggccctcatctgcggcgaccgggcaactccctcgactactctccttcgtacaagggggtctgctggcctcgccaccatctgctccagccacacaaccctctgcgcattggtgaccgctggaccatgaggggttgcgctgcacgggatccacttgctgcaggcaacaccgacgtcgacctccatgggcccgcctccgaaggctgttgtgtctttacctccgtgttattgtccggatgcgggagcttaccggcgaaggtgggtacaacgtggacgccag

SEQ ID NO: 25780 - DNA, 2582 bp, Zea Mays
gaaggaaatctcttctctcttgccggtcgtgggcaaagccctacggccggcctccccaacgccctaaccctagccggttactggtcatcacgactgttcatcatgttactattcatccgtttccactgttcatccacggatgttcacacgtgaatagtacctcgcctcctccaccagcagcgcccaaacatcgatccccctctccaacccctcaccaattccccaatcccatatctagccataacaatctggtattcggagccaaaaaaaatttcccaccgcccttccaccgcgtctgttcctgcgttgctcgcccgggcgcgcagccccatggtaaatgcgggaagacccatcgctgcccaagccgtggcgcggccccgacaccaacgtcacacggtacgagcggcccgcggtcgcgcctatgcttctcatgggtccttaggttcccgacaagacgtacttcgacgatctgtttgcgaggctcaacgcaatcagcatggtgctctccagcagcacgccagcaccagcggcctggccgtcgtcgcccgctccggcacctacatcttcgtgggcggcgatgcctaccagttggcctggctgacatcgtatcacctcacgggctacgcacatacgtggttctggcggctggaaagcgacgagcgtcaggtcacgtggccacagttcaagatcatgtgccagcaacactttggttccctcgcagcagtggcggcttttgctgccacgtttgtcatgctctcggtgctgataccacccccgtcatcaggggcagccatcaccgctacccttgaccccaagagcgacgtccaggagagggtgattgctccgcgatagacagcggcggtcgtccacctgcaggctgcagcacgcggttttctagcgcgtcagcgggtgaaacagatgttggtggtgctccattgcggaggagtcgtagctgcaccagcgaggccgagcaacgtggtggttgttcacctccgcgtacgagaggctgcaatacatggtgccccctacatcgctccgtccggcgctggccctcatctgcggcgaccgggcaactccctcgactactctccttcgtacaagggggtctgctggcctcgccaccatctgctccagccacacaaccctctgcgcattggtgaccgctggaccatgaggggttgcgctgcacgggatccacttgctgcaggcaacaccgacgtcgacctccatgggcccgcctccgaaggctgttgtgtctttacctccgtggttccaactcgcgccctcctcttcgttgtgcaacgtttccttgggacataggatgatgcttgcagttgcagtatatctagaataattaaaagatgagccgagatgtaaaagattcatttttcggtgataggttaggtcgttacaggtcgtttgttggatgctgtagctcgtgtacgagctgcttgtccaggggggtgtagtgccagggcctaaggagacccacggaggagctgcggcagcagcagccatgggccctccaagggtgattagataaggatagttagagataagattagaagattagatctattgcttagggtccaagttacttagagtccaaggtaccctctctatataaggagagggattgtatatgtaagataatgggtgtcttgatgtattgcatagagaaggggttacaatatatactcacaggaaaccctaaccctaatgggctgacaggccaactgtggcaccagcccacacacacacagagaacacacacagcctaacatccccccatagtcacaacggaggcaccgcacacgatgagactggaatagaagccgaaggtaggagccgacgggttgaaatcccccgcagtcgcagcgtcatgagggtgcgagtgttgcggctggagtagagaccggtgtgcgctccaagaagacgatagaccctggataacgaggtagccgaagtcgaggtggccgtggtcaggatacacgcatcagaagcctgatgttcgggaggagtcgacgttcgagcgtcaacgatcggcgaggcgacacaaaaggacaacaacaacctcagggtcttcttgcttcgttccacgaccgatcatcaaggagcctcgccagggaggccggcagcagcgcacgcgtctacgccgaatagggtggtcgcgcccgcggcagaaaagaaggggtgtcggcggatccggtctggaaagccatgacagcgacggatccagccatgaagacgatgatccgaccaaaggcaggacggatctagccgaaaggttgtggcagcggtggatccattccagcccagaaagtcgcggcatcgacaaatccaacgaaggcgacgaagaaggaaggcaccaagaaaagtccaatcaggcaggagcctgagccgaacctggcaggggagtttgacgtcggcaacgggcaaagcttgaagataggaggcgccgctgggcgtcagtgcagtcagggacgaggtggacgacgcgacgacgggtgctgcacagcgcacagggcaggggaagaggaagggagcggcctgctggcgggtcgacggcgcgtggaggcgcg

SEQ ID NO: 25781 - DNA, 2172 bp, Zea Mays
agcaatttcaggcgtggtgcctgcctgcctgttgaatataaatataaatcagttgcgtctctagcttgtgctgcggtgctgcctagtcttgccttctaccaagggtgtgccacacatcaaacaccattgatagatagatactgatgactgcttccttggaacaatctcctatttaaaagctgtgtgcataccaggcactcaggcagcacaaaggtcgacgagttaggaaggatggcctttctggtgccgtttctgctgggtctttcctctgtcctcgccgcgtggatctactctgaattcctgggatacagggcatcatcgtctcatgaaaaagtccactcggatgttcacgtcggcgataaaaccatcaaagaaaatgacagggcggtcctacttgaagaaggtgaatctaaaccgccatcgacaaaggcacccaacatgtctgccagagccaaattaatacggtttattacgttggacgagtcctttcttgttggaaaccgcgccacactgagagccatagctgaattcggcattattcttgtttacttttacacctgtgatcggaccaacatatttgcagagagcaagaagaactacaaccgcgacatgtttctgtttctttacattcttcttgtcgtcgcatcaacgattacctcactcaagaagcaccctgaaaattcagtagtttcaggaaagaccgttttctatcttaatcgcaaccaaactgatgaatggagagggtggatgcaggtcttgtttctgatgtaccactatttcgctgcctcggaaatatacaatgcaatccgtgtgttcattgcttgctatgtctggatgactggatttgggaatttctcatactactacaagaagaaagatttcagtatcgcaagatttgctcagatgatgtggagggtaaatttctttgccatgtcctgttgcatggtccttgacaatgactacatgttgtactatatcgctccgatgcataccctgttcactcttatggtgtatggatcactgtttgttctcaacaagtacaatgagatcccatcagtcatggccattaagatcgcaggctgcctcttgactgtcattctgatatgggaaattcctggtgtgtttgaaattttctgggcaccatttacgtttctgctaggttacaaaaacccagagccttctaagatgaacttacccctgttacacgaatggcgcttccgctctggccttgatcgttacatatggatcattggaatgatttatgcttactttcaccccaacgttgaaagatggatggaaaagctggaagaatctgagactaaggtgagagtgttaatcaagggaaccattgttacagcttccttaatggccggctatctgtggtacgaatatatctacaagctggacaaacatacatataacaagtaccatccctacacgtcgtggattccaataactatctatgtctgcctacgcaattgcacccaacagttgaggagtacccatttgtctctttttgtgctggttaaaaatatattttttaccgatttgtccttttatagttggcttggcaaaattacaatggagagttatatttctcagtttcacatttggctcaggtctagtattccgaacggacagccaaagttgcttctatctttcttaccagattatccgatgcttaactttttgcttactacgacgatatttctgtcggtatcattccgggtgtttaagctcacaaacgtactgaaagaggcatttatccccaccagggacaacaagtgtctatatcaaaattttattgctggagttgcagtctttgcatgcctatattgcagctcattattcttcaaaacctaccaacagtatagctgatacatagactctaaatcttagctatctcatgtagctcaactcagaaagcacattgtttttcctgggatggagaaattccaagtaattaagtgaacttgttaatttgtttcttttgtatgtatttccaagtaattgcgtgtttttagagacatccatagtcgtgtccttagttttggtggttttaactgcctatgtaaacaaaacaacaagtcttgtaaaatcagttctatagtagtgttctactttagttaagctttactcttacgagttcactatatttccgcttacataata

SEQ ID NO: 25782 - DNA, 2346 bp, Zea Mays
agcaatttcaggcgtggtgcctgcctgcctgttgaatataaatataaatcagttgcgtctctagcttgtgctgcggtgctgcctagtcttgccttctaccaagggtgtgccacacatcaaacaccattgatagatagatactgatgactgcttccttggaacaatctcctatttaaaagctgtgtgcataccaggcactcaggcagcacaaaggtcgacgagttaggaaggatggcctttctggtgccgtttctgctgggtctttcctctgtcctcgccgcgtggatctactctgaattcctgggatacagggcatcatcgtctcatgaaaaagtccactcggatgttcacgtcggcgataaaaccatcaaagaaaatgacagggcggtcctacttgaagaaggtgaatctaaaccgccatcgacaaaggcacccaacatgtctgccagagccaaattaatacggtttattacgttggacgagtcctttcttgttggaaaccgcgccacactgagagccatagctgaattcggcattattcttgtttacttttacacctgtgatcggaccaacatatttgcagagagcaagaagaactacaaccgcgacatgtttctgtttctttacattcttcttgtcgtcgcatcaacgattacctcactcaagaagcaccctgaaaattcagtagtttcaggaaagaccgttttctatcttaatcgcaaccaaactgatgaatggagagggtggatgcaggtcttgtttctgatgtaccactatttcgctgcctcggaaatatacaatgcaatccgtgtgttcattgcttgctatgtctggatgactggatttgggaatttctcatactactacaagaagaaagatttcagtatcgcaagatttgctcagatgatgtggagggtaaatttctttgccatgtcctgttgcatggtccttgacaatgactacatgttgtactatatcgctccgatgcataccctgttcactcttatggtgtatggatcactgtttgttctcaacaagtacaatgagatcccatcagtcatggccattaagatcgcaggctgcctcttgactgtcattctgatatgggaaattcctggtgtgtttgaaattttctgggcaccatttacgtttctgctaggttacaaaaacccagagccttctaagatgaacttacccctgttacacgaatggcgcttccgctctggccttgatcgttacatatggatcattggaatgatttatgcttactttcaccccaacgttgaaagatggatggaaaagctggaagaatctgagactaaggtgagagtgttaatcaagggaaccattgttacagcttccttaatggccggctatctgtggtacgaatatatctacaagctggacaaacatacatataacaagtaccatccctacacgtcgtggattccaataactatctatgtctgcctacgcaattgcacccaacagttgaggagtacccatttgtctctttttgtttggcttggcaaaattacaatggagagttatatttctcagtttcacatttggctcaggtaagtgccggacccagctttttttatataaagaaaggttttattgaaaatcaaaacaattacatcatgatgacacaaccatcctgagctactcctggcagcaaagcaggagttcattaaactgaatctctgaaagaaaaatgttgaaatgttttttgagcttctgctgcgcagtttcagtttcttgcaccaaccaagctgtggtttcttttacaggtctagtattccgaacggacagccaaagttgcttctatctttcttaccagattatccgatgcttaactttttgcttactacgacgatatttctgtcggtatcattccgggtgtttaagctcacaaacgtactgaaagaggcatttatccccaccagggacaacaagtgtctatatcaaaattttattgctggagttgcagtctttgcatgcctatattgcagctcattattcttcaaaacctaccaacagtatagctgatacatagactctaaatcttagctatctcatgtagctcaactcagaaagcacattgtttttcctgggatggagaaattccaagtaattaagtgaacttgttaatttgtttcttttgtatgtatttccaagtaattgcgtgtttttagagacatccatagtcgtgtccttagttttggtggttttaactgcctatgtaaacaaaacaacaagtcttgtaaaatcagttctatagtagtgttctactttagttaagctttactcttacgagttcactatatttccgcttacataata

SEQ ID NO: 25783 - DNA, 2194 bp, Zea Mays
ctttatttgagaattagtcatggctcattagtcaatgcaactgactccgtcagcctcctagcaatttcaggcgtggtgcctgcctgcctgttgaatataaatataaatcagttgcgtctctagcttgtgctgcggtgctgcctagtcttgccttctaccaagggtgtgccacacatcaaacaccattgatagatagatactgatgactgcttccttggaacaatctcctatttaaaagctgtgtgcataccaggcactcaggcagcacaaaggtcgacgagttaggaaggatggcctttctggtgccgtttctgctgggtctttcctctgtcctcgccgcgtggatctactctgaattcctgggatacagggcatcatcgtctcatgaaaaagtccactcggatgttcacgtcggcgataaaaccatcaaagaaaatgacagggcggtcctacttgaagaaggtgaatctaaaccgccatcgacaaaggcacccaacatgtctgccagagccaaattaatacggtttattacgttggacgagtcctttcttgttggaaaccgcgccacactgagagccatagctgaattcggcattattcttgtttacttttacacctgtgatcggaccaacatatttgcagagagcaagaagaactacaaccgcgacatgtttctgtttctttacattcttcttgtcgtcgcatcaacgattacctcactcaagaagcaccctgaaaattcagtagtttcaggaaagaccgttttctatcttaatcgcaaccaaactgatgaatggagagggtggatgcaggtcttgtttctgatgtaccactatttcgctgcctcggaaatatacaatgcaatccgtgtgttcattgcttgctatgtctggatgactggatttgggaatttctcatactactacaagaagaaagatttcagtatcgcaagatttgctcagatgatgtggagggtaaatttctttgccatgtcctgttgcatggtccttgacaatgactacatgttgtactatatcgctccgatgcataccctgttcactcttatggtgtatggatcactgtttgttctcaacaagtacaatgagatcccatcagtcatggccattaagatcgcaggctgcctcttgactgtcattctgatatgggaaattcctggtgtgtttgaaattttctgggcaccatttacgtttctgctaggtaaggttacaaaaacccagagccttctaagatgaacttacccctgttacacgaatggcgcttccgctctggccttgatcgttacatatggatcattggaatgatttatgcttactttcaccccaacgttgaaagatggatggaaaagctggaagaatctgagactaaggtgagagtgttaatcaagggaaccattgttacagcttccttaatggccggctatctgtggtacgaatatatctacaagctggacaaacatacatataacaagtaccatccctacacgtcgtggattccaataactatctatgtctgcctacgcaattgcacccaacagttgaggagtacccatttgtctctttttgtttggcttggcaaaattacaatggagagttatatttctcagtttcacatttggctcaggtctagtattccgaacggacagccaaagttgcttctatctttcttaccagattatccgatgcttaactttttgcttactacgacgatatttctgtcggtatcattccgggtgtttaagctcacaaacgtactgaaagaggcatttatccccaccagggacaacaagtgtctatatcaaaattttattgctggagttgcagtctttgcatgcctatattgcagctcattattcttcaaaacctaccaacagtatagctgatacatagactctaaatcttagctatctcatgtagctcaactcagaaagcacattgtttttcctgggatggagaaattccaagtaattaagtgaacttgttaatttgtttcttttgtatgtatttccaagtaattgcgtgtttttagagacatccatagtcgtgtccttagttttggtggttttaactgcctatgtaaacaaaacaacaagtcttgtaaaatcagttctatagtagtgttctactttagttaagctttactcttacgagttcactatatttccgcttacataata

SEQ ID NO: 25784 - DNA, 2928 bp, Zea Mays
cgacaattactttcgttgcgcgctgcaactgccgctcgccgatccgcgcacacagccgactgccgccgccatggaggacgttctgacaccgccgccgcagccggaactcgccggagagaagcgtaagagggaggagagttcgctggatgcgtccatcgaagacgctccatccgcccccgcctccacctgcagcgctgaggatgcggccggcagcgacgtcgcccggcacccgatgtggaagacgagcctgtgctccttcttccgccgccgcggcgccggcgccgaagggtgcagtcacggggactcctgccgctacgcgcacaccgaggaggagctccgcccacggcccgacggcacctgggaccccacctccgaccgcgccaaggagctgcgcaaggtcgccgcggaggcccaggaggaggccgaggaggaggtcacggtggatgagcagtcactcgacaagtgcctcgtcgggcttcccaggggctggacggctgataggctcaagtccttgctccaggatcagggaatctcgtatgcaacagcaaagaaaaagaagggaatgacagttggttttgtgacttttcagagtgttgaacaactaacaaatgcagttcaggtccttaaggagaacccttctgatggaaagcaaattaagatagtagatgccaatcgtaggtcccatcaaaaggcacatgctggagcacctgtatccaatactggaactgcaacagaaaatggtagtagtcctactacacctgcagaggaaacatctgtgcctgaatcggtgtcatcaagtaaaaaaggtgcccgtgatgcagttactccccttgcccatatgacttacattgatcagctagaacacaaaaagcaatctatggcacagatactgaagaaacttactcgcaatgctaggaaagcttgcccacctaccattccccatcctgattgggtttttaaatcaaaggaaatcggtggccttccttgcaagtttgaaggcattttggagtccccagttgttaatggataccgtaacaagtgtgagttctctgtaggatattctttagagggcaaaaagacagtaggatttatgctcggaaatttcagggaaggcgtgactgctgttgaggaacctgagaactgtccaaatgtctcagaaatttcctgcaaatatgctaaaatgttccaagattttcttcaatcatcaagtttccctttgtggagcaagattgacaactctgggttttggcgccaactcacagttcgtgagggaagatgtccagctgaagctgttgtttcacagaatgcagaatcacaaatatcagaagtcatgcttattgtgcaggtgtgttcgacaagtgttgatgaagctcttatgaaagaagagtttgacaagctgtctgctgccctggtacaaggagcagcaacatgctcacctcccttgccactgacaactattgtagtgcaagatcataaagggatatcaaatgctgcacctactgattgcccactgatcccgctattggtaccaaagggagataagttggatggcacatcagaagataaaacaagaatccatgatcacataagcaacttaaagttctctatatcaccaacagcttttttccaggttaatactcttgctgcggaaagattgtatgcccttgctggtgattgggctaatctcaattcagacacattactttttgatgtgtgttgtgggactggaactattggcctgaccttagcacagcgtgttggaatggttgttgggattgaaatgaatgaatcggcagtttcagatgctcacagaaatgctcttatcaatggcataaaaaattgtcgctttgtctgtggtaaggctgaagatgtgatggggccccttctcacagaatatcttggttcaccacagcagcaggctgcagcttctaaaagtaattctgaaatcgatgatacaagcaaaactgaggatatgattggttgtgcaagttatgatggtgaaaatatagatagctcaaagcagagacatgacaatgctgaaggtcagcagcctatggacacgtcagttgatcatcctacctgtgcaagtgaggtggatgggatggacgtggttgattgcaatcatgatgaaaacaatgtggcttctggtgaacaaaattgtggggaagcatcattgattaatggtaaacccattgagacatcatcagataatagtttggagcaaggcaagacatgcaaggatggttcttccagtccaaacaacaatgtccttgctgctaatgcatgccagtttaagaatgtcgttgctattgtagaccctccacgtgttggccttcaccctactgtgatcaaggcattgaggacgcatccacgtattcgacgtctagtgtacatttcctgcaaccctgacagtctagtcgccaacgggatcgagctttgcacaccaacacccgagaaacaagagaagaacaaaggcaaccgagggtggcggtctatgagcagcgcgggtctcgctcggcagaggacgaagtcgatgcccaactctgaaccttttatccccaagagggcaatggctgtcgatctgttccctcacacaccgcattgcgagatggttatgctttttgagaggtgaaggaagtgtgtctaccaattggacgcagctggcgtgcctcagattcttgttaagagatttttgacctttgtgtcgaggaccatatctgtttttcctcctcaccttggcccatccatatgttgtaacttagtaacatctattcgattgagaggccatgacggttggtgttggtggttactctttcggatttgccttctgttcggctacacttaatcactgattaacttttcaggtacccttgactccattactgcgataatgtgttacacacgacatatattcaatggataccagtt

SEQ ID NO: 25785 - DNA, 2877 bp, Zea Mays
cgacaattactttcgttgcgcgctgcaactgccgctcgccgatccgcgcacacagccgactgccgccgccatggaggacgttctgacaccgccgccgcagccggaactcgccggagagaagcgtaagagggaggagagttcgctggatgcgtccatcgaagacgctccatccgcccccgcctccacctgcagcgctgaggatgcggccggcagcgacgtcgcccggcacccgatgtggaagacgagcctgtgctccttcttccgccgccgcggcgccggcgccgaagggtgcagtcacggggactcctgccgctacgcgcacaccgaggaggagctccgcccacggcccgacggcacctgggaccccacctccgaccgcgccaaggagctgcgcaaggtcgccgcggaggcccaggaggaggccgaggaggaggtcacggtggatgagcagtcactcgacaagtgcctcgtcgggcttcccaggggctggacggctgataggctcaagtccttgctccaggatcagggaatctcgtatgcaacagcaaagaaaaagaagggaatgacagttggttttgtgacttttcagagtgttgaacaactaacaaatgcagttcaggtccttaaggagaacccttctgatggaaagcaaattaagatagtagatgccaatcgtaggtcccatcaaaaggcacatgctggagcacctgtatccaatactggaactgcaacagaaaatggtagtagtcctactacacctgcagaggaaacatctgtgcctgaatcggtgtcatcaagtaaaaaaggtgcccgtgatgcagttactccccttgcccatatgacttacattgatcagctagaacacaaaaagcaatctatggcacagatactgaagaaacttactcgcaatgctaggaaagcttgcccacctaccattccccatcctgattgggtttttaaatcaaaggaaatcggtggccttccttgcaagtttgaaggcattttggagtccccagttgttaatggataccgtaacaagtggaaggcgtgactgctgttgaggaacctgagaactgtccaaatgtctcagaaatttcctgcaaatatgctaaaatgttccaagattttcttcaatcatcaagtttccctttgtggagcaagattgacaactctgggttttggcgccaactcacagttcgtgagggaagatgtccagctgaagctgttgtttcacagaatgcagaatcacaaatatcagaagtcatgcttattgtgcaggtgtgttcgacaagtgttgatgaagctcttatgaaagaagagtttgacaagctgtctgctgccctggtacaaggagcagcaacatgctcacctcccttgccactgacaactattgtagtgcaagatcataaagggatatcaaatgctgcacctactgattgcccactgatcccgctattggtaccaaagggagataagttggatggcacatcagaagataaaacaagaatccatgatcacataagcaacttaaagttctctatatcaccaacagcttttttccaggttaatactcttgctgcggaaagattgtatgcccttgctggtgattgggctaatctcaattcagacacattactttttgatgtgtgttgtgggactggaactattggcctgaccttagcacagcgtgttggaatggttgttgggattgaaatgaatgaatcggcagtttcagatgctcacagaaatgctcttatcaatggcataaaaaattgtcgctttgtctgtggtaaggctgaagatgtgatggggccccttctcacagaatatcttggttcaccacagcagcaggctgcagcttctaaaagtaattctgaaatcgatgatacaagcaaaactgaggatatgattggttgtgcaagttatgatggtgaaaatatagatagctcaaagcagagacatgacaatgctgaaggtcagcagcctatggacacgtcagttgatcatcctacctgtgcaagtgaggtggatgggatggacgtggttgattgcaatcatgatgaaaacaatgtggcttctggtgaacaaaattgtggggaagcatcattgattaatggtaaacccattgagacatcatcagataatagtttggagcaaggcaagacatgcaaggatggttcttccagtccaaacaacaatgtccttgctgctaatgcatgccagtttaagaatgtcgttgctattgtagaccctccacgtgttggccttcaccctactgtgatcaaggcattgaggacgcatccacgtattcgacgtctagtgtacatttcctgcaaccctgacagtctagtcgccaacgggatcgagctttgcacaccaacacccgagaaacaagagaagaacaaaggcaaccgagggtggcggtctatgagcagcgcgggtctcgctcggcagaggacgaagtcgatgcccaactctgaaccttttatccccaagagggcaatggctgtcgatctgttccctcacacaccgcattgcgagatggttatgctttttgagaggtgaaggaagtgtgtctaccaattggacgcagctggcgtgcctcagattcttgttaagagatttttgacctttgtgtcgaggaccatatctgtttttcctcctcaccttggcccatccatatgttgtaacttagtaacatctattcgattgagaggccatgacggttggtgttggtggttactctttcggatttgccttctgttcggctacacttaatcactggtatgtatttctttttcgtgttaaatggatggcatagtaggactaattcgtgtacgtaaaatgtgtgctagtagccatacctggctcagcttt

SEQ ID NO: 25786 - DNA, 2816 bp, Zea Mays
cgacaattactttcgttgcgcgctgcaactgccgctcgccgatccgcgcacacagccgactgccgccgccatggaggacgttctgacaccgccgccgcagccggaactcgccggagagaagcgtaagagggaggagagttcgctggatgcgtccatcgaagacgctccatccgcccccgcctccacctgcagcgctgaggatgcggccggcagcgacgtcgcccggcacccgatgtggaagacgagcctgtgctccttcttccgccgccgcggcgccggcgccgaagggtgcagtcacggggactcctgccgctacgcgcacaccgaggaggagctccgcccacggcccgacggcacctgggaccccacctccgaccgcgccaaggagctgcgcaaggtcgccgcggaggcccaggaggaggccgaggaggaggtcacggtggatgagcagtcactcgacaagtgcctcgtcgggcttcccaggggctggacggctgataggctcaagtccttgctccaggatcagggaatctcgtatgcaacagcaaagaaaaagaagggaatgacagttggttttgtgacttttcagagtgttgaacaactaacaaatgcagttcaggtccttaaggagaacccttctgatggaaagcaaattaagatagtagatgccaatcgtaggtcccatcaaaaggcacatgctggagcacctgtatccaatactggaactgcaacagaaaatggtagtagtcctactacacctgcagaggaaacatctgtgcctgaatcggtgtcatcaagtaaaaaaggtgcccgtgatgcagttactccccttgcccatatgacttacattgatcagctagaacacaaaaagcaatctatggcacagatactgaagaaacttactcgcaatgctaggaaagcttgcccacctaccattccccatcctgattgggtttttaaatcaaaggaaatcggtggccttccttgcaagtttgaaggcattttggagtccccagttgttaatggataccgtaacaagtgtgagttctctgtaggatattctttagagggcaaaaagacagtaggatttatgctcggaaatttcagggaaggcgtgactgctgttgaggaacctgagaactgtccaaatgtctcagaaatttcctgcaaatatgctaaaatgttccaagattttcttcaatcatcaagtttccctttgtggagcaagattgacaactctgggttttggcgccaactcacagtgtgttcgacaagtgttgatgaagctcttatgaaagaagagtttgacaagctgtctgctgccctggtacaaggagcagcaacatgctcacctcccttgccactgacaactattgtagtgcaagatcataaagggatatcaaatgctgcacctactgattgcccactgatcccgctattggtaccaaagggagataagttggatggcacatcagaagataaaacaagaatccatgatcacataagcaacttaaagttctctatatcaccaacagcttttttccaggttaatactcttgctgcggaaagattgtatgcccttgctggtgattgggctaatctcaattcagacacattactttttgatgtgtgttgtgggactggaactattggcctgaccttagcacagcgtgttggaatggttgttgggattgaaatgaatgaatcggcagtttcagatgctcacagaaatgctcttatcaatggcataaaaaattgtcgctttgtctgtggtaaggctgaagatgtgatggggccccttctcacagaatatcttggttcaccacagcagcaggctgcagcttctaaaagtaattctgaaatcgatgatacaagcaaaactgaggatatgattggttgtgcaagttatgatggtgaaaatatagatagctcaaagcagagacatgacaatgctgaaggtcagcagcctatggacacgtcagttgatcatcctacctgtgcaagtgaggtggatgggatggacgtggttgattgcaatcatgatgaaaacaatgtggcttctggtgaacaaaattgtggggaagcatcattgattaatggtaaacccattgagacatcatcagataatagtttggagcaaggcaagacatgcaaggatggttcttccagtccaaacaacaatgtccttgctgctaatgcatgccagtttaagaatgtcgttgctattgtagaccctccacgtgttggccttcaccctactgtacatttcctgcaaccctgacagtctagtcgccaacgggatcgagctttgcacaccaacacccgagaaacaagagaagaacaaaggcaaccgagggtggcggtctatgagcagcgcgggtctcgctcggcagaggacgaagtcgatgcccaactctgaaccttttatccccaagagggcaatggctgtcgatctgttccctcacacaccgcattgcgagatggttatgctttttgagaggtgaaggaagtgtgtctaccaattggacgcagctggcgtgcctcagattcttgttaagagatttttgacctttgtgtcgaggaccatatctgtttttcctcctcaccttggcccatccatatgttgtaacttagtaacatctattcgattgagaggccatgacggttggtgttggtggttactctttcggatttgccttctgttcggctacacttaatcactggtatgtatttctttttcgtgttaaatggatggcatagtaggactaattcgtgtacgtaaaatgtgtgctagtagccatacctggctcagcttt

SEQ ID NO: 25787 - DNA, 1204 bp, Zea Mays
aagaaaacagccttacagtggtggcatacaagctagtttctaactggttaatgatgaatatgattgatcgaagaagctcggagtatacattttggggaactatggcagcgactatcaccgtccacaccagcagcctacatcatggcaagttcactcaacatccccgatgccacaagatgcggcaaggagcagtccatggcaaagccctatgcagttccaggatccaatgtcaggataccaaggaggtcctcccagcgctccacgtccttggggctcacattctggtcctggaggccgaggttcttattcaaatccaccaaactttgggttcagacacccgaatcccagccggggtggcagcccaatgaactatggaccaagaggtggcccatattcatcttatggacgtggcagggggcccaactactttggcagcccaggatcaagggggagaggtgggagggttggctgccatggccggagttacttcaacaagtcaatgcttgatgacccttggctggacctgcaacctggtgtcggcaacatactgatacctaggggtgagtatgactccaacaagtcctggctcccagaatcgctgcgaaaaaagaaggaaacgccgcctgctcaagggcaaattaaaccgacgccaggattgagcctagcagaataccttgacatgtctttcaatgaggtttctgataaagagaagtaggctttttttatgtatgcatagctacgacgacaggttgatgtttgtttttgccatcgtttgcaatagatctttggaagcacctcttcattacaactttgtaggctttgtttttttttaaaaaaaagagaagcagaactttggagaagggaaagttgcaaaggttgcgtagcatgtcagcgttttctgctggtgcattaacgaccagtgcctgtttcgtcttggattgcatagaaagtttggtggagattctgttgaaggaaaaaaaaagaagggtgcaaatcttgtgccaaaggtcagctggagatagatgctgcgcttttctttctttgttggtgcatatatgtataacgtgagcatccaaagtgagctaggcacataataaaaagcgcacagatcttttgcgtgatggcaattagagtctgctaagagaaggctgatcaagcatatatataagatgagaagaggaagaaaaggttgtgtttgttagga

SEQ ID NO: 25788 - DNA, 1153 bp, Zea Mays
ttgtgcctaacgccataaggatttctatgtgttctattagaatgggaactatggcagcgactatcaccgtccacaccagcagcctacatcatggcaagttcactcaacatccccgatgccacaagatgcggcaaggagcagtccatggcaaagccctatgcagttccaggatccaatgtcaggataccaaggaggtcctcccagcgctccacgtccttggggctcacattctggtcctggaggccgaggttcttattcaaatccaccaaactttgggttcagacacccgaatcccagccggggtggcagcccaatgaactatggaccaagaggtggcccatattcatcttatggacgtggcagggggcccaactactttggcagcccaggatcaagggggagaggtgggagggttggctgccatggccggagttacttcaacaagtcaatgcttgatgacccttggctggacctgcaacctggtgtcggcaacatactgatacctaggggtgagtatgactccaacaagtcctggctcccagaatcgctgcgaaaaaagaaggaaacgccgcctgctcaagggcaaattaaaccgacgccaggattgagcctagcagaataccttgacatgtctttcaatgaggtttctgataaagagaagtaggctttttttatgtatgcatagctacgacgacaggttgatgtttgtttttgccatcgtttgcaatagatctttggaagcacctcttcattacaactttgtaggctttgtttttttttaaaaaaaagagaagcagaactttggagaagggaaagttgcaaaggttgcgtagcatgtcagcgttttctgctggtgcattaacgaccagtgcctgtttcgtcttggattgcatagaaagtttggtggagattctgttgaaggaaaaaaaaagaagggtgcaaatcttgtgccaaaggtcagctggagatagatgctgcgcttttctttctttgttggtgcatatatgtataacgtgagcatccaaagtgagctaggcacataataaaaagcgcacagatcttttgcgtgatggcaattagagtctgctaagagaaggctgatcaagcatatatataagatgagaagaggaagaaaaggttgtgtttgttagga

SEQ ID NO: 25789 - DNA, 1699 bp, Zea Mays
atggagttgtgcttctactaacaaatttttatttgggcctaagctagcaaggtcgatggtctgcgggagcatgtgaagaaaagtgggcttgcagagaagattgaattggttattacttcccctttactgaggactatgcaaactgcagttggggtctttggtggtgaaaagtatactgatggtgtaaatgcacctccactaatggttgaaaatgctggacacagtggacgtccagctgtttcaagtttgaactgccccccatttattgcagttgaaacctgcagagagcacttgggtgtccatccatgtgacaagaggaggagcataacagaataccggcctctcttccctgccattgatttttcattggcaagtctctcctattgtccgttcatgagccatttcttgggcattgcttttcttcagatatgtatttgcttatttgcagatagagaatgatggagatgttctttgggaaccagatgtgagagaaacaaatgaggctgtcgcattgaggggtatgaagtttatggactggttgtggacaagagaagagaaagagatagctattgtcagtcacagtggtttcttgtttcacaccttaagcatgtacagcaaggagtgccatccaaccataagagacgaagttagcaagcactttgcaaactgcgagctacggtcgatggtgttggttgacagaagcatgcttgggtcatattcgtcaagattcaactatgctggcaagaatccaaccgggctagatgtgcctagtgatattgcagataagaagcaggttgatgaagctcagaagaactgaggcaaccttgaaagcataccgtagatgacttggattatcaaaaagccactctgacctttgcgaagcttgcttgcttgctttgaagagggcatctactacagatagagtttacacataccattgcgttagtcgagatgaactacgcagcaatgtataagcatgtctgctcttttgtctcagcctacatttgagattcagggcattggactaagatcgcctatttatgataataataataataataaccggatcaccccacattcaccaggtgatgcacgtcaaaattctattggtttcctagctgttttaaaacctaggggtggtttctgatggatggcgataaaaccgatcgatgtatggttttgggttgtgcgctgtatttctgatttctggttcagagataatggaggccggcgctgctgcatatgcatccaaactgtttacattgtgtaaaaaccatatatgttttgtttacaacgtggaaggcgagacggatcacaacgtgcaatgcaggctgaccgcctgcgagagcatgtgaaggaatctggacttgcagagaagatcgagctggttatttgttctcctttatcgaggtacagttttgcatgatcttttctgcccagcgatgacaagaagcaaccaggaggaagctcaagacagaatctgagcggctgagcctgccttatgaccccaagggcttgtttggtgaattggtgttcaccgctgattccttttgtcatcctattttgaaaattccctagctacatccagtccatttgttaactattctgagaatactactctgaacttcccatttatggcgattagggttttgacactcttttcctttagggctagtttaaaaaaaaaaattaaatctcc

SEQ ID NO: 25790 - DNA, 1875 bp, Zea Mays
cgtcttctcaccctcctccacagatttaccagtgatgatacgattcgtcgtcgtctcatcggccccttgggatctagaatggaacttggcgccaccactgccctgtaccctctgcaccgctgcaaaaccatttacctggtcaggcatgcccagggcattcacaacgtcgcaggcgagaaggacttcggcgcctacatgtcacatgaactgttcgatgctcagctcacccctttgggttggaaccaagtcgatggtctgcgggagcatgtgaagaaaagtgggcttgcagagaagattgaattggttattacttcccctttactgaggactatgcaaactgcagttggggtctttggtggtgaaaagtatactgatggtgtaaatgcacctccactaatggttgaaaatgctggacacagtggacgtccagctgtttcaagtttgaactgccccccatttattgcagttgaaacctgcagagagcacttgggtgtccatccatgtgacaagaggaggagcataacagaataccggcctctcttccctgccattgatttttcattggcaagtctctcctattgtccgttcatgagccatttcttgggcattgcttttcttcagatatgtatttgcttatttgcagatagagaatgatggagatgttctttgggaaccagatgtgagagaaacaaatgaggctgtcgcattgaggggttgtggacaagagaagagaaagagatagctattgtcagtcacagtggtttcttgtttcacaccttaagcatgtacagcaaggagtgccatccaaccataagagacgaagttagcaagcactttgcaaactgcgagctacggtcgatggtgttggttgacagaagcatgcttgggtcatattcgtcaagattcaactatgctggcaagaatccaaccgggctagatgtgcctagtgatattgcagataagaagcaggttgatgaagctcagaagaactgaggcaaccttgaaagcataccgtagatgacttggattatcaaaaagccactctgacctttgcgaagcttgcttgcttgctttgaagagggcatctactacagatagagtttacacataccattgcgttagtcgagatgaactacgcagcaatgtataagcatgtctgctcttttgtctcagcctacatttgagattcagggcattggactaagatcgcctatttatgataataataataataataaccggatcaccccacattcaccaggtgatgcacgtcaaaattctattggtttcctagctgttttaaaacctaggggtggtttctgatggatggcgataaaaccgatcgatgtatggttttgggttgtgcgctgtatttctgatttctggttcagagataatggaggccggcgctgctgcatatgcatccaaactgtttacattgtgtaaaaaccatatatgttttgtttacaacgtggaaggcgagacggatcacaacgtgcaatgcaggctgaccgcctgcgagagcatgtgaaggaatctggacttgcagagaagatcgagctggttatttgttctcctttatcgaggtacagttttgcatgatcttttctgcccagcgatgacaagaagcaaccaggaggaagctcaagacagaatctgagcggctgagcctgccttatgaccccaagggcttgtttggtgaattggtgttcaccgctgattccttttgtcatcctattttgaaaattccctagctacatccagtccatttgttaactattctgagaatactactctgaacttcccatttatggcgattagggttttgacactcttttcctttagggctagtttaaaaaaaaaaattaaatctcc

SEQ ID NO: 25791 - DNA, 1914 bp, Zea Mays
cgtcttctcaccctcctccacagatttaccagtgatgatacgattcgtcgtcgtctcatcggccccttgggatctagaatggaacttggcgccaccactgccctgtaccctctgcaccgctgcaaaaccatttacctggtcaggcatgcccagggcattcacaacgtcgcaggcgagaaggacttcggcgcctacatgtcacatgaactgttcgatgctcagctcacccctttgggttggaaccaagtgggtgcaggttttgtttttgaagaataaggaagaggaatagaatctcattcatgtgttcgtgcaaacagaagagcagatccaatacgcatacataaggtcgatggtctgcgggagcatgtgaagaaaagtgggcttgcagagaagattgaattggttattacttcccctttactgaggactatgcaaactgcagttggggtctttggtggtgaaaagtatactgatggtgtaaatgcacctccactaatggttgaaaatgctggacacagtggacgtccagctgtttcaagtttgaactgccccccatttattgcagttgaaacctgcagagagcacttgggtgtccatccatgtgacaagaggaggagcataacagaataccggcctctcttccctgccattgatttttcattgatagagaatgatggagatgttctttgggaaccagatgtgagagaaacaaatgaggctgtcgcattgaggggtatgaagtttatggactggttgtggacaagagaagagaaagagatagctattgtcagtcacagtggtttcttgtttcacaccttaagcatgtacagcaaggagtgccatccaaccataagagacgaagttagcaagcactttgcaaactgcgagctacggtcgatggtgttggttgacagaagcatgcttgggtcatattcgtcaagattcaactatgctggcaagaatccaaccgggctagatgtgcctagtgatattgcagataagaagcaggttgatgaagctcagaagaactgaggcaaccttgaaagcataccgtagatgacttggattatcaaaaagccactctgacctttgcgaagcttgcttgcttgctttgaagagggcatctactacagatagagtttacacataccattgcgttagtcgagatgaactacgcagcaatgtataagcatgtctgctcttttgtctcagcctacatttgagattcagggcattggactaagatcgcctatttatgataataataataataataaccggatcaccccacattcaccaggtgatgcacgtcaaaattctattggtttcctagctgttttaaaacctaggggtggtttctgatggatggcgataaaaccgatcgatgtatggttttgggttgtgcgctgtatttctgatttctggttcagagataatggaggccggcgctgctgcatatgcatccaaactgtttacattgtgtaaaaaccatatatgttttgtttacaacgtggaaggcgagacggatcacaacgtgcaatgcaggctgaccgcctgcgagagcatgtgaaggaatctggacttgcagagaagatcgagctggttatttgttctcctttatcgaggtacagttttgcatgatcttttctgcccagcgatgacaagaagcaaccaggaggaagctcaagacagaatctgagcggctgagcctgccttatgaccccaagggcttgtttggtgaattggtgttcaccgctgattccttttgtcatcctattttgaaaattccctagctacatccagtccatttgttaactattctgagaatactactctgaacttcccatttatggcgattagggttttgacactcttttcctttagggctagtttaaaaaaaaaaattaaatctcc

SEQ ID NO: 25792 - DNA, 2446 bp, Zea Mays
cgcccttttcctccttcaccctagatcccgttagtctaggtagcattgcgatctgcagatgtccttccgttcccgcggttccctttctcgcccttttcccgcccggggacctcatccttccctcagcaatgggatccacgtcttctcaccctcctccacagatttaccagtgatgatacgattcgtcgtcgtctcatcggccccttgggatctagaatggaacttggcgccaccactgccctgtaccctctgcaccgctgcaaaaccatttacctggtcaggcatgcccagggcattcacaacgtcgcaggcgagaaggacttcggcgcctacatgtcacatgaactgttcgatgctcagctcacccctttgggttggaaccaaggtgttagtttctactgacaaaataagctgcatggatggagttgtgcttctactaacaaatttttatttgggcctaagctagcaaggtaggtccaaattgcacacgtttattctaataactgatgctcgctaagcagtaacaaatgtagaattagccatggagattattctgtatgttatcctcttcaattttagcacacaaagcatcacccattcatgacaaaatagattagccatggaaataattcaagtgaaaaaatctgaaagtctcaatcccccacttactgatttccaactacttttaccttacttcatatgctactgtcatcaataatcatgtctcttctttttacaaacatgcattttgatagaaggcttcatagtcctaagacaggtgggtgcaggttttgtttttgaagaataaggaagaggaatagaatctcattcatgtgttcgtgcaaacagaagagcagatccaatacgcatacataaggtcgatggtctgcgggagcatgtgaagaaaagtgggcttgcagagaagattgaattggttattacttcccctttactgaggactatgcaaactgcagttggggtctttggtggtgaaaagtatactgatggtgtaaatgcacctccactaatggttgaaaatgctggacacagtggacgtccagctgtttcaagtttgaactgccccccatttattgcagttgaaacctgcagagagcacttgggtgtccatccatgtgacaagaggaggagcataacagaataccggcctctcttccctgccattgatttttcattgatagagaatgatggagatgttctttgggaaccagatgtgagagaaacaaatgaggctgtcgcattgaggggtatgaagtttatggactggttgtggacaagagaagagaaagagatagctattgtcagtcacagtggtttcttgtttcacaccttaagcatgtacagcaaggagtgccatccaaccataagagacgaagttagcaagcactttgcaaactgcgagctacggtcgatggtgttggttgacagaagcatgcttgggtcatattcgtcaagattcaactatgctggcaagaatccaaccgggctagatgtgcctagtgatattgcagataagaagcaggttgatgaagctcagaagaactgaggcaaccttgaaagcataccgtagatgacttggattatcaaaaagccactctgacctttgcgaagcttgcttgcttgctttgaagagggcatctactacagatagagtttacacataccattgcgttagtcgagatgaactacgcagcaatgtataagcatgtctgctcttttgtctcagcctacatttgagattcagggcattggactaagatcgcctatttatgataataataataataataaccggatcaccccacattcaccaggtgatgcacgtcaaaattctattggtttcctagctgttttaaaacctaggggtggtttctgatggatggcgataaaaccgatcgatgtatggttttgggttgtgcgctgtatttctgatttctggttcagagataatggaggccggcgctgctgcatatgcatccaaactgtttacattgtgtaaaaaccatatatgttttgtttacaacgtggaaggcgagacggatcacaacgtgcaatgcaggctgaccgcctgcgagagcatgtgaaggaatctggacttgcagagaagatcgagctggttatttgttctcctttatcgaggtacagttttgcatgatcttttctgcccagcgatgacaagaagcaaccaggaggaagctcaagacagaatctgagcggctgagcctgccttatgaccccaagggcttgtttggtgaattggtgttcaccgctgattccttttgtcatcctattttgaaaattccctagctacatccagtccatttgttaactattctgagaatactactctgaacttcccatttatggcgattagggttttgacactcttttcctttagggctagtttaaaaaaaaaaattaaatctcc

SEQ ID NO: 25793 - DNA, 2223 bp, Zea Mays
actaagcttatataaattccgttagatactcggtttgacatctcttttttatatacatttcgataagatcgtaaaaatctcacctcgcgcgcaaagcgcgcgttagacacaagttgcttctcacttggaaggaattatttgagttagaagaggagctccgtgctctgcttccttcccggccaatttttattttttatttcacagtcccattctgatcctgtggacagtgggttaataatagtaataaaaatgataatccacctcctctgcttcccaggcccagcagcaggagctcccccgtctccgtcctcctccgcctctgtcagggtcccggtcggacttcctcacgaccgccgcgccaaatcccgtctcgttcctccgttccgctgcgcatcctcaggaatggaacttggcgccaccactgccctgtaccctctgcaccgctgcaaaaccatttacctggtcaggcatgcccagggcattcacaacgtcgcaggcgagaaggacttcggcgcctacatgtcacatgaactgttcgatgctcagctcacccctttgggttggaaccaagtaaggtcgatggtctgcgggagcatgtgaagaaaagtgggcttgcagagaagattgaattggttattacttcccctttactgaggactatgcaaactgcagttggggtctttggtggtgaaaagtatactgatggtgtaaatgcacctccactaatggttgaaaatgctggacacagtggacgtccagctgtttcaagtttgaactgccccccatttattgcagttgaaacctgcagagagcacttgggtgtccatccatgtgacaagaggaggagcataacagaataccggcctctcttccctgccattgatttttcattggcaagtctctcctattgtccgttcatgagccatttcttgggcattgcttttcttcagatatgtatttgcttatttgcagatagagaatgatggagatgttctttgggaaccagatgtgagagaaacaaatgaggctgtcgcattgaggggtatgaagtttatggactggttgtggacaagagaagagaaagagatagctattgtcagtcacagtggtttcttgtttcacaccttaagcatgtacagcaaggagtgccatccaaccataagagacgaagttagcaagcactttgcaaactgcgagctacggtcgatggtgttggttgacagaagcatgcttgggtcatattcgtcaagattcaactatgctggcaagaatccaaccgggctagatgtgcctagtgatattgcagataagaagcaggttgatgaagctcagaagaactgaggcaaccttgaaagcataccgtagatgacttggattatcaaaaagccactctgacctttgcgaagcttgcttgcttgctttgaagagggcatctactacagatagagtttacacataccattgcgttagtcgagatgaactacgcagcaatgtataagcatgtctgctcttttgtctcagcctacatttgagattcagggcattggactaagatcgcctatttatgataataataataataataaccggatcaccccacattcaccaggtgatgcacgtcaaaattctattggtttcctagctgttttaaaacctaggggtggtttctgatggatggcgataaaaccgatcgatgtatggttttgggttgtgcgctgtatttctgatttctggttcagagataatggaggccggcgctgctgcatatgcatccaaactgtttacattgtgtaaaaaccatatatgttttgtttacaacgtggaaggcgagacggatcacaacgtgcaatgcaggctgaccgcctgcgagagcatgtgaaggaatctggacttgcagagaagatcgagctggttatttgttctcctttatcgaggtacagttttgcatgatcttttctgcccagcgatgacaagaagcaaccaggaggaagctcaagacagaatctgagcggctgagcctgccttatgaccccaagggcttgtttggtgaattggtgttcaccgctgattccttttgtcatcctattttgaaaattccctagctacatccagtccatttgttaactattctgagaatactactctgaacttcccatttatggcgattagggttttgacactcttttcctttagggctagtttaaaaaaaaaaattaaatctcc

SEQ ID NO: 25794 - DNA, 1135 bp, Zea Mays
ccaaaccattttttggtggcagcgctgtccagcaaaaacgaacggatgaatccgcccccgcccctctcgcggccgtaaaaatcgtcttgccttccatccttaccctatcccctctcaaccttatcttggaggcggcgcaggcgcaggcgagtggccgtccagtcgcgcgggcagcagggggcggccatccgtccaggcgcaggcgagcggccgtctgtccagcgcatgctagtggccatccgtccaggcgaactgcgagcaggcgtccgtccaaacgaactgcgagcgtccgtccaggcttccatccaggcgagctgcagaacttttctacgcacaacacattccaagaaccggatcacaaatctgatgctgagtttttaaacaagcctttggagaactataaggaaatgttcattgtctttggaaacaatatggctacaggaaagtatgcaaaaggatcaagtgaagctctaggtactgaagatagaaacagtatggctgaaacagagattgatgagggagatggtaatgctgttcctagtcctatagatgatattggggcttcatcctcagttcctagacctaggaagaaggcaaaggttactagtaatgaagaggcagggctgattggagcattcaaagatggtgctgaaaggcttgcaatggctattgagaaagctggttcagatgacctaccacctgacttgcttcaaacattgcaaagtattccaggttttgatgacacacacaaggccttttactttgcatatctagtgaaaaatcctggattggcaaggcagttccctactctcccattgacatatcagataagtttgcttgctcgcttcgttagtgagaactttccttagattatgaggaccgggaattaggactatgctggaggttaagtggaaattagaactatgttgttcttttgttatgtaataatggctttgctatgtcgaaataccgggtttcttatgaaatactgggtttgttatgaccaacacagatgctcggtttgtttgttttgaaatactgggtttgagattcattgtaatggtgtatgctcagtttgtttgttttgaagtactgtttgaaatattgttttgaaatgttttttataacggtgtat

SEQ ID NO: 25795 - DNA, 2225 bp, Zea Mays
ccaaaccattttttggtggcagcgctgtccagcaaaaacgaacggatgaatccgcccccgcccctctcgcggccgtaaaaatcgtcttgccttccatccttaccctatcccctctcaaccttatcttggaggcggcgcaggcgcaggcgagtggccgtccagtcgcgcgggcagcagggggcggccatccgtccaggcgcaggcgagcggccgtctgtccagcgcatgctagtggccatccgtccaggcgaactgcgagcaggcgtccgtccaaacgaactgcgagcgtccgtccaggcttccatccaggcgagctgcagaacttttctacgcacaacacattccaagaaccgatggacaaggcgaccaagcttttgatttatggtgcttcagcacacatgttgttgtccatgatggccatggttattgagtctagaaaaagaaaaagagatagtagaagagtcggtattacttatgggccaatggaggaaagggataggatgagacttgattatcttaacactaaaatatggatgagtgatacaacatgtgtgaacatgcttagacttagtaggtctagtttctttcgcttttgtaagggctttagagaccggggtttacttgaagatacaatacacatgtgtgttgaggaacaagtggccatgtttttgaacacagtgggacacaaccttaggaataggttggtgggaacaaattatggtagatctggtgagactgttagtcgctacttcaacaaagtgcttcgtgctattggagagctacgagctgaacttattaggccaccatcattagagactccatccaaaatagcaggaaatccaagatgggatccctactttaaggattgcattggagctattgatggcacacatataagagcttcggtttccatagatatggaaccttcatttcgtggtagaaagtcttatgcctctcaaaatgtaatggcggccgttgattttgatcttcgattcacatatgtcttggctggttgggagggttcagcacatgatgctttagtactaagagatgctttagagcgagagaatggccttcgtgtaccacaagaaaatggagagtgaaggagctggtgagcactttgtggaacaagctgatggtagtggccatgttgtgtggacttctgcaatgtccgcttacatgctcagtaacctagcaagccttgtggctgaagggatcaggacatcaacaggcttcaagaaagttcaccttaacatgtgtgctaaggctctaaatgactatttcaagatgaagctcactggagaacaagtgaagaaccatttgaggacatggaagagaagatatgcgaagataaacagacttaggaagttaagtgctgcttcttggaacgaagataactacatgatcactcttgatcatgaacattatgcaaactatgtgcaggatcacaaatctgatgctgagtttttaaacaagcctttggagaactataaggaaatgttcattgtctttggaaacaatatggctacaggaaagtatgcaaaaggatcaagtgaagctctaggtactgaagatagaaacagtatggctgaaacagagattgatgagggagatggtaatgctgttcctagtcctatagatgatattggggcttcatcctcagttcctagacctaggaagaaggcaaaggttactagtaatgaagaggcagggctgattggagcattcaaagatggtgctgaaaggcttgcaatggctattgagaaagctggttcagatgacctaccacctgacttgcttcaaacattgcaaagtattccaggttttgatgacacacacaaggccttttactttgcatatctagtgaaaaatcctggattggcaaggcagttccctactctcccattgacatatcagataagtttgcttgctcgcttcgttagtgagaactttccttagattatgaggaccgggaattaggactatgctggaggttaagtggaaattagaactatgttgttcttttgttatgtaataatggctttgctatgtcgaaataccgggtttcttatgaaatactgggtttgttatgaccaacacagatgctcggtttgtttgttttgaaatactgggtttgagattcattgtaatggtgtatgctcagtttgtttgttttgaagtactgtttgaaatattgttttgaaatgttttttataacggtgtat

SEQ ID NO: 25796 - DNA, 564 bp, Zea Mays
gcgagatgaaccccaaaccattttttggtggcagcgctgtccagcaaaaacgaacggatgaatccgcccccgcccctctcgcggccgtaaaaatcgtcttgccttccatccttaccctatcccctctcaaccttatcttggaggcggcgcaggcgcaggcgagtggccgtccagtcgcgcgggcagcagggggcggccatccgtccaggcgcaggcgagcggccgtctgtccagcgcatgctagtggccatccgtccaggcgaactgcgagcaggcgtccgtccaaacgaactgcgagcgtccgtccaggcttccatccaggcgagctgcagaacttttctacgcacaacacattccaagaaccgaaggctgcatcaggagacaggaggaggagcatgtctctgtaatcgagtggcattcgcaagacggcaaaggagaccaacaacgatgtccaggtctcgaggatgatggccgccgttcctctccacctccggccgccagaaagtctggtggcctactagtgctctgctgtctgcactgcacaagactacaagtagtaggggc

SEQ ID NO: 25797 - DNA, 3131 bp, Zea Mays
cacttgagtacgcattccccaccctaaaaatagaagccaaggttggaagccgaggatcaagacagcaacaatggcaaagaaattactctttttttgctttcccatccctgtcctgtatcatgctcctgccggggctcctagattggtggcgtcccaatcattattcccgggtaaattggttcgctgccgtcaagaatcgcaggtggaacaactgtggcacagttgtgctctcgacttgagaattcctcaagatgttagaaacaagttccattacagccttctgttcaacaccatcagcaattcgtatagagaaaatgataataagtcctatcctcagaaggtcggcattgaggaagcaaccacggcaaccttttcacctgcagaagttgccaacacttttctggattgcttaaacaagcataatttccctttctctgatcatggactgcagaagcatcaggaggaaaccataagcttacttcccaactctaacagcatcaaccttccttttgcgatgaaaagaagacgtctacttgaagaagattcagccattgctccaccccgacctaaagcaaaacaggcaataagaagcgttttgtcttccgaaggagaggctcacttgctagtcactaccgtgaaaaagtccggtaaaccagagcccaaaaacaagagcaaggacaacagtggcactattattgctggtttgtcagtggcttgtgttgcattggtggctcttatatgttcttcacgtaaatcatgctctaccccaattgatgtcaacaggttgggggcattgtcaaccagttcatcagcgagccagcgtaaagaatttaaatttcctcctataaaggcagaagttagagaaatgtcaatgaagtcagagtttgagcgacgcagcaatgtgcaggcgatgaaactaagttctcatgaaataactaccattgctggacgtccggcgacctctactaattctcaggatgtgaaatctgctgttgctgcagttccttctagtaatgccagcgacagcatatgtaaacctgcagctggtccagcaccagcaccaccaccaccaccacgtccaggttatcctctcccaaaggctcctcctgcaccatctgcaccaacaccaccggtaccacctccaaagatgcctacagctgctggttcgagcaatccacccccaccaggacccccaccgcctcctgctcccaggcctgcagttggacccggacctccaccatcaccaagtagtgccggacccggacctccacccccaccaggtagaggtggagctggacctccaccaccagccatgcctggtggtccaaaagcgcgtggtccaccaccattgaagaaggcagggaatgttgcaggtcctcctgtggcagacaataaaacaaagctgaagccattcttctgggataaagttactgcaaatccggatcaagcaatggtgtgggatcaaattaaagcaggatccttccagtttaatgaggagatgatcgagagcctttttggttgtcatgctgctgacaagaaaaatgctgacggcaaaaaggatttagcagcaaaggatacccctcaatttgttaggatactcgatgctaaaaaggcacagaacttagcgatatcactgaaggcattgagtgtttcagctgacgaagtacgtaatgcagttatggaagggcatgaactccctattgatctgatacaaaccttgataaggtggactccaagcagcgacgaggagctaaggcttcggttatacaccggggagctcactcaactgggtcctgcagagcaattcttgaggaccatcattgacataccttacctctatcagcgcctggatgtgttgcttttcatgtccactttgccggaagaagctgcaaatgcagaacaatcatttaaaaccctggaggtggcctgccatgagcttcggaacagccgtctattcaagaagctgctagaggctgtactcaagactggcaaccggatgaacgatggcacctttcgaggtggggcccaggcgttcaagctggacaccctcctgaagctctcagacgtgaagggggtcgacggcaagacgacgctgcttcactttgttgtccaggagatcattcggtcagagggcgtgcgtgccgttcgggccgccaaagagcagaacaacagcagcatatccagcgtgacttctgacgatctcaccgaggatgtcagcgatgacacggagcactacaagcagctaggcctgggcgttgtttcgagcctgggagacgacctccagaacgtgcggaaggcagcaatcctggacgccgatacgctgaccatctcggtggcgagcctggggcacaagttggtgaaggcgaatgagttcttgaacacgggcatgaagagcttagacgaggacagtgggttccatcgcaagcttggcgagttcatcgagcagtcccaggtgcgtgtgacccagcttctggaggaggaaaagaagctacgggcgctggtacgcactactgtagactacttccatgggagcacagggaaggatgagggcctacggctgttcgtcgttgtccgcgacttcctgggaatcctggacaaggtgtgcagagaggtgaaagaggcggctgccaaggctgctgctaataacaagaaaccttcagcggcaggatcaggatcaaagggaaggcaaccgtcgcagtcttcttcgtcgttccgtgatcctcgacagcagctggtgcccgcaattaaagatcggaggagtgcagcggcacgcagctctagttcatcttctgattctgactgactgacagcaaagaatttgtgcagatcacaccagattgatgaggtgatatgggagcacagcaggtagaagagttagcggctatctagttatggattgactcgcttacagcagaatgaaaaagagttagggacactacgccctggtaggttaatttagtatgcacatgatctcaggctctcagctttcgcctccgtaaatattattttatacaaatgtacatcctagatatgtatacaaagatcgttcatggcttaatgaataatattattttatacaaataccttataatatatattgtttgtggacatgaaattaatgtcaattaaac

SEQ ID NO: 25798 - DNA, 3593 bp, Zea Mays
ctgctcctgacaacgagggcagcctctcgttgcatctctctcgcctctgctgaatggaaccacttgagtacgcattccccaccctaaaaatagaagccaaggttggaagccgaggatcaagacagcaacaatggcaaagaaattactctttttttgctttcccatccctgtcctgtatcatgctcctgccggggctcctagattggtggcgtcccaatcattattcccgggtaaattggttcgctgccgtcaagaatcgcagatccaaccagaaggaccaatcttagtgtgccagaactgtatcacaattccaattttaggccaacatttgggtctaagaaacattaattaactaaggtcgaactcgaggtgagaagtacctgcaggggaggaatctattagttcctgtgcatcctttaggcagctgtggtaatccctattgggggaggtaccaatggccggttaatttggtgatccattgagctgtgcaagcaagcaaataccataggattacaagatgagatggcagaggagcaaattcagttggctcctcagcgcatgcctcatttgtctgctgctgcagctggttggtgcgatcaggactagcttgttctggccacaatcttgcctgccgtctcctgcaatcccaagagaagatgaatcggtggaacaactgtggcacagttgtgctctcgacttgagaattcctcaagatgttagaaacaagttccattacagccttctgttcaacaccatcagcaattcgtatagagaaaatgataataagtcctatcctcagaaggtcggcattgaggaagcaaccacggcaaccttttcacctgcagaagttgccaacacttttctggattgcttaaacaagcataatttccctttctctgatcatggactgcagaagcatcaggaggaaaccataagcttacttcccaactctaacagcatcaaccttccttttgcgatgaaaagaagacgtctacttgaagaagattcagccattgctccaccccgacctaaagcaaaacaggcaataagaagcgttttgtcttccgaaggagaggctcacttgctagtcactaccgtgaaaaagtccggtaaaccagagcccaaaaacaagagcaaggacaacagtggcactattattgctggtttgtcagtggcttgtgttgcattggtggctcttatatgttcttcacgtaaatcatgctctaccccaattgatgtcaacaggttgggggcattgtcaaccagttcatcagcgagccagcgtaaagaatttaaatttcctcctataaaggcagaagttagagaaatgtcaatgaagtcagagtttgagcgacgcagcaatgtgcaggcgatgaaactaagttctcatgaaataactaccattgctggacgtccggcgacctctactaattctcaggatgtgaaatctgctgttgctgcagttccttctagtaatgccagcgacagcatatgtaaacctgcagctggtccagcaccagcaccaccaccaccaccacgtccaggttatcctctcccaaaggctcctcctgcaccatctgcaccaacaccaccggtaccacctccaaagatgcctacagctgctggttcgagcaatccacccccaccaggacccccaccgcctcctgctcccaggcctgcagttggacccggacctccaccatcaccaagtagtgccggacccggacctccacccccaccaggtagaggtggagctggacctccaccaccagccatgcctggtggtccaaaagcgcgtggtccaccaccattgaagaaggcagggaatgttgcaggtcctcctgtggcagacaataaaacaaagctgaagccattcttctgggataaagttactgcaaatccggatcaagcaatggtgtgggatcaaattaaagcaggatccttccagtttaatgaggagatgatcgagagcctttttggttgtcatgctgctgacaagaaaaatgctgacggcaaaaaggatttagcagcaaaggatacccctcaatttgttaggatactcgatgctaaaaaggcacagaacttagcgatatcactgaaggcattgagtgtttcagctgacgaagtacgtaatgcagttatggaagggcatgaactccctattgatctgatacaaaccttgataaggtggactccaagcagcgacgaggagctaaggcttcggttatacaccggggagctcactcaactgggtcctgcagagcaattcttgaggaccatcattgacataccttacctctatcagcgcctggatgtgttgcttttcatgtccactttgccggaagaagctgcaaatgcagaacaatcatttaaaaccctggaggtggcctgccatgagcttcggaacagccgtctattcaagaagctgctagaggctgtactcaagactggcaaccggatgaacgatggcacctttcgaggtggggcccaggcgttcaagctggacaccctcctgaagctctcagacgtgaagggggtcgacggcaagacgacgctgcttcactttgttgtccaggagatcattcggtcagagggcgtgcgtgccgttcgggccgccaaagagcagaacaacagcagcatatccagcgtgacttctgacgatctcaccgaggatgtcagcgatgacacggagcactacaagcagctaggcctgggcgttgtttcgagcctgggagacgacctccagaacgtgcggaaggcagcaatcctggacgccgatacgctgaccatctcggtggcgagcctggggcacaagttggtgaaggcgaatgagttcttgaacacgggcatgaagagcttagacgaggacagtgggttccatcgcaagcttggcgagttcatcgagcagtcccaggtgcgtgtgacccagcttctggaggaggaaaagaagctacgggcgctggtacgcactactgtagactacttccatgggagcacagggaaggatgagggcctacggctgttcgtcgttgtccgcgacttcctgggaatcctggacaaggtgtgcagagaggtgaaagaggcggctgccaaggctgctgctaataacaagaaaccttcagcggcaggatcaggatcaaagggaaggcaaccgtcgcagtcttcttcgtcgttccgtgatcctcgacagcagctggtgcccgcaattaaagatcggaggagtgcagcggcacgcagctctagttcatcttctgattctgactgactgacagcaaagaatttgtgcagatcacaccagattgatgaggtgatatgggagcacagcaggtagaagagttagcggctatctagttatggattgactcgcttacagcagaatgaaaaagagttagggacactacgccctggtaggttaatttagtatgcacatgatctcaggctctcagctttcgcctccgtaaatattattttatacaaatgtacatcctagatatgtatacaaagatcgttcatggcttaatgaataatattattttatacaaataccttataatatatattgtttgtggacatgaaattaatgtcaattaaac

SEQ ID NO: 25799 - DNA, 3643 bp, Zea Mays
ctgctcctgacaacgagggcagcctctcgttgcatctctctcgcctctgctgaatggaaccacttgagtacgcattccccaccctaaaaatagaagccaaggttggaagccgaggatcaagacagcaacaatggcaaagaaattactctttttttgctttcccatccctgtcctgtatcatgctcctgccggggctcctagattggtggcgtcccaatcattattcccgggtaaattggttcgctgccgtcaagaatcgcagatccaaccagaaggaccaatcttagtgtgccagaactgtatcacaattccaattttaggccaacatttgggtctaagaaacattaattaactaaggtcgaactcgaggtgagaagtacctgcaggggaggaatctattagttcctgtgcatcctttaggcagctgtggtaatccctattgggggaggtaccaatggccggttaatttggtgatccattgagctgtgcaagcaagcaaataccataggattacaagatgagatggcagaggagcaaattcagttggctcctcagcgcatgcctcatttgtctgctgctgcagctggttggtgcgatcaggactagcttgttctggccacaatcttgcctgccgtctcctgcaatcccaagagaagatgaatcggtggaacaactgtggcacagttgtgctctcgacttgagaattcctcaagatgttagaaacaagttccattacagccttctgttcaacaccatcagcaattcgtatagagaaaatgataataagtcctatcctcagaaggtcggcattgaggaagcaaccacggcaaccttttcacctgcagaagttgccaacacttttctggattgcttaaacaagcataatttccctttctctgatcatggactgcagaagcatcaggaggaaaccataagcttacttcccaactctaacagcatcaaccttccttttgcgatgaaaagaagacgtctacttgaagaagattcagccattgctccaccccgacctaaagcaaaacaggcaataagaagcgttttgtcttccgaaggagaggctcacttgctagtcactaccgtgaaaaagtccggtaaaccagagcccaaaaacaagagcaaggacaacagtggcactattattgctggtttgtcagtggcttgtgttgcattggtggctcttatatgtctgtgttgctgtgcttgtcgtggaagcgaagacccagaatcatcatatgatgacaaaccactgctgagtttgaatatgagtgatttatcaggttgggggcattgtcaaccagttcatcagcgagccagcgtaaagaatttaaatttcctcctataaaggcagaagttagagaaatgtcaatgaagtcagagtttgagcgacgcagcaatgtgcaggcgatgaaactaagttctcatgaaataactaccattgctggacgtccggcgacctctactaattctcaggatgtgaaatctgctgttgctgcagttccttctagtaatgccagcgacagcatatgtaaacctgcagctggtccagcaccagcaccaccaccaccaccacgtccaggttatcctctcccaaaggctcctcctgcaccatctgcaccaacaccaccggtaccacctccaaagatgcctacagctgctggttcgagcaatccacccccaccaggacccccaccgcctcctgctcccaggcctgcagttggacccggacctccaccatcaccaagtagtgccggacccggacctccacccccaccaggtagaggtggagctggacctccaccaccagccatgcctggtggtccaaaagcgcgtggtccaccaccattgaagaaggcagggaatgttgcaggtcctcctgtggcagacaataaaacaaagctgaagccattcttctgggataaagttactgcaaatccggatcaagcaatggtgtgggatcaaattaaagcaggatccttccagtttaatgaggagatgatcgagagcctttttggttgtcatgctgctgacaagaaaaatgctgacggcaaaaaggatttagcagcaaaggatacccctcaatttgttaggatactcgatgctaaaaaggcacagaacttagcgatatcactgaaggcattgagtgtttcagctgacgaagtacgtaatgcagttatggaagggcatgaactccctattgatctgatacaaaccttgataaggtggactccaagcagcgacgaggagctaaggcttcggttatacaccggggagctcactcaactgggtcctgcagagcaattcttgaggaccatcattgacataccttacctctatcagcgcctggatgtgttgcttttcatgtccactttgccggaagaagctgcaaatgcagaacaatcatttaaaaccctggaggtggcctgccatgagcttcggaacagccgtctattcaagaagctgctagaggctgtactcaagactggcaaccggatgaacgatggcacctttcgaggtggggcccaggcgttcaagctggacaccctcctgaagctctcagacgtgaagggggtcgacggcaagacgacgctgcttcactttgttgtccaggagatcattcggtcagagggcgtgcgtgccgttcgggccgccaaagagcagaacaacagcagcatatccagcgtgacttctgacgatctcaccgaggatgtcagcgatgacacggagcactacaagcagctaggcctgggcgttgtttcgagcctgggagacgacctccagaacgtgcggaaggcagcaatcctggacgccgatacgctgaccatctcggtggcgagcctggggcacaagttggtgaaggcgaatgagttcttgaacacgggcatgaagagcttagacgaggacagtgggttccatcgcaagcttggcgagttcatcgagcagtcccaggtgcgtgtgacccagcttctggaggaggaaaagaagctacgggcgctggtacgcactactgtagactacttccatgggagcacagggaaggatgagggcctacggctgttcgtcgttgtccgcgacttcctgggaatcctggacaaggtgtgcagagaggtgaaagaggcggctgccaaggctgctgctaataacaagaaaccttcagcggcaggatcaggatcaaagggaaggcaaccgtcgcagtcttcttcgtcgttccgtgatcctcgacagcagctggtgcccgcaattaaagatcggaggagtgcagcggcacgcagctctagttcatcttctgattctgactgactgacagcaaagaatttgtgcagatcacaccagattgatgaggtgatatgggagcacagcaggtagaagagttagcggctatctagttatggattgactcgcttacagcagaatgaaaaagagttagggacactacgccctggtaggttaatttagtatgcacatgatctcaggctctcagctttcgcctccgtaaatattattttatacaaatgtacatcctagatatgtatacaaagatcgttcatggcttaatgaataatattattttatacaaataccttataatatatattgtttgtggacatgaaattaatgtcaattaaac

SEQ ID NO: 25800 - DNA, 3712 bp, Zea Mays
aacgatgaaacctaagaataatgtaaagttttcggaaaaccaaacccatttcatcttgtatttcgaactattcaaatgggactctagcgttaaacgtgcaattttgtcagctgaaaatggtggctgctcctgacaacgagggcagcctctcgttgcatctctctcgcctctgctgaatggaaccacttgagtacgcattccccaccctaaaaatagaagccaaggttggaagccgaggatcaagacagcaacaatggcaaagaaattactctttttttgctttcccatccctgtcctgtatcatgctcctgccggggctcctagattggtggcgtcccaatcattattcccgggtaaattggttcgctgccgtcaagaatcgcagatccaaccagaaggaccaatcttagtgtgccagaactgtatcacaattccaattttaggccaacatttgggtctaagaaacattaattaactaaggtcgaactcgaggtgagaagtacctgcaggggaggaatctattagttcctgtgcatcctttaggcagctgtggtaatccctattgggggaggtaccaatggccggttaatttggtgatccattgagctgtgcaagcaagcaaataccataggattacaagatgagatggcagaggagcaaattcagttggctcctcagcgcatgcctcatttgtctgctgctgcagctggttggtgcgatcaggactagcttgttctggccacaatcttgcctgccgtctcctgcaatcccaagagaagatgaatcggtggaacaactgtggcacagttgtgctctcgacttgagaattcctcaagatgttagaaacaagttccattacagccttctgttcaacaccatcagcaattcgtatagagaaaatgataataagtcctatcctcagaaggtcggcattgaggaagcaaccacggcaaccttttcacctgcagaagttgccaacacttttctggattgcttaaacaagcataatttccctttctctgatcatggactgcagaagcatcaggaggaaaccataagcttacttcccaactctaacagcatcaaccttccttttgcgatgaaaagaagacgtctacttgaagaagattcagccattgctccaccccgacctaaagcaaaacaggcaataagaagcgttttgtcttccgaaggagaggctcacttgctagtcactaccgtgaaaaagtccggtaaaccagagcccaaaaacaagagcaaggacaacagtggcactattattgctggtttgtcagtggcttgtgttgcattggtggctcttatatgtctgtgttgctgtgcttgtcgtggaagcgaagacccagaatcatcatatgatgacaaaccactgctgagtttgaatatgagtgatttatcaggttcttcacgtaaatcatgctctaccccaattgatgtcaacaggttgggggcattgtcaaccagttcatcagcgagccagcgtaaagaatttaaatttcctccattgctggacgtccggcgacctctactaattctcaggatgtgaaatctgctgttgctgcagttccttctagtaatgccagcgacagcatatgtaaacctgcagctggtccagcaccagcaccaccaccaccaccacgtccaggttatcctctcccaaaggctcctcctgcaccatctgcaccaacaccaccggtaccacctccaaagatgcctacagctgctggttcgagcaatccacccccaccaggacccccaccgcctcctgctcccaggcctgcagttggacccggacctccaccatcaccaagtagtgccggacccggacctccacccccaccaggtagaggtggagctggacctccaccaccagccatgcctggtggtccaaaagcgcgtggtccaccaccattgaagaaggcagggaatgttgcaggtcctcctgtggcagacaataaaacaaagctgaagccattcttctgggataaagttactgcaaatccggatcaagcaatggtgtgggatcaaattaaagcaggatccttccagtttaatgaggagatgatcgagagcctttttggttgtcatgctgctgacaagaaaaatgctgacggcaaaaaggatttagcagcaaaggatacccctcaatttgttaggatactcgatgctaaaaaggcacagaacttagcgatatcactgaaggcattgagtgtttcagctgacgaagtacgtaatgcagttatggaagggcatgaactccctattgatctgatacaaaccttgataaggtggactccaagcagcgacgaggagctaaggcttcggttatacaccggggagctcactcaactgggtcctgcagagcaattcttgaggaccatcattgacataccttacctctatcagcgcctggatgtgttgcttttcatgtccactttgccggaagaagctgcaaatgcagaacaatcatttaaaaccctggaggtggcctgccatgagcttcggaacagccgtctattcaagaagctgctagaggctgtactcaagactggcaaccggatgaacgatggcacctttcgaggtggggcccaggcgttcaagctggacaccctcctgaagctctcagacgtgaagggggtcgacggcaagacgacgctgcttcactttgttgtccaggagatcattcggtcagagggcgtgcgtgccgttcgggccgccaaagagcagaacaacagcagcatatccagcgtgacttctgacgatctcaccgaggatgtcagcgatgacacggagcactacaagcagctaggcctgggcgttgtttcgagcctgggagacgacctccagaacgtgcggaaggcagcaatcctggacgccgatacgctgaccatctcggtggcgagcctggggcacaagttggtgaaggcgaatgagttcttgaacacgggcatgaagagcttagacgaggacagtgggttccatcgcaagcttggcgagttcatcgagcagtcccaggtgcgtgtgacccagcttctggaggaggaaaagaagctacgggcgctggtacgcactactgtagactacttccatgggagcacagggaaggatgagggcctacggctgttcgtcgttgtccgcgacttcctgggaatcctggacaaggtgtgcagagaggtgaaagaggcggctgccaaggctgctgctaataacaagaaaccttcagcggcaggatcaggatcaaagggaaggcaaccgtcgcagtcttcttcgtcgttccgtgatcctcgacagcagctggtgcccgcaattaaagatcggaggagtgcagcggcacgcagctctagttcatcttctgattctgactgactgacagcaaagaatttgtgcagatcacaccagattgatgaggtgatatgggagcacagcaggtagaagagttagcggctatctagttatggattgactcgcttacagcagaatgaaaaagagttagggacactacgccctggtaggttaatttagtatgcacatgatctcaggctctcagctttcgcctccgtaaatattattttatacaaatgtacatcctagatatgtatacaaagatcgttcatggcttaatgaataatattattttatacaaataccttataatatatattgtttgtggacatgaaattaatgtcaattaaac

SEQ ID NO: 25801 - DNA, 3215 bp, Zea Mays
gccggctgctctctgtgttttctctgtgcgtataagaaagctgcttgcctggtcgtcgtcctcatcacttgttctttgtgttgaggcctccatcatctatctcctctctcgtcgtgctggccgaccggcgacgacctatagctcctgccgcctcacgtcgaacgcgccatggccgccaactcaacagctaccaagcatgctttcaagcgtatattgacgagcctgattaagcctggcggtggtgaatacggcaagttcttcagccttcccgcactaaatgatccaaggatcgataagcttccctactctatacgtgttctcctggaatcagctatccgccattgtgataacttccaagttacagagagtgatgtcgagaaaatcattgattgggagaacacatctcccaagctggctgagatacctttcaagccagcgagatgcattctaatggacaacactggagtcccagctgttgtagaccttgcagctatgcgtgatatgatgccaaagttgggttgtgatccctacaagatcaatccattgattcccgtggatgctgttattgaccatgcagtgcgagtggatgtagcagggacctatgatgcattggatagaaacgaggagttggagttccaacgcaacaaagaaaggtttgcttttcttaaatgggcatccaatgctttccacaacatgcaggttttccctcctggttcaggcactgtacaccaggtaaaccttgagtatcttgcccgagttgtcttcaacgaagatggcattctttacttcgacagcgtggttggcacagactcacacaccactatgattaatagtcttggagttgctggttggggagtaggcggtattgaagcagtcgttgcaatgcttggccagccaatgggcatggttttgcctggtgtggttggattcaagttgagtgggaagttacaggatggtgtcactactactgacattgttcttactatgacccaaatgctaaggaagcacggtgctattggcaaattcgttgaattctatggtgttggtgtgggcgagctatctttgcctgctagggccacaattgccaacatgtctccagaatatggagctaccatgggcttcttccctgtagaccaagtagcattggactatctcaaattgacaggccgaagcgatgaaactgtgtcgatgattgaagcatacctgcgagctaacaaaatgtttgtggacaagcatgagcctgagacggaacgagttttctcttcatatctggagctggaccttagtgaggtggagccttgcgtttcaggccccaaaaggcctcatgatcgtgtccctttgaaggaaatgaagtcagactggcatgcttgcctggacaacgaagttggtttcaagggctatgcggtgccaaaggaacagcaaggcaaagttgtgaaattcgacttccatggaaggccagctgaaatcaagcatggcagtgttgttcttgcagcaatatgtagctccacaaacacatcaaatcccagcgtcatgattggtgctggccttgtggcaaagaaagcctgcgaattgggccttgaggtgaagccatgggtaaagacaagccttacccctggatctgtggttgctaccgagtacttgaaacatagtggccttcaagattatctgaaccagcaagggttccatgtcgctgcgcatggctgcgccacttgtgtgggcaactctggtgacctggatggatctgtatccgctgctatcacagaaaatgatatcgttgctgctgcggtgctgtcggccaaccgaaacttcgaggggcgtgtgaaccctctcactcgggctaactaccttgcctcgccgcctctggttgttgcctatgctcttgccggcactgttgacattggttttgaggaagagcccattggagttggaaagggtggcaaggaaattttcttgagggacatatggccttcaaaccaagagatcgatgaggttgtggagtccagcgtgcagactcacttgttcaagaaagtgtacgactccatcatggaacgtaaccctaggtggaaccagctgccggttccaaaggaggcactgtacccatgggacgacaggtccacctacatccgcaagcccacttacctggagggcatgtccatgacgccgcctggcccgcccacggtgacggaggcctactgcctgctcaaccttggagacagcatcaccacggaccacatctcctactcggggaagatccccgagggcacacctgcggccaagtatctgctcgagtatggtgtggagcccaagaacttcagctcctatggtggccgccgcgggaacaatgaggtggtgatgaggggagcgtttgccaatatgaggatcgtgaataagcttcttaatggcgaggctggtccctggacgatccatgttcctaccggggagaagctctacgtttacgacgcggcaatgaaatacaagtcggaaggtcatgacatggtcatcatcgctggctccgagtacggcagtggcagctctcgtgactctgctgccaagggaccaatgctactgggtgtcaagtcggtgattgcaaagagcttcgagcggatccaccggagcaacttggtggggatggggatcattcctctctgctttcaagcaggagaggatgccgattcactcggcctcaccggacgtgagcgctacaccatccacctccctaccagcaccgccgagatcagtcctggtcaggacgtgaccgtcacgacccacgacggaagatcattcacttgcactcttcgcttggacacacagcttgaggtcacatacttcaaccatggaggcatccttccctacatggtccgcaacctggcggcacaaatgaaataagttgaagtttattggtgggaataaattaaaaggtactcaatgccacgtatttggcgtatgtatgtaaataagtggcacattctaatcttcaattgtattattcgctctggcattgaggtgggtcgtagctgcattatactttctccgcaagacatgagcatggattttgttttagcaacagattatttgtactcttgattctttggttccatgctctcttcggccatctccatgtcaatttgctttgcaaacaatataatatcagcgtgccgtgcccttgtagatttccaaatggttatatgcatatgtactattgaaattgtcaaaag

SEQ ID NO: 25802 - DNA, 3470 bp, Zea Mays
cttttccatcggcggcctttcgtttcatcagatcctccgcctctattgggcgccgggcagccaagctgcaggcggatgggcgcgatagcgggaccacatcctgccgccgccgccgccgcctgcccctcttccactccgatccatggagcagcagctcctctgtggtggttgccacacgcacacgcctccgccgccaagcctcccctgcccctgcctccgccgccgcccacggaccctctctgtttcatcgaggtgccacgcgattcatccggaccagctgctgcgtgcccgcctcgtccccgacgtcaccaccagcgccaagctacaaccacgcgacgacgctctccatcggatccgagtcggagtcggagctaccaagcatgctttcaagcgtatattgacgagcctgattaagcctggcggtggtgaatacggcaagttcttcagccttcccgcactaaatgatccaaggatcgataagcttccctactctatacgtgttctcctggaatcagctatccgccattgtgataacttccaagttacagagagtgatgtcgagaaaatcattgattgggagaacacatctcccaagctggctgagatacctttcaagccagcgagatgcattctaatggacaacactggagtcccagctgttgtagaccttgcagctatgcgtgatatgatgccaaagttgggttgtgatccctacaagatcaatccattgattcccgtggatgctgttattgaccatgcagtgcgagtggatgtagcagggacctatgatgcattggatagaaacgaggagttggagttccaacgcaacaaagaaaggtttgcttttcttaaatgggcatccaatgctttccacaacatgcaggttttccctcctggttcaggcactgtacaccaggtaaaccttgagtatcttgcccgagttgtcttcaacgaagatggcattctttacttcgacagcgtggttggcacagactcacacaccactatgattaatagtcttggagttgctggttggggagtaggcggtattgaagcagtcgttgcaatgcttggccagccaatgggcatggttttgcctggtgtggttggattcaagttgagtgggaagttacaggatggtgtcactactactgacattgttcttactatgacccaaatgctaaggaagcacggtgctattggcaaattcgttgaattctatggtgttggtgtgggcgagctatctttgcctgctagggccacaattgccaacatgtctccagaatatggagctaccatgggcttcttccctgtagaccaagtagcattggactatctcaaattgacaggccgaagcgatgaaactgtgtcgatgattgaagcatacctgcgagctaacaaaatgtttgtggacaagcatgagcctgagacggaacgagttttctcttcatatctggagctggaccttagtgaggtggagccttgcgtttcaggccccaaaaggcctcatgatcgtgtccctttgaaggaaatgaagtcagactggcatgcttgcctggacaacgaagttggtttcaagggctatgcggtgccaaaggaacagcaaggcaaagttgtgaaattcgacttccatggaaggccagctgaaatcaagcatggcagtgttgttcttgcagcaatatgtagctccacaaacacatcaaatcccagcgtcatgattggtgctggccttgtggcaaagaaagcctgcgaattgggccttgaggtgaagccatgggtaaagacaagccttacccctggatctgtggttgctaccgagtacttgaaacatagtggccttcaagattatctgaaccagcaagggttccatgtcgctgcgcatggctgcgccacttgtgtgggcaactctggtgacctggatggatctgtatccgctgctatcacagaaaatgatatcgttgctgctgcggtgctgtcggccaaccgaaacttcgaggggcgtgtgaaccctctcactcgggctaactaccttgcctcgccgcctctggttgttgcctatgctcttgccggcactgttgacattggttttgaggaagagcccattggagttggaaagggtggcaaggaaattttcttgagggacatatggccttcaaaccaagagatcgatgaggttgtggagtccagcgtgcagactcacttgttcaagaaagtgtacgactccatcatggaacgtaaccctaggtggaaccagctgccggttccaaaggaggcactgtacccatgggacgacaggtccacctacatccgcaagcccacttacctggagggcatgtccatgacgccgcctggcccgcccacggtgacggaggcctactgcctgctcaaccttggagacagcatcaccacggaccacatctcctactcggggaagatccccgagggcacacctgcggccaagtatctgctcgagtatggtgtggagcccaagaacttcagctcctatggtggccgccgcgggaacaatgaggtggtgatgaggggagcgtttgccaatatgaggatcgtgaataagcttcttaatggcgaggctggtccctggacgatccatgttcctaccggggagaagctctacgtttacgacgcggcaatgaaatacaagtcggaaggtcatgacatggtcatcatcgctggctccgagtacggcagtggcagctctcgtgactctgctgccaagggaccaatgctactgggtgtcaagtcggtgattgcaaagagcttcgagcggatccaccggagcaacttggtggggatggggatcattcctctctgctttcaagcaggagaggatgccgattcactcggcctcaccggacgtgagcgctacaccatccacctccctaccagcaccgccgagatcagtcctggtcaggacgtgaccgtcacgacccacgacggaagatcattcacttgcactcttcgcttggacacacagcttgaggtcacatacttcaaccatggaggcatccttccctacatggtccgcaacctggcggcacaaatgaaataagttgaagtttattggtgggaataaattaaaaggtactcaatgccacgtatttggcgtatgtatgtaaataagtggcacattctaatcttcaattgtattattcgctctggcattgaggtgggtcgtagctgcattatactttctccgcaagacatgagcatggattttgttttagcaacagattatttgtactcttgattctttggttccatgctctcttcggccatctccatgtcaatttgctttgcaaacaatataatatcagcgtgccgtgcccttgtagatttccaaatggttatatgcatatgtactattgaaattgtcattttagtttgcaaacaataccaacgtgcctttgtagatttcaaaatggatatatatgttgtattcaagtttgcta

SEQ ID NO: 25803 - DNA, 3248 bp, Zea Mays
cttttccatcggcggcctttcgtttcatcagatcctccgcctctattgggcgccgggcagccaagctgcaggcggatgggcgcgatagcgggaccacatcctgccgccgccgccgccgcctgcccctcttccactccgatccatggagcagcagctcctctgtggtggttgccacacgcacacgcctccgccgccaagcctcccctgcccctgcctccgccgccgcccacggaccctctctgtttcatcgaggtgccacgcgattcatccggaccagctgctgcgtgcccgcctcgtccccgacgtcaccaccagcgccaagctacaaccacgcgacgacgctctccatcggatccgagtcggagtcggagctaccaagcatgctttcaagcgtatattgacgagcctgattaagcctggcggtggtgaatacggcaagttcttcagccttcccgcactaaatgatccaaggatcgataagcttccctactctatacgtgttctcctggaatcagctatccgccattgtgataacttccaagttacagagagtgatgtcgagaaaatcattgattgggagaacacatctcccaagctggctgagatacctttcaagccagcgagatgcattctaatggacaacactggagtcccagctgttgtagaccttgcagctatgcgtgatatgatgccaaagttgggttgtgatccctacaagatcaatccattgattcccgtggatgctgttattgaccatgcagtgcgagtggatgtagcagggacctatgatgcattggatagaaacgaggagttggagttccaacgcaacaaagaaaggtaaaccttgagtatcttgcccgagttgtcttcaacgaagatggcattctttacttcgacagcgtggttggcacagactcacacaccactatgattaatagtcttggagttgctggttggggagtaggcggtattgaagcagtcgttgcaatgcttggccagccaatgggcatggttttgcctggtgtggttggattcaagttgagtgggaagttacaggatggtgtcactactactgacattgttcttactatgacccaaatgctaaggaagcacggtgctattggcaaattcgttgaattctatggtgttggtgtgggcgagctatctttgcctgctagggccacaattgccaacatgtctccagaatatggagctaccatgggcttcttccctgtagaccaagtagcattggactatctcaaattgacaggccgaagcgatgaaactgtgtcgatgattgaagcatacctgcgagctaacaaaatgtttgtggacaagcatgagcctgagacggaacgagttttctcttcatatctggagctggaccttagtgaggtggagccttgcgtttcaggccccaaaaggcctcatgatcgtgtccctttgaaggaaatgaagtcagactggcatgcttgcctggacaacgaagttggtttcaagggctatgcggtgccaaaggaacagcaaggcaaagttgtgaaattcgacttccatggaaggccagctgaaatcaagcatggcagtgttgttcttgcagcaatatgtagctccacaaacacatcaaatcccagcgtcatgattggtgctggccttgtggcaaagaaagcctgcgaattgggccttgaggtgaagccatgggtaaagacaagccttacccctggatctgtggttgctaccgagtacttgaaacatagtggccttcaagattatctgaaccagcaagggttccatgtcgctgcgcatggctgcgccacttgtgtgggcaactctggtgacctggatggatctgtatccgctgctatcacagaaaatgatatcgttgctgctgcggtgctgtcggccaaccgaaacttcgaggggcgtgtgaaccctctcactcgggctaactaccttgcctcgccgcctctggttgttgcctatgctcttgccggcactgttgacattggttttgaggaagagcccattggagttggaaagggtggcaaggaaattttcttgagggacatatggccttcaaaccaagagatcgatgaggttgtggagtccagcgtgcagactcacttgttcaagaaagtgtacgactccatcatggaacgtaaccctaggtggaaccagctgccggttccaaaggaggcactgtacccatgggacgacaggtccacctacatccgcaagcccacttacctggagggcatgtccatgacgccgcctggcccgcccacggtgacggaggcctactgcctgctcaaccttggagacagcatcaccacggaccacatctcctactcggggaagatccccgagggcacacctgcggccaagtatctgctcgagtatggtgtggagcccaagaacttcagctcctatggtggccgccgcgggaacaatgaggtggtgatgaggggagcgtttgccaatatgaggatcgtgaataagcttcttaatggcgaggctggtccctggacgatccatgttcctaccggggagaagctctacgtttacgacgcggcaatgaaatacaagtcggaaggtcatgacatggtcatcatcgctggctccgagtacggcagtggcagctctcgtgactctgctgccaagggaccaatgctactgggtgtcaagtcggtgattgcaaagagcttcgagcggatccaccggagcaacttggtggggatggggatcattcctctctgctttcaagcaggagaggatgccgattcactcggcctcaccggacgtgagcgctacaccatccacctccctaccagcaccgccgagatcagtcctggtcaggacgtgaccgtcacgacccacgacggaagatcattcacttgcactcttcgcttggacacacagcttgaggtcacatacttcaaccatggaggcatccttccctacatggtccgcaacctggcggcacaaatgaaataagttgaagtttattggtgggaataaattaaaagcaacagattatttgtactcttgattctttggttccatgctctcttcggccatctccatgtcaatttgctttgcaaacaatataatatcagcgtgccgtgcccttgtagatttccaaatggttatatgcatatgtactattgaaattgtcattttagtttgcaaacaataccaacgtgcctttgtagatttcaaaatggatatatatgttgtattcaagtttgcta

SEQ ID NO: 25804 - DNA, 3369 bp, Zea Mays
cttttccatcggcggcctttcgtttcatcagatcctccgcctctattgggcgccgggcagccaagctgcaggcggatgggcgcgatagcgggaccacatcctgccgccgccgccgccgcctgcccctcttccactccgatccatggagcagcagctcctctgtggtggttgccacacgcacacgcctccgccgccaagcctcccctgcccctgcctccgccgccgcccacggaccctctctgtttcatcgaggtgccacgcgattcatccggaccagctgctgcgtgcccgcctcgtccccgacgtcaccaccagcgccaagctacaaccacgcgacgacgctctccatcggatccgagtcggagtcggagctaccaagcatgctttcaagcgtatattgacgagcctgattaagcctggcggtggtgaatacggcaagttcttcagccttcccgcactaaatgatccaaggatcgataagcttccctactctatacgtgttctcctggaatcagctatccgccattgtgataacttccaagttacagagagtgatgtcgagaaaatcattgattgggagaacacatctcccaagctggctgagatacctttcaagccagcgagatgcattctaatggacaacactggagtcccagctgttgtagaccttgcagctatgcgtgatatgatgccaaagttgggttgtgatccctacaagatcaatccattgattcccgtggatgctgttattgaccatgcagtgcgagtggatgtagcagggacctatgatgcattggatagaaacgaggagttggagttccaacgcaacaaagaaaggtttgcttttcttaaatgggcatccaatgctttccacaacatgcaggttttccctcctggttcaggcactgtacaccagtcttggagttgctggttggggagtaggcggtattgaagcagtcgttgcaatgcttggccagccaatgggcatggttttgcctggtgtggttggattcaagttgagtgggaagttacaggatggtgtcactactactgacattgttcttactatgacccaaatgctaaggaagcacggtgctattggcaaattcgttgaattctatggtgttggtgtgggcgagctatctttgcctgctagggccacaattgccaacatgtctccagaatatggagctaccatgggcttcttccctgtagaccaagtagcattggactatctcaaattgacaggccgaagcgatgaaactgtgtcgatgattgaagcatacctgcgagctaacaaaatgtttgtggacaagcatgagcctgagacggaacgagttttctcttcatatctggagctggaccttagtgaggtggagccttgcgtttcaggccccaaaaggcctcatgatcgtgtccctttgaaggaaatgaagtcagactggcatgcttgcctggacaacgaagttggtttcaagggctatgcggtgccaaaggaacagcaaggcaaagttgtgaaattcgacttccatggaaggccagctgaaatcaagcatggcagtgttgttcttgcagcaatatgtagctccacaaacacatcaaatcccagcgtcatgattggtgctggccttgtggcaaagaaagcctgcgaattgggccttgaggtgaagccatgggtaaagacaagccttacccctggatctgtggttgctaccgagtacttgaaacatagtggccttcaagattatctgaaccagcaagggttccatgtcgctgcgcatggctgcgccacttgtgtgggcaactctggtgacctggatggatctgtatccgctgctatcacagaaaatgatatcgttgctgctgcggtgctgtcggccaaccgaaacttcgaggggcgtgtgaaccctctcactcgggctaactaccttgcctcgccgcctctggttgttgcctatgctcttgccggcactgttgacattggttttgaggaagagcccattggagttggaaagggtggcaaggaaattttcttgagggacatatggccttcaaaccaagagatcgatgaggttgtggagtccagcgtgcagactcacttgttcaagaaagtgtacgactccatcatggaacgtaaccctaggtggaaccagctgccggttccaaaggaggcactgtacccatgggacgacaggtccacctacatccgcaagcccacttacctggagggcatgtccatgacgccgcctggcccgcccacggtgacggaggcctactgcctgctcaaccttggagacagcatcaccacggaccacatctcctactcggggaagatccccgagggcacacctgcggccaagtatctgctcgagtatggtgtggagcccaagaacttcagctcctatggtggccgccgcgggaacaatgaggtggtgatgaggggagcgtttgccaatatgaggatcgtgaataagcttcttaatggcgaggctggtccctggacgatccatgttcctaccggggagaagctctacgtttacgacgcggcaatgaaatacaagtcggaaggtcatgacatggtcatcatcgctggctccgagtacggcagtggcagctctcgtgactctgctgccaagggaccaatgctactgggtgtcaagtcggtgattgcaaagagcttcgagcggatccaccggagcaacttggtggggatggggatcattcctctctgctttcaagcaggagaggatgccgattcactcggcctcaccggacgtgagcgctacaccatccacctccctaccagcaccgccgagatcagtcctggtcaggacgtgaccgtcacgacccacgacggaagatcattcacttgcactcttcgcttggacacacagcttgaggtcacatacttcaaccatggaggcatccttccctacatggtccgcaacctggcggcacaaatgaaataagttgaagtttattggtgggaataaattaaaaggtactcaatgccacgtatttggcgtatgtatgtaaataagtggcacattctaatcttcaattgtattattcgctctggcattgaggtgggtcgtagctgcattatactttctccgcaagacatgagcatggattttgttttagcaacagattatttgtactcttgattctttggttccatgctctcttcggccatctccatgtcaatttgctttgcaaacaatataatatcagcgtgccgtgcccttgtagatttccaaatggttatatgcatatgtactattgaaattgtcattttagtttgcaaacaataccaacgtgcctttgtagatttcaaaatggatatatatgttgtattcaagtttgcta

SEQ ID NO: 25805 - DNA, 3073 bp, Zea Mays
gttctttgtgttgaggcctccatcatctatctcctctctcgtcgtgctggccgaccggcgacgacctatagctcctgccgcctcacgtcgaacgcgccatggccgccaactcaacagctaccaagcatgctttcaagcgtatattgacgagcctgattaagcctggcggtggtgaatacggcaagttcttcagccttcccgcactaaatgatccaaggatcgataagcttccctactctatacgtgttctcctggaatcagctatccgccattgtgataacttccaagttacagagagtgatgtcgagaaaatcattgattgggagaacacatctcccaagctggctgagatacctttcaagccagcgagatgcattctaatggacaacactggagtcccagctgttgtagaccttgcagctatgcgtgatatgatgccaaagttgggttgtgatccctacaagatcaatccattgattcccgtggatgctgttattgaccatgcagtgcgagtggatgtagcagggacctatgatgcattggatagaaacgaggagttggagttccaacgcaacaaagaaaggtttgcttttcttaaatgggcatccaatgctttccacaacatgcaggttttccctcctggttcaggcactgtacaccaggtaaaccttgagtatcttgcccgagttgtcttcaacgaagatggcattctttacttcgacagcgtggttggcacagactcacacaccactatgattaatagtcttggagttgctggttggggagtaggcggtattgaagcagtcgttgcaatgcttggccagccaatgggcatggttttgcctggtgtggttggattcaagttgagtgggaagttacaggatggtgtcactactactgacattgttcttactatgacccaaatgctaaggaagcacggtgctattggcaaattcgttgaattctatggtgttggtgtgggcgagctatctttgcctgctagggccacaattgccaacatgtctccagaatatggagctaccatgggcttcttccctgtagaccaagtagcattggactatctcaaattgacaggccgaagcgatgaaactgtgtcgatgattgaagcatacctgcgagctaacaaaatgtttgtggacaagcatgagcctgagacggaacgagttttctcttcatatctggagctggaccttagtgaggtggagccttgcgtttcaggccccaaaaggcctcatgatcgtgtccctttgaaggaaatgaagtcagactggcatgcttgcctggacaacgaagttggtttcaagggctatgcggtgccaaaggaacagcaaggcaaagttgtgaaattcgacttccatggaaggccagctgaaatcaagcatggcagtgttgttcttgcagcaatatgtagctccacaaacacatcaaatcccagcgtcatgattggtgctggccttgtggcaaagaaagcctgcgaattgggccttgaggtgaagccatgggtaaagacaagccttacccctggatctgtggttgctaccgagtacttgaaacatagtggccttcaagattatctgaaccagcaagggttccatgtcgctgcgcatggctgcgccacttgtgtgggcaactctggtgacctggatggatctgtatccgctgctatcacagaaaatgatatcgttgctgctgcggtgctgtcggccaaccgaaacttcgaggggcgtgtgaaccctctcactcgggctaactaccttgcctcgccgcctctggttgttgcctatgctcttgccggcactgttgacattggttttgaggaagagcccattggagttggaaagggtggcaaggaaattttcttgagggacatatggccttcaaaccaagagatcgatgaggttgtggagtccagcgtgcagactcacttgttcaagaaagtgtacgactccatcatggaacgtaaccctaggtggaaccagctgccggttccaaaggaggcactgtacccatgggacgacaggtccacctacatccgcaagcccacttacctggagggcatgtccatgacgccgcctggcccgcccacggtgacggaggcctactgcctgctcaaccttggagacagcatcaccacggaccacatctcctactcggggaagatccccgagggcacacctgcggccaagtatctgctcgagtatggtgtggagcccaagaacttcagctcctatggtggccgccgcgggaacaatgaggtggtgatgaggggagcgtttgccaatatgaggatcgtgaataagcttcttaatggcgaggctggtccctggacgatccatgttcctaccggggagaagctctacgtttacgacgcggcaatgaaatacaagtcggaaggtcatgacatggtcatcatcgctggctccgagtacggcagtggcagctctcgtgactctgctgccaagggaccaatgctactgggtgtcaagtcggtgattgcaaagagcttcgagcggatccaccggagcaacttggtggggatggggatcattcctctctgctttcaagcaggagaggatgccgattcactcggcctcaccggacgtgagcgctacaccatccacctccctaccagcaccgccgagatcagtcctggtcaggacgtgaccgtcacgacccacgacggaagatcattcacttgcactcttcgcttggacacacagcttgaggtcacatacttcaaccatggaggcatccttccctacatggtccgcaacctggcggcacaaatgaaataagttgaagtttattggtgggaataaattaaaagcaacagattatttgtactcttgattctttggttccatgctctcttcggccatctccatgtcaatttgctttgcaaacaatataatatcagcgtgccgtgcccttgtagatttccaaatggttatatgcatatgtactattgaaattgtcattttagtttgcaaacaataccaacgtgcctttgtagatttcaaaatggatatatatgttgtattcaagtttgcta

SEQ ID NO: 25806 - DNA, 1087 bp, Zea Mays
ccacttcccagtccccaatcgcgttctcttcctggccgacatggcggccgccaccggctacagcgacgccccaaccgacgagcaactgctggcgtactctgagctgcccatacatggccgcgacatggcggaggtgttcgccgtgcgcatcccggccatcgccggaggagacccgccgccccgtggcatcatctctttctacggcggccactgctgcagcgatttcatttacagctggaactcactggaagaggaagaagacacctcgaagcaaacctgcgacagccagggtaacctcgtgctaactgggccatcaatggccacctcggcagaaagtccaattgccttcaccttctacctccatgatggcagcccgcaagccggagaagccgctgaggacgacgaggacatcgggaggataatctgcgactgcatcggcgacgacttctccaactacaacagggccatagtcgagactgtccaaatgggctatggcctcgctgaagtgatctatgccgtgctgaacaacggcgtccaaggccgggtcgctgtcaaacttgctcgcctgccggtgtccaaagccggagaagaagacgccaccgccattctcgggaggatcgttgctcgcagcaagctgttcgacgtcggctgcgtgctcttctacaaagagggtgacaatggagtgagcgtgcgaccgggggggctgattcagctggcgagggaagcgctcgccgtgccgctgcacatgccgctgacgattgagcttgacctgcatcgctgttccggcgatgaaattgttggaggggtccttgagttcaatcctgcgattgacggccagcacacggaacgacttgttggacaaaatggcgctgaattggaagtggcaatttcatggtcggagtacccttggtaatgcctattattattagccattaattcaagagtgcatttttatatgtatcaatgactaagggttttaaatcatgtttcatacaagacagttgcactagagcaagataacatttcgtggtgggaacgccaaataaataaaaatagagcgagtatcactttggttttttctaatata

SEQ ID NO: 25807 - DNA, 1195 bp, Zea Mays
cttttctaaaactacaaaaggaaaaccaaatatccaaacagacacttattagtgtcaacaagttggattactagctgggtgcagtttgtagttttggggcttttggggaaaagttgagggaagcacggtggtatttggagttttgtgcagataagaccaccacgcatccaatccatccctgtcttctcttcccacttcccagtccccaatcgcgttctcttcctggccgacatggcggccgccaccggctacagcgacgccccaaccgacgagcaactgctggcgtactctgagctgcccatacatggccgcgacatggcggaggtgttcgccgtgcgcatcccggccatcgccggaggagacccgccgccccgtggcatcatctctttctacggcggccactgctgcagcgatttcatttacagctggaactcactggaagaggaagaagacacctcgaagcaaacctgcgacagccagcccgcaagccggagaagccgctgaggacgacgaggacatcgggaggataatctgcgactgcatcggcgacgacttctccaactacaacagggccatagtcgagactgtccaaatgggctatggcctcgctgaagtgatctatgccgtgctgaacaacggcgtccaaggccgggtcgctgtcaaacttgctcgcctgccggtgtccaaagccggagaagaagacgccaccgccattctcgggaggatcgttgctcgcagcaagctgttcgacgtcggctgcgtgctcttctacaaagagggtgacaatggagtgagcgtgcgaccgggggggctgattcagctggcgagggaagcgctcgccgtgccgctgcacatgccgctgacgattgagcttgacctgcatcgctgttccggcgatgaaattgttggaggggtccttgagttcaatcctgcgattgacggccagcacacggaacgacttgttggacaaaatggcgctgaattggaagtggcaatttcatggtcggagtacccttggtaatgcctattattattagccattaattcaagagtgcatttttatatgtatcaatgactaagggttttaaatcatgtttcatacaagacagttgcactagagcaagataacatttcgtggtgggaacgccaaataaataaaaatagagcgagtatcactttggttttttctaatata

SEQ ID NO: 25808 - DNA, 1586 bp, Zea Mays
gccgggggagggaggcggtgttggctaaggatgcacaaaaattatacgacgcacaaaactcttccattacagtagtagagatagagaataaaaatagttgtaattggactacgggtacagaaagaagtatagaattttttttttgcaaaagagacgattgtgaaactgtgacaaatggtgagtaatagagattacaccatgatagtcgtatgtccgtgcattgctacggtttatatatatgtatgacatagaataaattttgttttaataaagcacaaaatatatgttttctattaattagctgggtgtgaatgtggagccaacaaccaaggttcaaacactcacttatacataatttcaatttatttttgacataaactcttttattatagtagtagagaagagattataggagtgcgggttgattctaaataaatatagggttttttttgaaaaatattgacacgggacgaccgttgaaactggtgctttaatatagtaaagattagaagaaatttagatttttgtctctaataaatcattctttgtactctagttccttgttttttttttcttagcttcaatcttgggttccattaatcatccttataacttctttaagaaagatgtatgctatggatggaaatgttttgtttacaatagctaggactgatttacatcattacatggccttgccccctttcatccatcaccttgagtctgcaaagaagggtaacctcgtgctaactgggccatcatgggccacctcggcatacagtccaattgccttcaccctctacctccatgatggcagcccgcaagccggagaagccgctgaggacgacgaggacatcgggaggataatctgcgactgcatcgacggtgacttctccaactacaacagggccatagtcgagactgtccaaacgggctatggccccgctgaagtgatctatgccgtcctgagcaacggcgtccaaggccgggtcgccatcaaacttgctcgcctgccagtgtccaaagctggagaagaagacgccaccgccattctcgggaggattgttgctcgcagcaagctgttcgacgtcggctgcgtgctcttctacaaagagggtgacaatggagtgagcgtgcgaccgggggggctgattcagttggcgagggaagcgctcgccgtgccgctgcacatgccgctgacgattgagcttgacctgcatcgctgttcgggcgatgaaattgttggaggggtccttgagttcaatcctgcgaccaacggccagcacacggaacgacttgttggagaaaatggcgctgaattggaagtgacaatttcatggtcgcagtacccttggtaatgcctattattattagcctataattcaagagtgcatttttatatgtatcaatgactaatggttttaaatcatgtttcatacaagacagttgcactagagcaagataacatttcgtggtgggaacgccaaataaataaaaatagagggagtatcactttgggtttttctaatatatttgcaatagtgcataataaaactgtgcgtgcctcaaagtgaggcgctcaatttcag

SEQ ID NO: 25809 - DNA, 653 bp, Zea Mays
tttctccctgcgtgcccctggccgatgctcggctccctgtctcacctctagtcttctccgtcctcccctctatgcgcgcacagggttggcgtgcgtcactgccctgtctcagctccactgtgcttcgacggctgccatggatgtccggccgctgctttgaccggcgtcctcctcgtcgaccgtcgttcttctccaaaccaggatccacaccagagccaccccagccgtttgccactgccgtgatgcttcctctgctcagagctcccagccatggcgcctggccggatcttcctgcagctcgccgtcgaactcccttgcgcgccgcggtcgccctctccctctgtcgtcttcttcctctgctcgcgtcgcacgcagctccagctcacctgcgcgtgcgtcctcgccgcgccgagcgccgtgaagtttctccacccagccgtgctttttcctcctctgctcggtgctcctacttcagttcgccctgcgcgcagccggcgtttcttcatgacgcgtgctccgctttgccatctccctgcacgtcgtggtattccgattcttcctagctcggaccgcgctcagtccccagctcgccgcgcccggtcgagctctctgcgcacacgccgcgcgcagccagctcgaccgggcgcggcgag

SEQ ID NO: 25810 - DNA, 968 bp, Zea Mays
caagggtggaatgggacgcccttggctgacttactaggaaagctagtggaggactaccttacccgataggggcaagggcagtaggggattaggcatgtagggaggttcccgggttgattttgctgcgatggcggtcagacaggggattcctgcattactcttccttgaactgtagcggattttctgaagctagtggaaccttgtaaaggcctcatagtggatccctatccattcacctcggcagtgtctaagggccttgcaaacccaagcagcatgggatacacgacttgtgggtatagggtacaacctctacagagtgtaaaactggtatactagtcgtgcttgcggtcatgagcagctcaggactctcacatgattaaattatggaactaaattcaatttgtcttttgcatcgcattgggatttattattaattttgatctattattattctggtttggtatctacttacatttagtaactactaataaaatttggccaacttattaaacgcaatgctcagtgttgggggccttcttcttcgtcgaaggtcctccaagcaaaaacaccttcgacaagacgatacacaagcagatacgacatgaagatatatgccgaagctacaattgaaagagcttctgcatgatgacatgcttaagacgaaggatggcaccgacttaaagaggaaaagaccacatagtccctgataatttgtattatggttatgattagttatcaaggacacgaatgtaatttttttcgggctgtgtctggtgcctataaatagatgaacagtaaccccgtactgttcacgctgacttgtaatcactcacgcgtcactcctggatctttaccttctatcaagcgaaggtacaaatgtaatttaaatatcattgatgtttgttcacgattatataatgataatgtgaatagtctaatgatttaaaatgattattcatactcttttt

SEQ ID NO: 25811 - DNA, 751 bp, Zea Mays
gtggttgcccctgttttcattgtgggccacttaagcacttagatagggaaccctcgccagcaactgcagagaccgtgtcatactccgccattgagagacgacgcagccgcctcgtagctactcgcccccaccgtcgtcgagtgcctgattggagccacagaatctcgcctgaacgcagggggaagtcactcagacccgtttctcggacaatcgtgcccttgggcgtgtggaattcctcgccgtagttgaagcttgccgcagagccgcgccgttgcgcggatagtgtcactcgtgctccataccaagtgttgggggccttcttcttcgtcgaaggtcctccaagcaaaaacaccttcgacaagacgatacacaagcagatacgacatgaagatatatgccgaagctacaattgaaagagcttctgcatgatgacatgcttaagacgaaggatggcaccgacttaaagaggaaaagaccacatagtccctgataatttgtattatggttatgattagttatcaaggacacgaatgtaatttttttcgggctgtgtctggtgcctataaatagatgaacagtaaccccgtactgttcacgctgacttgtaatcactcacgcgtcactcctggatctttaccttctatcaagcgaaggtacaaatgtaatttaaatatcattgatgtttgttcacgattatataatgataatgtgaatagtctaatgatttaaaatgattattcatactcttttt

SEQ ID NO: 25812 - DNA, 990 bp, Zea Mays
cacatccttgcgcggactcgcgcacgccgtggctacaaatgtggttgcccctgttttcattgtgggccacttaagcacttagatagggaaccctcgccagcaactgcagagaccgtgtcatactccgccattgagagacgacgcagccgcctcgtagctactcgcccccaccgtcgtcgagtgcctgattggagccacagaatctcgcctgaacgcagggggaagtcactcagacccgtttctcggacaatcgtgcccttgggcgtgtggaattcctcgccgtagttgaagcttgccgcagagccgcgccgttgcgcggatagtgtcactcgtgctccataccaaggtaataagtgcacccttttgtccatcctttccttggtgtggcatagtgcggttagaattagggattagcgccctaccgtgcgtgatgggggaaactccggtttggaaccaccgcgacatcgggcggcgccgccacggttggctgggagggagaatgggatccctcggtcgtccatccggttttgggcggtgtagattagacgtcacaataacccttcgcgtgattcgtcctgagccatcggatcacgaacaaacagacccagcgcaatctaggacatttaaaatccacgccatcgattgcatgattcacggtcccgattagaaagtatatgtatcccttcgtgattagatcgtgacccttggattagatcggacggatgtaagcagatccagcctaataaaatcgtggccttagatattcgatccggtggtctgtgggacgtaccgcttcgtgacttaatccgggtcctcgatctctgatcttgtggcccgtgggtgcctatagacccccagtcgtgactattttgcttaagagacccttgagaaccatctaatgaactcgcagtccatcgctggcgtactctgagtcatgaactttttacgtagcagcccctgtagttctctgtttttgtgcgcgcagtccag

SEQ ID NO: 25813 - DNA, 761 bp, Zea Mays
gtctcgaatgcccaaacctccattgccgacgtcgccctgctcgggtccaaccagctccccttcctgttgttgtgtccagccgatgcccctccctccatcttcctctctgcagcaaccctaccatggtttgccaggtccgaccgttctgctcgccgcgccctccccatgccagcacgcgagcgccccctcccgtccctcctcctctccatcgacgcccaggtcgatgccgagctcccagcccctcccgatggcgtggtcaagcatctaggtatcagaattcctggattccaaatctgagacggatgttgatgttgactataacagcttgtactcaaaggaggactttctacagggtttgcaagatctcacacggtgaagtatggagtagaaataactctgcagcgactaggtgtcagcggcggggccctctccgtcgccgccttcggcagcacatatatcagtttgaattatttattccactattgtggtctctttttttgtagaaaactggtagagatgagaaagaagtccttaaagctattgattatgtgcatgaattgagtatgaggtgccctggccaaagcgagtgttctactctacccaaaactttaggtagttgtgttgtctttagtggttcagttcctctaagtaaatcattcgctcaaaaggtgtcatctgaagctagaaaggtgataacccaaagatatatgtgcttatgtttagaacttgatcttcttactcttatataacctaagtatgaa

SEQ ID NO: 25814 - DNA, 804 bp, Zea Mays
ccaagggtactgcgaccatgaaattgccacttccaattcagcgccattttctccaacaagtcgttccgtgtgctggccgttggtcgcaggattgaactcaaggacccctccaacaatttcatcgccggaacagcgatgcaggtcaagctcaatcgtcagcggcatgtgcagcggcacggcgagcgcttccctcgccaactgaatcagcccccccggtcgcacgttcactccattgtcaccctctttgtagaagagcacgcagccgacgtcgaacagcttgctgcgagcaacgatcctcccaagaatggtggtggcgtcttcttctccagctttggacaccggcgggcgagcaagtttgacggcgacccggccttggacgccgttgctcaggacggcatagatcacttcagcggggccatagcccgtttggacagtctcgactatggccctgttgtagttggagaagtcgtcgccgatgcagtcgcagagtatcctcccgatgtcctcgtcgtcctcggtggcttctccggcttgcgggctggctgtcgcagatttgcttcgaggtgtcttcttcctcttccagtggactccagctgtaaatgaaatcgctgcagcagtggccgccgtagaaaacgatgctgccacggggcggcaggtttcctccgacggtggcggggatgcgcacggcgaacacctccgccatgtcgcggccatgtttgggcagctcagcgtacgccagcagttgctcgtcggttggggcgtcgctgtagccggtggcggccgccatgtcgccaaggaagagaa

SEQ ID NO: 25815 - DNA, 2279 bp, Zea Mays
tacattcctaccgccggctactgatgtgcactcctagtttctcacaacaatgtttataatgtggaagtgtcacctgaaagtgccgtggtgtttagagtcaccgaaaggctaagccagctggtgtcctttcaatgcctatcatatggttggaaataaaactaatggtgaagcaccagaaggccacaataatattgagacagcatcagttatcaaagtggcatctataaacaggaaagtcccttttaagtacttgtttgaagttttgctcggtaaaactgggacaaatgagattatcttataaataatagttcaaaaataagtttggatttgatgtgttagggggtcatctctcttcctcaaagattctcataaagagcatcactgctaccctttacgtacaacttctgtgatgttatgtatctactcaacaacctaggatttgaagagtcaaacttttctaagaaattatttgcaacaaaaagaaacgaagccagtgtactgtgaaaaatagaaaggttggtaccggtgctgctaggaagctgaatcacatgacaatatcaatcacaaagctagaaaatagttatcatgttcatatccgtaggccacaggtaatattcatatggactaaggaagaccattcccatagtgaaaatacagggctgaaggtgaaggagctttagtttcagactaccaaatgaaaaattgaacttttcgatcctgccagcttagtaatcagagcagagataaagacttagtggtcaatcacacctaaaactgtaatgttagctattgtgacataaaaccaaaaaaatacactcaatccggctattgacagtgccccaacttgagcattaccaccacactaaccatgactaatccaaacgaacaatcatcaccacagacaggcagaggcaaatggaggagaaaaacgcacctagcatctgcctgtaggaggcctgccaccagtctttgggcggggcgcctacgggggtggacgatattcctaatcactcagcttatttttatgcctaaccttagatgctgaaattgagcgcctcactttgaggcacacacagttttattatgcactattgcaaatatattagaaaaacccaaagtgatactccctctatttttatttatttggcgttcccaccacgaaatgttatcttgctctagtgcaactgtcttgtatgaaacatgatttaaaacacttagtcattgatacatataaaaatgcactcttgaattataggctaataataataggcattaccaagggtactgcgaccatgaaattgccacttccaattcagcgccattttctccaacaagtcgttccgtgtgctggccgttggtcgcaggattgaactcaaggacccctccaacaatttcatcgccggaacagcgatgcaggtcaagctcaatcgtcagcggcatgtgcagcggcacggcgagcgcttccctcgccaactgaatcagcccccccggtcgcacgttcactccattgtcaccctctttgtagaagagcacgcagccgacgtcgaacagcttgctgcgagcaacgatcctcccaagaatggtggtggcgtcttcttctccagctttggacaccggcgggcgagcaagtttgacggcgacccggccttggacgccgttgctcaggacggcatagatcacttcagcggggccatagcccgtttggacagtctcgactatggccctgttgtagttggagaagtcgtcgccgatgcagtcgcagagtatcctcccgatgtcctcgtcgtcctcggtggcttctccggcttgcgggctgccatcatggaggtagaggaagaaagcaattggactgtatgccgaggtggccaatgatggcccagttagcacgaggttaccctgtttcggtacaagaatgcatgaagaaagtggatcacttgctgtcctgcctgctcatagacgacggatgttgtgatacatttaacacaacgtctcgtacgatttaattaaacagacctggctgtcgcagatttgcttcgaggtgtcttcttcctcttccagtggactccagctgtaaatgaaatcgctgcagcagtggccgccgtagaaaacgatgctgccacggggcggcaggtttcctccgacggtggcggggatgcgcacggcgaacacctccgccatgtcgcggccatgtttgggcagctcagcgtacgccagcagttgctcgtcggttggggcgtcgctgtagccggtggcggccgccatgtcgccaaggaagagaa

SEQ ID NO: 25816 - DNA, 2115 bp, Zea Mays
tacattcctaccgccggctactgatgtgcactcctagtttctcacaacaatgtttataatgtggaagtgtcacctgaaagtgccgtggtgtttagagtcaccgaaaggctaagccagctggtgtcctttcaatgcctatcatatggttggaaataaaactaatggtgaagcaccagaaggccacaataatattgagacagcatcagttatcaaagtggcatctataaacaggaaagtcccttttaagtacttgtttgaagttttgctcggtaaaactgggacaaatgagattatcttataaataatagttcaaaaataagtttggatttgatgtgttagggggtcatctctcttcctcaaagattctcataaagagcatcactgctaccctttacgtacaacttctgtgatgttatgtatctactcaacaacctaggatttgaagagtcaaacttttctaagaaattatttgcaacaaaaagaaacgaagccagtgtactgtgaaaaatagaaaggttggtaccggtgctgctaggaagctgaatcacatgacaatatcaatcacaaagctagaaaatagttatcatgttcatatccgtaggccacaggtaatattcatatggactaaggaagaccattcccatagtgaaaatacagggctgaaggtgaaggagctttagtttcagactaccaaatgaaaaattgaacttttcgatcctgccagcttagtaatcagagcagagataaagacttagtggtcaatcacacctaaaactgtaatgttagctattgtgacataaaaccaaaaaaatacactcaatccggctattgacagtgccccaacttgagcattaccaccacactaaccatgactaatccaaacgaacaatcatcaccacagacaggcagaggcaaatggaggagaaaaacgcacctagcatctgcctgtaggaggcctgccaccagtctttgggcggggcgcctacgggggtggacgatattcctaatcactcagcttatttttatgcctaaccttagatgctgaaattgagcgcctcactttgaggcacacacagttttattatgcactattgcaaatatattagaaaaacccaaagtgatactccctctatttttatttatttggcgttcccaccacgaaatgttatcttgctctagtgcaactgtcttgtatgaaacatgatttaaaacacttagtcattgatacatataaaaatgcactcttgaattataggctaataataataggcattaccaagggtactgcgaccatgaaattgccacttccaattcagcgccattttctccaacaagtcgttccgtgtgctggccgttggtcgcaggattgaactcaaggacccctccaacaatttcatcgccggaacagcgatgcaggtcaagctcaatcgtcagcggcatgtgcagcggcacggcgagcgcttccctcgccaactgaatcagcccccccggtcgcacgttcactccattgtcaccctctttgtagaagagcacgcagccgacgtcgaacagcttgctgcgagcaacgatcctcccaagaatggtggtggcgtcttcttctccagctttggacaccggcgggcgagcaagtttgacggcgacccggccttggacgccgttgctcaggacggcatagatcacttcagcggggccatagcccgtttggacagtctcgactatggccctgttgtagttggagaagtcgtcgccgatgcagtcgcagagtatcctcccgatgtcctcgtcgtcctcggtggcttctccggcttgcgggctgccatcatggaggtagaggaagaaagcaattggactggctgtcgcagatttgcttcgaggtgtcttcttcctcttccagtggactccagctgtaaatgaaatcgctgcagcagtggccgccgtagaaaacgatgctgccacggggcggcaggtttcctccgacggtggcggggatgcgcacggcgaacacctccgccatgtcgcggccatgtttgggcagctcagcgtacgccagcagttgctcgtcggttggggcgtcgctgtagccggtggcggccgccatgtcgccaaggaagagaa

SEQ ID NO: 25817 - DNA, 2108 bp, Zea Mays
actactagttacttgcgaatttaaaaatttacattcctaccgccggctactgatgtgcactcctagtttctcacaacaatgtttataatgtggaagtgtcacctgaaagtgccgtggtgtttagagtcaccgaaaggctaagccagctggtgtcctttcaatgcctatcatatggttggaaataaaactaatggtgaagcaccagaaggccacaataatattgagacagcatcagttatcaaagtggcatctataaacaggaaagtcccttttaagtacttgtttgaagttttgctcggtaaaactgggacaaatgagattatcttataaataatagttcaaaaataagtttggatttgatgtgttagggggtcatctctcttcctcaaagattctcataaagagcatcactgctaccctttacgtacaacttctgtgatgttatgtatctactcaacaacctaggatttgaagagtcaaacttttctaagaaattatttgcaacaaaaagaaacgaagccagtgtactgtgaaaaatagaaaggttggtaccggtgctgctaggaagctgaatcacatgacaatatcaatcacaaagctagaaaatagttatcatgttcatatccgtaggccacaggtaatattcatatggactaaggaagaccattcccatagtgaaaatacagggctgaaggtgaaggagctttagtttcagactaccaaatgaaaaattgaacttttcgatcctgccagcttagtaatcagagcagagataaagacttagtggtcaatcacacctaaaactgtaatgttagctattgtgacataaaaccaaaaaaatacactcaatccggctattgacagtgccccaacttgagcattaccaccacactaaccatgactaatccaaacgaacaatcatcaccacagacaggcagaggcaaatggaggagaaaaacgcacctagcatctgcctgtaggaggcctgccaccagtctttgggcggggcgcctacgggggtggacgatattcctaatcactcagcttatttttatgcctaaccttagatgctgaaattgagcgcctcactttgaggcacacacagttttattatgcactattgcaaatatattagaaaaacccaaagtgatactccctctatttttatttatttggcgttcccaccacgaaatgttatcttgctctagtgcaactgtcttgtatgaaacatgatttaaaacacttagtcattgatacatataaaaatgcactcttgaattataggctaataataataggcattaccaagggtactgcgaccatgaaattgccacttccaattcagcgccattttctccaacaagtcgttccgtgtgctggccgttggtcgcaggattgaactcaaggacccctccaacaatttcatcgccggaacagcgatgcaggtcaagctcaatcgtcagcggcatgtgcagcggcacggcgagcgcttccctcgccaactgaatcagcccccccggtcgcacgttcactccattgtcaccctctttgtagaagagcacgcagccgacgtcgaacagcttgctgcgagcaacgatcctcccaagaatggtggtggcgtcttcttctccagctttggacaccggcgggcgagcaagtttgacggcgacccggccttggacgccgttgctcaggacggcatagatcacttcagcggggccatagcccgtttggacagtctcgactatggccctgttgtagttggagaagtcgtcgccgatgcagtcgcagagtatcctcccgatgtcctcgtcgtcctcggtggcttctccggcttgcgggctggctgtcgcagatttgcttcgaggtgtcttcttcctcttccagtggactccagctgtaaatgaaatcgctgcagcagtggccgccgtagaaaacgatgctgccacggggcggcaggtttcctccgacggtggcggggatgcgcacggcgaacacctccgccatgtcgcggccatgtttgggcagctcagcgtacgccagcagttgctcgtcggttggggcgtcgctgtagccggtggcggccgccatgtcgccaaggaagagaa

SEQ ID NO: 25818 - DNA, 548 bp, Zea Mays
tttctctactacttcttaaaatagctagtaccacaaacactgttccattcattcgattattattcaagaaagccctggatacatcaatgtctgaagacggttgaagggtgtatttacagcttctagccttcaactcgcccttgtcctagtcccagtcccagcttcacgcccttgtcctagtccgatcttcacgatcgacctccacacacaggctcgacaaagctcacttcactcacgtcccgccacctcggccttgaccctcctcaccaactccttcctgcaccggttgagacaaaaagaatcagatcacatttcataccaatggaagattgattcacatattctacagcagatgaaacgcctgatggtcgtaccgcagcagctgcctgtcaaaggaggaggcggagaggaggcccctgttctcctccgcgtgcctgatgatatcttattgcaatcagctagttaaagtaagaacataaaacttcagaaaattagctaagctggtaccaaaaccctgcttctaagatcaagatcataaacaaaacaaa

SEQ ID NO: 25819 - DNA, 717 bp, Zea Mays
aggatgttttttttcactctcgcaagcgcgtccttgttacgtgcagatagtatcagctttgctcctaaatttgcgaagtgcattgcaagaacctcccctgaaattacaagaaagcattaataacttggtatgttgaaatcaacatgaacaacaacaacaacaacatagtctttttagtgtcaagcaagttggggtaggctagagttgaaacccaacaagatgtcaccaaaaaaagaaagagaaaggggaggggaaaaggcttttgagagcactaaaaggtaaaaggcctaatcacggttcgggcacgtggataacttctttccaagcacttctatccaaacacaactccattgggatattccattccttcaagtcccttttgaatgttatgttgaaatattgtgatgaaattgatgtaaaaatatatatatgttgagaaaacagacatgttaactcatcaaaattgacacttgacagtgatcctataaaacctttgcagtacatcaagcttgaagaaggtatagagaaacccaaaatacaatattctggtgcatgaaatctataacacgttataaagttgtcactataccattcctcaatgaactaacaaaggcataaggctcgctaaaaaataacactgcagtcaggaaatttatcacctcacctgctgaaaagatgagcattaatgtgtagacatacaaaaggaaacctatttta

SEQ ID NO: 25820 - DNA, 1392 bp, Zea Mays
aagaaactaacctagctagataccagattggtgaatgaaaactttagccctagacagggtagaaagctgtattaataatagagtaaaatgggtatatgcttattacaaagatatattacacacagtacatcattacgccacacaataaatctaacacaactgaatcataattattggtcatagtgacgggtccaatttttcactaaactatattgtttctatacatgatctgatccttttcaggccgacctttttgcgtacaacaatataagtcacgtgaccatatgaatcgagaaagatggtgatagcagctacgagcaatttggtcatgctgacttcttgctgctgaaaatgagactccaactatacgtgttccctttctttgcggccgcatccagccgttttgcaccaacctggaaagataggttaatcaataaagtactagcaacaatggtaagcgcaaacttttctttggactccaagcatgtgtttggtttcggaacgatgtgggttggatcggaaccgactcatttttctgggttgaatcagacatatttcttgtttggtttcagtgacagattgaacctaatttcttgtttgattacagggttaaaatgggttgcagctacatcatctctttttgtttcgtgatgagggataaactgaatatggtcacctccctggacactcaggatgatatcttcaattcaatatgataacactattcaaaataaataaaaccgatactattttaatatttgagaaattcataagcacacgatatacataaattaaagccattattaactaagtcataaatttttagtgacgaggtctcactattacatttcagtcataattaaaggaacatcccaacaacatcaaatgcatttcagtgatgtaacatttgccatgactagcaagcttgtctaggcgatgacaagcactgacctttacctgctcgacgacaacactagcaagcctcgtgggttgtgcctacggaagaacacgccggcatcggagtgcaggtcagcgggggattgacggtgggatgtgcagcttctaacagcgttgacgaaggccagcacgctgcagggcaggccagtgggggactgacgacgggaggcaggtgggggattaatgtcggagggtaggccggcgggagtccctcgtcctaacaggccagcagtggcggcgcgcccctgtgctagtctcgagtggataatgcatgggtgacgggagggtgaagatgaagtgggtcgaaatgattcgcatgtttttgagaaatcactataacccacattttcaataagtatttcgacctagaaccaacctaacccgcgagactttttgaaccaaacgtgggttgttgtgggttgaacccgttcaaac

SEQ ID NO: 25821 - DNA, 1498 bp, Zea Mays
attgactatcacaatcaccgatctcatgcataaaaccaatacactcttcacataaacatctaccgatgtattccctaaaacatgatccgcatttatttatttatttatttatttatttaaacttagtatttgcatcaaacaatcccatcgcatatattcctatcgaaatataaaaacatccgagttcttttctacttctttttctttcgccacaacttcaatccataccaatgcgcataatcgaaacattttacacatccattcaatttatcaatcgagtcgatcaagagcaacatgcatcggctcaccataaacaaactcaatcggcgtttgtaagaacgatggcgattctgatttgtgcatagctccgaacgtcgacgagcgttgagcggcttgccttctcctccacaaaacaaaacaaaaacaacacacatacacaattaatcataggaaaataacatcgatgcggaatcaaataaggatcatcgcggtctcaccgggggtgaacgacgtcgcggatggggctgcgcaaaaacagcaaacacccggtgagcgtcgacgtcgtgttgtccactgggcttcccaaaacagcgagccggcagcgcgcgcagatatcgggggtgctgctcacggcgaggccaaccagggaaagccttggccccaacccacggacaggacttcctgggcacggccaggaatggagctcggctcttaggaaaaaaaggcaggggcagcgggagcatgatggcgtagtggctagggagaggaaacaagcatcgctgctgctgggagcgcctgctcggccatggagggagctggagagttgaggccatgggcagcacaggaccatgtgccgcggtcgcgcgcagggaagttgcagatccggcagagctcgagtagagcacgcttgaggagcacagccgtcggaaggagggatcccgacgccatggggaagaagaccgtggggagggaggagggcaaggcatcggcaaggggcttcaacaggggagcgctcggccagggagatgtggtcggggcgagcagcggctagggcgtcccgcagcgagctcgcgaggccaaagcagagcatctagaacacctgggcgccatggggctatgctcctgttgtgcctgctcggaccccaagctgccggcggggtggaagacgagtagggagctgcatggctaggaaaacaggggtgccatgggaggatctcgcgcagcgtctattgcaggggggtggaggctcacgcccatggagcagggaagggcgcaggcttgggcgctcggatgggggggaggaataaggccgactggagatgcgacgccctggaggagaggaggaactgctgctcacctacaccaatggagccgaggagaggaagggaggccgccatgggctgggaggaagtctgctgcaccaggaacagagaaagaagaaagttgtgcgtgagataaaaagaaaggggagaagagagagtggcggctagggggtaga

SEQ ID NO: 25822 - DNA, 3135 bp, Zea Mays
gcaattccttaggatctacgaggcgaccatatcatcatatggtggcaacatttccgtcatggcgaagtcctttgtcatggcagttaggaacgtggctcaaacatagtattcctcccttcggccgagaacaatcacgtcatggtagaagctgaaggacatgctagtaactagtttccaaggtttccagacgaagccagtaactgcttaagctttgttccaatgcacacaggaccatgaggaatacctgcaggtgtatgtcgaaaggttttggcgtctcagggaacaggcgccaatggtgccaaatgagtattgaggctatgatcaaagggctccgaccaggaccgacaacgcagtatttcgctaggaagccaccacaaactttggagaagcttttgtagaagatggacgagtacatcagggtcgacaatgactttcgacagagaagggaagaagcatatagatactccgagatgaccaggggcttcagaggaagactccaccctaggcatgtcaggacaatccataatcccaactcaagcgacaacaagggaaatcacactcaaggccagcaaagctcccaatcatcagggacgcagcaaagttcctacaggccaccagcaccaagaggcagaggaggtagaagcttcggtggaagattcaactcccaaccaagaaggttgttctgtctattctgtggggaagttaaggggcataaaacaaggacatgccaagtcactattcagaagcagaaacaaatagctgaagccgaagtacggcagaatcagctgaagcaggtcctgcataccgcttcgtgctattccccatacatccttctccgtagctttgttcagtaacaaattgatggcttcatctattgctacgtttaccaccctaaattcatccagaattcactttagcgatggatctgttctgggtcatatggttctggaggtagacaaattctgttgtataaagagattgtttagtgaaaaaattacgatggtaaggaataacgaggacatagtttaaaaataaaaacatgtacctatacgtcgttcaagatctacagcctcttcggctttctaagcctcttcctgggcctaatgagcctgagaaagacgtaagaataaattgagcaaaaaacagtaagttgcaaatatgaaaagtaagaatttattaccggaatgaccacttcttcatctcggatgatagcttcatctactatctccctcccaccattgagccaaactttagcataaaattttcctcctagagtaattgtggcggaaccgcccgaattattccagcttaagtgcctaagtcacacccttaagggcagcaacacacttaaacaggaataacccgtcagtccctcggatctagtccgataaagccacttaccaggatcgaataccactagctcactcgaaggtgaggcacagagaaatacaataaaacataataccataaattaagaaagtatcattagtgattacattatcggagtttcagaaataataaccataaattttaatgcagcagaaataactaacggagaaaaccgagtaacatggcgaagcctggccacgctactccttctggtcctctcctacggaagcaataaccctctcgaccatctatcccggtggcagggatgaaggccaagtcacaccagcaatcaatcatcttaagtagtacctgcaaaaaattatgccacaagcaaggctgagtatactaatactcagctagacttaaccggtgtgaggagtctactcctctacctctagacatgcagctgttttgctgaggggtttggtttgccaaaagcactagctgagtctaaaatcaatttttagcttttcaagttttagtatgatctttttaaaactagatgagtacctagctattcatacatggtatcaaacattatatcaatcaacatcttttgccagtcacctcatttccacttattactcaatgcagtacaatggatcaagcagtctcattagctgcgagaagcagacgattcgaattgagtttttatccttgcaaggtaaacctaaacacacgacgtggcgaggcactccgtccccacacacatcaaccgtccccatcaattccccgtcaacaaatcagggctcaccgccttggtgtacaatgcctcactgaccctgactgccgtcgtgcagtgaccacacttgtacccaccataaccggaatgggagaccatgtctcaggtcgtgtcaggagtaaagtctgctgctaggttcactcagctactaggcttaccgatttaccatatttctcggcatgtgtatacgatttaccatatttctcggcatgtgtatagtatgttcaaacgcttgacacaggtatccgcacattaatccttattccaatttctcatctcgtagacaacgcatccccatggatccgtgtctatagaccatcattattctgttatcaaaatggatacaaccaagtcctgacctcgcacgagtgctagaaaaatcactcgacttctaccgagatccctaattagtaaagcagctactcaacctagcatactaatatccatctcaaaaggattcctgagttcatgcaactagggtttcaatcaactcctacacttaagtgcacattataaacctacaaacattaagtgtagtaaaatatcataataaacggttatgcataaaaccagagcttgcctttaatttaacacttagatagtgtttgctaggggaggtactcgcttggcgagcatccacttgttatgtccatccttccttggttcgtccaccgactgcatcttgtgggtggcaccacatcacttgcacgatcatcctctttcgttcctaaatgagatgcaagatgcatatgtatgaatataatgaaatagcacaagatactttaagtacatgttagcgaattaaacactaagtagcgagacatcataagcaaccacacacactagcgttagctactacatatcattgagcgcacaacattaacaccactaaaagacgacaaacattttgtatatttacgcaacacaaatacaatcccataagtacgagcattcatttaacttgctacgacttttcattagttcttctatttatcacacaaaag

SEQ ID NO: 25823 - DNA, 1081 bp, Zea Mays
aatacttctactatccaatcatgacgtcaaaaaaaatcatggcacacaaccaaattatttcatcatacatcaaataccattacaacaataattatataaccaaatcattcattaactaagtagtcggagaaacgacttggctcaccacatcatgctccgactcgatttcagcaagaacgaagacgaccaccagttcgagcatatcatcgaacacctaaggagcgttaaacttaaccttattctccacctaattctccaaggattttactccatatcgcacacatcaacacacataaaacatcacatcagcggggtattaacaaagaactagtaaaacaacaaaggtatttagagatcaccatgggagcagcagaggttgcgtggttccacaaggccgcaaccatggagaaaactggagcagggagggaacggcgtccatgggaggagttggggtcggccatgggagatggctggaaatggccataggaacaagggaggggctgggagcatccacttgctgcagaaaggggagggcactgcttgctgctagcgtggggagggcgatagcatccacgctgtagggacaagctcggccatgggcaaggtgctgttgtgggggaggcagccttggttggggcgtcagcttggagagggggcagcgagcagcatcggcttggagagctagagccagggagggacaacggcagctgctgtttcataactgcaaccagagaaggagacgctatggggaggagcaaaggacgtggccttgggcgaccaggggaaggagtgcgccataggagggagaaatggatggagcggggaacaagacggatgccgcggccagaggaagtcgaggctgacagcgtccatggctggggcaagggcgagcgccagggaataggaaccgcgagcagggagggcgggcggtgctgttgccaggagctggaagatgagaacgagcgtcggcttgtgcaggtgatgaggacgtacgggaggttccaaaaattgagtacgtggaagaatttcgaaaatttctaggcatggggcggatgagatcggcaccaggaatggtggcttc

SEQ ID NO: 25824 - DNA, 2509 bp, Zea Mays
cacaactcacatacaaacatttgcagtggaaataaattctttattacaaaatgattacaagttacatcaagatttcgttatacatcatcgaagtgattacaaaagaaattgattcaaaaagattacaatttgaatgtataaagcatttataagttttaaaatacatgctcgcttaagtgacaatcctcaataaagaagctaatgatgggatacacctaaataagaaggccgagctcaccagcacttagcagcatccacaacagaacaaaattataacctgaaaaacaacagggaataaagccctgagtacgtaattactcagcaagacttacccgactaaagaaaagactctcaagggtatgctggtttgttgggaatcaaggtaaagctcatcaaatttcaaagactcgtttttgcagaaaagcttactagtagtggatccttatgccaaacttttacttcacaaattaagtacttttcttgaatctagattttccttatctagagcattcacttgtcctacactagtttcattttagcatctttagtttcacttgttatctacgatgagggtcgaagatccagtcttcatatccgagaagttcggcgatccgaatcgattaatacccagttggggatctccaaccacacgacatatgtagcacttaacccttgcatatgttaactcgccaccaggtttctcaagaccagaacgggttcacgtgacccgagagcacaacaccccaccatctagccacttgccaggtgggcacacgttactctcgccatctctccactcccagtgcgtgcgagctgttctggtattggtctggccgaggctaagcttacccatgatgaggcatgtggccagttaaagggtcctagattagtaggccaacaatcggaacggtccttaatcgacactaacagacgacctttcctgctcagcgcctggtctagatttattccaaccattttcccatttttggtacccgacaggggtactctttttcgaatgatgaacccactccagccgaaggcgaatcatcaccataagtttgctttgatttttgaaacaaaaagcccataacagtgttccacatcattctttttttaaaagaaacaacttttagtttttctaagtagggctaagcctcattagttcgctttataaaacaggtatcaaggaatagtaatcgaattccaaggaatggtaatgcatcaactgtttattcacacaactcctatcacctaatgcaacatataagtgataaaagttttataacaacaagagggtgacaaatgcaccggggcttgcctggaataacactaagtcagtgttgttagatgacgtccgcttggggagcatctctcatcctggtatttgaccagatcatccaagcttcgggttcgttcaccagcatcattttgggatcaactcggttcttgtcgtccgcatcatgtgatcaattaacgaacctgaatgatatgcataatgcacatgaatgattatacagggaaataacaagactaaataatgtcacattaaaggagacgtaatggcaaaatctcacaaatgttcataatcaagcactaaataggtctatagaatcagacacaataatcatgttctctagcttaactcaatctaactcaatcattatatatttttttatcacaagatctatgctttacttagttaaagcataatgtcgaagggtaacaatacttagacacaacaaccatggatacctataacttaaagtgacgaatagaaatactttaactatattttagagttactaatctagattatcaggcatagcacatcgactaaatcaagcaccacaccacttaatctaacaagtagagccttatcaaataacagagttttgacaagtccacattttttaaatctaaagaactaaaatactaatggatgatgaccactaaatagcttttggattttaactaaagcggaccaaccgatgctgcttaccttcaactgatttggacgacgataaatagctattcaggattattaatctaaacgatcgatattcatctacgggatttaaccgatcactcaatatagaacacgacaactagagcaaagcatcgacttctctaaacaaccatttgcaactaccatacttcattaatcaagccaaggactaacccaatctagttacctacacaaaagaaatttcaagcaaatcattttaatgtctgctgattttggacagcagcacaatggttaattgttttattcataactcacaaaatatgcatctaaaaatagtaaactaggactttctcgaaagcttataaagtcctctacacctttggtattatcatcacaataagattcgacctttagaaaggtcaaacagaactaaacataaactctgtccagatttgtacagaattcgactacttacttcaaaaattcataactggagtttcagacatccaaatcaggtgatcctagactttttagaaagctaat

SEQ ID NO: 25825 - DNA, 634 bp, Zea Mays
agacttccaggagtcggttagcacaccggcttggatccttgcacccaccgagactcgactctgggccataaaaccaagcaccgtgactacgtcgccatctagccgtgcaccatcaccgtcgcagaagaggaaggaatagagccgagcagcaccttagcatcctctcgccatcgccgttgcggaagatcgcggagcacgggaagccatgggttggcggtgatttctcgtcggtcacctagcaccaccacagatccacttctcatcgtgggcagctcggtccctgtctccgccttcagtcaagaacaggtaccggaaagatgaggagcatgaaggatgtcgcgatgagttcatgagaggtctaggtcgtcgtctcccagtcaactatggttgaggaggatcgttgtcttcatatgatgtaatgatttagctattttgtacataactcctatatatatagtaaagattcgacattcgtttctgtaccatgtgtcatcatgtgtgtgagacttgatcctagcacacatttgattcgcgcccgggtttgcccttaaaatccggcgtgacaaagttggtatcggatcaatgttgactgtaggacgtaacctatatagacctagaaaaatccttatctact

SEQ ID NO: 25826 - DNA, 1076 bp, Zea Mays
tgtgcactttgttcatccatgggcatagattcacatttaagcactttgtgttgacacttaatcaccaaaatacttagaaatggccaaaaggcacatttccctttcactacccgcgaaaacagtggtactaaaagggtggaatgggatgcccttggctgaataattaggaaagctagtgtgagttaatcctttcccaaaaggggcaagcggggtggaggagtgcaggtgtagggaggtcctcaggttggactgcctttttagcttttcgaacgagggattactacatcgccttcgacacgaactccgtagcgggttctctcatctagccattgaccttgggagtgtctaagggtcttgcaaacccttgctaaatggcaaacatgtcttgtgggtaaagatgtgcaacctctatagagtgtaaaactggtacatcagccgtgctcacggtcatgagcggctcgggccctcacatgagtaacttatggaactaaacttaatctgtcatttgcattgcattgtgggatttattataattatgatctcttatttaattgggatggtatctacttatatttagtaactactaataaaattttgaccaacttgttaaaagcaatgccagccttaaccattttctttgggaatccctacacttcacacgagcccccaccgtaagtgagctcatgcacattattccccacaacttgttgaatgataaaaatatatgaactcactcttgttgtactcacccctaggtcaagaacaggtaccggaaagatgaggagcatgaaggatgtcgcgatgagttcatgagaggtctaggtcgtcgtctcccagtcaactatggttgaggaggatcgttgtcttcatatgatgtaatgatttagctattttgtacataactcctatatatatagtaaagattcgacattcgtttctgtaccatgtgtcatcatgtgtgtgagacttgatcctagcacacatttgattcgcgcccgggtttgcccttaaaatccggcgtgacaaagttggtatcggatcaatgttgactgtaggacgtaacctatatagaccta

SEQ ID NO: 25827 - DNA, 1754 bp, Zea Mays
cttccctgggttgttgcgaacgcccatggaatcgcgcagacttccaggagtcggttagcacaccggcttggatccttgcacccaccgagactcgactctgggccataaaaccaagcaccgtgactacgtcgccatctagccgtgcaccatcaccgtcgcagaagaggaaggaatagagccgagcagcaccttagcatcctctcgccatcgccgttgcggaagatcgcggagcacgggaagccatgggttggcggtgatttctcgtcggtcacctagcaccaccacagatccacttctcatcgtgggcagctcggtccctgtctccgccttcagtgagatccccacctctttgtttcgctttgtccttctctttgcatagcaccgtttggatcggggtttggtgcatcggctcgacatattgtgaatcttcagcagggcgccaccacgaggtaagaaatgccgccgtgtttctccagcagagtaaggacgatggcgccagatcattgatcgtccgacgggcgggtaggattagatctccgtgcaccctatgggagattagatccgagaggatgtggactggatgatccagattgaatcgtgtttccttaaattttgaccgttgatctcggatccagtggccacggtagcgtgccggatcacatgggtttggatctaatcttgtccaatcagattagatcggccggctgtggcgcgctcataccccttcatccgagtacgttctacagaagagtcctcatgtttcactaaaataaactcgtcgtcctggttatgttaaagataattaaaaacaacccctattatttttaaaacaaatcatgtcttttgtttaaatactatccacttccattaggtcatgagagactttaaaataaatacagaaattgttttctaagtataaaataattctaaacacttagaaaactcataactatttcgttttatatccgaatttagtgattctcgaacctacgatctcgtagtggtgcatagaatattcctacgcagtgtgttctcatgttttgtgtaatgttatttttatatactacttgtctatttgtatgtattgctacgagtagcagagaggtcacgagaaacctgaagaccaacttggtaaagtatctgtaatctcaagtataaggcaagttgtgcctttgatcactcttttttacctaataatgttcttgttaatcactatgccatgctcaggttaatttgatgggacctaataggttaccctagttttgttccctccacaccttgcaaacaaatgaactattcggtagacttgctattgatctacctggttttgggattaatgttatactaaattatgctcatgttccattatttttgttggtttgattattgttcatgataagattattatgttaattggaatatggagcgactacctgagagcacctagaggggggggtgaataggtgatcctgtaaaacttaagcttatagccacaaaaacttggttaatcgttagcacaataattgccaagtggctagagaggagccaagacacaataatcacaagaaatcaatcacagagatgacacggtggttatcccgtggttcggccaagtacaaaacttgcctactccacgttgtggcgtcccaacggacaagagttgcactcaactcctctcaagtgatccaatgatcaacttgaataccacggtgttcttcttttctttgatcttttcccgtttgcgaggaatctcc

SEQ ID NO: 25828 - DNA, 147 bp, Zea Mays
cgcgtagtgtatatttctacaatccatgcatccaaggataggacataaaaataaagaaagaaaagcaataataatgataagtataattacgaacaatatacaactccacatcataaccatttttgggtcgacggtgacaagtcaagc

SEQ ID NO: 25829 - DNA, 2121 bp, Zea Mays
cactcctcttgtttccgagatttttgacattataaaacacggcatggtgggcttcaatgaaatggaggtgctgagaagggattcgacgatttggaaacccacacaacacacagtcgctgatatggacagggattctctcttatgtgcgacagatagagatttagctgctagagatcttggtgcacattttccggtcggctccagctgcactgcagggaatggggaatggggagaataggtcacaacagctagtactcccagccgatctccacccagccagcactgcaatgtggatggcacctagcatctattggagagaatgggaaggaagaagagagaaggagagctgatctctaggaggaactcatgggcgacggcgccgggagcagcgacggcgttgaggacggcagccatgcccacgcagactaatcctcacaacggagaattaagcagtgtccagcgcgcctaagagagaatccatgtctataccagcgtctgcacgttgtgtgggtttttaaatcatcgaatcccttctcagcgcctccgtttcgtcgaagctgggtgtgtcgtgttttataatggcaaaaatctccttgtttcctagccgctaggctgttcctcctcatgccacttctcgctctttggcttaggcgcaggagcagaggcctcccatggcgccaccctctccccctgcagctttccctccctctcggccgcgccctctgtcctagctccctgctagccaccatctccaagtcggccatgggccttcccccatgccctcttctgctccaaggcataggagcctaaggtcctccatcagccgaacttgctccttctgtcatggcctcgcgctcgacggtggcgactcgtcttcccaagcgcttagtgctccacctcgccgggccaccggccaacctcgccggccgagcccctccccagcgcccagcctcccccagctgggtgtccctcaagcacagggagctttagctcgttctccttcgcgtcccccttgttcctcatctatgcaggtctcccgcccttctctggtcttgccatggtgggagccgcagccccaagtttgtgaccttgcctcggctccactgtgcgtcgccgctccccctgtgcactcgcttagccccgctttgcacactcgccgctgctcctccatgagcgttgcttgctcgacaaaatgcacaacacaccacacgtcgtcggtaccttgcagcagcaaggaacccctgcatcgtgccgctacacccgcgccgtcgatgcttgctaggcgctcgaccaaatgcctaagccagcctcacccctgcagcagcaacaccgtgcgtcctgctgctataatgccttgtactcgctatcccgcaactcacggtcatcgcagcgtgttgtcttggtttgggtagcgagcgtcgtctacggtgtcatgctatccttgttttcgtggtcgccgtccctctcacagtgcttgcctctgcagtgtgtccgaactcctccccgtgtgagcaccaccggacatggctggcttctagtcgttgtcgtgaccgacgcaactcctccacagagcacccccttcacacacgtcacgtcctacttatcagccttgcgtcgtcgatccctcgccattccacacttcaactcatgcacttgtccccgagtgcattgttaccccatgcatcatggacgcgacgtcatcgtcatgtctccttgcaagcttatggctttgccaaaacttgcaggtgtgcaaaatggatgatctcgtggaagaagtaaattaaaagggtgagatatttctttatgttttcttactattgttagttgccattttcatatgcgtgaagtggattggcgaaatttctcttatggacgcaagtagtgtaaacacgtaggtgaatcagaggaaagggcgagtcatgtcgtttgatgtgatgaatgggattagaaacattcgtttatgcgaaggttgtatatattggtggacgtatgtgtgtcgaatcacgtggtactcatggtccgttagataggtgcagtgtctcaaataaaagtaaccggtagtgttggtcacttgttttcaaatactgtgaatcaagaaaaaggcaacacaattgttaatcg

SEQ ID NO: 25830 - DNA, 835 bp, Zea Mays
cgttgcactcagtagtttaggtacatatcggagctactgataagcctatttcaaaattcttcaccaagaaatcgactgcctacgatctatcagggaagtatgagaatatgtcacgggagcttgctcatgcttacaaagcagcgaaagtggaatgcgatggatcagtagaaaatcaaggaggggacggcaaccaacaccagtcccgagagaagcaaactactaattgtactataaaggatgaacctgtcaccttggaaccacaagttttcgagacaccgtggagcatcgagcatgaagatactatgactctggctggtgccactttggaaacacaacgtgatttgggattcaagagaaagatcgaggacactcaagtcgaagctagcatgaaaccctctcagcttaccaggaaggaaaaagctgtaaaagcagcttcggatgggcaggcatcgttgctttcatatttcgcaaggaagcagggtcgctcgatgaagtagtttgcggtagccgtgccatgtattcctgtgtaactcaaactttaccagtacctgtcctccgtgttcgggacaaactatttcggttttaattttgttttggctaccactaaaatgaaccagctagatttctgcggtcattaattttctgcggcccaacttagccgaggccaatgaaaaaagaactttatttccggtagtctggtccaatcactgaattaagaaccttgtttttggtggttatgttaagccgctgaacataagggtgacgataacgatcttgtttttggcaacttaagttaagccaccaaaaataaggtttttacttttttggcttaact

SEQ ID NO: 25831 - DNA, 1666 bp, Zea Mays
ctggagtgttcgaggcttcccctccccactagccacagtagcacctcagcccaggtccccgtcgcctccgctcaactgccgccgcagggcccgctgcaggcttccatgtgtggtagggcccggtgtaccctcagcccggccgaggttgccagggccttcggcttccccaccacctccgccaacgcgggcggcggtggagacggccccgctgtgccgacgctccatcttaaccggttccggccgtcgtacaatgtgttgcctggggcgtacctgcctgtgggcgccatgcgggcactaccaggttgcgcccacggaggaggaggttcggatggggaggggccggtgatccagtgcatgaagtgggggctggtgcccagcttcaccggcaaggccgagaaacccgactatttcaggatgttcaatgccagatcagagtccgtaaaagaaaaggtttcattccgtcgactaattcaaaaaaataggtgccttgttgcagtagaagggttttatgagtggaaaaagaatggatcaaaaaaacagccatactacatacatttccaagatcataggcctcttgtctttgcagccttgtatgatgcatggacaaattcagaaggagagatcacccatacattcactattttgactacacatgcctcaacttctctaaattggcttcatgaatgcctgttatcttaggcagtaaggactatgttgatgcttggttaaatgatgtttctgtaaaacttgaagaaattactgcaccttacgaaggagctgatctggtttggtatccagtgacatccgcattgggtaaagcatcatttgatggacctgagtgcatcaaagaggtacatatcggagctactgataagcctatttcaaaattcttcaccaagaaatcgactgcctacgatctatcagggaagtatgagaatatgtcacgggagcttgctcatgcttacaaagcagcgaaagtggaatgcgatggatcagtagaaaatcaaggaggggacggcaaccaacaccagtcccgagagaagcaaactactaattgtactataaaggatgaacctgtcaccttggaaccacaagttttcgagacaccgtggagcatcgagcatgaagatactatgactctggctggtgccactttggaaacacaacgtgatttgggattcaagagaaagatcgaggacactcaagtcgaagctagcatgaaaccctctcagcttaccaggaaggaaaaagctgtaaaagcagcttcggatgggcaggcatcgttgctttcatatttcgcaaggaagcagggtcgctcgatgaagtagtttgcggtagccgtgccatgtattcctgtgtaactcaaactttaccagtacctgtcctccgtgttcgggacaaactatttcggttttaattttgttttggctaccactaaaatgaaccagctagatttctgcggtcattaattttctgcggcccaacttagccgaggccaatgaaaaaagaactttatttccggtagtctggtccaatcactgaattaagaaccttgtttttggtggttatgttaagccgctgaacataagggtgacgataacgatcttgtttttggcaacttaagttaagccaccaaaaataaggtttttacttttttggcttaact

SEQ ID NO: 25832 - DNA, 1420 bp, Zea Mays
ctggagtgttcgaggcttcccctccccactagccacagtagcacctcagcccaggtccccgtcgcctccgctcaactgccgccgcagggcccgctgcaggcttccatgtgtggtagggcccggtgtaccctcagcccggccgaggttgccagggccttcggcttccccaccacctccgccaacgcgggcggcggtggagacggccccgctgtgccgacgctccatcttaaccgttcaatgccagatcagagtccgtaaaagaaaaggtttcattccgtcgactaattcaaaaaaataggtgccttgttgcagtagaagggttttatgagtggaaaaagaatggatcaaaaaaacagccatactacatacatttccaagatcataggcctcttgtctttgcagccttgtatgatgcatggacaaattcagaagatagaatgcctgttatcttaggcagtaaggactatgttgatgcttggttaaatgatgtttctgtaaaacttgaagaaattactgcaccttacgaaggagctgatctggtttggtatccagtgacatccgcattgggtaaagcatcatttgatggacctgagtgcatcaaagaggtacatatcggagctactgataagcctatttcaaaattcttcaccaagaaatcgactgcctacgatctatcagggaagtatgagaatatgtcacgggagcttgctcatgcttacaaagcagcgaaagtggaatgcgatggatcagtagaaaatcaaggaggggacggcaaccaacaccagtcccgagagaagcaaactactaattgtactataaaggatgaacctgtcaccttggaaccacaagttttcgagacaccgtggagcatcgagcatgaagatactatgactctggctggtgccactttggaaacacaacgtgatttgggattcaagagaaagatcgaggacactcaagtcgaagctagcatgaaaccctctcagcttaccaggaaggaaaaagctgtaaaagcagcttcggatgggcaggcatcgttgctttcatatttcgcaaggaagcagggtcgctcgatgaagtagtttgcggtagccgtgccatgtattcctgtgtaactcaaactttaccagtacctgtcctccgtgttcgggacaaactatttcggttttaattttgttttggctaccactaaaatgaaccagctagatttctgcggtcattaattttctgcggcccaacttagccgaggccaatgaaaaaagaactttatttccggtagtctggtccaatcactgaattaagaaccttgtttttggtggttatgttaagccgctgaacataagggtgacgataacgatcttgtttttggcaacttaagttaagccaccaaaaataaggtttttacttttttggcttaact

SEQ ID NO: 25833 - DNA, 1583 bp, Zea Mays
ctggagtgttcgaggcttcccctccccactagccacagtagcacctcagcccaggtccccgtcgcctccgctcaactgccgccgcagggcccgctgcaggcttccatgtgtggtagggcccggtgtaccctcagcccggccgaggttgccagggccttcggcttccccaccacctccgccaacgcgggcggcggtggagacggccccgctgtgccgacgctccatcttaaccggttccggccgtcgtacaatgtgttgcctggggcgtacctgcctgtgggcgccatgcgggcactaccaggttgcgcccacggaggaggaggttcggatggggaggggccggtgatccagtgcatgaagtgggggctggtgcccagcttcaccggcaaggccgagaaacccgactatttcaggatgttcaatgccagatcagagtccgtaaaagaaaaggtttcattccgtcgactaattcaaaaaaataggtgccttgttgcagtagaagggttttatgagtggaaaaagaatggatcaaaaaaacagccatactacatacatttccaagatcataggcctcttgtctttgcagccttgtatgatgcatggacaaattcagaaggcagtaaggactatgttgatgcttggttaaatgatgtttctgtaaaacttgaagaaattactgcaccttacgaaggagctgatctggtttggtatccagtgacatccgcattgggtaaagcatcatttgatggacctgagtgcatcaaagaggtacatatcggagctactgataagcctatttcaaaattcttcaccaagaaatcgactgcctacgatctatcagggaagtatgagaatatgtcacgggagcttgctcatgcttacaaagcagcgaaagtggaatgcgatggatcagtagaaaatcaaggaggggacggcaaccaacaccagtcccgagagaagcaaactactaattgtactataaaggatgaacctgtcaccttggaaccacaagttttcgagacaccgtggagcatcgagcatgaagatactatgactctggctggtgccactttggaaacacaacgtgatttgggattcaagagaaagatcgaggacactcaagtcgaagctagcatgaaaccctctcagcttaccaggaaggaaaaagctgtaaaagcagcttcggatgggcaggcatcgttgctttcatatttcgcaaggaagcagggtcgctcgatgaagtagtttgcggtagccgtgccatgtattcctgtgtaactcaaactttaccagtacctgtcctccgtgttcgggacaaactatttcggttttaattttgttttggctaccactaaaatgaaccagctagatttctgcggtcattaattttctgcggcccaacttagccgaggccaatgaaaaaagaactttatttccggtagtctggtccaatcactgaattaagaaccttgtttttggtggttatgttaagccgctgaacataagggtgacgataacgatcttgtttttggcaacttaagttaagccaccaaaaataaggtttttacttttttggcttaact

SEQ ID NO: 25834 - DNA, 1604 bp, Zea Mays
ctggagtgttcgaggcttcccctccccactagccacagtagcacctcagcccaggtccccgtcgcctccgctcaactgccgccgcagggcccgctgcaggcttccatgtgtggtagggcccggtgtaccctcagcccggccgaggttgccagggccttcggcttccccaccacctccgccaacgcgggcggcggtggagacggccccgctgtgccgacgctccatcttaaccggttccggccgtcgtacaatgtgttgcctggggcgtacctgcctgtgggcgccatgcgggcactaccaggttgcgcccacggaggaggaggttcggatggggaggggccggtgatccagtgcatgaagtgggggctggtgcccagcttcaccggcaaggccgagaaacccgactatttcaggatgttcaatgccagatcagagtccgtaaaagaaaaggtttcattccgtcgactaattcaaaaaaataggtgccttgttgcagtagaagggttttatgagtggaaaaagaatggatcaaaaaaacagccatactacatacatttccaagatcataggcctcttgtctttgcagccttgtatgatgcatggacaaattcagaagatagaatgcctgttatcttaggcagtaaggactatgttgatgcttggttaaatgatgtttctgtaaaacttgaagaaattactgcaccttacgaaggagctgatctggtttggtatccagtgacatccgcattgggtaaagcatcatttgatggacctgagtgcatcaaagaggtacatatcggagctactgataagcctatttcaaaattcttcaccaagaaatcgactgcctacgatctatcagggaagtatgagaatatgtcacgggagcttgctcatgcttacaaagcagcgaaagtggaatgcgatggatcagtagaaaatcaaggaggggacggcaaccaacaccagtcccgagagaagcaaactactaattgtactataaaggatgaacctgtcaccttggaaccacaagttttcgagacaccgtggagcatcgagcatgaagatactatgactctggctggtgccactttggaaacacaacgtgatttgggattcaagagaaagatcgaggacactcaagtcgaagctagcatgaaaccctctcagcttaccaggaaggaaaaagctgtaaaagcagcttcggatgggcaggcatcgttgctttcatatttcgcaaggaagcagggtcgctcgatgaagtagtttgcggtagccgtgccatgtattcctgtgtaactcaaactttaccagtacctgtcctccgtgttcgggacaaactatttcggttttaattttgttttggctaccactaaaatgaaccagctagatttctgcggtcattaattttctgcggcccaacttagccgaggccaatgaaaaaagaactttatttccggtagtctggtccaatcactgaattaagaaccttgtttttggtggttatgttaagccgctgaacataagggtgacgataacgatcttgtttttggcaacttaagttaagccaccaaaaataaggtttttacttttttggcttaact

SEQ ID NO: 25835 - DNA, 1563 bp, Zea Mays
ctggagtgttcgaggcttcccctccccactagccacagtagcacctcagcccaggtccccgtcgcctccgctcaactgccgccgcagggcccgctgcaggcttccatgtgtggtagggcccggtgtaccctcagcccggccgaggttgccagggccttcggcttccccaccacctccgccaacgcgggcggcggtggagacggccccgctgtgccgacgctccatcttaaccggttccggccgtcgtacaatgtgttgcctggggcgtacctgcctgtgggcgccatgcgggcactaccaggttgcgcccacggaggaggaggttcggatggggaggggccggtgatccagtgcatgaagtgggggctggtgcccagcttcaccggcaaggccgagaaacccgactatttcaggatgttcaatgccagatcagagtccgtaaaagaaaaggtttcattccgtcgactaattcaaaaaaataggtgccttgttgcagtagaagggttttatgagtggaaaaagaatggatcaaaaaaacagccatactacatacatttccaagatcataggcctcttgtctttgcagccttgtatgatgcatggacaaattcagaaggagagatcacccatacattcactattttgactacacatgcctcaacttctctaaattggcttcatggtttggtatccagtgacatccgcattgggtaaagcatcatttgatggacctgagtgcatcaaagaggtacatatcggagctactgataagcctatttcaaaattcttcaccaagaaatcgactgcctacgatctatcagggaagtatgagaatatgtcacgggagcttgctcatgcttacaaagcagcgaaagtggaatgcgatggatcagtagaaaatcaaggaggggacggcaaccaacaccagtcccgagagaagcaaactactaattgtactataaaggatgaacctgtcaccttggaaccacaagttttcgagacaccgtggagcatcgagcatgaagatactatgactctggctggtgccactttggaaacacaacgtgatttgggattcaagagaaagatcgaggacactcaagtcgaagctagcatgaaaccctctcagcttaccaggaaggaaaaagctgtaaaagcagcttcggatgggcaggcatcgttgctttcatatttcgcaaggaagcagggtcgctcgatgaagtagtttgcggtagccgtgccatgtattcctgtgtaactcaaactttaccagtacctgtcctccgtgttcgggacaaactatttcggttttaattttgttttggctaccactaaaatgaaccagctagatttctgcggtcattaattttctgcggcccaacttagccgaggccaatgaaaaaagaactttatttccggtagtctggtccaatcactgaattaagaaccttgtttttggtggttatgttaagccgctgaacataagggtgacgataacgatcttgtttttggcaacttaagttaagccaccaaaaataaggtttttacttttttggcttaact

SEQ ID NO: 25836 - DNA, 1602 bp, Zea Mays
ctggagtgttcgaggcttcccctccccactagccacagtagcacctcagcccaggtccccgtcgcctccgctcaactgccgccgcagggcccgctgcaggcttccatgtgtggtagggcccggtgtaccctcagcccggccgaggttgccagggccttcggcttccccaccacctccgccaacgcgggcggcggtggagacggccccgctgtgccgacgctccatcttaaccggttgcgcccacggaggaggaggttcggatggggaggggccggtgatccagtgcatgaagtgggggctggtgcccagcttcaccggcaaggccgagaaacccgactatttcaggatgttcaatgccagatcagagtccgtaaaagaaaaggtttcattccgtcgactaattcaaaaaaataggtgccttgttgcagtagaagggttttatgagtggaaaaagaatggatcaaaaaaacagccatactacatacatttccaagatcataggcctcttgtctttgcagccttgtatgatgcatggacaaattcagaaggagagatcacccatacattcactattttgactacacatgcctcaacttctctaaattggcttcatgatagaatgcctgttatcttaggcagtaaggactatgttgatgcttggttaaatgatgtttctgtaaaacttgaagaaattactgcaccttacgaaggagctgatctggtttggtatccagtgacatccgcattgggtaaagcatcatttgatggacctgagtgcatcaaagaggtacatatcggagctactgataagcctatttcaaaattcttcaccaagaaatcgactgcctacgatctatcagggaagtatgagaatatgtcacgggagcttgctcatgcttacaaagcagcgaaagtggaatgcgatggatcagtagaaaatcaaggaggggacggcaaccaacaccagtcccgagagaagcaaactactaattgtactataaaggatgaacctgtcaccttggaaccacaagttttcgagacaccgtggagcatcgagcatgaagatactatgactctggctggtgccactttggaaacacaacgtgatttgggattcaagagaaagatcgaggacactcaagtcgaagctagcatgaaaccctctcagcttaccaggaaggaaaaagctgtaaaagcagcttcggatgggcaggcatcgttgctttcatatttcgcaaggaagcagggtcgctcgatgaagtagtttgcggtagccgtgccatgtattcctgtgtaactcaaactttaccagtacctgtcctccgtgttcgggacaaactatttcggttttaattttgttttggctaccactaaaatgaaccagctagatttctgcggtcattaattttctgcggcccaacttagccgaggccaatgaaaaaagaactttatttccggtagtctggtccaatcactgaattaagaaccttgtttttggtggttatgttaagccgctgaacataagggtgacgataacgatcttgtttttggcaacttaagttaagccaccaaaaataaggtttttacttttttggcttaact

SEQ ID NO: 25837 - DNA, 881 bp, Zea Mays
ctggagtgttcgaggcttcccctccccactagccacagtagcacctcagcccaggtccccgtcgcctccgctcaactgccgccgcagggcccgctgcaggcttccatgtgtggtagggcccggtgtaccctcagcccggccgaggttgccagggccttcggcttccccaccacctccgccaacgcgggcggcggtggagacggccccgctgtgccgacgctccatcttaaccggttccggccgtcgtacaatgtgttgcctggggcgtacctgcctgtgggcgccatgcgggcactaccaggttgcgcccacggaggaggaggttcggatggggaggggccggtgatccagtgcatgaagtgggggctggtgcccagcttcaccggcaaggccgagaaacccgactatttcaggatgttcaatgccagatcagagtccgtaaaagaaaaggtttcattccgtcgactaattcaaaaaaataggtgccttgttgcagtagaagggttttatgagtggaaaaagaatggatcaaaaaaacagccatactacatacatttccaagatcataggcctcttgtctttgcagccttgtatgatgcatggacaaattcagaaggagagatcacccatacattcactattttgactacacatgcctcaacttctctaaattggcttcatgatagaatgcctgttatcttaggcagtaaggactatgttgatgcttggttaaatgatgtttctgtaaaacttgaagaaattactgcaccttacgaaggagctgatctggtttggtatccagtgacatccgcattgggtaaagcatcatttgatggacctgagtgcatcaaagagatttttctacaatcatggtcatcgag

SEQ ID NO: 25838 - DNA, 638 bp, Zea Mays
ctggagtgttcgaggcttcccctccccactagccacagtagcacctcagcccaggtccccgtcgcctccgctcaactgccgccgcagggcccgctgcaggcttccatgtgtggtagggcccggtgtaccctcagcccggccgaggttgccagggccttcggcttccccaccacctccgccaacgcgggcggcggtggagacggccccgctgtgccgacgctccatcttaaccggttccggccgtcgtacaatgtgttgcctggggcgtacctgcctgtgggcgccatgcgggcactaccaggttgcgcccacggaggaggaggttcggatggggaggggccggtgatccagtgcatgaagtgggggctggtgcccagcttcaccggcaaggccgagaaacccgactatttcaggatgttcaatgccagatcagagtccgtaaaagaaaaggtttcattccgtcgactaattcaaaaaaataggtgccttgttgcagtagaagggttttatgagtggaaaaagaatggatcaaaaaaacagccatactacatacatttccaagatcataggcctcttgtctttgcagccttgtatgatgcatggacaaattcagaagatttttatgcttgagagttgag

SEQ ID NO: 25839 - DNA, 1459 bp, Zea Mays
caaacatgtaaatgcacggcacaccacaccacagcccccctactttcctctaccttgcagactgcacactgcctcaagatggtttcctgttcctcatctccacggccacccatccctctcctgctcctcttcctcctccacttctcctctgtcctcgccgtatcagctccttcagcctcacaacaggctggtaccgacggcggcggcggcaatgtgtcggagacggcggcatggacgccgcggctgaggaagacgttcttggacggcggcatcgagcactggcacgggcggcggctggtggggcggttccaggtgtgcgcggtgtgcacctgctgcgggggcccgcacgggatgtgcatcccggcgccgtgctgctacgccatcaactgcaacatccccaaccgtccattcggcgtctgctccttcaccccgcgcacctgcaactgcctcaattgccacctctagcctagccttgccgccaaggatgccaaggtgtggcgaactgctgctggatccatggttttgattgtttcgctttttaagttggttgccgatgcaagggattcgtggtgagagattcgttaatttagggaccaagtggaagattccatcattgcataatactagtattgttagtagtatatactcttgtcctgcattgtagttgtagccatgactcatagtaagtagcagtatggtgatggttggattaattcagcttttttgctcttgcttggtgttgttcaactgtggatagtatctatcattgcagtgtggtacttgtattatttttttcctcatggcagtaggcatgacctttgttcttggattttgtcagcggtgtgccaatttccagtcatctgaaatggatcaaccacaattctttttagacatttctgaattagaattcataaattcatttttgcggtcatcgagatggcgatgtggtatgtgtaccatggattaccattttaaatcctacgcgctttgtctggccatggttttgattgtttaggctgtgctcctattactgctgactcagacggtgactcagacgagaacacgagtatatctcatgaaactggtgggctgttctagtttcttgtagtctctggccatggttttgattgttttttttttgtttgcacttgtcacaattaatgtggatttcctgaatttgacatcctgatttagtaagattattcagatattttaataagcattgtggttaaaaattttgttcaagatttttttgtcagatacacgaatggaaatggtccactggcagccagcagcctgttcaagttgatatgaagagcacaactgcgtctttaattggaaaaaacgaatgaaaagctagcactaaatcattaaaaagaagatgaacggtgacactgactttttttaccttttcattttgctttcccttagaacttcaaatctgatatcataaaggaac

SEQ ID NO: 25840 - DNA, 1777 bp, Zea Mays
aggaacaaaacgactggctgtccgaacggggacgcctggttcctctcattccccttccacctctctctttctttccactactcgccctctctctcttgcgcgcgcgtgacaacatccctccacgggcgcgcggcgcgggagcacccaccgacttatcgccggtggggcggggcgggggcgatctgatgccggcgcggcggtgatggcagcgccgtccggcggtgggggcggcggtgcgggggagggctcctcctcggccgccgcagctatgacgatcggggcccacggggtggaccaagtcacagaagcgatgtggcagatgaatttaggagatgccatggaactggggccatacccagagcgtgttggtgatccagactgtagctattacatgaggactggcatgtgcaggtttgggatgacctgtaaatttaatcacccagcagacagaaagctggctgttgctgctgcaagaatgaagggagaatatcctcaaagaattggacagcctgaatgtcaatactatctgaagactggcacatgcaagtttggagcaacttgcaagtttcatcatccccgagaaaaggctgcaatggcaactcgagttcagctgaatgaactgggctacccactccgcctgaatgaaaaggaatgtgcttattatttaagaacagggcagtgcaagtttggaagcacatgtaagtttcaccatccacaaccatccactatgatggttgccgtacgtggctctgtttattcacctggacagtctgcaacttctcctggccatcatgcttaccagggggctgtaacaagctggcccttgtcgagatctgcttctttcattgcaagtccaaggtggccaggtcattcaagttatgcacaagttattgttcctcctgggcttgttcaggtcccagggtggagtccttatgctgcgcagattggttcttcatcctcggatgaccaacaacggacacctggagctgcccaatactatactggctcacgccagagtggaacacctggcataggcgatcgaggaatgttttcatcctaccaagcaggttctgttcccgttggactttatgcagtacagacggagaatgtatttccagagagacctgaccaacctgaatgtcagttctatatgaagaccggagactgtaagtttggttctgtatgcaagttccatcatcccagggagcgaataattcctactcccaattgtgcactaagtccattaggcctacctttgcgcccgggagaaccaatatgcagtttctataatcgctatggcatgtgcaagtttggtccaaattgcaaatttcatcatccgatgggaaaccctatgtatggccatgcttcatcaccgacaagtgaggcccaaacatctcggcgtatgctggcacatgtaccatcgcatccagaagtatcacctgacagtggctcgggaaggtctaggaggattgttcattcagattcccagcaaataccctctgttgaaaggatcaccgagagagaggcgtcctaagccatcctcggtgtcttcgttcatgctgcctcccctcccctcccctcccattcttgacgagtaattaaatgcaacaacatctgagaatccgaagctgtacaggagattttgattattatctgtcggatatcgtaattagaggtacctggattgtgtccctaaaaacatgcttaaccccaagactatcgtcagacacattcctcaaggtcaagagagcataaaccgcgctttgcccgaggcctt

SEQ ID NO: 25841 - DNA, 2218 bp, Zea Mays
aggaacaaaacgactggctgtccgaacggggacgcctggttcctctcattccccttccacctctctctttctttccactactcgccctctctctcttgcgcgcgcgtgacaacatccctccacgggcgcgcggcgcgggagcacccaccgacttatcgccggtggggcggggcgggggcgatctgatgccggcgcggcggtgatggcagcgccgtccggcggtgggggcggcggtgcgggggagggctcctcctcggccgccgcagctatgacgatcggggcccacggggtggaccaagtcacagaagcgatgtggcagatgaatttaggagatgccatggaactggggccatacccagagcgtgttggtgatccagactgtagctattacatgaggactggcatgtgcaggtttgggatgacctgtaaatttaatcacccagcagacagaaagctggctgttgctgctgcaagaatgaagggagaatatcctcaaagaattggacagcctgaatgtcaatactatctgaagactggcacatgcaagtttggagcaacttgcaagtttcatcatccccgagaaaaggctgcaatggcaactcgagttcagctgaatgaactgggctacccactccgcctgaatgaaaaggaatgtgcttattatttaagaacagggcagtgcaagtttggaagcacatgtaagtttcaccatccacaaccatccactatgatggttgccgtacgtggctctgtttattcacctggacagtctgcaacttctcctggccatcatgcttaccagggggctgtaacaagctggcccttgtcgagatctgcttctttcattgcaagtccaaggtggccaggtcattcaagttatgcacaagttattgttcctcctgggcttgttcaggtcccagggtggagtccttatgctattggttcttcatcctcggatgaccaacaacggacacctggagctgcccaatactatactggctcacgccagagtggaacacctggcataggcgatcgaggaatgttttcatcctaccaagcaggttctgttcccgttggactttatgcagtacagacggagaatgtatttccagagagacctgaccaacctgaatgtcagttctatatgaagaccggagactgtaagtttggttctgtatgcaagttccatcatcccagggagcgaataattcctactcccaattgtgcactaagtccattaggcctacctttgcgcccgggagaaccaatatgcagtttctataatcgctatggcatgtgcaagtttggtccaaattgcaaatttcatcatccgatgggaaaccctatgtatggccatgcttcatcaccgacaagtgaggcccaaacatctcggcgtatgctggcacatgtaccatcgcatccagaagtatcacctgacagtggctcgggaaggtctaggaggattgttcattcagattcccagcaaataccctctgttgaaaggatcaccgagagagaggcgtcctaagccatcctcggtgtcttcgttcatgctgcctcccctcccctcccctcccattcttgacgagtaattaaatgcaacaacatctgagaatccgaagctgtacaggtcttttgcctcatctttgagctttacataccggagcttgcttcaacatgtattgcatccaggcatgaaaaagttcttgccggttcgggatgctcatttgcccccataaaaacgggaacaaacctaccttatttaaacatatgtatgaaactcactcacctctggacattcaaacccattcgagtaatggtcccggtgttgtagtttatagagctgtgtttcagtggacaaacctttgcgaaactgactggggatgcgcaagcatagcctcctttattaattattatctcgtttttttcctagcatctctcttttcataagggcaacccaaagtgttggaataatagattgccaccataatgctctgtattacccaccatatttaaacctggttacttgtgagtaattttctctttgtagttctgacttactcgatcaatctgccaggagattttgattattatctgtcggatatcgtaattagaggtacctggattgtgtccctaaaaacatgcttaaccccaagactatcgtcagacacattcctcaaggtcaagagagcataaaccgcgctttgcccgaggcctt

SEQ ID NO: 25842 - DNA, 2245 bp, Zea Mays
aggaacaaaacgactggctgtccgaacggggacgcctggttcctctcattccccttccacctctctctttctttccactactcgccctctctctcttgcgcgcgcgtgacaacatccctccacgggcgcgcggcgcgggagcacccaccgacttatcgccggtggggcggggcgggggcgatctgatgccggcgcggcggtgatggcagcgccgtccggcggtgggggcggcggtgcgggggagggctcctcctcggccgccgcagctatgacgatcggggcccacggggtggaccaagtcacagaagcgatgtggcagatgaatttaggagatgccatggaactggggccatacccagagcgtgttggtgatccagactgtagctattacatgaggactggcatgtgcaggtttgggatgacctgtaaatttaatcacccagcagacagaaagctggctgttgctgctgcaagaatgaagggagaatatcctcaaagaattggacagcctgaatgtcaatactatctgaagactggcacatgcaagtttggagcaacttgcaagtttcatcatccccgagaaaaggctgcaatggcaactcgagttcagctgaatgaactgggctacccactccgcctgaatgaaaaggaatgtgcttattatttaagaacagggcagtgcaagtttggaagcacatgtaagtttcaccatccacaaccatccactatgatggttgccgtacgtggctctgtttattcacctggacagtctgcaacttctcctggccatcatgcttaccagggggctgtaacaagctggcccttgtcgagatctgcttctttcattgcaagtccaaggtggccaggtcattcaagttatgcacaagttattgttcctcctgggcttgttcaggtcccagggtggagtccttatgctttttttttttcaaatttgtaggcgcagattggttcttcatcctcggatgaccaacaacggacacctggagctgcccaatactatactggctcacgccagagtggaacacctggcataggcgatcgaggaatgttttcatcctaccaagcaggttctgttcccgttggactttatgcagtacagacggagaatgtatttccagagagacctgaccaacctgaatgtcagttctatatgaagaccggagactgtaagtttggttctgtatgcaagttccatcatcccagggagcgaataattcctactcccaattgtgcactaagtccattaggcctacctttgcgcccgggagaaccaatatgcagtttctataatcgctatggcatgtgcaagtttggtccaaattgcaaatttcatcatccgatgggaaaccctatgtatggccatgcttcatcaccgacaagtgaggcccaaacatctcggcgtatgctggcacatgtaccatcgcatccagaagtatcacctgacagtggctcgggaaggtctaggaggattgttcattcagattcccagcaaataccctctgttgaaaggatcaccgagagagaggcgtcctaagccatcctcggtgtcttcgttcatgctgcctcccctcccctcccctcccattcttgacgagtaattaaatgcaacaacatctgagaatccgaagctgtacaggtcttttgcctcatctttgagctttacataccggagcttgcttcaacatgtattgcatccaggcatgaaaaagttcttgccggttcgggatgctcatttgcccccataaaaacgggaacaaacctaccttatttaaacatatgtatgaaactcactcacctctggacattcaaacccattcgagtaatggtcccggtgttgtagtttatagagctgtgtttcagtggacaaacctttgcgaaactgactggggatgcgcaagcatagcctcctttattaattattatctcgtttttttcctagcatctctcttttcataagggcaacccaaagtgttggaataatagattgccaccataatgctctgtattacccaccatatttaaacctggttacttgtgagtaattttctctttgtagttctgacttactcgatcaatctgccaggagattttgattattatctgtcggatatcgtaattagaggtacctggattgtgtccctaaaaacatgcttaaccccaagactatcgtcagacacattcctcaaggtcaagagagcataaaccgcgctttgcccgaggcctt

SEQ ID NO: 25843 - DNA, 2043 bp, Zea Mays
aggaacaaaacgactggctgtccgaacggggacgcctggttcctctcattccccttccacctctctctttctttccactactcgccctctctctcttgcgcgcgcgtgacaacatccctccacgggcgcgcggcgcgggagcacccaccgacttatcgccggtggggcggggcgggggcgatctgatgccggcgcggcggtgatggcagcgccgtccggcggtgggggcggcggtgcgggggagggctcctcctcggccgccgcagctatgacgatcggggcccacggggtggaccaagtcacagaagcgatgtggcagatgaatttaggagatgccatggaactggggccatacccagagcgtgttggtgatccagactgtagctattacatgaggactggcatgtgcaggtttgggatgacctgtaaatttaatcacccagcagacagaaagctggctgttgctgctgcaagaatgaagggagaatatcctcaaagaattggacagcctgaatgtcaatactatctgaagactggcacatgcaagtttggagcaacttgcaagtttcatcatccccgagaaaaggctgcaatggcaactcgagttcagctgaatgaactgggctacccactccgcctgaatgaaaaggaatgtgcttattatttaagaacagggcagtgcaagtttggaagcacatggggctgtaacaagctggcccttgtcgagatctgcttctttcattgcaagtccaaggtggccaggtcattcaagttatgcacaagttattgttcctcctgggcttgttcaggtcccagggtggagtccttatgctgcgcagattggttcttcatcctcggatgaccaacaacggacacctggagctgcccaatactatactggctcacgccagagtggaacacctggcataggcgatcgaggaatgttttcatcctaccaagcagttctatatgaagaccggagactgtaagtttggttctgtatgcaagttccatcatcccagggagcgaataattcctactcccaattgtgcactaagtccattaggcctacctttgcgcccgggagaaccaatatgcagtttctataatcgctatggcatgtgcaagtttggtccaaattgcaaatttcatcatccgatgggaaaccctatgtatggccatgcttcatcaccgacaagtgaggcccaaacatctcggcgtatgctggcacatgtaccatcgcatccagaagtatcacctgacagtggctcgggaaggtctaggaggattgttcattcagattcccagcaaataccctctgttgaaaggatcaccgagagagaggcgtcctaagccatcctcggtgtcttcgttcatgctgcctcccctcccctcccctcccattcttgacgagtaattaaatgcaacaacatctgagaatccgaagctgtacaggtcttttgcctcatctttgagctttacataccggagcttgcttcaacatgtattgcatccaggcatgaaaaagttcttgccggttcgggatgctcatttgcccccataaaaacgggaacaaacctaccttatttaaacatatgtatgaaactcactcacctctggacattcaaacccattcgagtaatggtcccggtgttgtagtttatagagctgtgtttcagtggacaaacctttgcgaaactgactggggatgcgcaagcatagcctcctttattaattattatctcgtttttttcctagcatctctcttttcataagggcaacccaaagtgttggaataatagattgccaccataatgctctgtattacccaccatatttaaacctggttacttgtgagtaattttctctttgtagttctgacttactcgatcaatctgccaggagattttgattattatctgtcggatatcgtaattagaggtacctggattgtgtccctaaaaacatgcttaaccccaagactatcgtcagacacattcctcaaggtcaagagagcataaaccgcgctttgcccgaggcctt

SEQ ID NO: 25844 - DNA, 986 bp, Zea Mays
aggaacaaaacgactggctgtccgaacggggacgcctggttcctctcattccccttccacctctctctttctttccactactcgccctctctctcttgcgcgcgcgtgacaacatccctccacgggcgcgcggcgcgggagcacccaccgacttatcgccggtggggcggggcgggggcgatctgatgccggcgcggcggtgatggcagcgccgtccggcggtgggggcggcggtgcgggggagggctcctcctcggccgccgcagctatgacgatcggggcccacggggtggaccaagtcacagaagcgatgtggcagatgaatttaggagatgccatggaactggggccatacccagagcgtgttggtgatccagactgtagctattacatgaggactggcatgtgcaggtttgggatgacctgtaaatttaatcacccagcagacagaaagctggctgttgctgctgcaagaatgaagggagaatatcctcaaagaattggacagcctgaatgtcaatactatctgaagactggcacatgcaagtttggagcaacttgcaagtttcatcatccccgagaaaaggctgcaatggcaactcgagttcagctgaatgaactgggctacccactccgcctgaatgaaaaggaatgtgcttattatttaagaacagggcagtgcaagtttggaagcacatgtaagtttcaccatccacaaccatccactatgatggttgccgtacgtggctctgtttattcacctggacagtctgcaacttctcctggccatcatgcttaccagggggctgtaacaagctggcccttgtcgagatctgcttctttcattgcaagtccaaggtggccaggtcattcaagttatgcacaagttattgttcctcctgggcttgttcaggtcccagggtggagtccttatgctgcataagtctgactggtgtggtgtgagtccctcaatcactcaattgacc

SEQ ID NO: 25845 - DNA, 1663 bp, Zea Mays
cgagtagcagcaatggcgctgcttgccttcgactttcctcgcgtcatctcgtgcttcccaatccctatagatagaactggattgatccccatggacccatggttctctcagacgccactgcgcctgttcgacgacgcgaagccagaaggcctcgtggtcggggaggctgacgcagagagggacgatgggaacgggggtacccgcctacaacggcgctcggggcataatagttggtcaggcgtgatcataggggcgcactagaggcgcgtgcatcggtccgtggggccgaagacggtcggtgcggcggcgattgctcgccgggatccgcaagaaccgccgtccgatcatcctgcgttgtcagcactcttcccatcagcgccttcgcgggaggtcacgaggatctgaagaatcaccctggtacctggaatttcaagtgccaggcaagttgtgcccttgatccacttttgttacccaataatattctttattatcattattcaatgcataggtttaattttgatgggacctaataggtcaccctagtctatttatccattttaccttgtttacccctgaatcatttgggtagtttttgctattgctttatatggttttggcataatatttcattatatccatgttccaattattttgttattttatttatgttcatgtcaagatcattaatgttaattggaacatggagcttaacttgagaaacacgtgccaccacaagggtggaatgggatgcccttggccaactaattaggaaagctagtggaagactaccttacccgaaaggggcaagggcagtaggggattgcatgcaaggaggttctcgtgttgattttgctgcaatggcggttagacgggggattcttgcaagtgctcttcccataaactgtagtgggttttctgaagctagtggaactttgtaaaggcctcgtagtggatccctagccattcacctcggtagtgtctaagtgccttgcaaaccctggcgacatgagatacacgacttgtgggtacagggtacaacctctgtagagtgtaaaactggtatactagccgagctcacggtcacgagcaactctggactctcgcatgattaaattatgaaacttaaactcaatttgtcatatgcattgcatgggatttattattaattttgttctattattatttattatggtttggtatttacttgtatttagtaattcctaataaaactttgaccaactttaaaagcaatgctcagctttaaacccctattgttgatcagctctacacttcacatgaactcccacctttgtgagttcatgccacattattccccacaacctattgagcgatgaacatgtgtgagctcacccttgctgtctcacaccccccataggagaagtacaggtggttcaagtggagctacgtaacgaggagttcgattcgatctaggtggcgtctcccagttgacttgcgccaaggacgatccttagttcgttttatatttataatttattttgtaagtctcccgctatgtaataagtactctgattatattgtgacatttatctctatacactctgttattatatatgttgtcttctttgacgcatgtatgagatgcacccgactttgtcccttaaagcccgagtgtgacaagaat

SEQ ID NO: 25846 - DNA, 939 bp, Zea Mays
gtcctgttgtttggttgtcctacacagcttgtggatgagaatcggtggtacaacttcgatgatagccatgttgcttccattgatgaagatgaggtgaagactgctgcagcttatgtgctattctatagaagggtcagagaacaagacatagcaaggggaactagtaatggatctcagttatatgcaaaaagaagtcacggatatagccataggtaggctgatgattactgtggttcggtgcaagggggattctggaaatgacacccgcacgcctttagtcattgccaggagtatatggcttgctggaaaaaatgctcatcacgtgcagtcaatgcaccgttgtccagttgtcacagaagatatttcgtgcagtgctggtacaagatgggaattttgtatgaggtgagttgaaggagtaattgactctttatgataactgggtagcttcaacaggaacgccggggcttggtggcattttgttcgtctgttttcttctagaagagaaacaaggggaggcaagaaaacatttaggaaacaccttttcgttaatttgattttttatttccatttttagatttagctagtctgtacactgttgttggaaatgggtccgctgttgttggtcgatgcttgtggtggccaataatactacacccaactataccaggctctgcaatggcgaatcatggtgcacattatggtgctctgttgcgggaagaattgtagctgatgttgtacttatatactggcaaaaaggccccagaaatgtaaaaatgtatcgatatgctgacatcttaaaccctattttggattcgtgctctttcctatggatgaaggtgtgcgccatttaggggttgtttgtttgaagaatcaatccattctaggtaggtgattatcacgagaccatttcataaatttggtgaaatgaattcatttttt

SEQ ID NO: 25847 - DNA, 3273 bp, Zea Mays
atggcgaccaaccgagaggccagtagcggcgtggatgaaggggcccgagtcgggcatggtcacgacgatggggaagggagccgccatgagggagagaggcatcaggtggtgacgagtaggtctgttggcgcagagggccagcggacagaggccacgacaataggctggggccgcggcggcgatctggtggtagggtatggtggaggaccaacattaccaagaaaggcaatcaatactggcttttctcaaactgatttggcgatagaagtttatcctctacgactgcagttaattctaatgtcaagaggagagcgaacctttataaggataagcaagaagggtacagttggccaactccataaaatggcctgtaaggtttttgacttggcaccagatgaggtatgcatttgggactattatggtcgaacaaagcattcattgatggatagcttggacaaaacccttgatgatgccaacattcagatggatcaaaacattctagttgaggtaaccactgatgcaagtggtagtctggatggtttggttaagcgaaacaatttttttgagagtgatgctccgaaatcaggattgccagatgagaattttgcagccaacaactatgcttccagaagctatagctctagtctgacaccaagcatctacctgcgatcacccaatggtgatctggataatgtgcatggttctagtggcatgatcacgaggggatcgcccttaggtcttacagggctacttaatcttggaaatacatgctatatgaacagtgccatacagtgtcttgtgcacacaccacagtttactaaatacttctgtgaagattatcatcgcgaaataaatcggcaaaatccactgggtaatgtgggtgaacttgcattagcttttggtgagctattgagaaaactctgggctcctggaggacgtgcccctgtttcacctagaccattcaaaatgaagctttctcggtttgcatctcagttcagtggatacaaccagcatgattcacaggagctgttggcgttcctattggatggactccatgaagatttgaatcgtgtgaagcatagaccttacataaattcaggggatgctgatggaagatcagatgaagaagttgcagatgaatattgggcaaatcatattgccagaaataattcaatcattgttgatgtatgccaggggcagtacaagtccactttggtttgcccagtctgtgggaaggtttcagtgacttttgacccgttcatgtatctttccttgcccttacaatttgcctcaacccggagcgtgactgccgtggtgttttcttgtgatggtagtgttccaccaacaccattcactgtgaatgtaccaaaacaaggtaggtgcagagatctattacaagcccttggtgctgcatgctcacttaaaaatggggagaaacttctaattgctgagatacggaatcataagatctaccgttttattgatgatccagtgcttcagctgtctacaataagtgatgatgatcatctggcagtttataagctcccaaagttggaaaagagggtgaattacattcagtttgtgcatcgtcatgaagatctggaccatggaaacaataacagcttgacatcttggaaaccgtacggtgttcctcttcttgcacaaatttctcgcaatgaaattgtcacgggttttgatatccatgagttggtccataaaatgcttgtgcccgtgctaaggaatccggactctctgcatttggctgttcaaagttctgtttccacaagaactcatagttatcataccgacagcagcaaatgtcagcttctgttggttgatgatagcaacacagtcattgaaaaatcaaatgatgctatcaggatcccacaatcttcacttgcaactgtattttttatcaactggcccaaggcagatctgaaaaagatagacactcatcatttagagtaccttccagaggtgtttatgtatgctccgcctgcgaagagaacccgtggtgaagctctgtcactctatgcatgcttggatgctttcttgagagaagaacctcttgtacctgaagacatgtggtactgtccaaggtgcaaggagcaaagacaagctagcaaaaagttggatttgtggagacttcctgaagtactagtcatacatctaaagagattttcatttagtaggtcaacaaaacaaaaactagaaacttttgttaattttccaatacatgacttggatttgacaaattacattgccaataagaagacttcagagcgccagatctatgagctgtatgctgtgagcaatcattatggcaacatggcaagtggacattatactgcacacattaagcttgtggatgagaatcggtggtacaacttcgatgatagccatgttgcttccattgatgaagatgaggtgaagactgctgcagcttatgtgctattctatagaagggtcagagaacaagacatagcaaggggaactagtaatggatctcagttatatgcaaaaagaagtcacggatatagccataggtaggctgatgattactgtggttcggtgcaagggggattctggaaatgacacccgcacgcctttagtcattgccaggagtatatggcttgctggaaaaaatgctcatcacgtgcagtcaatgcaccgttgtccagttgtcacagaagatatttcgtgcagtgctggtacaagatgggaattttgtatgaggtgagttgaaggagtaattgactctttatgataactgggtagcttcaacaggaacgccggggcttggtggcattttgttcgtctgttttcttctagaagagaaacaaggggaggcaagaaaacatttaggaaacaccttttcgttaatttgattttttatttccatttttagatttagctagtctgtacactgttgttggaaatgggtccgctgttgttggtcgatgcttgtggtggccaataatactacacccaactataccaggctctgcaatggcgaatcatggtgcacattatggtgctctgttgcgggaagaattgtagctgatgttgtacttatatactggcaaaaaggccccagaaatgtaaaaatgtatcgatatgctgacatcttaaaccctattttggattcgtgctctttcctatggatgaaggtgtgcgccatttaggggttgtttgtttgaagaatcaatccattctaggtaggtgattatcacgagaccatttcataaatttggtgaaatgaattcatttttt

SEQ ID NO: 25848 - DNA, 3240 bp, Zea Mays
atggcgaccaaccgagaggccagtagcggcgtggatgaaggggcccgagtcgggcatggtcacgacgatggggaagggagccgccatgagggagagaggcatcaggtggtgacgagtaggtctgttggcgcagagggccagcggacagaggccacgacaataggctggggccgcggcggcgatctggtggtagggtatggtggaggaccaacattaccaagaaaggcaatcaatactggcttttctcaaactgatttggcgatagaagtttatcctctacgactgcagttaattctaatgtcaagaggagagcgaacctttataaggataagcaagaagggtacagttggccaactccataaaatggcctgtaaggtttttgacttggcaccagatgagcattcattgatggatagcttggacaaaacccttgatgatgccaacattcagatggatcaaaacattctagttgaggtaaccactgatgcaagtggtagtctggatggtttggttaagcgaaacaatttttttgagagtgatgctccgaaatcaggattgccagatgagaattttgcagccaacaactatgcttccagaagctatagctctagtctgacaccaagcatctacctgcgatcacccaatggtgatctggataatgtgcatggttctagtggcatgatcacgaggggatcgcccttaggtcttacagggctacttaatcttggaaatacatgctatatgaacagtgccatacagtgtcttgtgcacacaccacagtttactaaatacttctgtgaagattatcatcgcgaaataaatcggcaaaatccactgggtaatgtgggtgaacttgcattagcttttggtgagctattgagaaaactctgggctcctggaggacgtgcccctgtttcacctagaccattcaaaatgaagctttctcggtttgcatctcagttcagtggatacaaccagcatgattcacaggagctgttggcgttcctattggatggactccatgaagatttgaatcgtgtgaagcatagaccttacataaattcaggggatgctgatggaagatcagatgaagaagttgcagatgaatattgggcaaatcatattgccagaaataattcaatcattgttgatgtatgccaggggcagtacaagtccactttggtttgcccagtctgtgggaaggtttcagtgacttttgacccgttcatgtatctttccttgcccttacaatttgcctcaacccggagcgtgactgccgtggtgttttcttgtgatggtagtgttccaccaacaccattcactgtgaatgtaccaaaacaaggtaggtgcagagatctattacaagcccttggtgctgcatgctcacttaaaaatggggagaaacttctaattgctgagatacggaatcataagatctaccgttttattgatgatccagtgcttcagctgtctacaataagtgatgatgatcatctggcagtttataagctcccaaagttggaaaagagggtgaattacattcagtttgtgcatcgtcatgaagatctggaccatggaaacaataacagcttgacatcttggaaaccgtacggtgttcctcttcttgcacaaatttctcgcaatgaaattgtcacgggttttgatatccatgagttggtccataaaatgcttgtgcccgtgctaaggaatccggactctctgcatttggctgttcaaagttctgtttccacaagaactcatagttatcataccgacagcagcaaatgtcagcttctgttggttgatgatagcaacacagtcattgaaaaatcaaatgatgctatcaggatcccacaatcttcacttgcaactgtattttttatcaactggcccaaggcagatctgaaaaagatagacactcatcatttagagtaccttccagaggtgtttatgtatgctccgcctgcgaagagaacccgtggtgaagctctgtcactctatgcatgcttggatgctttcttgagagaagaacctcttgtacctgaagacatgtggtactgtccaaggtgcaaggagcaaagacaagctagcaaaaagttggatttgtggagacttcctgaagtactagtcatacatctaaagagattttcatttagtaggtcaacaaaacaaaaactagaaacttttgttaattttccaatacatgacttggatttgacaaattacattgccaataagaagacttcagagcgccagatctatgagctgtatgctgtgagcaatcattatggcaacatggcaagtggacattatactgcacacattaagcttgtggatgagaatcggtggtacaacttcgatgatagccatgttgcttccattgatgaagatgaggtgaagactgctgcagcttatgtgctattctatagaagggtcagagaacaagacatagcaaggggaactagtaatggatctcagttatatgcaaaaagaagtcacggatatagccataggtaggctgatgattactgtggttcggtgcaagggggattctggaaatgacacccgcacgcctttagtcattgccaggagtatatggcttgctggaaaaaatgctcatcacgtgcagtcaatgcaccgttgtccagttgtcacagaagatatttcgtgcagtgctggtacaagatgggaattttgtatgaggtgagttgaaggagtaattgactctttatgataactgggtagcttcaacaggaacgccggggcttggtggcattttgttcgtctgttttcttctagaagagaaacaaggggaggcaagaaaacatttaggaaacaccttttcgttaatttgattttttatttccatttttagatttagctagtctgtacactgttgttggaaatgggtccgctgttgttggtcgatgcttgtggtggccaataatactacacccaactataccaggctctgcaatggcgaatcatggtgcacattatggtgctctgttgcgggaagaattgtagctgatgttgtacttatatactggcaaaaaggccccagaaatgtaaaaatgtatcgatatgctgacatcttaaaccctattttggattcgtgctctttcctatggatgaaggtgtgcgccatttaggggttgtttgtttgaagaatcaatccattctaggtaggtgattatcacgagaccatttcataaatttggtgaaatgaattcatttttt

SEQ ID NO: 25849 - DNA, 3145 bp, Zea Mays
ctcatctctgacctctgaccaactccggtgatcaagaactgaagaagatgagtacctcatctgaaggtatggtggaggaccaacattaccaagaaaggcaatcaatactggcttttctcaaactgatttggcgatagaagtttatcctctacgactgcagttaattctaatgtcaagaggagagcgaacctttataaggataagcaagaagggtacagttggccaactccataaaatggcctgtaaggtttttgacttggcaccagatgaggtatgcatttgggactattatggtcgaacaaagcattcattgatggatagcttggacaaaacccttgatgatgccaacattcagatggatcaaaacattctagttgaggtaaccactgatgcaagtggtagtctggatggtttggttaagcgaaacaatttttttgagagtgatgctccgaaatcaggattgccagatgagaattttgcagccaacaactatgcttccagaagctatagctctagtctgacaccaagcatctacctgcgatcacccaatggtgatctggataatgtgcatggttctagtggcatgatcacgaggggatcgcccttaggtcttacagggctacttaatcttggaaatacatgctatatgaacagtgccatacagtgtcttgtgcacacaccacagtttactaaatacttctgtgaagattatcatcgcgaaataaatcggcaaaatccactgggtaatgtgggtgaacttgcattagcttttggtgagctattgagaaaactctgggctcctggaggacgtgcccctgtttcacctagaccattcaaaatgaagctttctcggtttgcatctcagttcagtggatacaaccagcatgattcacaggagctgttggcgttcctattggatggactccatgaagatttgaatcgtgtgaagcatagaccttacataaattcaggggatgctgatggaagatcagatgaagaagttgcagatgaatattgggcaaatcatattgccagaaataattcaatcattgttgatgtatgccaggggcagtacaagtccactttggtttgcccagtctgtgggaaggtttcagtgacttttgacccgttcatgtatctttccttgcccttacaatttgcctcaacccggagcgtgactgccgtggtgttttcttgtgatggtagtgttccaccaacaccattcactgtgaatgtaccaaaacaaggtaggtgcagagatctattacaagcccttggtgctgcatgctcacttaaaaatggggagaaacttctaattgctgagatacggaatcataagatctaccgttttattgatgatccagtgcttcagctgtctacaataagtgatgatgatcatctggcagtttataagctcccaaagttggaaaagagggtgaattacattcagtttgtgcatcgtcatgaagatctggaccatggaaacaataacagcttgacatcttggaaaccgtacggtgttcctcttcttgcacaaatttctcgcaatgaaattgtcacgggttttgatatccatgagttggtccataaaatgcttgtgcccgtgctaaggaatccggactctctgcatttggctgttcaaagttctgtttccacaagaactcatagttatcataccgacagcagcaaatgtcagcttctgttggttgatgatagcaacacagtcattgaaaaatcaaatgatgctatcaggatcccacaatcttcacttgcaactgtattttttatcaactggcccaaggcagatctgaaaaagatagacactcatcatttagagtaccttccagaggtgtttatgtatgctccgcctgcgaagagaacccgtggtgaagctctgtcactctatgcatgcttggatgctttcttgagagaagaacctcttgtacctgaagacatgtggtactgtccaaggtgcaaggagcaaagacaagctagcaaaaagttggatttgtggagacttcctgaagtactagtcatacatctaaagagattttcatttagtaggtcaacaaaacaaaaactagaaacttttgttaattttccaatacatgacttggatttgacaaattacattgccaataagaagacttcagagcgccagatctatgagctgtatgctgtgagcaatcattatggcaacatggcaagtggacattatactgcacacattaagcttgtggatgagaatcggtggtacaacttcgatgatagccatgttgcttccattgatgaagatgaggtgaagactgctgcagcttatgtgctattctatagaagggtcagagaacaagacatagcaaggggaactagtaatggatctcagttatatgcaaaaagaagtcacggatatagccataggtaggctgatgattactgtggttcggtgcaagggggattctggaaatgacacccgcacgcctttagtcattgccaggagtatatggcttgctggaaaaaatgctcatcacgtgcagtcaatgcaccgttgtccagttgtcacagaagatatttcgtgcagtgctggtacaagatgggaattttgtatgaggtgagttgaaggagtaattgactctttatgataactgggtagcttcaacaggaacgccggggcttggtggcattttgttcgtctgttttcttctagaagagaaacaaggggaggcaagaaaacatttaggaaacaccttttcgttaatttgattttttatttccatttttagatttagctagtctgtacactgttgttggaaatgggtccgctgttgttggtcgatgcttgtggtggccaataatactacacccaactataccaggctctgcaatggcgaatcatggtgcacattatggtgctctgttgcgggaagaattgtagctgatgttgtacttatatactggcaaaaaggccccagaaatgtaaaaatgtatcgatatgctgacatcttaaaccctattttggattcgtgctctttcctatggatgaaggtgtgcgccatttaggggttgtttgtttgaagaatcaatccattctaggtaggtgattatcacgagaccatttcataaatttggtgaaatgaattcatttttt

SEQ ID NO: 25850 - DNA, 3125 bp, Zea Mays
actcatctctgacctctgaccaactccggtgatcaagaactgaagaagatgagtacctcatctgaaggtatggtggaggaccaacattaccaagaaaggcaatcaatactggcttttctcaaactgatttggcgatagaagtttatcctctacgactgcagttaattctaatgtcaagaggagagcgaacctttataaggataagcaagaagggtacagttggccaactccataaaatggcctgtaaggtttttgacttggcaccagatgaggtatgcatttgggactattatggtcgaacaaagcattcattgatggatagcttggacaaaacccttgatgatgccaacattcagatggatcaaaacattctagttgaggtaaccactgatgcaagtggtagtctggatggtttggttaagcgaaacaatttttttgagagtgatgctccgaaatcaggattgccagatgagaattttgcagccaacaactatgcttccagaagctatagctctagtctgacaccaagcatctacctgcgatcacccaatggtgatctggataatgtgcatggttctagtggcatgatcacgaggggatcgcccttaggtcttacagggctacttaatcttggaaatacatgctatatgaacagtgccatacagtgtcttgtgcacacaccacagtttactaaatacttctgtgaagattatcatcgcgaaataaatcggcaaaatccactgggtaatgtgtcatgtagggtgaacttgcattagcttttggtgagctattgagaaaactctgggctcctggaggacgtgcccctgtttcacctagaccattcaaaatgaagctttctcggtttgcatctcagttcagtggatacaaccagcatgattcacaggagctgttggcgttcctattggatggactccatgaagatttgaatcgtgtgaagcatagaccttacataaattcaggggatgctgatggaagatcagatgaagaagttgcagatgaatattgggcaaatcatattgccagaaataattcaatcattgttgatgtatgccaggggcagtacaagtccactttggtttgcccagtctgtgggaaggtttcagtgacttttgacccgttcatgtatctttccttgcccttacaatttgcctcaacccggagcgtgactgccgtggtgttttcttgtgatggtagtgttccaccaacaccattcactgtgaatgtaccaaaacaaggtttgacgattgtgtgtccttaaacattttggttgaatttatctacagatacggaatcataagatctaccgttttattgatgatccagtgcttcagctgtctacaataagtgatgatgatcatctggcagtttataagctcccaaagttggaaaagagggtgaattacattcagtttgtgcatcgtcatgaagatctggaccatggaaacaataacagcttgacatcttggaaaccgtacggtgttcctcttcttgcacaaatttctcgcaatgaaattgtcacgggttttgatatccatgagttggtccataaaatgcttgtgcccgtgctaaggaatccggactctctgcatttggctgttcaaagttctgtttccacaagaactcatagttatcataccgacagcagcaaatgtcagcttctgttggttgatgatagcaacacagtcattgaaaaatcaaatgatgctatcaggatcccacaatcttcacttgcaactgtattttttatcaactggcccaaggcagatctgaaaaagatagacactcatcatttagagtaccttccagaggtgtttatgtatgctccgcctgcgaagagaacccgtggtgaagctctgtcactctatgcatgcttggatgctttcttgagagaagaacctcttgtacctgaagacatgtggtactgtccaaggtgcaaggagcaaagacaagctagcaaaaagttggatttgtggagacttcctgaagtactagtcatacatctaaagagattttcatttagtaggtcaacaaaacaaaaactagaaacttttgttaattttccaatacatgacttggatttgacaaattacattgccaataagaagacttcagagcgccagatctatgagctgtatgctgtgagcaatcattatggcaacatggcaagtggacattatactgcacacattaagcttgtggatgagaatcggtggtacaacttcgatgatagccatgttgcttccattgatgaagatgaggtgaagactgctgcagcttatgtgctattctatagaagggtcagagaacaagacatagcaaggggaactagtaatggatctcagttatatgcaaaaagaagtcacggatatagccataggtaggctgatgattactgtggttcggtgcaagggggattctggaaatgacacccgcacgcctttagtcattgccaggagtatatggcttgctggaaaaaatgctcatcacgtgcagtcaatgcaccgttgtccagttgtcacagaagatatttcgtgcagtgctggtacaagatgggaattttgtatgaggtgagttgaaggagtaattgactctttatgataactgggtagcttcaacaggaacgccggggcttggtggcattttgttcgtctgttttcttctagaagagaaacaaggggaggcaagaaaacatttaggaaacaccttttcgttaatttgattttttatttccatttttagatttagctagtctgtacactgttgttggaaatgggtccgctgttgttggtcgatgcttgtggtggccaataatactacacccaactataccaggctctgcaatggcgaatcatggtgcacattatggtgctctgttgcgggaagaattgtagctgatgttgtacttatatactggcaaaaaggccccagaaatgtaaaaatgtatcgatatgctgacatcttaaaccctattttggattcgtgctctttcctatggatgaaggtgtgcgccatttaggggttgtttgtttgaagaatcaatccattctaggtaggtgattatcacgagaccatttcataaatttggtgaaatgaattcatttttt

SEQ ID NO: 25851 - DNA, 3092 bp, Zea Mays
ccagcgactcatctctgacctctgaccaactccggtgatcaagaactgaagaagatgagtacctcatctgaaggtatggtggaggaccaacattaccaagaaaggcaatcaatactggcttttctcaaactgatttggcgatagaagtttatcctctacgactgcagttaattctaatgtcaagaggagagcgaacctttataaggataagcaagaaggtatgcatttgggactattatggtcgaacaaagcattcattgatggatagcttggacaaaacccttgatgatgccaacattcagatggatcaaaacattctagttgaggtaaccactgatgcaagtggtagtctggatggtttggttaagcgaaacaatttttttgagagtgatgctccgaaatcaggattgccagatgagaattttgcagccaacaactatgcttccagaagctatagctctagtctgacaccaagcatctacctgcgatcacccaatggtgatctggataatgtgcatggttctagtggcatgatcacgaggggatcgcccttaggtcttacagggctacttaatcttggaaatacatgctatatgaacagtgccatacagtgtcttgtgcacacaccacagtttactaaatacttctgtgaagattatcatcgcgaaataaatcggcaaaatccactgggtaatgtgggtgaacttgcattagcttttggtgagctattgagaaaactctgggctcctggaggacgtgcccctgtttcacctagaccattcaaaatgaagctttctcggtttgcatctcagttcagtggatacaaccagcatgattcacaggagctgttggcgttcctattggatggactccatgaagatttgaatcgtgtgaagcatagaccttacataaattcaggggatgctgatggaagatcagatgaagaagttgcagatgaatattgggcaaatcatattgccagaaataattcaatcattgttgatgtatgccaggggcagtacaagtccactttggtttgcccagtctgtgggaaggtttcagtgacttttgacccgttcatgtatctttccttgcccttacaatttgcctcaacccggagcgtgactgccgtggtgttttcttgtgatggtagtgttccaccaacaccattcactgtgaatgtaccaaaacaaggtaggtgcagagatctattacaagcccttggtgctgcatgctcacttaaaaatggggagaaacttctaattgctgagatacggaatcataagatctaccgttttattgatgatccagtgcttcagctgtctacaataagtgatgatgatcatctggcagtttataagctcccaaagttggaaaagagggtgaattacattcagtttgtgcatcgtcatgaagatctggaccatggaaacaataacagcttgacatcttggaaaccgtacggtgttcctcttcttgcacaaatttctcgcaatgaaattgtcacgggttttgatatccatgagttggtccataaaatgcttgtgcccgtgctaaggaatccggactctctgcatttggctgttcaaagttctgtttccacaagaactcatagttatcataccgacagcagcaaatgtcagcttctgttggttgatgatagcaacacagtcattgaaaaatcaaatgatgctatcaggatcccacaatcttcacttgcaactgtattttttatcaactggcccaaggcagatctgaaaaagatagacactcatcatttagagtaccttccagaggtgtttatgtatgctccgcctgcgaagagaacccgtggtgaagctctgtcactctatgcatgcttggatgctttcttgagagaagaacctcttgtacctgaagacatgtggtactgtccaaggtgcaaggagcaaagacaagctagcaaaaagttggatttgtggagacttcctgaagtactagtcatacatctaaagagattttcatttagtaggtcaacaaaacaaaaactagaaacttttgttaattttccaatacatgacttggatttgacaaattacattgccaataagaagacttcagagcgccagatctatgagctgtatgctgtgagcaatcattatggcaacatggcaagtggacattatactgcacacattaagcttgtggatgagaatcggtggtacaacttcgatgatagccatgttgcttccattgatgaagatgaggtgaagactgctgcagcttatgtgctattctatagaagggtcagagaacaagacatagcaaggggaactagtaatggatctcagttatatgcaaaaagaagtcacggatatagccataggtaggctgatgattactgtggttcggtgcaagggggattctggaaatgacacccgcacgcctttagtcattgccaggagtatatggcttgctggaaaaaatgctcatcacgtgcagtcaatgcaccgttgtccagttgtcacagaagatatttcgtgcagtgctggtacaagatgggaattttgtatgaggtgagttgaaggagtaattgactctttatgataactgggtagcttcaacaggaacgccggggcttggtggcattttgttcgtctgttttcttctagaagagaaacaaggggaggcaagaaaacatttaggaaacaccttttcgttaatttgattttttatttccatttttagatttagctagtctgtacactgttgttggaaatgggtccgctgttgttggtcgatgcttgtggtggccaataatactacacccaactataccaggctctgcaatggcgaatcatggtgcacattatggtgctctgttgcgggaagaattgtagctgatgttgtacttatatactggcaaaaaggccccagaaatgtaaaaatgtatcgatatgctgacatcttaaaccctattttggattcgtgctctttcctatggatgaaggtgtgcgccatttaggggttgtttgtttgaagaatcaatccattctaggtaggtgattatcacgagaccatttcataaatttggtgaaatgaattcatttttt

SEQ ID NO: 25852 - DNA, 3321 bp, Zea Mays
ttggtggcggaatgcttcggcgccgccgttgaggttgcgcctcggcgtcggcattggaggtggtggcaaagttggattgattacctcattcaagatttgactggtgcaacaagtaatggttctcatcatcatgagtttggttcaaaaactcctagaaggccaggagctattgacaataccgatttaattgatgatgtgccacttgaagtctccaacatggagattgagatacatgataacttggttgagggtcgggattacatactgcttcctcagcaagtttgggaaaagttgcatggttggtatggtggaggaccaacattaccaagaaaggcaatcaatactggcttttctcaaactgatttggcgatagaagtttatcctctacgactgcagttaattctaatgtcaagaggagagcgaacctttataaggataagcaagaaggtatgcatttgggactattatggtcgaacaaagcattcattgatggatagcttggacaaaacccttgatgatgccaacattcagatggatcaaaacattctagttgaggtaaccactgatgcaagtggtagtctggatggtttggttaagcgaaacaatttttttgagagtgatgctccgaaatcaggattgccagatgagaattttgcagccaacaactatgcttccagaagctatagctctagtctgacaccaagcatctacctgcgatcacccaatggtgatctggataatgtgcatggttctagtggcatgatcacgaggggatcgcccttaggtcttacagggctacttaatcttggaaatacatgctatatgaacagtgccatacagtgtcttgtgcacacaccacagtttactaaatacttctgtgaagattatcatcgcgaaataaatcggcaaaatccactgggtaatgtgggtgaacttgcattagcttttggtgagctattgagaaaactctgggctcctggaggacgtgcccctgtttcacctagaccattcaaaatgaagctttctcggtttgcatctcagttcagtggatacaaccagcatgattcacaggagctgttggcgttcctattggatggactccatgaagatttgaatcgtgtgaagcatagaccttacataaattcaggggatgctgatggaagatcagatgaagaagttgcagatgaatattgggcaaatcatattgccagaaataattcaatcattgttgatgtatgccaggggcagtacaagtccactttggtttgcccagtctgtgggaaggtttcagtgacttttgacccgttcatgtatctttccttgcccttacaatttgcctcaacccggagcgtgactgccgtggtgttttcttgtgatggtagtgttccaccaacaccattcactgtgaatgtaccaaaacaaggtaggtgcagagatctattacaagcccttggtgctgcatgctcacttaaaaatggggagaaacttctaattgctgagatacggaatcataagatctaccgttttattgatgatccagtgcttcagctgtctacaataagtgatgatgatcatctggcagtttataagctcccaaagttggaaaagagggtgaattacattcagtttgtgcatcgtcatgaagatctggaccatggaaacaataacagcttgacatcttggaaaccgtacggtgttcctcttcttgcacaaatttctcgcaatgaaattgtcacgggttttgatatccatgagttggtccataaaatgcttgtgcccgtgctaaggaatccggactctctgcatttggctgttcaaagttctgtttccacaagaactcatagttatcataccgacagcagcaaatgtcagcttctgttggttgatgatagcaacacagtcattgaaaaatcaaatgatgctatcaggatcccacaatcttcacttgcaactgtattttttatcaactggcccaaggcagatctgaaaaagatagacactcatcatttagagtaccttccagaggtgtttatgtatgctccgcctgcgaagagaacccgtggtgaagctctgtcactctatgcatgcttggatgctttcttgagagaagaacctcttgtacctgaagacatgtggtactgtccaaggtgcaaggagcaaagacaagctagcaaaaagttggatttgtggagacttcctgaagtactagtcatacatctaaagagattttcatttagtaggtcaacaaaacaaaaactagaaacttttgttaattttccaatacatgacttggatttgacaaattacattgccaataagaagacttcagagcgccagatctatgagctgtatgctgtgagcaatcattatggcaacatggcaagtggacattatactgcacacattaagcttgtggatgagaatcggtggtacaacttcgatgatagccatgttgcttccattgatgaagatgaggtgaagactgctgcagcttatgtgctattctatagaagggtcagagaacaagacatagcaaggggaactagtaatggatctcagttatatgcaaaaagaagtcacggatatagccataggtaggctgatgattactgtggttcggtgcaagggggattctggaaatgacacccgcacgcctttagtcattgccaggagtatatggcttgctggaaaaaatgctcatcacgtgcagtcaatgcaccgttgtccagttgtcacagaagatatttcgtgcagtgctggtacaagatgggaattttgtatgaggtgagttgaaggagtaattgactctttatgataactgggtagcttcaacaggaacgccggggcttggtggcattttgttcgtctgttttcttctagaagagaaacaaggggaggcaagaaaacatttaggaaacaccttttcgttaatttgattttttatttccatttttagatttagctagtctgtacactgttgttggaaatgggtccgctgttgttggtcgatgcttgtggtggccaataatactacacccaactataccaggctctgcaatggcgaatcatggtgcacattatggtgctctgttgcgggaagaattgtagctgatgttgtacttatatactggcaaaaaggccccagaaatgtaaaaatgtatcgatatgctgacatcttaaaccctattttggattcgtgctctttcctatggatgaaggtgtgcgccatttaggggttgtttgtttgaagaatcaatccattctaggtaggtgattatcacgagaccatttcataaatttggtgaaatgaattcatttttt

SEQ ID NO: 25853 - DNA, 3383 bp, Zea Mays
tgttggtggcggaatgcttcggcgccgccgttgaggttgcgcctcggcgtcggcattggaggtggtggcaaagttggattgattacctcattcaagatttgactggtgcaacaagtaatggttctcatcatcatgagtttggttcaaaaactcctagaaggccaggagctattgacaataccgatttaattgatgatgtgccacttgaagtctccaacatggagattgagatacatgataacttggttgagggtcgggattacatactgcttcctcagcaagtttgggaaaagttgcatggttggtatggtggaggaccaacattaccaagaaaggcaatcaatactggcttttctcaaactgatttggcgatagaagtttatcctctacgactgcagttaattctaatgtcaagaggagagcgaacctttataaggataagcaagaagggtacagttggccaactccataaaatggcctgtaaggtttttgacttggcaccagatgaggtatgcatttgggactattatggtcgaacaaagcattcattgatggatagcttggacaaaacccttgatgatgccaacattcagatggatcaaaacattctagttgaggtaaccactgatgcaagtggtagtctggatggtttggttaagcgaaacaatttttttgagagtgatgctccgaaatcaggattgccagatgagaattttgcagccaacaactatgcttccagaagctatagctctagtctgacaccaagcatctacctgcgatcacccaatggtgatctggataatgtgcatggttctagtggcatgatcacgaggggatcgcccttaggtcttacagggctacttaatcttggaaatacatgctatatgaacagtgccatacagtgtcttgtgcacacaccacagtttactaaatacttctgtgaagattatcatcgcgaaataaatcggcaaaatccactgggtaatgtgggtgaacttgcattagcttttggtgagctattgagaaaactctgggctcctggaggacgtgcccctgtttcacctagaccattcaaaatgaagctttctcggtttgcatctcagttcagtggatacaaccagcatgattcacaggagctgttggcgttcctattggatggactccatgaagatttgaatcgtgtgaagcatagaccttacataaattcaggggatgctgatggaagatcagatgaagaagttgcagatgaatattgggcaaatcatattgccagaaataattcaatcattgttgatgtatgccaggggcagtacaagtccactttggtttgcccagtctgtgggaaggtttcagtgacttttgacccgttcatgtatctttccttgcccttacaatttgcctcaacccggagcgtgactgccgtggtgttttcttgtgatggtagtgttccaccaacaccattcactgtgaatgtaccaaaacaaggtaggtgcagagatctattacaagcccttggtgctgcatgctcacttaaaaatggggagaaacttctaattgctgagatacggaatcataagatctaccgttttattgatgatccagtgcttcagctgtctacaataagtgatgatgatcatctggcagtttataagctcccaaagttggaaaagagggtgaattacattcagtttgtgcatcgtcatgaagatctggaccatggaaacaataacagcttgacatcttggaaaccgtacggtgttcctcttcttgcacaaatttctcgcaatgaaattgtcacgggttttgatatccatgagttggtccataaaatgcttgtgcccgtgctaaggaatccggactctctgcatttggctgttcaaagttctgtttccacaagaactcatagttatcataccgacagcagcaaatgtcagcttctgttggttgatgatagcaacacagtcattgaaaaatcaaatgatgctatcaggatcccacaatcttcacttgcaactgtattttttatcaactggcccaaggcagatctgaaaaagatagacactcatcatttagagtaccttccagaggtgtttatgtatgctccgcctgcgaagagaacccgtggtgaagctctgtcactctatgcatgcttggatgctttcttgagagaagaacctcttgtacctgaagacatgtggtactgtccaaggtgcaaggagcaaagacaagctagcaaaaagttggatttgtggagacttcctgaagtactagtcatacatctaaagagattttcatttagtaggtcaacaaaacaaaaactagaaacttttgttaattttccaatacatgacttggatttgacaaattacattgccaataagaagacttcagagcgccagatctatgagctgtatgctgtgagcaatcattatggcaacatggcaagtggacattatactgcacacattaagcttgtggatgagaatcggtggtacaacttcgatgatagccatgttgcttccattgatgaagatgaggtgaagactgctgcagcttatgtgctattctatagaagggtcagagaacaagacatagcaaggggaactagtaatggatctcagttatatgcaaaaagaagtcacggatatagccataggtaggctgatgattactgtggttcggtgcaagggggattctggaaatgacacccgcacgcctttagtcattgccaggagtatatggcttgctggaaaaaatgctcatcacgtgcagtcaatgcaccgttgtccagttgtcacagaagatatttcgtgcagtgctggtacaagatgggaattttgtatgaggtgagttgaaggagtaattgactctttatgataactgggtagcttcaacaggaacgccggggcttggtggcattttgttcgtctgttttcttctagaagagaaacaaggggaggcaagaaaacatttaggaaacaccttttcgttaatttgattttttatttccatttttagatttagctagtctgtacactgttgttggaaatgggtccgctgttgttggtcgatgcttgtggtggccaataatactacacccaactataccaggctctgcaatggcgaatcatggtgcacattatggtgctctgttgcgggaagaattgtagctgatgttgtacttatatactggcaaaaaggccccagaaatgtaaaaatgtatcgatatgctgacatcttaaaccctattttggattcgtgctctttcctatggatgaaggtgtgcgccatttaggggttgtttgtttgaagaatcaatccattctaggtaggtgattatcacgagaccatttcataaatttggtgaaatgaattcatttttt

SEQ ID NO: 25854 - DNA, 3731 bp, Zea Mays
gccagacagcctcctctcctccggccggaaaaaagcaacctcgcagatccgcggccccccctcctccgctcacaggttcaccgcatcgacgccactaccgtttccactgccgcctcgaccccgctccaccaattcttggtcaagccgctccagctaagagacggagagccctgcggaaaggggagacgaggggagggtgcaaaccctagccgtagaccgcgggctcctcctcctcgccggcggcggcggggatggagatggtggtggcggcgccggcgctccccgccgaagtggagagggctctcatccgggacataaccgtcgcggctgatgcccacgccaaggagggagacactttcttcctcatcaccaccagggtcccgcggggcgcaagatcgttttttccccttcttgctggtgttgtttgttggtggcggaatgcttcggcgccgccgttgaggttgcgcctcggcgtcggcattggaggtggtggcaaagttggattgattacctcattcaagatttgactggtgcaacaagtaatggttctcatcatcatgagtttggttcaaaaactcctagaaggccaggagctattgacaataccgatttaattgatgatgtgccacttgaagtctccaacatggagattgagatacatgataacttggttgagggtcgggattacatactgcttcctcagcaagtttgggaaaagttgcatggttggtatggtggaggaccaacattaccaagaaaggcaatcaatactggcttttctcaaactgatttggcgatagaagtttatcctctacgactgcagttaattctaatgtcaagaggagagcgaacctttataaggataagcaagaagggtacagttggccaactccataaaatggcctgtaaggtttttgacttggcaccagatgaggtatgcatttgggactattatggtcgaacaaagcattcattgatggatagcttggacaaaacccttgatgatgccaacattcagatggatcaaaacattctagttgaggtaaccactgatgcaagtggtagtctggatggtttggttaagcgaaacaatttttttgagagtgatgctccgaaatcaggattgccagatgagaattttgcagccaacaactatgcttccagaagctatagctctagtctgacaccaagcatctacctgcgatcacccaatggtgatctggataatgtgcatggttctagtggcatgatcacgaggggatcgcccttaggtcttacagggctacttaatcttggaaatacatgctatatgaacagtgccatacagtgtcttgtgcacacaccacagtttactaaatacttctgtgaagattatcatcgcgaaataaatcggcaaaatccactgggtaatgtgggtgaacttgcattagcttttggtgagctattgagaaaactctgggctcctggaggacgtgcccctgtttcacctagaccattcaaaatgaagctttctcggtttgcatctcagttcagtggatacaaccagcatgattcacaggagctgttggcgttcctattggatggactccatgaagatttgaatcgtgtgaagcatagaccttacataaattcaggggatgctgatggaagatcagatgaagaagttgcagatgaatattgggcaaatcatattgccagaaataattcaatcattgttgatgtatgccaggggcagtacaagtccactttggtttgcccagtctgtgggaaggtttcagtgacttttgacccgttcatgtatctttccttgcccttacaatttgcctcaacccggagcgtgactgccgtggtgttttcttgtgatggtagtgttccaccaacaccattcactgtgaatgtaccaaaacaagatacggaatcataagatctaccgttttattgatgatccagtgcttcagctgtctacaataagtgatgatgatcatctggcagtttataagctcccaaagttggaaaagagggtgaattacattcagtttgtgcatcgtcatgaagatctggaccatggaaacaataacagcttgacatcttggaaaccgtacggtgttcctcttcttgcacaaatttctcgcaatgaaattgtcacgggttttgatatccatgagttggtccataaaatgcttgtgcccgtgctaaggaatccggactctctgcatttggctgttcaaagttctgtttccacaagaactcatagttatcataccgacagcagcaaatgtcagcttctgttggttgatgatagcaacacagtcattgaaaaatcaaatgatgctatcaggatcccacaatcttcacttgcaactgtattttttatcaactggcccaaggcagatctgaaaaagatagacactcatcatttagagtaccttccagaggtgtttatgtatgctccgcctgcgaagagaacccgtggtgaagctctgtcactctatgcatgcttggatgctttcttgagagaagaacctcttgtacctgaagacatgtggtactgtccaaggtgcaaggagcaaagacaagctagcaaaaagttggatttgtggagacttcctgaagtactagtcatacatctaaagagattttcatttagtaggtcaacaaaacaaaaactagaaacttttgttaattttccaatacatgacttggatttgacaaattacattgccaataagaagacttcagagcgccagatctatgagctgtatgctgtgagcaatcattatggcaacatggcaagtggacattatactgcacacattaagcttgtggatgagaatcggtggtacaacttcgatgatagccatgttgcttccattgatgaagatgaggtgaagactgctgcagcttatgtgctattctatagaagggtcagagaacaagacatagcaaggggaactagtaatggatctcagttatatgcaaaaagaagtcacggatatagccataggtaggctgatgattactgtggttcggtgcaagggggattctggaaatgacacccgcacgcctttagtcattgccaggagtatatggcttgctggaaaaaatgctcatcacgtgcagtcaatgcaccgttgtccagttgtcacagaagatatttcgtgcagtgctggtacaagatgggaattttgtatgaggtgagttgaaggagtaattgactctttatgataactgggtagcttcaacaggaacgccggggcttggtggcattttgttcgtctgttttcttctagaagagaaacaaggggaggcaagaaaacatttaggaaacaccttttcgttaatttgattttttatttccatttttagatttagctagtctgtacactgttgttggaaatgggtccgctgttgttggtcgatgcttgtggtggccaataatactacacccaactataccaggctctgcaatggcgaatcatggtgcacattatggtgctctgttgcgggaagaattgtagctgatgttgtacttatatactggcaaaaaggccccagaaatgtaaaaatgtatcgatatgctgacatcttaaaccctattttggattcgtgctctttcctatggatgaaggtgtgcgccatttaggggttgtttgtttgaagaatcaatccattctaggtaggtgattatcacgagaccatttcataaatttggtgaaatgaattcatttttt

SEQ ID NO: 25855 - DNA, 3699 bp, Zea Mays
aaaaacaaagcggaggagtctaaacaaagcgccagacagcctcctctcctccggccggaaaaaagcaacctcgcagatccgcggccccccctcctccgctcacaggttcaccgcatcgacgccactaccgtttccactgccgcctcgaccccgctccaccaattcttggtcaagccgctccagctaagagacggagagccctgcggaaaggggagacgaggggagggtgcaaaccctagccgtagaccgcgggctcctcctcctcgccggcggcggcggggatggagatggtggtggcggcgccggcgctccccgccgaagtggagagggctctcatccgggacataaccgtcgcggctgatgcccacgccaaggagggagacactttcttcctcatcaccaccaggtggtggcaaagttggattgattacctcattcaagatttgactggtgcaacaagtaatggttctcatcatcatgagtttggttcaaaaactcctagaaggccaggagctattgacaataccgatttaattgatgatgtgccacttgaagtctccaacatggagattgagatacatgataacttggttgagggtcgggattacatactgcttcctcagcaagtttgggaaaagttgcatggttggtatggtggaggaccaacattaccaagaaaggcaatcaatactggcttttctcaaactgatttggcgatagaagtttatcctctacgactgcagttaattctaatgtcaagaggagagcgaacctttataaggataagcaagaagggtacagttggccaactccataaaatggcctgtaaggtttttgacttggcaccagatgaggtatgcatttgggactattatggtcgaacaaagcattcattgatggatagcttggacaaaacccttgatgatgccaacattcagatggatcaaaacattctagttgaggtaaccactgatgcaagtggtagtctggatggtttggttaagcgaaacaatttttttgagagtgatgctccgaaatcaggattgccagatgagaattttgcagccaacaactatgcttccagaagctatagctctagtctgacaccaagcatctacctgcgatcacccaatggtgatctggataatgtgcatggttctagtggcatgatcacgaggggatcgcccttaggtcttacagggctacttaatcttggaaatacatgctatatgaacagtgccatacagtgtcttgtgcacacaccacagtttactaaatacttctgtgaagattatcatcgcgaaataaatcggcaaaatccactgggtaatgtgggtgaacttgcattagcttttggtgagctattgagaaaactctgggctcctggaggacgtgcccctgtttcacctagaccattcaaaatgaagctttctcggtttgcatctcagttcagtggatacaaccagcatgattcacaggagctgttggcgttcctattggatggactccatgaagatttgaatcgtgtgaagcatagaccttacataaattcaggggatgctgatggaagatcagatgaagaagttgcagatgaatattgggcaaatcatattgccagaaataattcaatcattgttgatgtatgccaggggcagtacaagtccactttggtttgcccagtctgtgggaaggtttcagtgacttttgacccgttcatgtatctttccttgcccttacaatttgcctcaacccggagcgtgactgccgtggtgttttcttgtgatggtagtgttccaccaacaccattcactgtgaatgtaccaaaacaaggtttgacgattgtgtgtccttaaacattttggttgaatttatctacagatacggaatcataagatctaccgttttattgatgatccagtgcttcagctgtctacaataagtgatgatgatcatctggcagtttataagctcccaaagttggaaaagagggtgaattacattcagtttgtgcatcgtcatgaagatctggaccatggaaacaataacagcttgacatcttggaaaccgtacggtgttcctcttcttgcacaaatttctcgcaatgaaattgtcacgggttttgatatccatgagttggtccataaaatgcttgtgcccgtgctaaggaatccggactctctgcatttggctgttcaaagttctgtttccacaagaactcatagttatcataccgacagcagcaaatgtcagcttctgttggttgatgatagcaacacagtcattgaaaaatcaaatgatgctatcaggatcccacaatcttcacttgcaactgtattttttatcaactggcccaaggcagatctgaaaaagatagacactcatcatttagagtaccttccagaggtgtttatgtatgctccgcctgcgaagagaacccgtggtgaagctctgtcactctatgcatgcttggatgctttcttgagagaagaacctcttgtacctgaagacatgtggtactgtccaaggtgcaaggagcaaagacaagctagcaaaaagttggatttgtggagacttcctgaagtactagtcatacatctaaagagattttcatttagtaggtcaacaaaacaaaaactagaaacttttgttaattttccaatacatgacttggatttgacaaattacattgccaataagaagacttcagagcgccagatctatgagctgtatgctgtgagcaatcattatggcaacatggcaagtggacattatactgcacacattaagcttgtggatgagaatcggtggtacaacttcgatgatagccatgttgcttccattgatgaagatgaggtgaagactgctgcagcttatgtgctattctatagaagggtcagagaacaagacatagcaaggggaactagtaatggatctcagttatatgcaaaaagaagtcacggatatagccataggtaggctgatgattactgtggttcggtgcaagggggattctggaaatgacacccgcacgcctttagtcattgccaggagtatatggcttgctggaaaaaatgctcatcacgtgcagtcaatgcaccgttgtccagttgtcacagaagatatttcgtgcagtgctggtacaagatgggaattttgtatgaggtgagttgaaggagtaattgactctttatgataactgggtagcttcaacaggaacgccggggcttggtggcattttgttcgtctgttttcttctagaagagaaacaaggggaggcaagaaaacatttaggaaacaccttttcgttaatttgattttttatttccatttttagatttagctagtctgtacactgttgttggaaatgggtccgctgttgttggtcgatgcttgtggtggccaataatactacacccaactataccaggctctgcaatggcgaatcatggtgcacattatggtgctctgttgcgggaagaattgtagctgatgttgtacttatatactggcaaaaaggccccagaaatgtaaaaatgtatcgatatgctgacatcttaaaccctattttggattcgtgctctttcctatggatgaaggtgtgcgccatttaggggttgtttgtttgaagaatcaatccattctaggtaggtgattatcacgagaccatttcataaatttggtgaaatgaattcatttttt

SEQ ID NO: 25856 - DNA, 3737 bp, Zea Mays
gaaaaacaaagcggaggagtctaaacaaagcgccagacagcctcctctcctccggccggaaaaaagcaacctcgcagatccgcggccccccctcctccgctcacaggttcaccgcatcgacgccactaccgtttccactgccgcctcgaccccgctccaccaattcttggtcaagccgctccagctaagagacggagagccctgcggaaaggggagacgaggggagggtgcaaaccctagccgtagaccgcgggctcctcctcctcgccggcggcggcggggatggagatggtggtggcggcgccggcgctccccgccgaagtggagagggctctcatccgggacataaccgtcgcggctgatgcccacgccaaggagggagacactttcttcctcatcaccaccaggtggtggcaaagttggattgattacctcattcaagatttgactggtgcaacaagtaatggttctcatcatcatgagtttggttcaaaaactcctagaaggccaggagctattgacaataccgatttaattgatgatgtgccacttgaagtctccaacatggagattgagatacatgataacttggttgagggtcgggattacatactgcttcctcagcaagtttgggaaaagttgcatggttggtatggtggaggaccaacattaccaagaaaggcaatcaatactggcttttctcaaactgatttggcgatagaagtttatcctctacgactgcagttaattctaatgtcaagaggagagcgaacctttataaggataagcaagaagggtacagttggccaactccataaaatggcctgtaaggtttttgacttggcaccagatgaggtatgcatttgggactattatggtcgaacaaagcattcattgatggatagcttggacaaaacccttgatgatgccaacattcagatggatcaaaacattctagttgaggtaaccactgatgcaagtggtagtctggatggtttggttaagcgaaacaatttttttgagagtgatgctccgaaatcaggattgccagatgagaattttgcagccaacaactatgcttccagaagctatagctctagtctgacaccaagcatctacctgcgatcacccaatggtgatctggataatgtgcatggttctagtggcatgatcacgaggggatcgcccttaggtcttacagggctacttaatcttggaaatacatgctatatgaacagtgccatacagtgtcttgtgcacacaccacagtttactaaatacttctgtgaagattatcatcgcgaaataaatcggcaaaatccactgggtaatgtgtcatgtagggtgaacttgcattagcttttggtgagctattgagaaaactctgggctcctggaggacgtgcccctgtttcacctagaccattcaaaatgaagctttctcggtttgcatctcagttcagtggatacaaccagcatgattcacaggagctgttggcgttcctattggatggactccatgaagatttgaatcgtgtgaagcatagaccttacataaattcaggggatgctgatggaagatcagatgaagaagttgcagatgaatattgggcaaatcatattgccagaaataattcaatcattgttgatgtatgccaggggcagtacaagtccactttggtttgcccagtctgtgggaaggtttcagtgacttttgacccgttcatgtatctttccttgcccttacaatttgcctcaacccggagcgtgactgccgtggtgttttcttgtgatggtagtgttccaccaacaccattcactgtgaatgtaccaaaacaaggtaggtgcagagatctattacaagcccttggtgctgcatgctcacttaaaaatggggagaaacttctaattgctgagatacggaatcataagatctaccgttttattgatgatccagtgcttcagctgtctacaataagtgatgatgatcatctggcagtttataagctcccaaagttggaaaagagggtgaattacattcagtttgtgcatcgtcatgaagatctggaccatggaaacaataacagcttgacatcttggaaaccgtacggtgttcctcttcttgcacaaatttctcgcaatgaaattgtcacgggttttgatatccatgagttggtccataaaatgcttgtgcccgtgctaaggaatccggactctctgcatttggctgttcaaagttctgtttccacaagaactcatagttatcataccgacagcagcaaatgtcagcttctgttggttgatgatagcaacacagtcattgaaaaatcaaatgatgctatcaggatcccacaatcttcacttgcaactgtattttttatcaactggcccaaggcagatctgaaaaagatagacactcatcatttagagtaccttccagaggtgtttatgtatgctccgcctgcgaagagaacccgtggtgaagctctgtcactctatgcatgcttggatgctttcttgagagaagaacctcttgtacctgaagacatgtggtactgtccaaggtgcaaggagcaaagacaagctagcaaaaagttggatttgtggagacttcctgaagtactagtcatacatctaaagagattttcatttagtaggtcaacaaaacaaaaactagaaacttttgttaattttccaatacatgacttggatttgacaaattacattgccaataagaagacttcagagcgccagatctatgagctgtatgctgtgagcaatcattatggcaacatggcaagtggacattatactgcacacattaagcttgtggatgagaatcggtggtacaacttcgatgatagccatgttgcttccattgatgaagatgaggtgaagactgctgcagcttatgtgctattctatagaagggtcagagaacaagacatagcaaggggaactagtaatggatctcagttatatgcaaaaagaagtcacggatatagccataggtaggctgatgattactgtggttcggtgcaagggggattctggaaatgacacccgcacgcctttagtcattgccaggagtatatggcttgctggaaaaaatgctcatcacgtgcagtcaatgcaccgttgtccagttgtcacagaagatatttcgtgcagtgctggtacaagatgggaattttgtatgaggtgagttgaaggagtaattgactctttatgataactgggtagcttcaacaggaacgccggggcttggtggcattttgttcgtctgttttcttctagaagagaaacaaggggaggcaagaaaacatttaggaaacaccttttcgttaatttgattttttatttccatttttagatttagctagtctgtacactgttgttggaaatgggtccgctgttgttggtcgatgcttgtggtggccaataatactacacccaactataccaggctctgcaatggcgaatcatggtgcacattatggtgctctgttgcgggaagaattgtagctgatgttgtacttatatactggcaaaaaggccccagaaatgtaaaaatgtatcgatatgctgacatcttaaaccctattttggattcgtgctctttcctatggatgaaggtgtgcgccatttaggggttgtttgtttgaagaatcaatccattctaggtaggtgattatcacgagaccatttcataaatttggtgaaatgaattcatttttt

SEQ ID NO: 25857 - DNA, 3647 bp, Zea Mays
gaaagaagaaaaacaaagcggaggagtctaaacaaagcgccagacagcctcctctcctccggccggaaaaaagcaacctcgcagatccgcggccccccctcctccgctcacaggttcaccgcatcgacgccactaccgtttccactgccgcctcgaccccgctccaccaattcttggtcaagccgctccagctaagagacggagagccctgcggaaaggggagacgaggggagggtgcaaaccctagccgtagaccgcgggctcctcctcctcgccggcggcggcggggatggagatggtggtggcggcgccggcgctccccgccgaagtggagagggctctcatccgggacataaccgtcgcggctgatgcccacgccaaggagggagacactttcttcctcatcaccaccaggtggtggcaaagttggattgattacctcattcaagatttgactggtgcaacaagtaatggttctcatcatcatgagtttggttcaaaaactcctagaaggccaggagctattgacaataccgatttaattgatgatgtgccacttgaagtctccaacatggagattgagatacatgataacttggttgagggtcgggattacatactgcttcctcagcaagtttgggaaaagttgcatggttggtatggtggaggaccaacattaccaagaaaggcaatcaatactggcttttctcaaactgatttggcgatagaagtttatcctctacgactgcagttaattctaatgtcaagaggagagcgaacctttataaggataagcaagaaggtatgcatttgggactattatggtcgaacaaagcattcattgatggatagcttggacaaaacccttgatgatgccaacattcagatggatcaaaacattctagttgaggtaaccactgatgcaagtggtagtctggatggtttggttaagcgaaacaatttttttgagagtgatgctccgaaatcaggattgccagatgagaattttgcagccaacaactatgcttccagaagctatagctctagtctgacaccaagcatctacctgcgatcacccaatggtgatctggataatgtgcatggttctagtggcatgatcacgaggggatcgcccttaggtcttacagggctacttaatcttggaaatacatgctatatgaacagtgccatacagtgtcttgtgcacacaccacagtttactaaatacttctgtgaagattatcatcgcgaaataaatcggcaaaatccactgggtaatgtgggtgaacttgcattagcttttggtgagctattgagaaaactctgggctcctggaggacgtgcccctgtttcacctagaccattcaaaatgaagctttctcggtttgcatctcagttcagtggatacaaccagcatgattcacaggagctgttggcgttcctattggatggactccatgaagatttgaatcgtgtgaagcatagaccttacataaattcaggggatgctgatggaagatcagatgaagaagttgcagatgaatattgggcaaatcatattgccagaaataattcaatcattgttgatgtatgccaggggcagtacaagtccactttggtttgcccagtctgtgggaaggtttcagtgacttttgacccgttcatgtatctttccttgcccttacaatttgcctcaacccggagcgtgactgccgtggtgttttcttgtgatggtagtgttccaccaacaccattcactgtgaatgtaccaaaacaaggtttgacgattgtgtgtccttaaacattttggttgaatttatctacagatacggaatcataagatctaccgttttattgatgatccagtgcttcagctgtctacaataagtgatgatgatcatctggcagtttataagctcccaaagttggaaaagagggtgaattacattcagtttgtgcatcgtcatgaagatctggaccatggaaacaataacagcttgacatcttggaaaccgtacggtgttcctcttcttgcacaaatttctcgcaatgaaattgtcacgggttttgatatccatgagttggtccataaaatgcttgtgcccgtgctaaggaatccggactctctgcatttggctgttcaaagttctgtttccacaagaactcatagttatcataccgacagcagcaaatgtcagcttctgttggttgatgatagcaacacagtcattgaaaaatcaaatgatgctatcaggatcccacaatcttcacttgcaactgtattttttatcaactggcccaaggcagatctgaaaaagatagacactcatcatttagagtaccttccagaggtgtttatgtatgctccgcctgcgaagagaacccgtggtgaagctctgtcactctatgcatgcttggatgctttcttgagagaagaacctcttgtacctgaagacatgtggtactgtccaaggtgcaaggagcaaagacaagctagcaaaaagttggatttgtggagacttcctgaagtactagtcatacatctaaagagattttcatttagtaggtcaacaaaacaaaaactagaaacttttgttaattttccaatacatgacttggatttgacaaattacattgccaataagaagacttcagagcgccagatctatgagctgtatgctgtgagcaatcattatggcaacatggcaagtggacattatactgcacacattaagcttgtggatgagaatcggtggtacaacttcgatgatagccatgttgcttccattgatgaagatgaggtgaagactgctgcagcttatgtgctattctatagaagggtcagagaacaagacatagcaaggggaactagtaatggatctcagttatatgcaaaaagaagtcacggatatagccataggtaggctgatgattactgtggttcggtgcaagggggattctggaaatgacacccgcacgcctttagtcattgccaggagtatatggcttgctggaaaaaatgctcatcacgtgcagtcaatgcaccgttgtccagttgtcacagaagatatttcgtgcagtgctggtacaagatgggaattttgtatgaggtgagttgaaggagtaattgactctttatgataactgggtagcttcaacaggaacgccggggcttggtggcattttgttcgtctgttttcttctagaagagaaacaaggggaggcaagaaaacatttaggaaacaccttttcgttaatttgattttttatttccatttttagatttagctagtctgtacactgttgttggaaatgggtccgctgttgttggtcgatgcttgtggtggccaataatactacacccaactataccaggctctgcaatggcgaatcatggtgcacattatggtgctctgttgcgggaagaattgtagctgatgttgtacttatatactggcaaaaaggccccagaaatgtaaaaatgtatcgatatgctgacatcttaaaccctattttggattcgtgctctttcctatggatgaaggtgtgcgccatttaggggttgtttgtttgaagaatcaatccattctaggtaggtgattatcacgagaccatttcataaatttggtgaaatgaattcatttttt

SEQ ID NO: 25858 - DNA, 3718 bp, Zea Mays
aaaaaaatccttatacaaaatcctgcgttgcaaggacctgttaatcacgggtcgagaaggaaagaagaaaaacaaagcggaggagtctaaacaaagcgccagacagcctcctctcctccggccggaaaaaagcaacctcgcagatccgcggccccccctcctccgctcacaggttcaccgcatcgacgccactaccgtttccactgccgcctcgaccccgctccaccaattcttggtcaagccgctccagctaagagacggagagccctgcggaaaggggagacgaggggagggtgcaaaccctagccgtagaccgcgggctcctcctcctcgccggcggcggcggggatggagatggtggtggcggcgccggcgctccccgccgaagtggagagggctctcatccgggacataaccgtcgcggctgatgcccacgccaaggagggagacactttcttcctcatcaccaccaggtggtggcaaagttggattgattacctcattcaagatttgactggtgcaacaagtaatggttctcatcatcatgagtttggttcaaaaactcctagaaggccaggagctattgacaataccgatttaattgatgatgtgccacttgaagtctccaacatggagattgagatacatgataacttggttgagggtcgggattacatactgcttcctcagcaagtttgggaaaagttgcatggttggtatggtggaggaccaacattaccaagaaaggcaatcaatactggcttttctcaaactgatttggcgatagaagtttatcctctacgactgcagttaattctaatgtcaagaggagagcgaacctttataaggataagcaagaagggtacagttggccaactccataaaatggcctgtaaggtttttgacttggcaccagatgaggtatgcatttgggactattatggtcgaacaaagcattcattgatggatagcttggacaaaacccttgatgatgccaacattcagatggatcaaaacattctagttgaggtaaccactgatgcaagtggtagtctggatggtttggttaagcgaaacaatttttttgagagtgatgctccgaaatcaggattgccagatgagaattttgcagccaacaactatgcttccagaagctatagctctagtctgacaccaagcatctacctgcgatcacccaatggtgatctggataatgtgcatggttctagtggcatgatcacgaggggatcgcccttaggtcttacagggctacttaatcttggaaatacatgctatatgaacagtgccatacagtgtcttgtgcacacaccacagtttactaaatacttctgtgaagattatcatcgcgaaataaatcggcaaaatccactgggtaatgtgggtgaacttgcattagcttttggtgagctattgagaaaactctgggctcctggaggacgtgcccctgtttcacctagaccattcaaaatgaagctttctcggtttgcatctcagttcagtggatacaaccagcatgattcacaggagctgttggcgttcctattggatggactccatgaagatttgaatcgtgtgaagcatagaccttacataaattcaggggatgctgatggaagatcagatgaagaagttgcagatgaatattgggcaaatcatattgccagaaataattcaatcattgttgatgtatgccaggggcagtacaagtccactttggtttgcccagtctgtgggaaggtttcagtgacttttgacccgttcatgtatctttccttgcccttacaatttgcctcaacccggagcgtgactgccgtggtgttttcttgtgatggtagtgttccaccaacaccattcactgtgaatgtaccaaaacaagatacggaatcataagatctaccgttttattgatgatccagtgcttcagctgtctacaataagtgatgatgatcatctggcagtttataagctcccaaagttggaaaagagggtgaattacattcagtttgtgcatcgtcatgaagatctggaccatggaaacaataacagcttgacatcttggaaaccgtacggtgttcctcttcttgcacaaatttctcgcaatgaaattgtcacgggttttgatatccatgagttggtccataaaatgcttgtgcccgtgctaaggaatccggactctctgcatttggctgttcaaagttctgtttccacaagaactcatagttatcataccgacagcagcaaatgtcagcttctgttggttgatgatagcaacacagtcattgaaaaatcaaatgatgctatcaggatcccacaatcttcacttgcaactgtattttttatcaactggcccaaggcagatctgaaaaagatagacactcatcatttagagtaccttccagaggtgtttatgtatgctccgcctgcgaagagaacccgtggtgaagctctgtcactctatgcatgcttggatgctttcttgagagaagaacctcttgtacctgaagacatgtggtactgtccaaggtgcaaggagcaaagacaagctagcaaaaagttggatttgtggagacttcctgaagtactagtcatacatctaaagagattttcatttagtaggtcaacaaaacaaaaactagaaacttttgttaattttccaatacatgacttggatttgacaaattacattgccaataagaagacttcagagcgccagatctatgagctgtatgctgtgagcaatcattatggcaacatggcaagtggacattatactgcacacattaagcttgtggatgagaatcggtggtacaacttcgatgatagccatgttgcttccattgatgaagatgaggtgaagactgctgcagcttatgtgctattctatagaagggtcagagaacaagacatagcaaggggaactagtaatggatctcagttatatgcaaaaagaagtcacggatatagccataggtaggctgatgattactgtggttcggtgcaagggggattctggaaatgacacccgcacgcctttagtcattgccaggagtatatggcttgctggaaaaaatgctcatcacgtgcagtcaatgcaccgttgtccagttgtcacagaagatatttcgtgcagtgctggtacaagatgggaattttgtatgaggtgagttgaaggagtaattgactctttatgataactgggtagcttcaacaggaacgccggggcttggtggcattttgttcgtctgttttcttctagaagagaaacaaggggaggcaagaaaacatttaggaaacaccttttcgttaatttgattttttatttccatttttagatttagctagtctgtacactgttgttggaaatgggtccgctgttgttggtcgatgcttgtggtggccaataatactacacccaactataccaggctctgcaatggcgaatcatggtgcacattatggtgctctgttgcgggaagaattgtagctgatgttgtacttatatactggcaaaaaggccccagaaatgtaaaaatgtatcgatatgctgacatcttaaaccctattttggattcgtgctctttcctatggatgaaggtgtgcgccatttaggggttgtttgtttgaagaatcaatccattctaggtaggtgattatcacgagaccatttcataaatttggtgaaatgaattcatttttt

SEQ ID NO: 25859 - DNA, 3735 bp, Zea Mays
aaaaaaatccttatacaaaatcctgcgttgcaaggacctgttaatcacgggtcgagaaggaaagaagaaaaacaaagcggaggagtctaaacaaagcgccagacagcctcctctcctccggccggaaaaaagcaacctcgcagatccgcggccccccctcctccgctcacaggttcaccgcatcgacgccactaccgtttccactgccgcctcgaccccgctccaccaattcttggtcaagccgctccagctaagagacggagagccctgcggaaaggggagacgaggggagggtgcaaaccctagccgtagaccgcgggctcctcctcctcgccggcggcggcggggatggagatggtggtggcggcgccggcgctccccgccgaagtggagagggctctcatccgggacataaccgtcgcggctgatgcccacgccaaggagggagacactttcttcctcatcaccaccaggtggtggcaaagttggattgattacctcattcaagatttgactggtgcaacaagtaatggttctcatcatcatgagtttggttcaaaaactcctagaaggccaggagctattgacaataccgatttaattgatgatgtgccacttgaagtctccaacatggagattgagatacatgataacttggttgagggtcgggattacatactgcttcctcagcaagtttgggaaaagttgcatggttggtatggtggaggaccaacattaccaagaaaggcaatcaatactggcttttctcaaactgatttggcgatagaagtttatcctctacgactgcagttaattctaatgtcaagaggagagcgaacctttataaggataagcaagaaggtatgcatttgggactattatggtcgaacaaagcattcattgatggatagcttggacaaaacccttgatgatgccaacattcagatggatcaaaacattctagttgaggtaaccactgatgcaagtggtagtctggatggtttggttaagcgaaacaatttttttgagagtgatgctccgaaatcaggattgccagatgagaattttgcagccaacaactatgcttccagaagctatagctctagtctgacaccaagcatctacctgcgatcacccaatggtgatctggataatgtgcatggttctagtggcatgatcacgaggggatcgcccttaggtcttacagggctacttaatcttggaaatacatgctatatgaacagtgccatacagtgtcttgtgcacacaccacagtttactaaatacttctgtgaagattatcatcgcgaaataaatcggcaaaatccactgggtaatgtgggtgaacttgcattagcttttggtgagctattgagaaaactctgggctcctggaggacgtgcccctgtttcacctagaccattcaaaatgaagctttctcggtttgcatctcagttcagtggatacaaccagcatgattcacaggagctgttggcgttcctattggatggactccatgaagatttgaatcgtgtgaagcatagaccttacataaattcaggggatgctgatggaagatcagatgaagaagttgcagatgaatattgggcaaatcatattgccagaaataattcaatcattgttgatgtatgccaggggcagtacaagtccactttggtttgcccagtctgtgggaaggtttcagtgacttttgacccgttcatgtatctttccttgcccttacaatttgcctcaacccggagcgtgactgccgtggtgttttcttgtgatggtagtgttccaccaacaccattcactgtgaatgtaccaaaacaaggtaggtgcagagatctattacaagcccttggtgctgcatgctcacttaaaaatggggagaaacttctaattgctgagatacggaatcataagatctaccgttttattgatgatccagtgcttcagctgtctacaataagtgatgatgatcatctggcagtttataagctcccaaagttggaaaagagggtgaattacattcagtttgtgcatcgtcatgaagatctggaccatggaaacaataacagcttgacatcttggaaaccgtacggtgttcctcttcttgcacaaatttctcgcaatgaaattgtcacgggttttgatatccatgagttggtccataaaatgcttgtgcccgtgctaaggaatccggactctctgcatttggctgttcaaagttctgtttccacaagaactcatagttatcataccgacagcagcaaatgtcagcttctgttggttgatgatagcaacacagtcattgaaaaatcaaatgatgctatcaggatcccacaatcttcacttgcaactgtattttttatcaactggcccaaggcagatctgaaaaagatagacactcatcatttagagtaccttccagaggtgtttatgtatgctccgcctgcgaagagaacccgtggtgaagctctgtcactctatgcatgcttggatgctttcttgagagaagaacctcttgtacctgaagacatgtggtactgtccaaggtgcaaggagcaaagacaagctagcaaaaagttggatttgtggagacttcctgaagtactagtcatacatctaaagagattttcatttagtaggtcaacaaaacaaaaactagaaacttttgttaattttccaatacatgacttggatttgacaaattacattgccaataagaagacttcagagcgccagatctatgagctgtatgctgtgagcaatcattatggcaacatggcaagtggacattatactgcacacattaagcttgtggatgagaatcggtggtacaacttcgatgatagccatgttgcttccattgatgaagatgaggtgaagactgctgcagcttatgtgctattctatagaagggtcagagaacaagacatagcaaggggaactagtaatggatctcagttatatgcaaaaagaagtcacggatatagccataggtaggctgatgattactgtggttcggtgcaagggggattctggaaatgacacccgcacgcctttagtcattgccaggagtatatggcttgctggaaaaaatgctcatcacgtgcagtcaatgcaccgttgtccagttgtcacagaagatatttcgtgcagtgctggtacaagatgggaattttgtatgaggtgagttgaaggagtaattgactctttatgataactgggtagcttcaacaggaacgccggggcttggtggcattttgttcgtctgttttcttctagaagagaaacaaggggaggcaagaaaacatttaggaaacaccttttcgttaatttgattttttatttccatttttagatttagctagtctgtacactgttgttggaaatgggtccgctgttgttggtcgatgcttgtggtggccaataatactacacccaactataccaggctctgcaatggcgaatcatggtgcacattatggtgctctgttgcgggaagaattgtagctgatgttgtacttatatactggcaaaaaggccccagaaatgtaaaaatgtatcgatatgctgacatcttaaaccctattttggattcgtgctctttcctatggatgaaggtgtgcgccatttaggggttgtttgtttgaagaatcaatccattctaggtaggtgattatcacgagaccatttcataaatttggtgaaatgaattcatttttt

SEQ ID NO: 25860 - DNA, 3826 bp, Zea Mays
aagaaaaattactcatttttctctcaatgccaaaaaaatccttatacaaaatcctgcgttgcaaggacctgttaatcacgggtcgagaaggaaagaagaaaaacaaagcggaggagtctaaacaaagcgccagacagcctcctctcctccggccggaaaaaagcaacctcgcagatccgcggccccccctcctccgctcacaggttcaccgcatcgacgccactaccgtttccactgccgcctcgaccccgctccaccaattcttggtcaagccgctccagctaagagacggagagccctgcggaaaggggagacgaggggagggtgcaaaccctagccgtagaccgcgggctcctcctcctcgccggcggcggcggggatggagatggtggtggcggcgccggcgctccccgccgaagtggagagggctctcatccgggacataaccgtcgcggctgatgcccacgccaaggagggagacactttcttcctcatcaccaccaggtggtggcaaagttggattgattacctcattcaagatttgactggtgcaacaagtaatggttctcatcatcatgagtttggttcaaaaactcctagaaggccaggagctattgacaataccgatttaattgatgatgtgccacttgaagtctccaacatggagattgagatacatgataacttggttgagggtcgggattacatactgcttcctcagcaagtttgggaaaagttgcatggttggtatggtggaggaccaacattaccaagaaaggcaatcaatactggcttttctcaaactgatttggcgatagaagtttatcctctacgactgcagttaattctaatgtcaagaggagagcgaacctttataaggataagcaagaagggtacagttggccaactccataaaatggcctgtaaggtttttgacttggcaccagatgaggtatgcatttgggactattatggtcgaacaaagcattcattgatggatagcttggacaaaacccttgatgatgccaacattcagatggatcaaaacattctagttgaggtaaccactgatgcaagtggtagtctggatggtttggttaagcgaaacaatttttttgagagtgatgctccgaaatcaggattgccagatgagaattttgcagccaacaactatgcttccagaagctatagctctagtctgacaccaagcatctacctgcgatcacccaatggtgatctggataatgtgcatggttctagtggcatgatcacgaggggatcgcccttaggtcttacagggctacttaatcttggaaatacatgctatatgaacagtgccatacagtgtcttgtgcacacaccacagtttactaaatacttctgtgaagattatcatcgcgaaataaatcggcaaaatccactgggtaatgtgggtgaacttgcattagcttttggtgagctattgagaaaactctgggctcctggaggacgtgcccctgtttcacctagaccattcaaaatgaagctttctcggtttgcatctcagttcagtggatacaaccagcatgattcacaggagctgttggcgttcctattggatggactccatgaagatttgaatcgtgtgaagcatagaccttacataaattcaggggatgctgatggaagatcagatgaagaagttgcagatgaatattgggcaaatcatattgccagaaataattcaatcattgttgatgtatgccaggggcagtacaagtccactttggtttgcccagtctgtgggaaggtttcagtgacttttgacccgttcatgtatctttccttgcccttacaatttgcctcaacccggagcgtgactgccgtggtgttttcttgtgatggtagtgttccaccaacaccattcactgtgaatgtaccaaaacaaggtaggtgcagagatctattacaagcccttggtgctgcatgctcacttaaaaatggggagaaacttctaattgctgagatacggaatcataagatctaccgttttattgatgatccagtgcttcagctgtctacaataagtgatgatgatcatctggcagtttataagctcccaaagttggaaaagagggtgaattacattcagtttgtgcatcgtcatgaagatctggaccatggaaacaataacagcttgacatcttggaaaccgtacggtgttcctcttcttgcacaaatttctcgcaatgaaattgtcacgggttttgatatccatgagttggtccataaaatgcttgtgcccgtgctaaggaatccggactctctgcatttggctgttcaaagttctgtttccacaagaactcatagttatcataccgacagcagcaaatgtcagcttctgttggttgatgatagcaacacagtcattgaaaaatcaaatgatgctatcaggatcccacaatcttcacttgcaactgtattttttatcaactggcccaaggcagatctgaaaaagatagacactcatcatttagagtaccttccagaggtgtttatgtatgctccgcctgcgaagagaacccgtggtgaagctctgtcactctatgcatgcttggatgctttcttgagagaagaacctcttgtacctgaagacatgtggtactgtccaaggtgcaaggagcaaagacaagctagcaaaaagttggatttgtggagacttcctgaagtactagtcatacatctaaagagattttcatttagtaggtcaacaaaacaaaaactagaaacttttgttaattttccaatacatgacttggatttgacaaattacattgccaataagaagacttcagagcgccagatctatgagctgtatgctgtgagcaatcattatggcaacatggcaagtggacattatactgcacacattaagcttgtggatgagaatcggtggtacaacttcgatgatagccatgttgcttccattgatgaagatgaggtgaagactgctgcagcttatgtgctattctatagaagggtcagagaacaagacatagcaaggggaactagtaatggatctcagttatatgcaaaaagaagtcacggatatagccataggtaggctgatgattactgtggttcggtgcaagggggattctggaaatgacacccgcacgcctttagtcattgccaggagtatatggcttgctggaaaaaatgctcatcacgtgcagtcaatgcaccgttgtccagttgtcacagaagatatttcgtgcagtgctggtacaagatgggaattttgtatgaggtgagttgaaggagtaattgactctttatgataactgggtagcttcaacaggaacgccggggcttggtggcattttgttcgtctgttttcttctagaagagaaacaaggggaggcaagaaaacatttaggaaacaccttttcgttaatttgattttttatttccatttttagatttagctagtctgtacactgttgttggaaatgggtccgctgttgttggtcgatgcttgtggtggccaataatactacacccaactataccaggctctgcaatggcgaatcatggtgcacattatggtgctctgttgcgggaagaattgtagctgatgttgtacttatatactggcaaaaaggccccagaaatgtaaaaatgtatcgatatgctgacatcttaaaccctattttggattcgtgctctttcctatggatgaaggtgtgcgccatttaggggttgtttgtttgaagaatcaatccattctaggtaggtgattatcacgagaccatttcataaatttggtgaaatgaattcatttttt

SEQ ID NO: 25861 - DNA, 2047 bp, Zea Mays
agacaaacaagtggagacctggcctggcttcccccacctatctggcgctctcctgcccctctactaaaacgtgggcattaacaaggacgcccccatggaggcatggacctccaatggcgaccctgccgacctcgcaccggcctggcccctcatatatcccacgcttatagatatcgcagaacagtgtgcactgtctctcccatgctttctcttgcgttcgattcaggtccggctggagccatggcaacggccccaggagctaccccgtgattgggtgcctggtcgacttctacaagaaccggtggcggctgctggactggtacactgagctgctggcggcgtcgccgacgcagacgatcgtggtggaccggctgggcgcccggcgcaccgtggtgaccgcgaaccccgtgaacgttgagcatattctcaagagcaacttcggcaactaccccaaggggaagcccttcaccgacatcctcggcgacctgctgggcaccggcatcttcaacgtcgacggcgagctgtggtacgcgcagcggaagctggtgagccacgagttctcggcgcgcgcgctccgggagctggagttcgccgtgctcgaggacgaggcgcgggagcgccttgtgcccgccctgggcctggcggctgcgcgcggcgacgtcgtggacatgcaggacctgctccggcgcttctcgttcgacgtcatctgccgcgtgtcgctgggcgttgaccccgggtgcctggaccctgcattgccggcgccgaggctggccgcggcgttcgacgcggcggcggggatcatcgccaggcgcggcgcggcgcccgtggccgccgtgtggaaggcgaagcgcgcgctggacgtgggctcggagcggcagctgcgcgaggagatcgcggtcatccacgaggccgtcatggacctcatccacatccgcaagaaggagtgcgggctgcgggtcaacggcggcgacggacggaggagcgacctgctgtcgcggatgatcgaatgcgggtacccggacgaggcgatccgcgacatggtcatcagcttcatcatggccggccgggacaccacgtcgtcggcgctgacctggttcttctggctgctcacccgccaccgcgacgtggagcgcgaggtcctgcgggagatcacaggcggcggcgcgagccacgccgccgccggcgggcagggcaagatgcgcgcgctccacgcggcgctgtgcgagacgatgcggctgtacccgccggtggcgtgggactcgaagcacgcggcggcgggcgacgtgctgcccgacggcacccgcgtggagcgcggcgaccgcgtcacctacttccagtacgggatggggcggatggagtccatctggggcgctgatgccggcgagttcagcctgcggcgctggctgtccattattccggaggagaacgcggcgccagcgccacccgccgcggtggccggcttgtcgccgttcaagtacccggtgttccaggcggggccgcggacgtgcctcggcaaggagatggccttcgtgcagatgaagttcgtggccagcaccgtgctccggcggttcgagctcgtccccgtggacgaggggcgtgtgccggtgttcctgcccctgatgacggcacacatgggggacgggctcaacgtgacggtgaggagcagatcaggggaacacgttgcctctgctgcgtcgtctgggaattgagtattatacccggcctcctcatgtaagtagtacgacaaattaaaaccaggattatttatttagttactactactatatgaaaactgcttcgttattactactagctatgaaattcatgaggaccacgtactgttttattagctgcgtagattgcagacaacagtgtacacttttgtaccatgtcgatcatgatcatatgaaagagatacacaggaggatacatatttgcagctatacgccctcgctcgcatgtatatacaccaagctatttatttctgttcacaaacactcagtttgtatgtatctatctactcgtatatattaatatatataaaaat

SEQ ID NO: 25862 - DNA, 1356 bp, Zea Mays
attgatcttcactttgtcagagaacgagttgctgtcgttgatctttgggtcctacatgtgtcgacgacatcatatgtgcacttctctatactactgtatatggacaaaggaggatccgagtcataaacctttcactttcatgcacaaatttgcttgccaatcttttccggtatgctgatttggagacacagttttcatgcttcctgaagcaagctgctaatggcatcccgacatctccattacctcgtattcgggatgaagcaacaaatacatgcataaatattcttcaatcttaccgcaaacactgtgcatctgtaacttcatcagggcagttgattctcccagaggctctaaaactgctgcccttatatactttggcactggtcaaaagcttaggcttgagaaccgatgggcgattggatgaccgttcctactggatatctgtagcctcgtcagtttctgtagtactagctgttcctttggtgttccctagattgattcctatccacgatctcacatcaagggatgacgatgattctcttatacccagtccccttatgctcaatagtgagaatgtacaagaggatggagtttatttattggaaaatggtgaggatggtttaatttatgtaggaaacatggtaaatccggctaccctggaacaaatattcggtgtctcttctttggctgcattaccagcccagttggcgttggagcaatttgacaacgaactctcgaggaaggttaacgaagttgtaaatgaaataagacgccagaggtgctcatacttgaggttaagacaatgcagaaggggtgaaccatctggtgattttttccggtcatttttagtggaggacaaggcgcctggcgtcttctcctacgtcgagttccttgtgcatgtccacaggcaaatccaaagcaagatgacctgagggcccaagatcctggttgtaacatttcggtcagtagatggattgtatgtaccccgggagtttgatttctgcataaggagacagcaaagtggcgattccatatcaatgtggagcataaagagtgctcggataatagaactcaggaatagaggcttgtggtgtttacagcaccgtttttggagtgggtggtatatgtgttgtatacagagatgagaggggtggagctttagtttttgtgttgtcttttatcatcgtgcatccttgtttatctcatgtgcaaaaagtgttggattatgttggttggaaggttatagaggtttcgtaataaaatgcacctagctaatcgatagtatgaatcagatatactataatttaactattatgtttgcctattcgaatttaaccctgtgatgatgttttgtga

SEQ ID NO: 25863 - DNA, 1507 bp, Zea Mays
gtggtacccatctttatttctattgtttaatttttcatcttgttgttgtacttttgttaagctctatttttttcttatgattatttctgactgttttttggccattatttatttattttgcaggtctactactactatccgttttctgctctttcagatccagccaagctcttcaatgatctcagatggaatatcagtagaccccagggttttgaggctgttatgcgtgtaaggtgcagtcagggtctccaagttcaggactattatggcaatttctgcaagcgtgttcccaccgatattgatcttccagcgattgattctgacaaaactgtgatggtcacgtttaagcatgatgacaagttacctgaaaatgtggaatgtggcttccagtgtgcacttctctatactactgtatatggacaaaggaggatccgagtcataaacctttcactttcatgcacaaatttgcttgccaatcttttccggtatgctgatttggagacacagttttcatgcttcctgaagcaagcactggtcaaaagcttaggcttgagaaccgatgggcgattggatgaccgttcctactggatatctgtagcctcgtcagtttctgtagtactagctgttcctttggtgttccctagattgattcctatccacgatctcacatcaagggatgacgatgattctcttatacccagtccccttatgctcaatagtgagaatgtacaagaggatggagtttatttattggaaaatggtgaggatggtttaatttatgtaggaaacatggtaaatccggctaccctggaacaaatattcggtgtctcttctttggctgcattaccagcccagttggcgttggagcaatttgacaacgaactctcgaggaaggttaacgaagttgtaaatgaaataagacgccagaggtgctcatacttgaggttaagacaatgcagaaggggtgaaccatctggtgattttttccggtcatttttagtggaggacaaggcgcctggcgtcttctcctacgtcgagttccttgtgcatgtccacaggcaaatccaaagcaagatgacctgagggcccaagatcctggttgtaacatttcggtcagtagatggattgtatgtaccccgggagtttgatttctgcataaggagacagcaaagtggcgattccatatcaatgtggagcataaagagtgctcggataatagaactcaggaatagaggcttgtggtgtttacagcaccgtttttggagtgggtggtatatgtgttgtatacagagatgagaggggtggagctttagtttttgtgttgtcttttatcatcgtgcatccttgtttatctcatgtgcaaaaagtgttggattatgttggttggaaggttatagaggtttcgtaataaaatgcacctagctaatcgatagtatgaatcagatatactataatttaactattatgtttgcctattcgaatttaaccctgtgatgatgttttgtga

SEQ ID NO: 25864 - DNA, 2120 bp, Zea Mays
tgtgcagccctcctgcgttatccgagaaaaagaaggtcctcggacaatggttggaattgcaacatttgattctgctattcacttctacagtcttaaacgtgctcagcagcagcctttgatgctcatcgttcctgatgttcaagatgtatatacacctcttcagactgatcttattctcccagtttctgagtgccgggacaatctggagcagttgctagaaagtatcccaagcatgtttgagaataatagggttgctgattctgcttttggagcagctatgaaggctggcttcctggcgatgaaatctaccggcggaaaacttctggttttccaatcagtgctgccatcacttgggattggttctttatcagctagggaagctgaaggtagagcaaacattacaactggtgacaaggaagcccataaacttttgcagcctgttgacaacaccctcaagacaatggcactagaatttgctgagtatcaggtctgtgtggatgtattcctcaccacacaatcctatgttgatattgcttctatatccgttgtgcctcaaactacaggtggccgggtctactactactatccgttttctgctctttcagatccagccaagctcttcaatgatctcagatggaatatcagtagaccccagggttttgaggctgttatgcgtgtaaggtgcagtcagggtctccaagttcaggactattatggcaatttctgcaagcgtgttcccaccgatattgatcttccagcgattgattctgacaaaactgtgatggtcacgtttaagcatgatgacaagttacctgaaaatgtggaatgtggcttccagtgtgcacttctctatactactgtatatggacaaaggaggatccgagtcataaacctttcactttcatgcacaaatttgcttgccaatcttttccggtatgctgatttggagacacagttttcatgcttcctgaagcaagctgctaatggcatcccgacatctccattacctcgtattcgggatgaagcaacaaatacatgcataaatattcttcaatcttaccgcaaacactgtgcatctgtaacttcatcagggcagttgattctcccagaggctctaaaactgctgcccttatatactttggcactggtcaaaagcttaggcttgagaaccgatgggcgattggatgaccgttcctactggatatctgtagcctcgtcagtttctgtagtactagctgttcctttggtgttccctagattgattcctatccacgatctcacatcaagggatgacgatgattctcttatacccagtccccttatgctcaatagtgagaatgtacaagaggatggagtttatttattggaaaatggtgaggatggtttaatttatgtaggaaacatggtaaatccggctaccctggaacaaatattcggtgtctcttctttggctgcattaccagcccagttggcgttggagcaatttgacaacgaactctcgaggaaggttaacgaagttgtaaatgaaataagacgccagaggtgctcatacttgaggttaagacaatgcagaaggggtgaaccatctggtgattttttccggtcatttttagtggaggacaaggcgcctggcgtcttctcctacgtcgagttccttgtgcatgtccacaggcaaatccaaagcaagatgacctgagggcccaagatcctggttgtaacatttcggtcagtagatggattgtatgtaccccgggagtttgatttctgcataaggagacagcaaagtggcgattccatatcaatgtggagcataaagagtgctcggataatagaactcaggaatagaggcttgtggtgtttacagcaccgtttttggagtgggtggtatatgtgttgtatacagagatgagaggggtggagctttagtttttgtgttgtcttttatcatcgtgcatccttgtttatctcatgtgcaaaaagtgttggattatgttggttggaaggttatagaggtttcgtaataaaatgcacctagctaatcgatagtatgaatcagatatactataatttaactattatgtttgcctattcgaatttaaccctgtgatgatgttttgtga

SEQ ID NO: 25865 - DNA, 4263 bp, Zea Mays
atggcgtcgtcgccgcagccgccgccgccgttcgccgcgcaaaaccctaccgcgcagggctcgggccaggggccgccaggctccggggtgggggctctccccggggcgttcgccaacctccagatctcccgcggcgcggccccgccgcccggcgccccgcgggggctcacgccgcagcaggcaccgcccaccttagccgcgcgtccgggccccccaccgtccgctgcccgtcccgccttccctggcagcccgcccgcaccgccattcgtgcgggcgccgacaccgtcaacttccgcctcgccgccctttggcggacagcctggggtaatgtcccagccgccgccaccgttcggagggcctccaggtgcgtcgtctcagccgccgccgccgttcggtgtcccccccggggtggtgtcccaggccccttccctgtttggaggccctcctgcgacggcatcgcaggcgtcttcgccttttgttggtcactctgttgctgcgtctcaggcggcaccattcggtgccccccctgttgcgggttcgcatcctccacccttcggtgggcctcctggagcggggcctcagccagcaccgccattgcggcagacattcgctggccagcctgggccaatggccgcagcggcagcttggacgcagccacctccacctagctttggagccccgcaacagcctccaccaccattcggttcgcggccagctgggcagccgctctttgctacacaatcagcgcctgcggcacaacaactgccattcatggggccacccagggtaaatgccccggcgtttggacctccgtcttggcaaactcagggagctgggtctggtgcaatgcagccacctttgagaatgccaggcattcctggtagcatgcagccaaacacactaggaccccctggcaccccgactataccttattctccacatgctggaacccaggtatcaaccccgtccaaaattgatcctaatcaaattccacgtcccatgcgtgaatcatcagtcatcatttatgagacccgtcaaggtggccaagcaaccattcccccggctgcatctagtgaatttattgtgaaggacactgggaactgtagcccccgtctaatgcgctgcactgtgaatcaaataccatgtactggggatctcttgactacttcgggcatgcctttagctctgatggttcaacctttttctcttcctcacccatctgaggaacatattcagcttgtggacttcggagagatgggacccattcggtgttctcgttgcaaagcgtacataaaccctttcatgaaatttgttgaccaagggaggcatttcatctgtaacttatgtggattcagaaatgatactcctagagactacatgtgcaacttagggcctgatggtaggcgacgtgatgctgatgacaggcctgaattgtctagaggaacagttgaatttgttgctacgaaggaatttctggttcgtgatccaatgcctgctgtatacttcttccttattgatgtctctatgaatgctatacaaactggtgcaactgctgcagcttgcagtgctatttctcaggctatttcagatctgccggaaggtcctcggacaatggttggaattgcaacatttgattctgctattcacttctacagtcttaaacgtgctcagcagcagcctttgatgctcatcgttcctgatgttcaagatgtatatacacctcttcagactgatcttattctcccagtttctgagtgccgggacaatctggagcagttgctagaaagtatcccaagcatgtttgagaataatagggttgctgattctgcttttggagcagctatgaaggctggcttcctggcgatgaaatctaccggcggaaaacttctggttttccaatcaggtatgcttgttaacttatcagagataagatgcatatttatgctgactctgttaagtggtttcttagtttacttgggcgctttttttcctaatgcatgctggcttatttggagagctatattttcaatttgttagtttggtcttcgtagtgagtatatttgcattctacttcaggaagttttgcctgttattggtaccagattggaacggcagtgctatatcaaatgacctagcgctatacacctgccacataaatttatagttggtcttcgtaagatatttgacagttttactttaagggctagtttgggaaccccaattttccaagggattttcattttcccaagggaaattagttcattttcccatgggaaaatagaaatctcttgataaattggtgttcccaaactagctctaagtctggcaagtggactcatgtttgttttttatcttaataaaggatttgtttcaattgctgctaatttgccgtacatatttctgtgagatttttttttaagtcttaaatttcgatgctcttgtgttaataatgtggcaatgtgcactgttggcacttggcagtgctgccatcacttgggattggttctttatcagctagggaagctgaaggtagagcaaacattacaactggtgacaaggaagcccataaacttttgcagcctgttgacaacaccctcaagacaatggcactagaatttgctgagtatcaggtctgtgtggatgtattcctcaccacacaatcctatgttgatattgcttctatatccgttgtgcctcaaactacaggtggccgggtctactactactatccgttttctgctctttcagatccagccaagctcttcaatgatctcagatggaatatcagtagaccccagggttttgaggctgttatgcgtgtaaggtgcagtcagggtctccaagttcaggactattatggcaatttctgcaagcgtgttcccaccgatattgatcttccagcgattgattctgacaaaactgtgatggtcacgtttaagcatgatgacaagttacctgaaaatgtggaatgtggcttccagtgtgcacttctctatactactgtatatggacaaaggaggatccgagtcataaacctttcactttcatgcacaaatttgcttgccaatcttttccggtatgctgatttggagacacagttttcatgcttcctgaagcaagctgctaatggcatcccgacatctccattacctcgtattcgggatgaagcaacaaatacatgcataaatattcttcaatcttaccgcaaacactgtgcatctgtaacttcatcagggcagttgattctcccagaggctctaaaactgctgcccttatatactttggcactggtcaaaagcttaggcttgagaaccgatgggcgattggatgaccgttcctactggatatctgtagcctcgtcagtttctgtagtactagctgttcctttggtgttccctagattgattcctatccacgatctcacatcaagggatgacgatgattctcttatacccagtccccttatgctcaatagtgagaatgtacaagaggatggagtttatttattggaaaatggtgaggatggtttaatttatgtaggaaacatggtaaatccggctaccctggaacaaatattcggtgtctcttctttggctgcattaccagcccagttggcgttggagcaatttgacaacgaactctcgaggaaggttaacgaagttgtaaatgaaataagacgccagaggtgctcatacttgaggttaagacaatgcagaaggggtgaaccatctggtgattttttccggtcatttttagtggaggacaaggcgcctggcgtcttctcctacgtcgagttccttgtgcatgtccacaggcaaatccaaagcaagatgacctgagggcccaagatcctggttgtaacatttcggtcagtagatggattgtatgtaccccgggagtttgatttctgcataaggagacagcaaagtggcgattccatatcaatgtggagcataaagagtgctcggataatagaactcaggaatagaggcttgtggtgtttacagcaccgtttttggagtgggtggtatatgtgttgtatacagagatgagaggggtggagctttagtttttgtgttgtcttttatcatcgtgcatccttgtttatctcatgtgcaaaaagtgttggattatgttggttggaaggttatagaggtttcgtaataaaatgcacctagctaatcgatagtatgaatcagatatactataatttaactattatgtttgcctattcgaatttaaccctgtgatgatgttttgtga

SEQ ID NO: 25866 - DNA, 3838 bp, Zea Mays
aaaaaagtttcgaaaaaagattaaaatgaaaaaaagacggcctgcacggcaggccagaccgccagaccggtcaggagcagagcacccgaccgcctttcctcccccgcctggccgcctgccaccgcgcgccagatcccgatctcgctgcgatccatggcgtcgtcgccgcagccgccgccgccgttcgccgcgcaaaaccctaccgcgcagggctcgggccaggggccgccaggctccggggtgggggctctccccggggcgttcgccaacctccagatctcccgcggcgcggccccgccgcccggcgccccgcgggggctcacgccgcagcaggcaccgcccaccttagccgcgcgtccgggccccccaccgtccgctgcccgtcccgccttccctggcagcccgcccgcaccgccattcgtgcgggcgccgacaccgtcaacttccgcctcgccgccctttggcggacagcctggggtaatgtcccagccgccgccaccgttcggagggcctccaggtgcgtcgtctcagccgccgccgccgttcggtgtcccccccggggtggtgtcccaggccccttccctgtttggaggccctcctgcgacggcatcgcaggcgtcttcgccttttgttggtcactctgttgctgcgtctcaggcggcaccattcggtgccccccctgttgcgggttcgcatcctccacccttcggtgggcctcctggagcggggcctcagccagcaccgccattgcggcagacattcgctggccagcctgggccaatggccgcagcggcagcttggacgcagccacctccacctagctttggagccccgcaacagcctccaccaccattcggttcgcggccagctgggcagccgctctttgctacacaatcagcgcctgcggcacaacaactgccattcatggggccacccagggtaaatgccccggcgtttggacctccgtcttggcaaactcagggagctgggtctggtgcaatgcagccacctttgagaatgccaggcattcctggtagcatgcagccaaacacactaggaccccctggcaccccgactataccttattctccacatgctggaacccaggtatcaaccccgtccaaaattgatcctaatcaaattccacgtcccatgcgtgaatcatcagtcatcatttatgagacccgtcaaggtggccaagcaaccattcccccggctgcatctagtgaatttattgtgaaggacactgggaactgtagcccccgtctaatgcgctgcactgtgaatcaaataccatgtactggggatctcttgactacttcgggcatgcctttagctctgatggttcaacctttttctcttcctcacccatctgaggaacatattcagcttgtggacttcggagagatgggacccattcggtgttctcgttgcaaagcgtacataaaccctttcatgaaatttgttgaccaagggaggcatttcatctgtaacttatgtggattcagaaatgatactcctagagactacatgtgcaacttagggcctgatggtaggcgacgtgatgctgatgacaggcctgaattgtctagaggaacagttgaatttgttgctacgaaggaatttctggttcgtgatccaatgcctgctgtatacttcttccttattgatgtctctatgaatgctatacaaactggtgcaactgctgcagcttgcagtgctatttctcaggctatttcagatctgccggaaggtcctcggacaatggttggaattgcaacatttgattctgctattcacttctacagtcttaaacgtgctcagcagcagcctttgatgctcatcgttcctgatgttcaagatgtatatacacctcttcagactgatcttattctcccagtttctgagtgccgggacaatctggagcagttgctagaaagtatcccaagcatgtttgagaataatagggttgctgattctgcttttggagcagctatgaaggctggcttcctggcgatgaaatctaccggcggaaaacttctggttttccaatcagtgctgccatcacttgggattggttctttatcagctagggaagctgaaggtagagcaaacattacaactggtgacaaggaagcccataaacttttgcagcctgttgacaacaccctcaagacaatggcactagaatttgctgagtatcaggtctgtgtggatgtattcctcaccacacaatcctatgttgatattgcttctatatccgttgtgcctcaaactacaggtggccgggtctactactactatccgttttctgctctttcagatccagccaagctcttcaatgatctcagatggaatatcagtagaccccagggttttgaggctgttatgcgtgtaaggtgcagtcagggtctccaagttcaggactattatggcaatttctgcaagcgtgttcccaccgatattgatcttccagcgattgattctgacaaaactgtgatggtcacgtttaagcatgatgacaagttacctgaaaatgtggaatgtggcttccagtgtgcacttctctatactactgtatatggacaaaggaggatccgagtcataaacctttcactttcatgcacaaatttgcttgccaatcttttccggtatgctgatttggagacacagttttcatgcttcctgaagcaagctgctaatggcatcccgacatctccattacctcgtattcgggatgaagcaacaaatacatgcataaatattcttcaatcttaccgcaaacactgtgcatctgtaacttcatcagggcagttgattctcccagaggctctaaaactgctgcccttatatactttggcactggtcaaaagcttaggcttgagaaccgatgggcgattggatgaccgttcctactggatatctgtagcctcgtcagtttctgtagtactagctgttcctttggtgttccctagattgattcctatccacgatctcacatcaagggatgacgatgattctcttatacccagtccccttatgctcaatagtgagaatgtacaagaggatggagtttatttattggaaaatggtgaggatggtttaatttatgtaggaaacatggtaaatccggctaccctggaacaaatattcggtgtctcttctttggctgcattaccagcccagttggcgttggagcaatttgacaacgaactctcgaggaaggttaacgaagttgtaaatgaaataagacgccagaggtgctcatacttgaggttaagacaatgcagaaggggtgaaccatctggtgattttttccggtcatttttagtggaggacaaggcgcctggcgtcttctcctacgtcgagttccttgtgcatgtccacaggcaaatccaaagcaagatgacctgagggcccaagatcctggttgtaacatttcggtcagtagatggattgtatgtaccccgggagtttgatttctgcataaggagacagcaaagtggcgattccatatcaatgtggagcataaagagtgctcggataatagaactcaggaatagaggcttgtggtgtttacagcaccgtttttggagtgggtggtatatgtgttgtatacagagatgagaggggtggagctttagtttttgtgttgtcttttatcatcgtgcatccttgtttatctcatgtgcaaaaagtgttggattatgttggttggaaggttatagaggtttcgtaataaaatgcacctagctaatcgatagtatgaatcagatatactataatttaactattatgtttgcctattcgaatttaaccctgtgatgatgttttgtga

SEQ ID NO: 25867 - DNA, 1604 bp, Zea Mays
atggcgtcgtcgccgcagccgccgccgccgttcgccgcgcaaaaccctaccgcgcagggctcgggccaggggccgccaggctccggggtgggggctctccccggggcgttcgccaacctccagatctcccgcggcgcggccccgccgcccggcgccccgcgggggctcacgccgcagcaggcaccgcccaccttagccgcgcgtccgggccccccaccgtccgctgcccgtcccgccttccctggcagcccgcccgcaccgccattcgtgcgggcgccgacaccgtcaacttccgcctcgccgccctttggcggacagcctggggtaatgtcccagccgccgccaccgttcggagggcctccaggtgcgtcgtctcagccgccgccgccgttcggtgtcccccccggggtggtgtcccaggccccttccctgtttggaggccctcctgcgacggcatcgcaggcgtcttcgccttttgttggtcactctgttgctgcgtctcaggcggcaccattcggtgccccccctgttgcgggttcgcatcctccacccttcggtgggcctcctggagcggggcctcagccagcaccgccattgcggcagacattcgctggccagcctgggccaatggccgcagcggcagcttggacgcagccacctccacctagctttggagccccgcaacagcctccaccaccattcggttcgcggccagctgggcagccgctctttgctacacaatcagcgcctgcggcacaacaactgccattcatggggccacccagggtaaatgccccggcgtttggacctccgtcttggcaaactcagggagctgggtctggtgcaatgcagccacctttgagaatgccaggcattcctggtagcatgcagccaaacacactaggaccccctggcaccccgactataccttattctccacatgctggaacccaggtatcaaccccgtccaaaattgatcctaatcaaattccacgtcccatgcgtgaatcatcagtcatcatttatgagacccgtcaaggtggccaagcaaccattcccccggctgcatctagtgaatttattgtgaaggacactgggaactgtagcccccgtctaatgcgctgcactgtgaatcaaataccatgtactggggatctcttgactacttcgggcatgcctttagctctgatggttcaacctttttctcttcctcacccatctgaggaacatattcagcttgtggacttcggagagatgggacccattcggtgttctcgttgcaaagcgtacataaaccctttcatgaaatttgttgaccaagggaggcatttcatctgtaacttatgtggattcagaaatgatactcctagagactacatgtgcaacttagggcctgatggtaggcgacgtgatgctgatgacaggcctgaattgtctagaggaacagttgaatttgttgctacgaaggaatttctggttcgtgatccaatgcctgctgtatacttcttccttattgatgtctctatgaatgctatacaaactggtgcaactgctgcagcttgcagtgctatttctcaggctatttcagatctgccgcagacgtc

SEQ ID NO: 25868 - DNA, 981 bp, Zea Mays
atggcagagctgtttggctgggatgtgcctgaggtgggtcaggaaggtcctcggacaatggttggaattgcaacatttgattctgctattcacttctacagtcttaaacgtgctcagcagcagcctttgatgctcatcgttcctgatgttcaagatgtatatacacctcttcagactgatcttattctcccagtttctgagtgccgggacaatctggagcagttgctagaaagtatcccaagcatgtttgagaataatagggttgctgattctgcttttggagcagctatgaaggctggcttcctggcgatgaaatctaccggcggaaaacttctggttttccaatcagtgctgccatcacttgggattggttctttatcagctagggaagctgaaggtagagcaaacattacaactggtgacaagcctgttgacaacaccctcaagacaatggcactagaatttgctgagtatcaggtctgtgtggatgtattcctcaccacacaatcctatgttgatattgcttctatatccgttgtgcctcaaactacaggtggccggtctggtcaagaaaaagcaaagggtggtaactgtcttgtctcttgggagattgttcaaaggacaaaggccactggaatatggaggtcttggggttctcaatcttcaaagattaggttgggatttatgtattcggtggctatggctacaaagaacagatactgctcggccatgggagggcttcctattcaggttctgagaaattctcaagccctatttgcagcagcaatgcacatcatagttggcaatgggaaggacactaaattctggactgaccggtggctgaatggcagttcagttgctgaattggctccaaacttgttactggctgtttccacaaaaaggtgcactgtttctcaagctttaaacaacagaagatgaaggatataagaggggctctcacagtccaagtgctgcttgaat

SEQ ID NO: 25869 - DNA, 2681 bp, Zea Mays
atggcgtcgtcgccgcagccgccgccgccgttcgccgcgcaaaaccctaccgcgcagggctcgggccaggggccgccaggctccggggtgggggctctccccggggcgttcgccaacctccagatctcccgcggcgcggccccgccgcccggcgccccgcgggggctcacgccgcagcaggcaccgcccaccttagccgcgcgtccgggccccccaccgtccgctgcccgtcccgccttccctggcagcccgcccgcaccgccattcgtgcgggcgccgacaccgtcaacttccgcctcgccgccctttggcggacagcctggggtaatgtcccagccgccgccaccgttcggagggcctccaggtgcgtcgtctcagccgccgccgccgttcggtgtcccccccggggtggtgtcccaggccccttccctgtttggaggccctcctgcgacggcatcgcaggcgtcttcgccttttgttggtcactctgttgctgcgtctcaggcggcaccattcggtgccccccctgttgcgggttcgcatcctccacccttcggtgggcctcctggagcggggcctcagccagcaccgccattgcggcagacattcgctggccagcctgggccaatggccgcagcggcagcttggacgcagccacctccacctagctttggagccccgcaacagcctccaccaccattcggttcgcggccagctgggcagccgctctttgctacacaatcagcgcctgcggcacaacaactgccattcatggggccacccagggtaaatgccccggcgtttggacctccgtcttggcaaactcagggagctgggtctggtgcaatgcagccacctttgagaatgccaggcattcctggtagcatgcagccaaacacactaggaccccctggcaccccgactataccttattctccacatgctggaacccaggtatcaaccccgtccaaaattgatcctaatcaaattccacgtcccatgcgtgaatcatcagtcatcatttatgagacccgtcaaggtggccaagcaaccattcccccggctgcatctagtgaatttattgtgaaggacactgggaactgtagcccccgtctaatgcgctgcactgtgaatcaaataccatgtactggggatctcttgactacttcgggcatgcctttagctctgatggttcaacctttttctcttcctcacccatctgaggaacatattcagcttgtggacttcggagagatgggacccattcggtgttctcgttgcaaagcgtacataaaccctttcatgaaatttgttgaccaagggaggcatttcatctgtaacttatgtggattcagaaatgatactcctagagactacatgtgcaacttagggcctgatggtaggcgacgtgatgctgatgacaggcctgaattgtctagaggaacagttgaatttgttgctacgaaggaatttctggttcgtgatccaatgcctgctgtatacttcttccttattgatgtctctatgaatgctatacaaactggtgcaactgctgcagcttgcagtgctatttctcaggctatttcagatctgccggaaggtcctcggacaatggttggaattgcaacatttgattctgctattcacttctacagtcttaaacgtgctcagcagcagcctttgatgctcatcgttcctgatgttcaagatgtatatacacctcttcagactgatcttattctcccagtttctgagtgccgggacaatctggagcagttgctagaaagtatcccaagcatgtttgagaataatagggttgctgattctgcttttggagcagctatgaaggctggcttcctggcgatgaaatctaccggcggaaaacttctggttttccaatcagctagggaagctgaaggtagagcaaacattacaactggtgacaaggtatgcattgttgcatacttgcatatacttattttgtcttactaacaatggcacattgtaaatacgatctaactccatatatttgtttcatcaggagctcatgttccttttatcaagaatacccagttaaaatactaataaccttgtgtgattcataggaagcccataaacttttgcagcctgttgacaacaccctcaagacaatggcactagaatttgctgagtatcaggtctgtgtggatgtattcctcaccacacaatcctatgttgatattgcttctatatccgttgtgcctcaaactacaggtggccggtctggtcaagaaaaagcaaagggtggtaactgtcttgtctcttgggagattgttcaaaggacaaaggccactggaatatggaggtcttggggttctcaatcttcaaagattaggttgggatttatgtattcggtggctatggctacaaagaacagatactgctcggccatgggagggcttcctattcaggttctgagaaattctcaagccctatttgcagcagcaatgcacatcatagttggcaatgggaaggacactaaattctggactgaccggtggctgaatggcagttcagttgctgaattggctccaaacttgttactggctgtttccacaaaaaggtgcactgtttctcaagctttaaacaacagaagatgaaggatataagaggggctctcacagtccaagtgctgcttgaat

SEQ ID NO: 25870 - DNA, 2101 bp, Zea Mays
aaaaaagacggcctgcacggcaggccagaccgccagaccggtcaggagcagagcacccgaccgcctttcctcccccgcctggccgcctgccaccgcgcgccagatcccgatctcgctgcgatccatggcgtcgtcgccgcagccgccgccgccgttcgccgcgcaaaaccctaccgcgcagggctcgggccaggggccgccaggctccggggtgggggctctccccggggcgttcgccaacctccagatctcccgcggcgcggccccgccgcccggcgccccgcgggggctcacgccgcagcaggcaccgcccaccttagccgcgcgtccgggccccccaccgtccgctgcccgtcccgccttccctggcagcccgcccgcaccgccattcgtgcgggcgccgacaccgtcaacttccgcctcgccgccctttggcggacagcctggggtaatgtcccagccgccgccaccgttcggagggcctccaggtgcgtcgtctcagccgccgccgccgttcggtgtcccccccggggtggtgtcccaggccccttccctgtttggaggccctcctgcgacggcatcgcaggcgtcttcgccttttgttggtcactctgttgctgcgtctcaggcggcaccattcggtgccccccctgttgcgggttcgcatcctccacccttcggtgggcctcctggagcggggcctcagccagcaccgccattgcggcagacattcgctggccagcctgggccaatggccgcagcggcagcttggacgcagccacctccacctagctttggagccccgcaacagcctccaccaccattcggttcgcggccagctgggcagccgctctttgctacacaatcagcgcctgcggcacaacaactgccattcatggggccacccagggtaaatgccccggcgtttggacctccgtcttggcaaactcagggagctgggtctggtgcaatgcagccacctttgagaatgccaggcattcctggtagcatgcagccaaacacactaggaccccctggcaccccgactataccttattctccacatgctggaacccaggtatcaaccccgtccaaaattgatcctaatcaaattccacgtcccatgcgtgaatcatcagtcatcatttatgagacccgtcaaggtggccaagcaaccattcccccggctgcatctagtgaatttattgtgaaggacactgggaactgtagcccccgtctaatgcgctgcactgtgaatcaaataccatgtactggggatctcttgactacttcgggcatgcctttagctctgatggttcaacctttttctcttcctcacccatctgaggaacatattcagcttgtggacttcggagagatgggacccattcggtgttctcgttgcaaagcgtacataaaccctttcatgaaatttgttgaccaagggaggcatttcatctgtaacttatgtggattcagaaatgatactcctagagactacatgtgcaacttagggcctgatggtaggcgacgtgatgctgatgacaggcctgaattgtctagaggaacagttgaatttgttgctacgaaggaatttctggttcgtgatccaatgcctgctgtatacttcttccttattgatgtctctatgaatgctatacaaactggtgcaactgctgcagcttgcagtgctatttctcaggctatttcagatctgccgacggtggcgtcccgggtgtctccggagcgtcgcagggcttttgtttgggagtggatgcagctgccagagttgagatggagcagggaaaaaattggtggaggatctcaccgccatgtgtcgaaagcgggctggcctccagtggtttgaatggtggcaagttgatcgtgcaggtgaccagctccccatcggaaggtgtccaagatgatggggttcctggttctcaagggcacatcctgactcgtcggagacgcaaacgccatcaaaagcgttggacttggctggggcttctaaccttaagctccttcatagggaggctccttaggctgggtgtggtcgttgagatcgtgttcagttattgtgtaaagtgttctagtgttcctg

SEQ ID NO: 25871 - DNA, 1266 bp, Zea Mays
atggcgtcgtcgccgcagccgccgccgccgttcgccgcgcaaaaccctaccgcgcagggctcgggccaggggccgccaggctccggggtgggggctctccccggggcgttcgccaacctccagatctcccgcggcgcggccccgccgcccggcgccccgcgggggctcacgccgcagcaggcaccgcccaccttagccgcgcgtccgggccccccaccgtccgctgcccgtcccgccttccctggcagcccgcccgcaccgccattcgtgcgggcgccgacaccgtcaacttccgcctcgccgccctttggcggacagcctggggtaatgtcccagccgccgccaccgttcggagggcctccaggtgcgtcgtctcagccgccgccgccgttcggtgtcccccccggggtggtgtcccaggccccttccctgtttggaggccctcctgcgacggcatcgcaggcgtcttcgccttttgttggtcactctgttgctgcgtctcaggcggcaccattcggtgccccccctgttgcgggttcgcatcctccacccttcggtgggcctcctggagcggggcctcagccagcaccgccattgcggcagacattcgctggccagcctgggccaatggccgcagcggcagcttggacgcagccacctccacctagctttggagccccgcaacagcctccaccaccattcggttcgcggccagctgggcagccgctctttgctacacaatcagcgcctgcggcacaacaactgccattcatggggccacccagggtaaatgccccggcgtttggacctccgtcttggcaaactcagggagctgggtctggtgcaatgcagccacctttgagaatgccaggcattcctggtagcatgcagccaaacacactaggaccccctggcaccccgactataccttattctccacatgctggaacccaggtatcaaccccgtccaaaattgatcctaatcaaattccacgtcccatgcgtgaatcatcagtcatcatttatgagacccgtcaaggtggccaagcaaccattcccccggctgcatctagtgaatttattgtgaaggacactgggaactgtagcccccgtctaatgcgctgcactgtgaatcaaataccatgtactggggatctcttgactacttcgggcatgcctttagctctgatggttcaacctttttctcttcctcacccatctgaggaacatattcagagtattgccactcttgctcaggtgatgcct

SEQ ID NO: 25872 - DNA, 1248 bp, Zea Mays
cgcctgcccatgcgccccagctcccttttgagcatcgtcccgaggtgaggaactcgctcctgagcaccgtccctgaacttgcgaccacaacattctcacgtgaagatgtggggttatggtgcttagctggggcctcagggcttagaaggatttggccataatctatcagtgggtcgggttttgtttgatgtcttgtaattgtggtttataatcttttgccccttaaagtgggtttgtattgacctattttggctctcctttcttaatataatgatgtgcagctctcctgcgcgttcgagagaaaaaaatgctaaaattgtcaaaataccacccagtcaagctgaatttcacaacgttctagaagcatgttgggacttgccgacttggcaatctctctgaaaactgcgcctacaacagcagcctggttaagactttcagctttgttcaaagcatctagaagacggatatacatgccattacattaactatacgtcctcgtaatcgagtttcttcaaatacatgatatgcctcaattgctctatctgcatggctcattctctataagagcatttaaaattgcagcatcaaggattccaccgtcggccttaaacttctcaaagagactgcaagcatctattatgtttcctatcattgcaagcccagaaatcatggttgtttaagtcaccagatcacaaaagccttattgtacttctgtacacggcaaaggacacttataagaataatgtatgtataagtgtttgcggaccatttcatttccttcattgacttgaaacaaacaagtgcttcattattaaatagtcttcatctatcctaccaacctacatagaaaagactcgtttactgatcaagaactctctttttctgacaagcaaccccaaagttgaaacagcctgaaacatttccggtttttgtcaacggtactgaggaggtacatgctttgtttcattgttccctgctgcaaccatgtactatttttcccttacgtaatctattgtattgttgctacgtgatgtgcctattgccctggttcttagtttccactgatggtgtatagtgttgccttctaccttcgttatgttccaactcggcaattacatgttaactgcttgtttgaactaatgtaacaaacaggtaaaagcatattgctaagaaagcagccattcttctgaacgatagtgcttaatcatttattgaaactaatttggagttgaaaatattcaatcaatt

SEQ ID NO: 25873 - DNA, 2754 bp, Zea Mays
gggaattctaggatatgccagcccaaaagagacttatgagaaaggaaagtttattgtcaaaaattcaccaccccgaggatagatgcaggaagggtgtaaagcctatctcttggatgattcagctgcttcactgttgatgaggtgtcatacatgcagtaaaggtgtgctggactttttccctgagcttccaccttgcgtggtaaacatgcaggcgctcgtcacctccaccgaccccgacgcgccgcttggctcgggcgccgacagcatccccacccatgtcggcgaaggggccctcgagccaggccatggcgatgtggccgtaggcggtctcgttgagttgggcgcagtcccagttccggtggaggccacaacccgacgccgaaccccgacgctcagcttcgctgggaactactcgcaacacgccctcaccatctggaggccctccttcatgcagtccgcggtcaggggcccgggcgccttcaatgtctacggccgagcaggcgagcaccctgctccctggacggatccaccaggacctctcgatcgagctccagcagtaggcaccttccagatcgagctccagcagcaggcgcaggtgcgcagcgatcaatcagcgagcaggacgagcggcaggggagaagcactcgagtcgagagcagatcaggatgtttgtgaagatcgaccgcacgacgcccagacttccgctgtcgaggaggccatggccgcgggcgcgggagaccccgggcagctcgaccaactcttgctgctcgacccctacgccgaggacgacatcaccaactactgcgtcgagttccataatgctgtcgtcactaccatctactcctccatcatcatcaagccggagacgggcagcagtagcagctcttccttcgcgtgttcgaccaattgtcccagccaggcactgcacaacattggtaagcccagtctggtagccgtggtgactattgcaggcacaccttcatctactttgattgatgctcaagtggtgctcggtgaaatgcaaccaagggaacatagcactttgatgacagccaccattgagttgcgcttcattttatggtattttttcattctggacctggttgctttacaacaaagtccaccatggccacaacccgttaaatcactggtagtagtcggatacatcctgccaaagcctccttggttagcatttgatcgaggcaatttgttcagaattcattacacctgcagtactagaagtgcttccttacagtatacattgcaattgtcacctgatgctgggaatattcagaatcaatgtttggatttgtgtttagtaaatttaatcactgggtcagcactgaacgtcagggttcagcagctgcttgtttctgttggctcccctagcaatgctcttgtgctcaagattccaattcagggtgttgtggatgcacttcataggaaaacactccagggcacaggtctgaatgaagagcaaatgagacaggctagcgtcgcagacaatggtcatcgtcagctaaacaagatacttgttgacttggatcaagataacattactgctaagaattatgcaattgcattttacacagagaagcacattcagattccatgcttgggcggtgaacacgaagttactttcttccatgagtatagagattcagttgaacgggtgtttgttgatcatccctcgtatcacagacctggaaatttatatggagctaaagttgttcttcttgggttccaacattatgcggtcatgcttggtacaactgtgatcataccaactgcacttgttccacaaatgggaggaaaatatgaggacaaagttgtggttatccagacattgatgttcgttgtaggtatgaacaccctacgtcagagtttcttgggtaccaggttgcctgcagtgactggcgggtcatacacttttgttctgtataccatttctatcatccttggtggacgttctgctaatgaacctagttcacacattaaatttctgggcatcatgcgtgggacacatggtgcgttgattgtggcttcagctttacagattatagttgccttcagtggcctttggtgtaatgttgccaggtatctgagttcactttcagctactcctttggtggcactagttgtatttggactgtatgagttagaaattccaagagcagggaaaataaaggctttgtccgttgatgcagtaatagtgtttggatcacaaaggattcctcaggtcattcattcagttatgtggatcatgttcatcctttttagagtcatctggtgcttgcaattttcctgggatcctggtggaagtaattggtggaagtaatgttacacatcggcttgagggcaagccgcattttaagaaagggggaatgttagggactgccggcccaatagcccatggtgcagcccaactatctgatgtcttgtgctacaaaggagcaaggaaacatagcagcagggaattattcagagaacagactcttggttattatgcttcttcttccttagcgtcttcctcttgtacccagatccacatttcctgtgcttctagattcttctagtgtctttctctagtatctgatcacctgcttgctgtctatcctatattctgtctcaaatcatagtttgtgttggagtgaattgagtgtgagttcgtcctcgagattgagtgctgttaacaaaatagcccccgcccgacctccattaagccaactcttgttatgctagttggagcccaaa

SEQ ID NO: 25874 - DNA, 1067 bp, Zea Mays
cctatttctttttcttttatcttttctttctttcaaaacttcaattcaaatttagattcaaactttgtggcaaatttgtactcagaccaaatgtttaatttgatcataccaaattgtgatgaagttatttatttataaatttattttgtattgtataatatttctctccttccttctctattttcaaaccctaatttcaatttggcgttcaatccacatctcaaatagttattatatttttattaatattattgttactattattaaatgcacaaacaaccaaaattcctacatgatgcatagagtattttattaagtaattgtttacttaaatatggttattaccatgttcttttatgtagatgacaaatcatatactgacatcaactcttttcctattattttcaaactgggtattacaggtttctcggatgtggtaaaacagatatggtctaccgaaatggatggcaatacccctatggatagatggcaagcaaagattcgaaaattacgccaatatcttacgaggtgggcaaagcatacaaatgggattaataagaaggaaaagaaaagtttgttgaacaaccttgatgagctagacagaatagcagagtcaacaattttgacgcagcaagaacttgatttgaaatgttgtgttcataataggcttgccaatttgcttagggaggaagaaataaaatggtaccaaagggctaaggtgtaggatttgttacaaggtgactgtaatacaaaatatttttagatggttgctaatggaaagtttagaaagactaggattttccagttgaaagacaggaatcaagttattacggatgagtttgaactaaaacaatacattaccacgtactacaaaaaggctttttgggccaccagagaataatgattttagtctggatgagtttcgaagatatgatattcctcaagttaattcactaggaaatgaagtcttagtaaggcactttacggaagaggaggttagagcagctatttttgagatggaaaataataaggccccgggccctgatggattcccagtagaattctat

SEQ ID NO: 25875 - DNA, 1123 bp, Zea Mays
cacagccgctgcccgctgagccgcacccgcacggctgcacaggcacagccgcaggctcctcccgcatctgcatgggcgctgaccgcttggcagacggcctgctcggctgctcctcatctccgacgctctgctcggctgctcgtgctcggcagacgatttaaagacctatttcagtcaagtttctagtggaagtagaccaagcactcgcgctagtggagtttacaataaacccagaatacaagttggagttcaagagaataacaatgaagatgccaatggtgaaactgttaatggttaagtcgaaagtataaatcagttcaaactggatcacattatttctgatccgagacttcgtattccaatcgattattttacttcaatttgccattggtaactcattttttctttttttcagattttattcgctatatggcatttggttgtaaatggattgtaatcaagatgactattaaataaggtttctcggatgtggtaaaacagatatggtctaccgaaatggatggcaatacccctatggatagatggcaagcaaagattcgaaaattacgccaatatcttacgaggtgggcaaagcatacaaatgggattaataagaaggaaaagaaaagtttgttgaacaaccttgatgagctagacagaatagcagagtcaacaattttgacgcagcaagaacttgatttgaaatgttgtgttcataataggcttgccaatttgcttagggaggaagaaataaaatggtaccaaagggctaaggtgtaggatttgttacaaggtgactgtaatacaaaatatttttagatggttgctaatggaaagtttagaaagactaggattttccagttgaaagacaggaatcaagttattacggatgagtttgaactaaaacaatacattaccacgtactacaaaaaggctttttgggccaccagagaataatgattttagtctggatgagtttcgaagatatgatattcctcaagttaattcactaggaaatgaagtcttagtaaggcactttacggaagaggaggttagagcagctatttttgagatggaaaataataaggccccgggccctgatggattcccagtagaattctat

SEQ ID NO: 25876 - DNA, 800 bp, Zea Mays
cacagccgctgcccgctgagccgcacccgcacggctgcacaggcacagccgcaggctcctcccgcatctgcatgggcgctgaccgcttggcagacggcctgctcggctgctcctcatctccgacgctctgctcggctgctcgtgctcggcagacggtttctcggatgtggtaaaacagatatggtctaccgaaatggatggcaatacccctatggatagatggcaagcaaagattcgaaaattacgccaatatcttacgaggtgggcaaagcatacaaatgggattaataagaaggaaaagaaaagtttgttgaacaaccttgatgagctagacagaatagcagagtcaacaattttgacgcagcaagaacttgatttgaaatgttgtgttcataataggcttgccaatttgcttagggaggaagaaataaaatggtaccaaagggctaaggtgtaggatttgttacaaggtgactgtaatacaaaatatttttagatggttgctaatggaaagtttagaaagactaggattttccagttgaaagacaggaatcaagttattacggatgagtttgaactaaaacaatacattaccacgtactacaaaaaggctttttgggccaccagagaataatgattttagtctggatgagtttcgaagatatgatattcctcaagttaattcactaggaaatgaagtcttagtaaggcactttacggaagaggaggttagagcagctatttttgagatggaaaataataaggccccgggccctgatggattcccagtagaattctat

SEQ ID NO: 25877 - DNA, 1512 bp, Zea Mays
cacagccgctgcccgctgagccgcacccgcacggctgcacaggcacagccgcaggctcctcccgcatctgcatgggcgctgaccgcttggcagacggcctgctcggctgctcctcatctccgacgctctgctcggctgctcgtgctcggcagacggtagtcccgctccggcgctccgctgctcgcccggccagccggcctgctcggctgctcttgcagactgcagtccttctacctctgcctgcttgtccggtgtcccgcccggcgggcggcagccgactgcagggtgcaggctgtggctgtttatcccggcccgccgaggcgccgacccggccggctgccgcagtgtcgctgcttccagcttgcttcctgcttgctttagttcattacttcattagttattacgtcattagttgcttgactacagagtgcttgagtttgagtgcttgactgcttgtcccatctgatggcctaaagatttttcaatttctaaatagcagtcttagatataaacaaaaacaagacaaagaatatggcccaaaaaaatttaaagacctatttcagtcaagtttctagtggaagtagaccaagcactcgcgctagtggagtttacaataaacccagaatacaagttggagttcaagagaataacaatgaagatgccaatggtgaaactgttaatggttaagtcgaaagtataaatcagttcaaactggatcacattatttctgatccgagacttcgtattccaatcgattattttacttcaatttgccattggtaactcattttttctttttttcagattttattcgctatatggcatttggttgtaaatggattgtaatcaagatgactattaaataaggtttctcggatgtggtaaaacagatatggtctaccgaaatggatggcaatacccctatggatagatggcaagcaaagattcgaaaattacgccaatatcttacgaggtgggcaaagcatacaaatgggattaataagaaggaaaagaaaagtttgttgaacaaccttgatgagctagacagaatagcagagtcaacaattttgacgcagcaagaacttgatttgaaatgttgtgttcataataggcttgccaatttgcttagggaggaagaaataaaatggtaccaaagggctaaggtgtaggatttgttacaaggtgactgtaatacaaaatatttttagatggttgctaatggaaagtttagaaagactaggattttccagttgaaagacaggaatcaagttattacggatgagtttgaactaaaacaatacattaccacgtactacaaaaaggctttttgggccaccagagaataatgattttagtctggatgagtttcgaagatatgatattcctcaagttaattcactaggaaatgaagtcttagtaaggcactttacggaagaggaggttagagcagctatttttgagatggaaaataataaggccccgggccctgatggattcccagtagaattctat

SEQ ID NO: 25878 - DNA, 3368 bp, Zea Mays
gaatagttctgggatgaaaggcctggcttggcccatgaacacagggaaaaccggccccgcgccagccacccacgcccgtgcggtatgatttgcagaaaacccctcccagagttaactaatctgtaaagaccctaggcctaatttccgtgtttctctgacatcacaccgaggccctcatgctttctttcattcacaaactccggtccccgatccacccccgacgagcgcaggccaaccgccgcgctaattcgctggtggcgacctcctccggcaaagctaaacacccagacatgatccatgagactaacacacctatacctctcagctaatcagactgaggtaacttatagactcactagccatgtcggtggcggcataccgagctctagcaagtccggacctaggcctaggacatggtagtgttcaacccaagactacaatgattaccagtgacacattttgaacatgatgcttgtggcagaacctcccaagttattgggccacatgcacctgtccttgtctcaaagacctcagacgactatgcatgtgcaccagataacttaacaagatccgtccgagtgtctcaaggaacctggataaaccacttacaaccaggatcgcaagattaagtaaacacaagtcacacaccaacattttgcagcggaatttctttattacaaaaagttaaaagttacaacaaatttacattatatttattggagtgattacaaaaaatgattcaaagaatatactttgaaatgttaaaaattatttataagtttaaaatatatgctagcttaagtgaccatcctcaataagaagtatagaagagctacttagacctatcagaaggccatgcccaccggcgcttagcaccatcctcagcagcacaaatctagtacctgcaacaacatgggttcgaaaacactgagtacaaagtgtacttttgtaagtcttacccgactaaagaaaaggactctcaaggatatgctggcttttgggaatcaaggtaaagtttaacaagattcaaagactcttttgcagaaaagcttactatgagtgtatccttaagaattccttttacttatccggttaagtaaagttacctgcatctagagttctttctatcctagatcaaacacttggcctacactagccgtcttttatcatccccttcagttccactagaatgttacgtgtagggcagtgaccaagtcatcatgtcccgagaagtaacgacgatccgaatcgattaatacccagctagggatctccaaccacacgacatatgtagcacttaacccttgcatatgtcaactcgccaccggggttctcaagaccagaatgggttcacgccaaccgagagcacagatacaccaccgcctagcctcttgccacggagggtacacgctactctcgccatctctccactcccattgtgtggtggcctttgtggtagtggtcagactgaggcaaagcttacccatgacgaggcatgtggccagttaaaaggtcctcgatcagcaagcctacatcggttcggtccttaagcgactcagacggagacactacatcgagacttccttctcgtgcaagtcacccgcttagtctcgtcttaataatttacaacccaaagtttggtacctgacagaggtacatcttttcagatgctgaacccatcaaggccctgatagattcaccatcacaagtcttttctttgtaaaaatccccatccagtgtgaagcatcaccttttgttttaaaacaaaacattttgtttttctagatcaaggctaagcatcataaaaatccttttcataaaagggtatcaagaaagggtaatcaattttccaaggatggaaatgcagcaattgtttagcacacaactcctatcacctaatgcatcatataaggtgataaaaattttaaaacacaaggaaagggataatgcaccggggcttgcctggaataacactaggttagtgttggttagatgacgtccacttgacgaaaaacttttggtctaacacttgttcaggtcatccatcttcaggttcatcatccacatcaccttgagattaatccagttcttgttcttcacatcacgtgatcaactagcgtacctcatgagatgcacgatgcacatgtatgaatatcaagacgaatatcgcaagataatattgcgatgttacacagtaaagaatcaaacacttaatggtaaggcattacgtcatttcataagcaaatgctaggtatcgacatataaccaagtacaataatcacgttttctagtttaaccgcatataatccaaacaacaagtgataataaactaagcacaagtcctatgtcaacttcagctagcacccaatatcaaatgtctcgtcaaactttgattcactatttttgaataccaacaatgcagagtaaggaagcatatttaattaactatctaagctagttttcccgactaacctgtgtaatccaccactaattaaaacatcacgctacttagtttagtaagtagagcatcattaaacattatataagtctactcgactacaactttagaaatgaaagacctaaagtgcttatacccatcttttattatgcaaattttcatatttcacttaaaatacctatcgatgttattcgattccaaatacttgaaaaatcaagtaatatccaaccatgacacttactcggccactaacattgaacatgatgactaataaagcaatttaccgacttcatcacatacacacaatgtttataacagacacgtgaatgcaattgtatcgtataaaggggacgcaattgtatcgcataaaggggattacttcaattacactagacctatatatccaccaaggcacttcgcgcctaatccacgtcttaaacctaaaccttgttaagctatgcatctacttaacactttgaacaccatttcataactataataacgaggcttttcaataaacacttaataccatcataattattcacctaggacattttatcaatcaatataatagattgtaacaattactaagcagttcttcaacttcactaaaaagattcatttgatttaattagcgataaccgaacttatcggataaccatttgaaataccaaacctatcatttacatacaaataccccatacttaacacttaaaggactaacttaatcacactagatgcatccacccactaaaacattcccgcataaacttcatttcaaacttaagttttgccccatgaaatgtttactttgcaaacaagaacataatcccatctctgtatgaaacgaggcattacacagtgcatctatatggaaaacatggaaatcatcaatcaccatcaaatcaac

SEQ ID NO: 25879 - DNA, 1808 bp, Zea Mays
aattaatttatggtcaaccgtatgatcacacctaaaaaacccagatacatgttctcgaggaaatggaaactaatttaatgtttttgttgcagaaaattaggagaacaaaaaccgccaggaggaacgaaacaaactcaaatctgaaccagtaaacaactaacaaccgacgagcgaatcgcgcagtcttttcgcgtgggaaaaagctagtcggcccggatataaaggcatttcttcctcgcaaatcgcaagcttcgtcttcgtcctccactgggcaacgaacgcctcctccctccctggttccgttggctcttgcaccaccagcaatggcggcttcttggagagccgtggcgctgtcggtcgtcacgctggcctggctccttggcggtggcgcgtgggcgttcccggcggaggatttggtcacgcggctgccggggcagccgccggtgacgttcaggcagttcgcggggtacgtggacgtggacgtcaaggccgggaggagcctcttctactacttcgccgaggcgcaggagaacgccgccgccaagccgctcacgctgtggctcaatggaggtccaggctgttcttctattggaggcggtgctttcacagagctagggccattttaccccagaggtgatggtcgaggcctcaggttgaacaagaagtcatggaacaaagcgtccaatcttctgttcgtggaatcgccggctggggttgggtggtcttattccaacacttcgtcggactacatcaccggagatgcgcggacagctaatgacatgctccggtttttgttgggatggtacgccaagtttcctgagtacagatccagagctctattcctcactggagagagctacgcagggcactatataccacagatcgctgatgtacttgtcacccataacgagaggtccaagggtttgaagttcaatattaagggagtcgctatcgggaatccgcttctgaagcttgacagggacgtcccggcaacctacgagtatttctggtcccacggcatgatctccgacgagacattcctagcgatcagccacagctgcgatttcgaggattacaccttcaacaacgacagcccccacaacgagagcaagccgtgcaacgatgccatcgcagaagccaacgccgtagttggagactacgtcaacaactacgatgtcattcttgacgtctgctacccatcgattgtgatgcaggagctacggttgcgacagtttgcgacaaagatcagtgtgggagtggatgtctgcatgtcctacgaaaggttcttctatttcaacctaccagaggtgcagcaggccctgcacgctaacaggacgcacttgaagtaccaatggagcatgtgcagcgatttcctcaactacagcaacaccgacggcaacatcgacatgctgcctacgctccaaagaatcgttgagcgcaagataccactctgggtcttcagtggcgatcaagactcggtggtgccattgttgggcagccggtcccttgtgcgagagctagcgcacaccatggggctgcatgtcaccgtcccctacagcacctggttccgcaaaggccaggttggaggctgggtgacggagtatggcaacttcctaaccttcgccacagtgcgaggtgcatctcacatggtgccgttcgcacagccggaccgggccctcgggctgtttcgatcgattgtactcgggcggagactaccaaacgcaaccagtccaccaattggctgaagtgtatctatctacaaatgaaggttgtggcaaagaaccttctattagtggaacttttgtccc

SEQ ID NO: 25880 - DNA, 1789 bp, Zea Mays
aacaaccgacgagcgaatcgcgcagtcttttcgcgtgggaaaaagctagtcggcccggatataaaggcatttcttcctcgcaaatcgcaagcttcgtcttcgtcctccactgggcaacgaacgcctcctccctccctggttccgttggctcttgcaccaccagcaatggcggcttcttggagagccgtggcgctgtcggtcgtcacgctggcctggctccttggcggtggcgcgtgggcgttcccggcggaggatttggtcacgcggctgccggggcagccgccggtgacgttcaggcagttcgcggggtacgtggacgtggacgtcaaggccgggaggagcctcttctactacttcgccgaggcgcaggagaacgccgccgccaagccgctcacgctgtggctcaatggaggtccaggctgttcttctattggaggcggtgctttcacagagctagggccattttaccccagaggtgatggtcgaggcctcaggttgaacaagaagtcatggaacaaagcgtccaatcttctgttcgtggaatcgccggctggggttgggtggtcttattccaacacttcgtcggactacatcaccggagatgcgcggacagctaatgacatgctccggtttttgttgggatggtacgccaagtttcctgagtacagatccagagctctattcctcactggagagagctacgcagggcactatataccacagatcgctgatgtacttgtcacccataacgagaggtccaagggtttgaagttcaatattaagggagtcgctatcgggaatccgcttctgaagcttgacagggacgtcccggcaacctacgagtatttctggtcccacggcatgatctccgacgagacattcctagcgatcagccacagctgcgatttcgaggattacaccttcaacaacgacagcccccacaacgagagcaagccgtgcaacgatgccatcgcagaagccaacgccgtagttggagactacgtcaacaactacgatgtcattcttgacgtctgctacccatcgattgtgatgcaggagctacggttgcgacagcgacaaagatcagtgtgggagtggatgtctgcatgtcctacgaaaggttcttctatttcaacctaccagaggtgcagcaggccctgcacgctaacaggacgcacttgaagtaccaatggagcatgtgcagcgatttcctcaactacagcaacaccgacggcaacatcgacatgctgcctacgctccaaagaatcgttgagcgcaagataccactctgggtcttcagtggcgatcaagactcggtggtgccattgttgggcagccggtcccttgtgcgagagctagcgcacaccatggggctgcatgtcaccgtcccctacagcacctggttccgcaaaggccaggttggaggctgggtgacggagtatggcaacttcctaaccttcgccacagtgcgaggtgcatctcacatggtgccgttcgcacagccggaccgggccctcgggctgtttcgatcgattgtactcgggcggagactaccaaacgcaaccagtccaccaattggctgaagtgtatctatctacaaatgaaggtggagatagaaaaaaggttgcttagggtttttcttttttcctttcagttatgttatagtagattagttcataaacatgtattggatgttgaataagttctttattgtttataaagagcagaaaataatactattattaatattatgactcttgtcattacactagcatcaaaacatgcattt

SEQ ID NO: 25881 - DNA, 4795 bp, Zea Mays
aggaaagtaatccttgattggtgctagtttacttattctgttttaggaaatagctagtatggtagtggatcagtcttatatggacggatccaatcagcaagatcaggactgatagcagtccggattattaccttgtaatagctagtttgtttccttatgaaagtctataaatatatggccttagaggctaagaaaaggcagtcaataggacgccaccaaatctgctgtgttcccctccaaaagagttcgcgtgcgtgtgagtccctgggaggtttttcttatacctgaagaacttacctgggaggtaggaactcgccggcaacctgcagggttgtctctccggcgcagattccaacaactggtatcggagccaaggaggagcaagatgtcgaaaactgttgatagcagtgcgacattcaggaagtccagcgacgacacctccaaagatggagtagtggtccagcgagtaattcgtgaggtgagtgcagggagtggatatcccacactcaccaagaccaattactcggactgggcgctcctgatgaaggtgaagctgagggcgaggatgttgtgggacgtcatcgagcacggaggagcagacatccatgaagaaatgatggcactcgacgctctctgcagcgcagtgccaccagagatggtgtcttcgatcgcagacaagtccacggcaaaggaggcgtggaagaccattgcagacctacgggttggcgatgatcgcatgaagaaaactgctgctgtgctgcttcggaggaagttcgacttggcaacgtttaatgacggtgagtccgttgaagatttcgcgctgcgcctaaatggcatggcagcggaactctccactcttggagctggcgtggaagaagagaagatcgtggagaaaattgctcgcagcgttccaccacgcttcaagcaaatcgtcctctccatcacgactctcctcgacctgtcaaccctcactgtgtctgacatggtggggaggttgagggcagcggaggacgcctttgaggaggccccaggatcactgcagcacagtggtcgactctacctcacggaagaagagtggaatgcccggcgcagagggcgctcatcaggtggaccaccggctggaaaggtcactggtgatgagtgcagaaggtgtggcaagatgggacattgggcgcgagagtgtccgtcaaggcacaagaaggagcaagcacatgctgtccaagaagaagaggaggctacacttcttgtggcaaagacgttcccggtaaaaacctcaacacttaaaccatgctgcaagatgtctagttctcatctagagatcagggaggagaaggtgtttttacagcatgaagaagaggagaaattagaggagggaacctggatcctggacactggagccacaaatcatatgtccggatccagggctgttttcaccgatctggataccagagtgctgggtactgtcaggttcggtgacaactcggtggctcagattgagggacgaggaaccatcaagtttatgtgcaagaatggcgagacccggtcgtttgttggggcttattttattcctcgcctgacaacaaatatcatcagtattgggcaacttgatgaagcaaagtacaagattcatgttgatgatggggtgatgcatattagggaacctgatggaagattactggcaagaatagtgcgggctgaaaacaggttgtacctccttcatttgaagatacaacagtctgtgtgcctagcagtgcgtgggcgcgaagatgaagtagcctggcggtggcatgagaggtttggtcatgttaatatggctgcactgcggaaactggagaaagaagaactggtccgaggcttgcccaagctcggacaggttgaaagggtgtgtgaggcatgccaggcaggcaaacagaaacgcacctcttttccagcgtaggcagaataccgggcaaaacagcgcttggagttggtacatggtgatctgtgtggtcctattgccccaatgacaccaagaggtaacaaatatttcttgctgttggtggatgatttgagtagatatatgtggatggctgcgatctcgtcgaaagaccaagctattgatgcagtgaaaagaattcagatgcaagctgaaagggaatctggactcaagttgaagacacttcgaactgatcgaggtggggagttcacctcgggtgaatttgcggagtattgtatggccagtggtattcaccgacaacacactgcgccgtacagtcctcaacaaaacggcatagtggaacgccggaatgggactgttgtggccacaacaaggagtatgttgaaggcaaagaaactccctggctggttttggggagaggcagtaaaaactgctgtttatgttttgaacaggtgcccaaccaagagtgtagatgggatgactccatttgaggcatggcatggcaagaaaccagcagttcaccacctcaagacgttcggctgcattgtctatgtccgaaacactgttcctcatctgaagaagctggaggatcgaggaaggaaaatgatcttcattggctatgaagaaggcacgaaggcataccgggcttacgaccccatcactgagcgtgttcatatttcaagggatgtcatcttcgacgaacaggctcagtgggattgggaaacccaggaggacatcaattcagaaaatgaagatcaagatgtgttcacaatggaatatgccatcagaaagcagacacattctgaaggagatgagaaaactgctggggaatctgaagatgagcattcagctggaggtctgtcccctcggacccctcatgttgatacagggcatgtttcggaagaggaggatgaaatgcaggaagtggagtttgcttcaccaccggaggggaatattgatgagtatctagatgcctatagagcagaatatgatccacttagattccgcaaggtagatggactactggaatccaaaactccacctggttatgcaacaaggaggctgctagatgaggagttacatgcagtaagcgccgatgaaccgatctcttttggtgaagcagaaaggagtctaagctggagaaaagcaatgatggaggagatgaaatcaattgaagataaccagacctggactcttgtggatcttcctccagggcgcaaggcaatcggtcttaaatgggtatacaaggtgaaaagggatgaacaaggtgcagtatccaaacacaaggcacggctggtagtgaagggatatgcacaacaacatggtattgactatgatgaagtatttgctccagtagccaggcttgattctgtgaggttgcttattgcacttgcagcacatgagagttgggaagtacatcatatggatgtgaaatcagcattcttaaatggtgaattgggtgaagaggtgacaatgaaatctcttggtttcagaaagagcatttcagaacctgctatttatcttagaagaaacatcaagtcacagttggtggttggcgtgtatgtggatgatttgataatcactggaacaaattgtgaggacatcaagctgttcaaggaagagatggcagctgttttcaagatgacagatctggggttactgaaatattatctgggaattgaagtaaggcaaaataaggagggaatatctctcagccaaggagcatatgcagaaaaaattctggagaagaatggaatgagagaatgcaacccgtgtcagactcccatggagacacggttgaagctgagcaaactgagcactgaacccctagtggatgtcacggtataccgaagcatagtaggaagcttgaggtatttggtcaacactcgacctgaccttgtgtttgctgtgggatatgtcagccggtttctggaagaaccccacaaagatcacatgatggctgtgaaacacattctgaggtatgtgaagggaaccaagaattggggtttgtggtttggaagaaaaggaaggaaggaggctgggctgattgggtatagtgatagtgattatgctggggatgttgacagcaggaagagcactactggagtggttttcttcctgaacaatagtccagttacttggacttcgatgaaacaaaaggtggtggctcaatcaacctgtgaagcagaatatatagctgctgccaatgcggcttgtcaggcattatggctgagtagggtactggccgaagtacaaggagtatcactgaaagctccaatgctaaaagtggacaacaaatcagctattgccctcattaagaacccagtgctacatggtcagagcaagcacatagaagtgaagtatcattttgttcgggagtgtgctgagaatgggcagatcaaagtggacttcatcaggagcgaagaacagctgggggacttcctgacgaaaccgcttgggaagaccaaatttcaagagttgcgctctaaggtcggactggtggatgtagacagattgcaccacaaggcttaggaggagattgttaggaaagtaatccttgattggtgctagtttacttattctgttttaggaaatagctagtatggtagtggatcagtcttatatggacggatccaatcagcaagatcaggactgatagcagtccggattattaccttgtaatagctagtttgtttccttatgaaagtctataaatatatggccttagaggctaagaaaaggcagtcaataggacgccaccaaatctgctgtgttcccctccaaaagagttcgcgtgcgtgtgagtccctgggaggtttttcttatacctgaagaacttacctgggaggtaggaactcg

SEQ ID NO: 25882 - DNA, 784 bp, Zea Mays
ttggcattctatttgcagcagtttgctgatgttaatcaagttgctcgtggtgataacactggggaatcaattcctatgctcctaaggataccccgcttctttgatccatggggtggttatgatatgataggctttggtgacattatcttccctggattgcttgttggattcagctatagatttgacagagcaaacagaaagggtgtcttgagtggatattttctctggctaattgtgggatatgcagttggccttttcattacgtatcttgcgctgttcttgatggacgggcatggtcaacctgcgttgttgtaccttgtgccatgtacattgggggttattgttattcttggttggttaagaggtgagctttatgaattatggaacttcggaaaaagtccaggagaaaattttgtcaatgaaccatgacaacaaaatccagggaagatgtattcttcagcgtagtagatagcttgaggatgtttattaggaggcaccgtgtattgcaagatgttatgtttagcattatttcaaagaaggatgctattgtgtttgaaaaaaatgatatacatgtaagatgcaagcatgtactcccacagtcgtaaaataatccaatataagtgccgctatatagttccaaaataagtgtcactagggttggaaacgagttgagcctgacttggctcggtcaatttggatatgtttggttgcctggtctagtgcacgaccaggcccatttgaaaaggtcgacatgtttggtatcctggcccagcttggcagcctg

SEQ ID NO: 25883 - DNA, 1104 bp, Zea Mays
attccctcctttcgggcacaggtatgcatgcttgcttggtcacgcttctagctaggatttttaaggactgtggacaaaagactgtacaactccctgttttgggggaggtcttgatcttatctgttggaattgtaccattttgtgcggtgtttgcaattctctgggctgtgtatcgccatgcttcatttgcttggataggccaagacgttctgggtatctgtttgatgataactgtgcttcagatggcacgtttaccaaatatcaaggttgcatcggcacttcttagtgctgcatttgtgtatgacatcttttgggtgttcatttcacctcttatattccatgaaagcgtcatgattgcagttgctcgtggtgataacactggggaatcaattcctatgctcctaaggataccccgcttctttgatccatggggtggttatgatatgataggctttggtgacattatcttccctggattgcttgttggattcagctatagatttgacagagcaaacagaaagggtgtcttgagtggatattttctctggctaattgtgggatatgcagttggccttttcattacgtatcttgcgctgttcttgatggacgggcatggtcaacctgcgttgttgtaccttgtgccatgtacattgggggttattgttattcttggttggttaagaggtgagctttatgaattatggaacttcggaaaaagtccaggagaaaattttgtcaatgaaccatgacaacaaaatccagggaagatgtattcttcagcgtagtagatagcttgaggatgtttattaggaggcaccgtgtattgcaagatgttatgtttagcattatttcaaagaaggatgctattgtgtttgaaaaaaatgatatacatgtaagatgcaagcatgtactcccacagtcgtaaaataatccaatataagtgccgctatatagttccaaaataagtgtcactagggttggaaacgagttgagcctgacttggctcggtcaatttggatatgtttggttgcctggtctagtgcacgaccaggcccatttgaaaaggtcgacatgtttggtatcctggcccagcttggcagcctg

SEQ ID NO: 25884 - DNA, 1284 bp, Zea Mays
gcatttcatgtttgtatttatatgatggacctgacacgggaacaaaatacagagaagataaagaggtcttcgagatcagcgcgaagggtgcttttatttttattatagtagcttcagttttcctcctcctcctgttctacttcatgtcatcttggttcgtttgggtgctaattgtactattctgcattggtggtattgagggtatgcatgcttgcttggtcacgcttctagctaggatttttaaggactgtggacaaaagactgtacaactccctgttttgggggaggtcttgatcttatctgttggaattgtaccattttgtgcggtgtttgcaattctctgggctgtgtatcgccatgcttcatttgcttggataggccaagacgttctgggtatctgtttgatgataactgtgcttcagatggcacgtttaccaaatatcaaggttgcatcggcacttcttagtgctgcatttgtgtatgacatcttttgggtgttcatttcacctcttatattccatgaaagcgtcatgattgcagttgctcgtggtgataacactggggaatcaattcctatgctcctaaggataccccgcttctttgatccatggggtggttatgatatgataggctttggtgacattatcttccctggattgcttgttggattcagctatagatttgacagagcaaacagaaagggtgtcttgagtggatattttctctggctaattgtgggatatgcagttggccttttcattacgtatcttgcgctgttcttgatggacgggcatggtcaacctgcgttgttgtaccttgtgccatgtacattgggggttattgttattcttggttggttaagaggtgagctttatgaattatggaacttcggaaaaagtccaggagaaaattttgtcaatgaaccatgacaacaaaatccagggaagatgtattcttcagcgtagtagatagcttgaggatgtttattaggaggcaccgtgtattgcaagatgttatgtttagcattatttcaaagaaggatgctattgtgtttgaaaaaaatgatatacatgtaagatgcaagcatgtactcccacagtcgtaaaataatccaatataagtgccgctatatagttccaaaataagtgtcactagggttggaaacgagttgagcctgacttggctcggtcaatttggatatgtttggttgcctggtctagtgcacgaccaggcccatttgaaaaggtcgacatgtttggtatcctggcccagcttggcagcctg

SEQ ID NO: 25885 - DNA, 1686 bp, Zea Mays
ctttaacaccatcagtagtaggcttacatacaaagttaacaagttcagttgctatagcaacacgtggggaatgtgctttcacggaaaaagcaaatattgctcaggccagtggttcgaccggtttactagttatcaatgataatgaagagctttacaagatggtttgcggtgagaatgacacctccattaatgtgacaatacctgttgtcatgataccacagtcagcaggaaagaagctgaagaacttattgcatcatggagcaagtgtggaagtgcagctatattcaccaaatcgaccaactgtggacctttcagcatgcttcttatggataatggctgtaggcaccatagtctgtgcttcactctggactgaatttgttacatgtgaacaggttgatgagcgttataatcagctgaccagaaaggatggacctgacacgggaacaaaatacagagaagataaagaggtcttcgagatcagcgcgaagggtgcttttatttttattatagtagcttcagttttcctcctcctcctgttctacttcatgtcatcttggttcgtttgggtgctaattgtactattctgcattggtggtattgagttctataccatcatcctatatacttcatataacaggatttttaaggactgtggacaaaagactgtacaactccctgttttgggggaggtcttgatcttatctgttggaattgtaccattttgtgcggtgtttgcaattctctgggctgtgtatcgccatgcttcatttgcttggataggccaagacgttctgggtatctgtttgatgataactgtgcttcagatggcacgtttaccaaatatcaaggttgcatcggcacttcttagtgctgcatttgtgtatgacatcttttgggtgttcatttcacctcttatattccatgaaagcgtcatgattgcagttgctcgtggtgataacactggggaatcaattcctatgctcctaaggataccccgcttctttgatccatggggtggttatgatatgataggctttggtgacattatcttccctggattgcttgttggattcagctatagatttgacagagcaaacagaaagggtgtcttgagtggatattttctctggctaattgtgggatatgcagttggccttttcattacgtatcttgcgctgttcttgatggacgggcatggtcaacctgcgttgttgtaccttgtgccatgtacattgggggttattgttattcttggttggttaagaggtgagctttatgaattatggaacttcggaaaaagtccaggagaaaattttgtcaatgaaccatgacaacaaaatccagggaagatgtattcttcagcgtagtagatagcttgaggatgtttattaggaggcaccgtgtattgcaagatgttatgtttagcattatttcaaagaaggatgctattgtgtttgaaaaaaatgatatacatgtaagatgcaagcatgtactcccacagtcgtaaaataatccaatataagtgccgctatatagttccaaaataagtgtcactagggttggaaacgagttgagcctgacttggctcggtcaatttggatatgtttggttgcctggtctagtgcacgaccaggcccatttgaaaaggtcgacatgtttggtatcctggcccagcttggcagcctg

SEQ ID NO: 25886 - DNA, 2608 bp, Zea Mays
aggccgccaaattaaacttgaccatttcctctctctctttctctctaactccgggtccctctctcttactctctctattctctccatccttgcttctgggaagctcatcagccatggacgatgccgctgcagaggaagaagcttccattcgcgcacaaaaaagctaggtgcttcggcttcctttcgcgcccaattggaggcgagacacaccccgaaataaaaaaaagatgagaattcgatgcgacaaacaagctcaaatgcttggtcggtgtccttttgaaggttcgagaccagccatgtcctcggcgccctgctggcctcctcgccgttgctggcgcgcgcctgggaccgctgcacagccgcctccgctgcagcgccgtggttcgttcacggcgaagacggcggcaaggtgtacgtggggttctctggggtgcaggctgcgcttacggcggcaggcgcggcggtggccggcggcggcgccgacatcttcgcgccggtgagtctcggcggggacgcggcggggcggatgttcgcgccgctggtcgccgccgagcccgacccggccgctaccggggagccggttgccgtgcaggcgctggcgctgcagtgcttcctgaaactctgctgcagtcctgatttccagatgcttctgaatcagatcaggggcaaggcagtcgtgttcacgggccactcccttggtggcgccgttgcggccctcacggcgctacactacctctgcatctcatcgtcaagctcgccacctgctcctcctgtcctgtgcgtcacctttggaagcccattacttggcaacgaggcgctgtccagggccatcctgcgtgagcactggggtggtaacttctgccacgtagtctcacagcacgatgtcgtcccaaggctcctcttctgctccccggacgccgtacccgcgcacatcattgttggaatgcaactgcagcaatggccggcgtggactcggcacacaggagctgtgagcacggtcaccgcgcacatggcggacactgacaaagacgtgctccggcagctgatacagacgcacgttggcgctgtggccgtggaacagaagcttgccgcttctgagacgacaggtgggagcccgtaccggccgtttgggacgtacgtgctgtgctccccagaaggcgcggcgtgcgtggacaacccgaccgccgcggtacagatgctgtacgccaccttcgcctctcagagctcagccggtgcagagtccccggaggccgcgcactcctgctacggcgagctcgtgctgaaaatgccgcaccacttgcttctcaagagatggctgcgtgtggacgacgacatgccggcgacgcccaactacgacgacggcgtctccctcgcgttggaggcctctggcatcgacgtcatggccatggaggcgtcgacggcgcggcattggctgaaaacatcaaagcgggcagggcggcggccgagcctgaactgcgctcgcctggcgacgcagctgggccgggtcacgccgtgccgtgcacagatagaatggtacaaggcgctgttcgacgcagagatggggtactacgacgcgttcaagcagcggcggtcgcccaggaagtacaccaaggtgaacttaaaccgcatcaagctgggccagttctgggaccgagtgctgagcatgctcgacgccggccagctcccccacgatttccaccgccgcgccaagtgggtcaacgcctcccgcttctaccagctcctcgtcgagcctctcgacattgccgactaccatcgacacggccaccacctgacgagcgggagctacatgactcacggccgggagaggaggtacgagctgttcgacaggtggtggcatgagaagggatgcactggcgctggcggtggcatcacgtcctccatgtcggcagcgtcggcgagcagccggagacgcagcaaatacgccgggctaacgcaggacccgtgcttctgggcgagagtggaggaggcgagggagcagacggagagcgcacgccgcgagcgcgacgtggccgaactggcgatgaagctggaggagctgcaagagttcgagcgctactcccgtgagctggtggcgaccaaggaggtgtccgtcgacgtgctcgcgccgcagtcgagctacacgctgtgggtggaggattggaaccagctcaagctcagggctcagggatgatgtgaggacaatgttgcttcggttttgagctgggctgcaaacagatgatgaattcgtaggtagctggtgggcgttctacaaatagttcaggtgtaaatgaatcattggatcatggtgctagtatatgtgatggtaaatatatccaaacctatagaagcgctgcagtggattacagtattgttgtggttctcgtcgaaattctgaaaaaacgataatatgacaataccaattagttttaaaatcctccttttcttcgaagagttctgaggaaaaaacgaataaaatgctattttcaccgatcaatagtcctgaagttcatcgttttcgatatgcgtgaatataaatcatgacacagcttcaaaatattcttctctcctttgaaggtgtcaaaggggagaatgatgatttacttgtgtg

SEQ ID NO: 25887 - DNA, 2480 bp, Zea Mays
aggccgccaaattaaacttgaccatttcctctctctctttctctctaactccgggtccctctctcttactctctctattctctccatccttgcttctgggaagctcatcagccatggacgatgccgctgcagaggaagaagcttccatgttcgagaccagccatgtcctcggcgccctgctggcctcctcgccgttgctggcgcgcgcctgggaccgctgcacagccgcctccgctgcagcgccgtggttcgttcacggcgaagacggcggcaaggtgtacgtggggttctctggggtgcaggctgcgcttacggcggcaggcgcggcggtggccggcggcggcgccgacatcttcgcgccggtgagtctcggcggggacgcggcggggcggatgttcgcgccgctggtcgccgccgagcccgacccggccgctaccggggagccggttgccgtgcaggcgctggcgctgcagtgcttcctgaaactctgctgcagtcctgatttccagatgcttctgaatcagatcaggggcaaggcagtcgtgttcacgggccactcccttggtggcgccgttgcggccctcacggcgctacactacctctgcatctcatcgtcaagctcgccacctgctcctcctgtcctgtgcgtcacctttggaagcccattacttggcaacgaggcgctgtccagggccatcctgcgtgagcactggggtggtaacttctgccacgtagtctcacagcacgatgtcgtcccaaggctcctcttctgctccccggacgccgtacccgcgcacatcattgttggaatgcaactgcagcaatggccggcgtggactcggcacacaggagctgtgagcacggtcaccgcgcacatggcggacactgacaaagacgtgctccggcagctgatacagacgcacgttggcgctgtggccgtggaacagaagcttgccgcttctgagacgacaggtgggagcccgtaccggccgtttgggacgtacgtgctgtgctccccagaaggcgcggcgtgcgtggacaacccgaccgccgcggtacagatgctgtacgccaccttcgcctctcagagctcagccggtgcagagtccccggaggccgcgcactcctgctacggcgagctcgtgctgaaaatgccgcaccacttgcttctcaagagatggctgcgtgtggacgacgacatgccggcgacgcccaactacgacgacggcgtctccctcgcgttggaggcctctggcatcgacgtcatggtcagggccatggaggcgtcgacggcgcggcattggctgaaaacatcaaagcgggcagggcggcggccgagcctgaactgcgctcgcctggcgacgcagctgggccgggtcacgccgtgccgtgcacagatagaatggtacaaggcgctgttcgacgcagagatggggtactacgacgcgttcaagcagcggcggtcgcccaggaagtacaccaaggtgaacttaaaccgcatcaagctgggccagttctgggaccgagtgctgagcatgctcgacgccggccagctcccccacgatttccaccgccgcgccaagtgggtcaacgcctcccgcttctaccagctcctcgtcgagcctctcgacattgccgactaccatcgacacggccaccacctgacgagcgggagctacatgactcacggccgggagaggaggtacgagctgttcgacaggtggtggcatgagaagggatgcactggcgctggcggtggcatcacgtcctccatgtcggcagcgtcggcgagcagccggagacgcagcaaatacgccgggctaacgcaggacccgtgcttctgggcgagagtggaggaggcgagggagcagacggagagcgcacgccgcgagcgcgacgtggccgaactggcgatgaagctggaggagctgcaagagttcgagcgctactcccgtgagctggtggcgaccaaggaggtgtccgtcgacgtgctcgcgccgcagtcgagctacacgctgtgggtggaggattggaaccagctcaagctcagggctcagggatgatgtgaggacaatgttgcttcggttttgagctgggctgcaaacagatgatgaattcgtaggtagctggtgggcgttctacaaatagttcaggtgtaaatgaatcattggatcatggtgctagtatatgtgatggtaaatatatccaaacctatagaagcgctgcagtggattacagtattgttgtggttctcgtcgaaattctgaaaaaacgataatatgacaataccaattagttttaaaatcctccttttcttcgaagagttctgaggaaaaaacgaataaaatgctattttcaccgatcaatagtcctgaagttcatcgttttcgatatgcgtgaatataaatcatgacacagcttcaaaatattcttctctcctttgaaggtgtcaaaggggagaatgatgatttacttgtgtg

SEQ ID NO: 25888 - DNA, 1489 bp, Zea Mays
caaatattcatgtggattcttttgttcataccttcggtaggtccaaagaaagcatgtatacaaccttaggcaggtgatattatctggtgactctgaaagctgcagtgaacaaattttccagtacatgcaagcggtagctgatgaaattgttttggtaaatgttgacccccaaaagccacccaaggcatggaatctggtaaagcttttggatgaatttgttagtctaggcggaaaactgagtgaatcattcaaggacatccgagagcaaaacctccaatcagcacttgagcaaatgcaaggttggggtcctgtgaaggctgatagtttcgcccttccaaacatgccgttgccgcccgattcattcagaggaattcgaaaaagaacatcttcaataacgcggtggttttccatttgtgttgatgatacgtcaaagaaagggagatatacaaacactgtgaatctgctccggaaatattttggggattttctaatagctacctacttgaatgccgtgcaagagtcccgttatgacgatgcttatatagagggaagtactattgaagactcttgatacattatggaaagaccatttggtaaacatgaacaagcttagttctgctgtgaacgttcggagttttggacacagaaatcctctggaagagtacaagatcgatggctgccgcttcttcatctcaatgttgagcgccacacgacgtctcaccgtggaatcccttgtgcactactggtcgtcgcccatggagtccgaggagatcttcaacacagaggatcaatagcagaagacctgacgtggactggtgctgcaagttgtgggcaggttaattagcagagaggcacaggtataaacaggagccgcgcgcggcgtgtgttaaccctgtaaaatcacaagctgacatggccacggttgcgtcgatttcgcgctgtggctgtgcacctacatataaaactaagtacatctcaatgcacaagagggtagtaactggataggtgtggactgcaagacagtctgatccatcccacatcagcaatacggcgttgccgcaaagttggcatctcgttcacagtgtactgtggtcctttagcctgtcatgatgatgaaaaagtccgctctgtacctttttctttcatcgctcgtcagacggaacaggagagtgcggaatctcttgcttgtggatgacgaactcttcgtgcaggtaggtacgcagcctagtggtcatgctttgacattgccaaatatttggtttttaattttttttcgggcgtgtgatggtggcaatttgtaagtaaaaaactctagggagtatggtaccgatttaacctgtgtgtactgctgcagttgcaacaatatactgtacaaaaagtagaagcccgtgaattaaagcttaagtctcctggatgctgctggttcgtttttttttcctttaatttgtttcactgcttggataacacagtgatcggtgctccaactggg

SEQ ID NO: 25889 - DNA, 1673 bp, Zea Mays
ccctctttagtttaattattagtactagttttcccaaatttggtctcatttttggaagacttggattcattggcaatagaaattatagtaaaaaggtattcacagtacatgagtgcctttcagtttctaatagcatcacaaatattcatgtggattcttttgttcataccttcggtaggtccaaagaaagcatgtatacaaccttaggcaggtgatattatctggtgactctgaaagctgcagtgaacaaattttccagtacatgcaagcggtagctgatgaaattgttttggtaaatgttgacccccaaaagccacccaaggcatggaatctggtaaagcttttggatgaatttgttagtctaggcggaaaactgagtgaatcattcaaggacatccgagagcaaaacctccaatcagcacttgagcaaatgcaaggttggggtcctgtgaaggctgatagtttcgcccttccaaacatgccgttgccgcccgattcattcagaggaattcgaaaaagaacatcttcaataacgcggtggttttccatttgtgttgatgatacgtcaaatttgtatgttgcttcttttcgataaatcaatccaggaaagggagatatacaaacactgtgaatctgctccggaaatattttggggattttctaatagctacctacttgaatgccgtgcaagagtcccgttatgacgatgcttatataggtggaattgagagggaagtactattgaagactcttgatacattatggaaagaccatttggtaaacatgaacaagcttagttctgctgtgaacgttcggagttttggacacagaaatcctctggaagagtacaagatcgatggctgccgcttcttcatctcaatgttgagcgccacacgacgtctcaccgtggaatcccttgtgcactactggtcgtcgcccatggagtccgaggagatcttcaacacagaggatcaatagcagaagacctgacgtggactggtgctgcaagttgtgggcaggttaattagcagagaggcacaggtataaacaggagccgcgcgcggcgtgtgttaaccctgtaaaatcacaagctgacatggccacggttgcgtcgatttcgcgctgtggctgtgcacctacatataaaactaagtacatctcaatgcacaagagggtagtaactggataggtgtggactgcaagacagtctgatccatcccacatcagcaatacggcgttgccgcaaagttggcatctcgttcacagtgtactgtggtcctttagcctgtcatgatgatgaaaaagtccgctctgtacctttttctttcatcgctcgtcagacggaacaggagagtgcggaatctcttgcttgtggatgacgaactcttcgtgcaggtaggtacgcagcctagtggtcatgctttgacattgccaaatatttggtttttaattttttttcgggcgtgtgatggtggcaatttgtaagtaaaaaactctagggagtatggtaccgatttaacctgtgtgtactgctgcagttgcaacaatatactgtacaaaaagtagaagcccgtgaattaaagcttaagtctcctggatgctgctggttcgtttttttttcctttaatttgtttcactgcttggataacacagtgatcggtgctccaactggg

SEQ ID NO: 25890 - DNA, 1575 bp, Zea Mays
ctaaccctctttagtttaattattagtactagttttcccaaatttggtctcatttttggaagacttggattcattggcaatagaaattatagtaaaaaggtattcacagtacatgagtgcctttcagtttctaatagcatcacaaatattcatgtggattcttttgttcataccttcggtaggtccaaagaaagcatgtatacaaccttaggcaggtgatattatctggtgactctgaaagctgcagtgaacaaattttccagtacatgcaagcggtagctgatgaaattgttttggtaaatgttgacccccaaaagaatcattcaaggacatccgagagcaaaacctccaatcagcacttgagcaaatgcaaggttggggtcctgtgaaggctgatagtttcgcccttccaaacatgccgttgccgcccgattcattcagaggaattcgaaaaagaacatcttcaataacgcggtggttttccatttgtgttgatgatacgtcaaagaaagggagatatacaaacactgtgaatctgctccggaaatattttggggattttctaatagctacctacttgaatgccgtgcaagagtcccgttatgacgatgcttatataggtggaattgagagggaagtactattgaagactcttgatacattatggaaagaccatttggtaaacatgaacaagcttagttctgctgtgaacgttcggagttttggacacagaaatcctctggaagagtacaagatcgatggctgccgcttcttcatctcaatgttgagcgccacacgacgtctcaccgtggaatcccttgtgcactactggtcgtcgcccatggagtccgaggagatcttcaacacagaggatcaatagcagaagacctgacgtggactggtgctgcaagttgtgggcaggttaattagcagagaggcacaggtataaacaggagccgcgcgcggcgtgtgttaaccctgtaaaatcacaagctgacatggccacggttgcgtcgatttcgcgctgtggctgtgcacctacatataaaactaagtacatctcaatgcacaagagggtagtaactggataggtgtggactgcaagacagtctgatccatcccacatcagcaatacggcgttgccgcaaagttggcatctcgttcacagtgtactgtggtcctttagcctgtcatgatgatgaaaaagtccgctctgtacctttttctttcatcgctcgtcagacggaacaggagagtgcggaatctcttgcttgtggatgacgaactcttcgtgcaggtaggtacgcagcctagtggtcatgctttgacattgccaaatatttggtttttaattttttttcgggcgtgtgatggtggcaatttgtaagtaaaaaactctagggagtatggtaccgatttaacctgtgtgtactgctgcagttgcaacaatatactgtacaaaaagtagaagcccgtgaattaaagcttaagtctcctggatgctgctggttcgtttttttttcctttaatttgtttcactgcttggataacacagtgatcggtgctccaactggg

SEQ ID NO: 25891 - DNA, 2169 bp, Zea Mays
atggccggcggcggcggcggctctctgtctagcccctccgcctccttcctttccagtcccaccccaacaccgccccctcgtctcctccgcaggtgtagcacgaagtctgcctcacgagatagccccatcctcagaccaaaaaagccgcctccactcttctgcgcggcggcagccactcccacccccgctcccgcggccgcgtccaagtcggctgggtcatggagggacctgtgcagtctcaacgcctgggtggtgcgagactaccgccgccttgtcgactccgtcggcgcgctcgagccggcgcttcggaggctctctgaggaacagttgaaggcgaagacggccgagttccgcagccgcctaacgcgcggggagacgctcgccgacgtccaggccgatgcgtttgctgtggtacgtgaggcggctaggaggacgcttgggatgcggcatttcgacgtccagataattggcggtgctgtgctccatgacggctgcattgcagagatgaagacaggcgaggggaagacgcttgtttccacacttgcggcttatctaaatgcccttacagggaaaggggttcatgtggtgactgtaaatgattatttggcacagcgtgatgctgaatggatgggtcgtgttcatcgctttctcggtcttactgttggtctgattcaggcgggtatgaagtcagatgagagaagagctagctacagatgtgacattacatacactaacaactcggaacttggatttgactatcttcgtgacaacctatctcgaaacaaagaacaactagttatgagatggccaaggccattccattttgctattgtggacgaagtggactcagtacttatagatgagggaaggaatccattattaataagtggagaggataatagagatgcagttcggtatccaattgctgctaaagtcgcagaacttcttatggagggtgttcattacaccgttgaactaaagggcaataatatagatctgacagaggacggtgtagcacatgctgagattattcttgggacagatgatctatgggatgagaatgatccatgggcaaggtttgtgatgaatgctttgaaggcaaaagtgttctaccgaagggatgtccagtatattgtcagggatgggaaagctattataattaatgaggaaaaggagttttcaaagatgttcaagatgcctgttattgaagtacctacgaatctgccaaatatacgggtggacttgcctatccaagcttttgcgactgcaagaggcaaatggcaatatgtacgggctgaagtagagtctatgttccaattaggtcgccctgttttagttggaactacaagtgtcgagagttctgaatacttgtcagagctacttaaagttcacaagattccacacaatgtccttaatgcaaggccaaagtatgctgcaagagaagccgaaataattgcccaagctggaagaaaacatgctattacaatatctactaatatggctggcagaggaactgacattattttaggtggtaatccaaaaatgcttgcaaaagaaatagtagaagataacatacttccatttttgacccatgaacctcctaatattgacatggaaggggaatccacatcccacaagggtctctcaaatgtagaacttagtccatcatcagtaggtctgcttgccaaagctgcaatcatgtcaaaatatattcacaaaagcgagagaaatgaatggtctttgagtaaggcaaaatccactattgctgaatctatagaaatgggtcaaatgattgggatggagaaactgcaagagcgcatgactgaagagtctgagatgtaccctctttgtgatgcaataggacttgcttatctcagtgtcttaagggattgcgaagttcattgttcttttgaaggtgctgcagtgaagagattaggtgggcttcatgtagtaggaacctctttgcatgagtcacgccgaattgataaccaactgcgcggcagagcaggcagacagggtgatcctgggtcgacacggtttatggtgagcttacaagatgaaatattccagaaatttaatctggacactgaatgggccgtgaggctaatatcaaggataacgaatgatgaagacatagctatcgagagcaatgttgttgtgaaacaggtc

SEQ ID NO: 25892 - DNA, 2260 bp, Zea Mays
ctaccatggccggcggcggcggcggctctctgtctagcccctccgcctccttcctttccagtcccaccccaacaccgccccctcgtctcctccgcaggtgtagcacgaagtctgcctcacgagatagccccatcctcagaccaaaaaagccgcctccactcttctgcgcggcggcagccactcccacccccgctcccgcggccgcgtccaagtcggctgggtcatggagggacctgtgcagtctcaacgcctgggtggtgcgagactaccgccgccttgtcgactccgtcggcgcgctcgagccggcgcttcggaggctctctgaggaacagttgaaggcgaagacggccgagttccgcagccgcctaacgcgcggggagacgctcgccgacgtccaggccgatgcgtttgctgtggtacgtgaggcggctaggaggacgcttgggatgcggcatttcgacgtccagataattggcggtgctgtgctccatgacggctgcattgcagagatgaagacaggcgaggggaagacgcttgtttccacacttgcggcttatctaaatgcccttacagggaaaggggttcattggtgactgtaaatgattatttggcacagcgtgatgctgaatggatgggtcgtgttcatcgctttctcggtcttactgttggtctgattcaggcgggtatgaagtcagatgagagaagagctagctacagatgtgacattacatacactaacaactcggaacttggatttgactatcttcgtgacaacctatctcgaaacaaagaacaactagttatgagatggccaaggccattccattttgctattgtggacgaagtggactcagtacttatagatgagggaaggaatccattattaataagtggagaggataatagagatgcagttcggtatccaattgctgctaaagtcgcagaacttcttatggagggtgttcattacaccgttgaactaaagggcaataatatagatctgacagaggacggtgtagcacatgctgagattattcttgggacagatgatctatgggatgagaatgatccatgggcaaggtttgtgatgaatgctttgaaggcaaaagtgttctaccgaagggatgtccagtatattgtcagggatgggaaagctattataattaatgagttaaccggccgagttgaacccaagagaagatggtctgatggtatccaccaagcagtagaagcaaaagaaggcctaaaaatccagactcggtaattgtggctcaaatcacatatcagtcattgtttaagctttatcctaaactttctgggatgacaggaactgctaagacagaggaaaaggagttttcaaagatgttcaagatgcctgttattgaagtacctacgaatctgccaaatatacgggtggacttgcctatccaagcttttgcgtgtcgagagttctgaatacttgtcagagctacttaaagttcacaagattccacacaatgtccttaatgcaaggccaaagtatgctgcaagagaagccgaaataattgcccaagctggaagaaaacatgctattacaatatctactaatatggctggcagaggaactgacattattttaggtggtaatccaaaaatgcttgcaaaagaaatagtagaagataacatacttccatttttgacccatgaacctcctaatattgacatggaaggggaatccacatcccacaagggtctctcaaatgtagaacttagtccatcatcagtaggtctgcttgccaaagctgcaatcatgtcaaaatatattcacaaaagcgagagaaatgaatggtctttgagtaaggcaaaatccactattgctgaatctatagaaatgggtcaaatgattgggatggagaaactgcaagagcgcatgactgaagagtctgagatgtaccctctttgtgatgcaataggacttgcttatctcagtgtcttaagggattgcgaagttcattgttcttttgaaggtgctgcagtgaagagattaggtgggcttcatgtagtaggaacctctttgcatgagtcacgccgaattgataaccaactgcgcggcagagcaggcagacagggtgatcctgggtcgacacggtttatggtgagcttacaagatgaaatattccagaaatttaatctggacactgaatgggccgtgaggctaatatcaaggataacgaatgatgaagacatagctatcgagagcaatgttgttgtgaaacaggtc

SEQ ID NO: 25893 - DNA, 2347 bp, Zea Mays
ccgactaccatggccggcggcggcggcggctctctgtctagcccctccgcctccttcctttccagtcccaccccaacaccgccccctcgtctcctccgcaggtgtagcacgaagtctgcctcacgagatagccccatcctcagaccaaaaaagccgcctccactcttctgcgcggcggcagccactcccacccccgctcccgcggccgcgtccaagtcggctgggtcatggagggacctgtgcagtctcaacgcctgggtggtgcgagactaccgccgccttgtcgactccgtcggcgcgctcgagccggcgcttcggaggctctctgaggaacagttgaaggcgaagacggccgagttccgcagccgcctaacgcgcggggagacgctcgccgacgtccagatgcgtttgctgtggtacgtgaggcggctaggaggacgcttgggatgcggcatttcgacgtccagataattggcggtgctgtgctccatgacggctgcattgcagagatgaagacaggcgaggggaagacgcttgtttccacacttgcggcttatctaaatgcccttacagggaaaggggttcatgtggtgactgtaaatgattatttggcacagcgtgatgctgaatggatgggtcgtgttcatcgctttctcggtcttactgttggtctgattcaggcgggtatgaagtcagatgagagaagagctagctacagatgtgacattacatacactaacaactcggaacttggatttgactatcttcgtgacaacctatctcgaaacaaagaacaactagttatgagatggccaaggccattccattttgctattgtggacgaagtggactcagtacttatagatgagggaaggaatccattattaataagtggagaggataatagagatgcagttcggtatccaattgctgctaaagtcgcagaacttcttatggagggtgttcattacaccgttgaactaaagggcaataatatagatctgacagaggacggtgtagcacatgctgagattattcttgggacagatgatctatgggatgagaatgatccatgggcaaggtttgtgatgaatgctttgaaggcaaaagtgttctaccgaagggatgtccagtatattgtcagggatgggaaagctattataattaatgagttaaccggccgagttgaacccaagagaagatggtctgatggtatccaccaagcagtagaagcaaaagaaggcctaaaaatccagactcggtaattgtggctcaaatcacatatcagtcattgtttaagctttatcctaaactttctgggatgacaggaactgctaagacagaggaaaaggagttttcaaagatgttcaagatgcctgttattgaagtacctacgaatctgccaaatatacgggtggacttgcctatccaagcttttgcgactgcaagaggcaaatggcaatatgtacgggctgaagtagagtctatgttccaattaggtcgccctgttttagttggaactacaagtgtcgagagttctgaatacttgtcagagctacttaaagttcacaagattccacacaatgtccttaatgcaaggccaaagtatgctgcaagagaagccgaaataattgcccaagctggaagaaaacatgctattacaatatctactaatatggctggcagaggaactgacattattttaggtggtaatccaaaaatgcttgcaaaagaaatagtagaagataacatacttccatttttgacccatgaacctcctaatattgacatggaaggggaatccacatcccacaagggtctctcaaatgtagaacttagtccatcatcagtaggtctgcttgccaaagctgcaatcatgtcaaaatatattcacaaaagcgagagaaatgaatggtctttgagtaaggcaaaatccactattgctgaatctatagaaatgggtcaaatgattgggatggagaaactgcaagagcgcatgactgaagagtctgagatgtaccctctttgtgatgcaataggacttgcttatctcagtgtcttaagggattgcgaagttcattgttcttttgaaggtgctgcagtgaagagattaggtgggcttcatgtagtaggaacctctttgcatgagtcacgccgaattgataaccaactgcgcggcagagcaggcagacagggtgatcctgggtcgacacggtttatggtgagcttacaagatgaaatattccagaaatttaatctggacactgaatgggccgtgaggctaatatcaaggataacgaatgatgaagacatagctatcgagagcaatgttgttgtgaaacaggtc

SEQ ID NO: 25894 - DNA, 2121 bp, Zea Mays
ctcatcccaactgaccgactaccatggccggcggcggcggcggctctctgtctagcccctccgcctccttcctttccagtcccaccccaacaccgccccctcgtctcctccgcaggtgtagcacgaagtctgcctcacgagatagccccatcctcagaccaaaaaagccgcctccactcttctgcgcggcggcagccactcccacccccgctcccgcggccgcgtccaagtcggctgggtcatggagggacctgtgcagtctcaacgcctgggtggtgcgagactaccgccgccttgtcgactccgtcggcgcgctcgagccggcgcttcggaggctctctgaggaacagttgaaggcgaagacggccgagttccgcagccgcctaacgcgcggggagacgctcgccgacgtccaggccgatgcgtttgctgtggtacgtgaggcggctaggaggacgcttgggatgcggcatttcgacgtccagataattggcggtgctgtgctccatgacggctgcattgcagagatgaagacaggcgaggggaagacgcttgtttccacacttgcggcttatctaaatgcccttacagggaaaggggttcatgtggtgactgtaaatgattatttggcacagcgtgatgctgaatggatgggtcgtgttcatcgctttctcggtcttactgttggtctgattcaggaacttggatttgactatcttcgtgacaacctatctcgaaacaaagaacaactagttatgagatggccaaggccattccattttgctattgtggacgaagtggactcagtacttatagatgagggaaggaatccattattaataagtggagaggataatagagatgcagttcggtatccaattgctgctaaagtcgcagaacttcttatggagggtgttcattacaccgttgaactaaagggcaataatatagatctgacagaggacggtgtagcacatgctgagattattcttgggacagatgatctatgggatgagaatgatccatgggcaaggtttgtgatgaatgctttgaaggcaaaagtgttctaccgaagggatgtccagtatattgtcagggatgggaaagctattataattaatgagttaaccggccgagttgaacccaagagaagatggtctgatggtatccaccaagcagtagaagcaaaagaaggcctaaaaatccaggcagactcggtaattgtggctcaaatcacatatcagtcattgtttaagctttatcctaaactttctgggatgacaggaactgctaagacagagtgtcgagagttctgaatacttgtcagagctacttaaagttcacaagattccacacaatgtccttaatgcaaggccaaagtatgctgcaagagaagccgaaataattgcccaagctggaagaaaacatgctattacaatatctactaatatggctggcagaggaactgacattattttaggtggtaatccaaaaatgcttgcaaaagaaatagtagaagataacatacttccatttttgacccatgaacctcctaatattgacatggaaggggaatccacatcccacaagggtctctcaaatgtagaacttagtccatcatcagtaggtctgcttgccaaagctgcaatcatgtcaaaatatattcacaaaagcgagagaaatgaatggtctttgagtaaggcaaaatccactattgctgaatctatagaaatgggtcaaatgattgggatggagaaactgcaagagcgcatgactgaagagtctgagatgtaccctctttgtgatgcaataggacttgcttatctcagtgtcttaagggattgcgaagttcattgttcttttgaaggtgctgcagtgaagagattaggtgggcttcatgtagtaggaacctctttgcatgagtcacgccgaattgataaccaactgcgcggcagagcaggcagacagggtgatcctgggtcgacacggtttatggtgagcttacaagatgaaatattccagaaatttaatctggacactgaatgggccgtgaggctaatatcaaggataacgaatgatgaagacatagctatcgagagcaatgttgttgtgaaacaggtc

SEQ ID NO: 25895 - DNA, 2329 bp, Zea Mays
ctcatcccaactgaccgactaccatggccggcggcggcggcggctctctgtctagcccctccgcctccttcctttccagtcccaccccaacaccgccccctcgtctcctccgcaggtgtagcacgaagtctgcctcacgagatagccccatcctcagaccaaaaaagccgcctccactcttctgcgcggcggcagccactcccacccccgctcccgcggccgcgtccaagtcggctgggtcatggagggacctgtgcagtctcaacgcctgggtggtgcgagactaccgccgccttgtcgactccgtcggcgcgctcgagccggcgcttcggaggctctctgaggaacagttgaaggcgaagacggccgagttccgcagccgcctaacgcgcggggagacgctcgccgacgtccaggccgatgcgtttgctgtggtacgtgaggcggctaggaggacgcttgggatgcggcatttcgacgtccagagatgaagacaggcgaggggaagacgcttgtttccacacttgcggcttatctaaatgcccttacagggaaaggggttcatgtggtgactgtaaatgattatttggcacagcgtgatgctgaatggatgggtcgtgttcatcgctttctcggtcttactgttggtctgattcaggcgggtatgaagtcagatgagagaagagctagctacagatgtgacattacatacactaacaactcggaacttggatttgactatcttcgtgacaacctatctcgaaacaaagaacaactagttatgagatggccaaggccattccattttgctattgtggacgaagtggactcagtacttatagatgagggaaggaatccattattaataagtggagaggataatagagatgcagttcggtatccaattgctgctaaagtcgcagaacttcttatggagggtgttcattacaccgttgaactaaagggcaataatatagatctgacagaggacggtgtagcacatgctgagattattcttgggacagatgatctatgggatgagaatgatccatgggcaaggtttgtgatgaatgctttgaaggcaaaagtgttctaccgaagggatgtccagtatattgtcagggatgggaaagctattataattaatgagttaaccggccgagttgaacccaagagaagatggtctgatggtatccaccaagcagtagaagcaaaagaaggcctaaaaatccaggcagactcggtaattgtggctcaaatcacatatcagtcattgtttaagctttatcctaaactttctgggatgacaggaactgctaagacagaggaaaaggagttttcaaagatgttcaagatgcctgttattgaagtacctacgaatctgccaaatatacgggtggacttgcctatccaagcttttgcgactgcaagaggcaaatggcaatatgtacgggctgaagtagagtctatgttccaattaggtcgccctgttttagttggaactacaagtgtcgagagttctgaatacttgtcagagctacttaaagttcacaagattccacacaatgtccttaatgcaaggccaaagtatgctgcaagagaagccgaaataattgcccaagctggaagaaaacatgctattacaatatctactaatatggctggcagaggaactgacattattttaggtggtaatccaaaaatgcttgcaaaagaaatagtagaagataacatacttccatttttgacccatgaacctcctaatattgacatggaaggggaatccacatcccacaagggtctctcaaatgtagaacttagtccatcatcagtaggtctgcttgccaaagctgcaatcatgtcaaaatatattcacaaaagcgagagaaatgaatggtctttgagtaaggcaaaatccactattgctgaatctatagaaatgggtcaaatgattgggatggagaaactgcaagagcgcatgactgaagagtctgagatgtaccctctttgtgatgcaataggacttgcttatctcagtgtcttaagggattgcgaagttcattgttcttttgaaggtgctgcagtgaagagattaggtgggcttcatgtagtaggaacctctttgcatgagtcacgccgaattgataaccaactgcgcggcagagcaggcagacagggtgatcctgggtcgacacggtttatggtgagcttacaagatgaaatattccagaaatttaatctggacactgaatgggccgtgaggctaatatcaaggataacgaatgatgaagacatagctatcgagagcaatgttgttgtgaaacaggtc

SEQ ID NO: 25896 - DNA, 2197 bp, Zea Mays
ttcttctcatcccaactgaccgactaccatggccggcggcggcggcggctctctgtctagcccctccgcctccttcctttccagtcccaccccaacaccgccccctcgtctcctccgcaggtgtagcacgaagtctgcctcacgagatagccccatcctcagaccaaaaaagccgcctccactcttctgcgcggcggcagccactcccacccccgctcccgcggccgcgtccaagtcggctgggtcatggagggacctgtgcagtctcaacgcctgggtggtgcgagactaccgccgccttgtcgactccgtcggcgcgctcgagccggcgcttcggaggctctctgaggaacagttgaaggcgaagacggccgagttccgcagccgcctaacgcgcggggagacgctcgccgacgtccaggccgatgcgtttgctgtggtacgtgaggcggctaggaggacgcttgggatgcggcatttcgacgtccagataattggcggtgctgtgctccatgacggctgcattgcagagatgaagacaggcgaggggaagacgcttgtttccacacttgcggcttatctaaatgcccttacagggaaaggggttcatgtggtgactgtaaatgattatttggcacagcgtgatgctgaatggatgggtcgtgttcatcgctttctcggtcttactgttggtctgattcaggcgggtatgaagtcagatgagagaagagctagctacagatgtgacattacatacactaacaactcggaacttggatttgactatcttcgtgacaacctatctcgaaacaaagaacaactagttatgagatggccaaggccattccattttgctattgtggacgaagtggactcagtacttatagatgagggaaggaatccattattaataagtggagaggataatagagatgcagttcggtatccaattgctgctaaagtcgcagaacttcttatggagggtgttcattacaccgttgaactaaagggcaataatatagatctgacagaggacggtgtagcacatgctgagattattcttgggacagatgatctatgggatgagaatgatccatgggcaagttaaccggccgagttgaacccaagagaagatggtctgatggtatccaccaagcagtagaagcaaaagaaggcctaaaaatccaggcagactcggtaattgtggctcaaatcacatatcagtcattgtttaagctttatcctaaactttctgggatgacaggaactgctaagacagaggaaaaggagttttcaaagatgttcaagatgcctgttattgaagtacctacgaatctgccaaatatacgggtggacttgcctatccaagcttttgcgtgtcgagagttctgaatacttgtcagagctacttaaagttcacaagattccacacaatgtccttaatgcaaggccaaagtatgctgcaagagaagccgaaataattgcccaagctggaagaaaacatgctattacaatatctactaatatggctggcagaggaactgacattattttaggtggtaatccaaaaatgcttgcaaaagaaatagtagaagataacatacttccatttttgacccatgaacctcctaatattgacatggaaggggaatccacatcccacaagggtctctcaaatgtagaacttagtccatcatcagtaggtctgcttgccaaagctgcaatcatgtcaaaatatattcacaaaagcgagagaaatgaatggtctttgagtaaggcaaaatccactattgctgaatctatagaaatgggtcaaatgattgggatggagaaactgcaagagcgcatgactgaagagtctgagatgtaccctctttgtgatgcaataggacttgcttatctcagtgtcttaagggattgcgaagttcattgttcttttgaaggtgctgcagtgaagagattaggtgggcttcatgtagtaggaacctctttgcatgagtcacgccgaattgataaccaactgcgcggcagagcaggcagacagggtgatcctgggtcgacacggtttatggtgagcttacaagatgaaatattccagaaatttaatctggacactgaatgggccgtgaggctaatatcaaggataacgaatgatgaagacatagctatcgagagcaatgttgttgtgaaacaggtc

SEQ ID NO: 25897 - DNA, 2390 bp, Zea Mays
cccaaccctcttccggttcttctcatcccaactgaccgactaccatggccggcggcggcggcggctctctgtctagcccctccgcctccttcctttccagtcccaccccaacaccgccccctcgtctcctccgcaggtgtagcacgaagtctgcctcacgagatagccccatcctcagaccaaaaaagccgcctccactcttctgcgcggcggcagccactcccacccccgctcccgcggccgcgtccaagtcggctgggtcatggagggacctgtgcagtctcaacgcctgggtggtgcgagactaccgccgccttgtcgactccgtcggcgcgctcgagccggcgcttcggaggctctctgaggaacagttgaaggcgaagacggccgagttccgcagccgcctaacgcgcggggagacgctcgccgacgtccaggccgatgcgtttgctgtggtacgtgaggcggctaggaggacgcttgggatgcggcatttcgacgtccagataattggcggtgctgtgctccatgacggctgcattgcagagatgaagacaggcgaggggaagacgcttgtttccacacttgcggcttatctaaatgcccttacagggaaaggggttcatgtggtgactgtaaatgattatttggcacagcgtgatgctgaatggatgggtcgtgttcatcgctttctcggtcttactgttggtctgattcaggcgggtatgaagtcagatgagagaagagctagctacagatgtgacattacatacactaacaactcggaacttggatttgactatcttcgtgacaacctatctcgaaacaaagaacaactagttatgagatggccaaggccattccattttgctattgtggacgaagtggactcagtacttatagatgagggaaggaatccattattaataagtggagaggataatagagatgcagttcggtatccaattgctgctaaagtcgcagaacttcttatggagggtgttcattacaccgttgaactaaagggcaataatatagatctgacagaggacggtgtagcacatgctgagattattcttgggacagatgatctatgggatgagaatgatccatgggcaaggtttgtgatgaatgctttgaaggcaaaagtgttctaccgaagggatgtccagtatattgtcagggatgggaaagctattataattaatgagttaaccggccgagttgaacccaagagaagatggtctgatggtatccaccaagcagtagaagcaaaagaaggcctaaaaatccaggcagactcggtaattgtggctcaaatcacatatcagtcattgtttaagctttatcctaaactttctgggatgacaggaactgctaagacagaggaaaaggagttttcaaagatgttcaagatgcctgttattgaagtacctacgaatctgccaaatatacgggtggacttgcctatccaagcttttgcgactgcaagaggcaaatggcaatatgtacgggctgaagtagagtctatgttccaattaggtcgccctgttttagttggaactacaagtgtcgagagttctgaatacttgtcagagctacttaaagttcacaagattccacacaatgtccttaatgcaaggccaaagtatgctgcaagagaagccgaaataattgcccaagctggaagaaaacatgctattacaatatctactaatatggctggcagaggaactgacattattttaggtggtaatccaaaaatgcttgcaaaagaaatagtagaagataacatacttccatttttgacccatgaacctcctaatattgacatggaaggggaatccacatcccacaagggtctctcaaatgtagaacttagtccatcatcagtaggtctgcttgccaaagctgcaatcatgtcaaaatatattcacaaaagcgagagaaatgaatggtctttgagtaaggcaaaatccactattgctgaatctatagaaatgggtcaaatgattgggatggagaaactgcaagagcgcatgactgaagagtctgagatgtaccctctttgtgatgcaataggacttgcttatctcagtgtcttaagggattgcgaagttcattgttcttttgaaggtgctgcagtgaagagattaggtgggcttcatgtagtaggaacctctttgcatgagtcacgccgaattgataaccaactgcgcggcagagcaggcagacagggtgatcctgggtcgacacggtttatggtgagcttacaagatgaaatattccagaaatttaatctggacactgaatgggccgtgaggctaatatcaaggataacgaatgatgaagacatagctatcgagagcaatgttgttgtgaaacaggtc

SEQ ID NO: 25898 - DNA, 2363 bp, Zea Mays
cccaaccctcttccggttcttctcatcccaactgaccgactaccatggccggcggcggcggcggctctctgtctagcccctccgcctccttcctttccagtcccaccccaacaccgccccctcgtctcctccgcaggtgtagcacgaagtctgcctcacgagatagccccatcctcagaccaaaaaagccgcctccactcttctgcgcggcggcagccactcccacccccgctcccgcggccgcgtccaagtcggctgggtcatggagggacctgtgcagtctcaacgcctgggtggtgcgagactaccgccgccttgtcgactccgtcggcgcgctcgagccggcgcttcggaggctctctgaggaacagttgaaggcgaagacggccgagttccgcagccgcctaacgcgcggggagacgctcgccgacgtccaggccgatgcgtttgctgtggtacgtgaggcggctaggaggacgcttgggatgcggcatttcgacgtccagataattggcggtgctgtgctccatgacggctgcattgcagagatgaagacaggcgaggggaagacgcttgtttccacacttgcggcttatctaaatgcccttacagggaaaggggttcatgtggtgactgtaaatgattatttggcacagcgtgatgctgaatggatgggtcgtgttcatcgctttctcggtcttactgttggtctgattcaggcgggtatgaagtcagatgagagaagagctagctacagatgtgacattacatacactaacaactcggaacttggatttgactatcttcgtgacaacctatctcgaaacaaagaacaactagttatgagatggccaaggccattccattttgctattgtggacgaagtggactcagtacttatagatgagggaaggaatccattattaataagtggagaggataatagagatgcagttcggtatccaattgctgctaaagtcgcagaacttcttatggagggtgttcattacaccgttgaactaaagggcaataatatagatctgacagaggacggtgtagcacatgctgagattattcttgggacagatgatctatgggatgagaatgatccatgggcaaggtttgtgatgaatgctttgaaggcaaaagtgttctaccgaagggatgtccagtatattgtcagggatgggaaagctattataattaatgagttaaccggccgagttgaacccaagagaagatggtctgatggtatccaccaagcagtagaagcaaaagaaggcctaaaaatccaggcagactcggtaattgtggctcaaatcacatatcagtcattgtttaagctttatcctaaactttctgggatgacaggaactgctaagacagaggaaaaggagttttcaaagatgttcaagatgcctgttattgaagtacctacgaatctgccaaatatacggactgcaagaggcaaatggcaatatgtacgggctgaagtagagtctatgttccaattaggtcgccctgttttagttggaactacaagtgtcgagagttctgaatacttgtcagagctacttaaagttcacaagattccacacaatgtccttaatgcaaggccaaagtatgctgcaagagaagccgaaataattgcccaagctggaagaaaacatgctattacaatatctactaatatggctggcagaggaactgacattattttaggtggtaatccaaaaatgcttgcaaaagaaatagtagaagataacatacttccatttttgacccatgaacctcctaatattgacatggaaggggaatccacatcccacaagggtctctcaaatgtagaacttagtccatcatcagtaggtctgcttgccaaagctgcaatcatgtcaaaatatattcacaaaagcgagagaaatgaatggtctttgagtaaggcaaaatccactattgctgaatctatagaaatgggtcaaatgattgggatggagaaactgcaagagcgcatgactgaagagtctgagatgtaccctctttgtgatgcaataggacttgcttatctcagtgtcttaagggattgcgaagttcattgttcttttgaaggtgctgcagtgaagagattaggtgggcttcatgtagtaggaacctctttgcatgagtcacgccgaattgataaccaactgcgcggcagagcaggcagacagggtgatcctgggtcgacacggtttatggtgagcttacaagatgaaatattccagaaatttaatctggacactgaatgggccgtgaggctaatatcaaggataacgaatgatgaagacatagctatcgagagcaatgttgttgtgaaacaggtc

SEQ ID NO: 25899 - DNA, 2304 bp, Zea Mays
cccaaccctcttccggttcttctcatcccaactgaccgactaccatggccggcggcggcggcggctctctgtctagcccctccgcctccttcctttccagtcccaccccaacaccgccccctcgtctcctccgcaggtgtagcacgaagtctgcctcacgagatagccccatcctcagaccaaaaaagccgcctccactcttctgcgcggcggcagccactcccacccccgctcccgcggccgcgtccaagtcggctgggtcatggagggacctgtgcagtctcaacgcctgggtggtgcgagactaccgccgccttgtcgactccgtcggcgcgctcgagccggcgcttcggaggctctctgaggaacagttgaaggcgaagacggccgagttccgcagccgcctaacgcgcggggagacgctcgccgacgtccaggccgatgcgtttgctgtggtacgtgaggcggctaggaggacgcttgggatgcggcatttcgacgtccagataattggcggtgctgtgctccatgacggctgcattgcagagatgaagacaggcgaggggaagacgcttgtttccacacttgcggcttatctaaatgcccttacagggaaaggggttcatgtggtgactgtaaatgattatttggcacagcgtgatgctgaatggatgggtcgtgttcatcgctttctcggtcttactgttggtctgattcaggcgggtatgaagtcagatgagagaagagctagctacagatgtgacattacatacactaacaactcggaacttggatttgactatcttcgtgacaacctatctcgaaacaaagaacaactagttatgagatggccaaggccattccattttgctattgtggacgaagtggactcagtacttatagatgagggaaggaatccattattaataagtggagaggataatagagatgcagttcggtatccaattgctgctaaagtcgcagaacttcttatggagggtgttcattacaccgttgaactaaagggcaataatatagatctgacagaggacggtgtagcacatgctgagattattcttgggacagatgatctatgggatgagaatgatccatgggcaaggtttgtgatgaatgctttgaaggcaaaagtgttctaccgaagggatgtccagtatattgtcagggatgggaaagctattataattaatgagttaaccggccgagttgaacccaagagaagatggtctgatggtatccaccaagcagtagaagcaaaagaaggcctaaaaatccaggcagactcggtaattgtggctcaaatcacatatcagtcattgtttaagctttatcctaaactttctgggatgacaggaactgctaagacagaggaaaaggagttttcaaagatgttcaagatgcctgttattgaagtacctacgaatctgccaaatatacgggtggacttgcctatccaagcttttgcgtgtcgagagttctgaatacttgtcagagctacttaaagttcacaagattccacacaatgtccttaatgcaaggccaaagtatgctgcaagagaagccgaaataattgcccaagctggaagaaaacatgctattacaatatctactaatatggctggcagaggaactgacattattttaggtggtaatccaaaaatgcttgcaaaagaaatagtagaagataacatacttccatttttgacccatgaacctcctaatattgacatggaaggggaatccacatcccacaagggtctctcaaatgtagaacttagtccatcatcagtaggtctgcttgccaaagctgcaatcatgtcaaaatatattcacaaaagcgagagaaatgaatggtctttgagtaaggcaaaatccactattgctgaatctatagaaatgggtcaaatgattgggatggagaaactgcaagagcgcatgactgaagagtctgagatgtaccctctttgtgatgcaataggacttgcttatctcagtgtcttaagggattgcgaagttcattgttcttttgaaggtgctgcagtgaagagattaggtgggcttcatgtagtaggaacctctttgcatgagtcacgccgaattgataaccaactgcgcggcagagcaggcagacagggtgatcctgggtcgacacggtttatggtgagcttacaagatgaaatattccagaaatttaatctggacactgaatgggccgtgaggctaatatcaaggataacgaatgatgaagacatagctatcgagagcaatgttgttgtgaaacaggtc

SEQ ID NO: 25900 - DNA, 2334 bp, Zea Mays
cccaaccctcttccggttcttctcatcccaactgaccgactaccatggccggcggcggcggcggctctctgtctagcccctccgcctccttcctttccagtcccaccccaacaccgccccctcgtctcctccgcaggtgtagcacgaagtctgcctcacgagatagccccatcctcagaccaaaaaagccgcctccactcttctgcgcggcggcagccactcccacccccgctcccgcggccgcgtccaagtcggctgggtcatggagggacctgtgcagtctcaacgcctgggtggtgcgagactaccgccgccttgtcgactccgtcggcgcgctcgagccggcgcttcggaggctctctgaggaacagttgaaggcgaagacggccgagttccgcagccgcctaacgcgcggggagacgctcgccgacgtccaggccgatgcgtttgctgtggtacgtgaggcggctaggaggacgcttgggatgcggcatttcgacgtccagataattggcggtgctgtgctccatgacggctgcattgcagagatgaagacaggcgaggggaagacgcttgtttccacacttgcggcttatctaaatgcccttacagggaaaggggttcatgtggtgactgtaaatgattatttggcacagcgtgatgctgaatggatgggtcgtgttcatcgctttctcggtcttactgttggtctgattcaggcgggtatgaagtcagatgagagaagagctagctacagatgtgacattacatacactaacaactcggaacttggatttgactatcttcgtgacaacctatctcgaaacaaagaacaactagttatgagatggccaaggccattccattttgctattgtggacgaagtggactcagtacttatagatgagggaaggaatccattattaataagtggagaggataatagagatgcagttcggtatccaattgctgctaaagtcgcagaacttcttatggagggtgttcattacaccgttgaactaaagggcaataatatagatctgacagaggacggtgtagcacatgctgagattattcttgggacagatgatctatgggatgagaatgatccatgggcaaggtttgtgatgaatgctttgaaggcaaaagtgttctaccgaagggatgtccagtatattgtcagggatgggaaagctattataattaatgagttaaccggccgagttgaacccaagagaagatggtctgatggtatccaccaagcagtagaagcaaaagaaggcctaaaaatccaggcagactcggtaattgtggctcaaatcacatatcagtcattgtttaagctttatcctaaactttctgggatgacaggaactgctaagacagaggaaaaggagttttcaaagatgttcaagatgcctgttattgaagtacctacgaatctgccaaatatacgggtggacttgcctatccaagcttttgcgactgcaagaggcaaatggcaatatgtacgggctgaagtagagtctatgttccaattaggtcgccctgttttagttggaactacaagtgtcgagagttctgaatacttgtcagagctacttaaagttcacaagattccacacaatgtccttaatgcaaggccaaagtatgctgcaagagaagccgaaataattgcccaagctggaagaaaacatgctattacaatatctactaatatggctggcagaggaactgacattattttaggtggtaatccaaaaatgcttgcaaaagaaatagtagaagataacatacttccatttttgacccatgaacctcctaatattgacatggaaggggaatccacatcccacaagggtctctcaaatgtagaacttagtccatcatcagtaggtctgcttgccaaagctgcaatcatgtcaaaatatattcacaaaagcgagagaaatgaatggtctttgagtaaggcaaaatccactattgctgaatctatagaaatgggtcaaatgattgggatggagaaactgcaagagcgcatgactgaagagtctgagatgtaccctctttgtgatgcaataggacttgcttatctcagtgtcttaagggattgcgaagttcattgttcttttgaaggtgctgcagtgaagagattagctgcgcggcagagcaggcagacagggtgatcctgggtcgacacggtttatggtgagcttacaagatgaaatattccagaaatttaatctggacactgaatgggccgtgaggctaatatcaaggataacgaatgatgaagacatagctatcgagagcaatgttgttgtgaaacaggtc

SEQ ID NO: 25901 - DNA, 2300 bp, Zea Mays
cccaaccctcttccggttcttctcatcccaactgaccgactaccatggccggcggcggcggcggctctctgtctagcccctccgcctccttcctttccagtcccaccccaacaccgccccctcgtctcctccgcaggtgtagcacgaagtctgcctcacgagatagccccatcctcagaccaaaaaagccgcctccactcttctgcgcggcggcagccactcccacccccgctcccgcggccgcgtccaagtcggctgggtcatggagggacctgtgcagtctcaacgcctgggtggtgcgagactaccgccgccttgtcgactccgtcggcgcgctcgagccggcgcttcggaggctctctgaggaacagttgaaggcgaagacggccgagttccgcagccgcctaacgcgcggggagacgctcgccgacgtccaggccgatgcgtttgctgtggtacgtgaggcggctaggaggacgcttgggatgcggcatttcgacgtccagataattggcggtgctgtgctccatgacggctgcattgcagagatgaagacaggcgaggggaagacgcttgtttccacacttgcggcttatctaaatgcccttacagggaaaggggttcatgtggtgactgtaaatgattatttggcacagcgtgatgctgaatggatgggtcgtgttcatcgctttctcggtcttactgttggtctgattcaggcgggtatgaagtcagatgagagaagagctagctacagatgtgacattacatacactaacaactcggaacttggatttgactatcttcgtgacaacctatctcgaaacaaagaacaactagttatgagatggccaaggccattccattttgctattgtggacgaagtggactcagtacttatagatgagggaaggaatccattattaataagtggagaggataatagagatgcagttcggtatccaattgctgctaaagtcgcagaacttcttatggagggtgttcattacaccgttgaactaaagggcaataatatagatctgacagaggacggtgtagcacatgctgagattattcttgggacagatgatctatgggatgagaatgatccatgggcaaggtttgtgatgaatgctttgaaggcaaaagtgttctaccgaagggatgtccagtatattgtcagggatgggaaagctattataattaatgagttaaccggccgagttgaacccaagagaagatggtctgatggtatccaccaagcagtagaagcaaaagaaggcctaaaaatccagactcggtaattgtggctcaaatcacatatcagtcattgtttaagctttatcctaaactttctgggatgacaggaactgctaagacagaggaaaaggagttttcaaagatgttcaagatgcctgttattgaagtacctacgaatctgccaaatatacgggtggacttgcctatccaagcttttgcgtgtcgagagttctgaatacttgtcagagctacttaaagttcacaagattccacacaatgtccttaatgcaaggccaaagtatgctgcaagagaagccgaaataattgcccaagctggaagaaaacatgctattacaatatctactaatatggctggcagaggaactgacattattttaggtggtaatccaaaaatgcttgcaaaagaaatagtagaagataacatacttccatttttgacccatgaacctcctaatattgacatggaaggggaatccacatcccacaagggtctctcaaatgtagaacttagtccatcatcagtaggtctgcttgccaaagctgcaatcatgtcaaaatatattcacaaaagcgagagaaatgaatggtctttgagtaaggcaaaatccactattgctgaatctatagaaatgggtcaaatgattgggatggagaaactgcaagagcgcatgactgaagagtctgagatgtaccctctttgtgatgcaataggacttgcttatctcagtgtcttaagggattgcgaagttcattgttcttttgaaggtgctgcagtgaagagattaggtgggcttcatgtagtaggaacctctttgcatgagtcacgccgaattgataaccaactgcgcggcagagcaggcagacagggtgatcctgggtcgacacggtttatggtgagcttacaagatgaaatattccagaaatttaatctggacactgaatgggccgtgaggctaatatcaaggataacgaatgatgaagacatagctatcgagagcaatgttgttgtgaaacaggtc

SEQ ID NO: 25902 - DNA, 2386 bp, Zea Mays
cccaaccctcttccggttcttctcatcccaactgaccgactaccatggccggcggcggcggcggctctctgtctagcccctccgcctccttcctttccagtcccaccccaacaccgccccctcgtctcctccgcaggtgtagcacgaagtctgcctcacgagatagccccatcctcagaccaaaaaagccgcctccactcttctgcgcggcggcagccactcccacccccgctcccgcggccgcgtccaagtcggctgggtcatggagggacctgtgcagtctcaacgcctgggtggtgcgagactaccgccgccttgtcgactccgtcggcgcgctcgagccggcgcttcggaggctctctgaggaacagttgaaggcgaagacggccgagttccgcagccgcctaacgcgcggggagacgctcgccgacgtccaggccgatgcgtttgctgtggtacgtgaggcggctaggaggacgcttgggatgcggcatttcgacgtccagataattggcggtgctgtgctccatgacggctgcattgcagagatgaagacaggcgaggggaagacgcttgtttccacacttgcggcttatctaaatgcccttacagggaaaggggttcatgtggtgactgtaaatgattatttggcacagcgtgatgctgaatggatgggtcgtgttcatcgctttctcggtcttactgttggtctgattcaggcgggtatgaagtcagatgagagaagagctagctacagatgtgacattacatacactaacaactcggaacttggatttgactatcttcgtgacaacctatctcgaaacaaagaacaactagttatgagatggccaaggccattccattttgctattgtggacgaagtggactcagtacttatagatgagggaaggaatccattattaataagtggagaggataatagagatgcagttcggtatccaattgctgctaaagtcgcagaacttcttatggagggtgttcattacaccgttgaactaaagggcaataatatagatctgacagaggacggtgtagcacatgctgagattattcttgggacagatgatctatgggatgagaatgatccatgggcaaggtttgtgatgaatgctttgaaggcaaaagtgttctaccgaagggatgtccagtatattgtcagggatgggaaagctattataattaatgagttaaccggccgagttgaacccaagagaagatggtctgatggtatccaccaagcagtagaagcaaaagaaggcctaaaaatccagactcggtaattgtggctcaaatcacatatcagtcattgtttaagctttatcctaaactttctgggatgacaggaactgctaagacagaggaaaaggagttttcaaagatgttcaagatgcctgttattgaagtacctacgaatctgccaaatatacgggtggacttgcctatccaagcttttgcgactgcaagaggcaaatggcaatatgtacgggctgaagtagagtctatgttccaattaggtcgccctgttttagttggaactacaagtgtcgagagttctgaatacttgtcagagctacttaaagttcacaagattccacacaatgtccttaatgcaaggccaaagtatgctgcaagagaagccgaaataattgcccaagctggaagaaaacatgctattacaatatctactaatatggctggcagaggaactgacattattttaggtggtaatccaaaaatgcttgcaaaagaaatagtagaagataacatacttccatttttgacccatgaacctcctaatattgacatggaaggggaatccacatcccacaagggtctctcaaatgtagaacttagtccatcatcagtaggtctgcttgccaaagctgcaatcatgtcaaaatatattcacaaaagcgagagaaatgaatggtctttgagtaaggcaaaatccactattgctgaatctatagaaatgggtcaaatgattgggatggagaaactgcaagagcgcatgactgaagagtctgagatgtaccctctttgtgatgcaataggacttgcttatctcagtgtcttaagggattgcgaagttcattgttcttttgaaggtgctgcagtgaagagattaggtgggcttcatgtagtaggaacctctttgcatgagtcacgccgaattgataaccaactgcgcggcagagcaggcagacagggtgatcctgggtcgacacggtttatggtgagcttacaagatgaaatattccagaaatttaatctggacactgaatgggccgtgaggctaatatcaaggataacgaatgatgaagacatagctatcgagagcaatgttgttgtgaaacaggtc

SEQ ID NO: 25903 - DNA, 2244 bp, Zea Mays
cccaaccctcttccggttcttctcatcccaactgaccgactaccatggccggcggcggcggcggctctctgtctagcccctccgcctccttcctttccagtcccaccccaacaccgccccctcgtctcctccgcaggtgtagcacgaagtctgcctcacgagatagccccatcctcagaccaaaaaagccgcctccactcttctgcgcggcggcagccactcccacccccgctcccgcggccgcgtccaagtcggctgggtcatggagggacctgtgcagtctcaacgcctgggtggtgcgagactaccgccgccttgtcgactccgtcggcgcgctcgagccggcgcttcggaggctctctgaggaacagttgaaggcgaagacggccgagttccgcagccgcctaacgcgcggggagacgctcgccgacgtccaggccgatgcgtttgctgtggtacgtgaggcggctaggaggacgcttgggatgcggcatttcgacgtccagataattggcggtgctgtgctccatgacggctgcattgcagagatgaagacaggcgaggggaagacgcttgtttccacacttgcggcttatctaaatgcccttacagggaaaggggttcatgtggtgactgtaaatgattatttggcacagcgtgatgctgaatggatgggtcgtgttcatcgctttctcggtcttactgttggtctgattcaggcgggtatgaagtcagatgagagaagagctagctacagatgtgacattacatacactaacaactcggaacttggatttgactatcttcgtgacaacctatctcgaaacaaagaacaactagttatgagatggccaaggccattccattttgctattgtggacgaagtggactcagtacttatagatgagggaaggaatccattattaataagtggagaggataatagagatgcagttcggtatccaattgctgctaaagtcgcagaacttcttatggagggtgttcattacaccgttgaactaaagggcaataatatagatctgacagaggacggtgtagcacatgctgagattattcttgggacagatgatctatgggatgagaatgatccatgggcaaggtttgtgatgaatgctttgaaggcaaaagtgttctaccgaagggatgtccagtatattgtcagggatgggaaagctattataattaatgagttaaccggccgagttgaacccaagagaagatggtctgatggtatccaccaagcagtagaagcaaaagaaggcctaaaaatccagactcggtaattgtggctcaaatcacatatcagtcattgtttaagctttatcctaaactttctgggatgacaggaactgctaagacagaggaaaaggagttttcaaagatgttcaagatgcctgttattgaagtacctacgaatctgccaaatatacgggtggacttgcctatccaagcttttgcgtgtcgagagttctgaatacttgtcagagctacttaaagttcacaagattccacacaatgtccttaatgcaaggccaaagtatgctgcaagagaagccgaaataattgcccaagctggaagaaaacatgctattacaatatctactaatatggctggcagaggaactgacattattttaggtggtaatccaaaaatgcttgcaaaagaaatagtagaagataacatacttccatttttgacccatgaacctcctaatattgacatggaaggggaatccacatcccacaagggtctctcaaatgtagaacttagtccatcatcagtaggtctgcttgccaaagctgcaatcatgtcaaaatatattcacaaaagcgagagaaatgaatggtctttgagtaaggcaaaatccactattgctgaatctatagaaatgggtcaaatgattgggatggagaaactgcaagagcgcatgactgaagagtctgagatgtaccctctttgtgatgcaataggacttgcttatctcagtgtcttaagggattgcgaagttcattgttcttttgaaggtgctgcagtgaagagattagctgcgcggcagagcaggcagacagggtgatcctgggtcgacacggtttatggtgagcttacaagatgaaatattccagaaatttaatctggacactgaatgggccgtgaggctaatatcaaggataacgaatgatgaagacatagctatcgagagcaatgttgttgtgaaacaggtc

SEQ ID NO: 25904 - DNA, 2248 bp, Zea Mays
cccaaccctcttccggttcttctcatcccaactgaccgactaccatggccggcggcggcggcggctctctgtctagcccctccgcctccttcctttccagtcccaccccaacaccgccccctcgtctcctccgcaggtgtagcacgaagtctgcctcacgagatagccccatcctcagaccaaaaaagccgcctccactcttctgcgcggcggcagccactcccacccccgctcccgcggccgcgtccaagtcggctgggtcatggagggacctgtgcagtctcaacgcctgggtggtgcgagactaccgccgccttgtcgactccgtcggcgcgctcgagccggcgcttcggaggctctctgaggaacagttgaaggcgaagacggccgagttccgcagccgcctaacgcgcggggagacgctcgccgacgtccaggccgatgcgtttgctgtggtacgtgaggcggctaggaggacgcttgggatgcggcatttcgacgtccagataattggcggtgctgtgctccatgacggctgcattgcagagatgaagacaggcgaggggaagacgcttgtttccacacttgcggcttatctaaatgcccttacagggaaaggggttcatgtggtgactgtaaatgattatttggcacagcgtgatgctgaatggatgggtcgtgttcatcgctttctcggtcttactgttggtctgattcaggcgggtatgaagtcagatgagagaagagctagctacagatgtgacattacatacactaacaactcggaacttggatttgactatcttcgtgacaacctatctcgaaacaaagaacaactagttatgagatggccaaggccattccattttgctattgtggacgaagtggactcagtacttatagatgagggaaggaatccattattaataagtggagaggataatagagatgcagttcggtatccaattgctgctaaagtcgcagaacttcttatggagggtgttcattacaccgttgaactaaagggcaataatatagatctgacagaggacggtgtagcacatgctgagattattcttgggacagatgatctatgggatgagaatgatccatgggcaaggtttgtgatgaatgctttgaaggcaaaagtgttctaccgaagggatgtccagtatattgtcagggatgggaaagctattataattaatgagttaaccggccgagttgaacccaagagaagatggtctgatggtatccaccaagcagtagaagcaaaagaaggcctaaaaatccaggcagactcggtaattgtggctcaaatcacatatcagtcattgtttaagctttatcctaaactttctgggatgacaggaactgctaagacagaggaaaaggagttttcaaagatgttcaagatgcctgttattgaagtacctacgaatctgccaaatatacgggtggacttgcctatccaagcttttgcgtgtcgagagttctgaatacttgtcagagctacttaaagttcacaagattccacacaatgtccttaatgcaaggccaaagtatgctgcaagagaagccgaaataattgcccaagctggaagaaaacatgctattacaatatctactaatatggctggcagaggaactgacattattttaggtggtaatccaaaaatgcttgcaaaagaaatagtagaagataacatacttccatttttgacccatgaacctcctaatattgacatggaaggggaatccacatcccacaagggtctctcaaatgtagaacttagtccatcatcagtaggtctgcttgccaaagctgcaatcatgtcaaaatatattcacaaaagcgagagaaatgaatggtctttgagtaaggcaaaatccactattgctgaatctatagaaatgggtcaaatgattgggatggagaaactgcaagagcgcatgactgaagagtctgagatgtaccctctttgtgatgcaataggacttgcttatctcagtgtcttaagggattgcgaagttcattgttcttttgaaggtgctgcagtgaagagattagctgcgcggcagagcaggcagacagggtgatcctgggtcgacacggtttatggtgagcttacaagatgaaatattccagaaatttaatctggacactgaatgggccgtgaggctaatatcaaggataacgaatgatgaagacatagctatcgagagcaatgttgttgtgaaacaggtc

SEQ ID NO: 25905 - DNA, 2219 bp, Zea Mays
cccaaccctcttccggttcttctcatcccaactgaccgactaccatggccggcggcggcggcggctctctgtctagcccctccgcctccttcctttccagtcccaccccaacaccgccccctcgtctcctccgcaggtgtagcacgaagtctgcctcacgagatagccccatcctcagaccaaaaaagccgcctccactcttctgcgcggcggcagccactcccacccccgctcccgcggccgcgtccaagtcggctgggtcatggagggacctgtgcagtctcaacgcctgggtggtgcgagactaccgccgccttgtcgactccgtcggcgcgctcgagccggcgcttcggaggctctctgaggaacagttgaaggcgaagacggccgagttccgcagccgcctaacgcgcggggagacgctcgccgacgtccaggccgatgcgtttgctgtggtacgtgaggcggctaggaggacgcttgggatgcggcatttcgacgtccagataattggcggtgctgtgctccatgacggctgcattgcagagatgaagacaggcgaggggaagacgcttgtttccacacttgcggcttatctaaatgcccttacagggaaaggggttcatgtggtgactgtaaatgattatttggcacagcgtgatgctgaatggatgggtcgtgttcatcgctttctcggtcttactgttggtctgattcaggcgggtatgaagtcagatgagagaagagctagctacagatgtgacattacatacactaacaactcggaacttggatttgactatcttcgtgacaacctatctcgaaacaaagaacaactagttatgagatggccaaggccattccattttgctattgtggacgaagtggactcagtacttatagatgagggaaggaatccattattaataagtggagaggataatagagatgcagttcggtatccaattgctgctaaagtcgcagaacttcttatggagggtgttcattacaccgttgaactaaagggcaataatatagatctgacagaggacggtgtagcacatgctgagattattcttgggacagatgatctatgggatgagaatgatccatgggcaaggtttgtgatgaatgctttgaaggcaaaagtgttctaccgaagggatgtccagtatattgtcagggatgggaaagctattataattaatgagttaaccggccgagttgaacccaagagaagatggtctgatggtatccaccaagcagtagaagcaaaagaaggcctaaaaatccagtttttggtgtgcaatgctaattgcaatttaatcaggcagactcggtaattgtggctcaaatcacatatcagtcattgtttaagctttatcctaaactttctgggatgacaggaactgctaagacagaggaaaaggagttttcaaagatgttcaagatgcctgttattgaagtacctacgaatctgccaaatatacgggtggacttgcctatccaagcttttgcgtgtcgagagttctgaatacttgtcagagctacttaaagttcacaagattccacacaatgtccttaatgcaaggccaaagtatgctgcaagagaagccgaaataattgcccaagctggaagaaaacatgctattacaatatctactaatatggctggcagaggaactgacattattttaggtggtaatccaaaaatgcttgcaaaagaaatagtagaagataacatacttccatttttgacccatgaacctcctaatattgacatggaaggggaatccacatcccacaagggtctctcaaatgtagaacttagtccatcatcagtaggtctgcttgccaaagctgcaatcatgtcaaaatatattcacaaaagcgagagaaatgaatggtctttgagtaaggcaaaatccactattgctgaatctatagaaatgggtcaaatgattgggatggagaaactgcaagagcgcatgactgaagagtctgagatgtaccctctttgtgatgcaataggacttgcttatctcagtgtcttaagggattgcgaagttcattgttcttttgaaggtgctgcagtgaagagattaggtgggcttcatgtagtaggaacctctttgcatgagtcacgccgaattgataaccaaatttcttgtccatcatcagcagctttcattcttacactggatgcatccatgcactga

SEQ ID NO: 25906 - DNA, 1256 bp, Zea Mays
atggccggcggcggcggcggctctctgtctagcccctccgcctccttcctttccagtcccaccccaacaccgccccctcgtctcctccgcaggtgtagcacgaagtctgcctcacgagatagccccatcctcagaccaaaaaagccgcctccactcttctgcgcggcggcagccactcccacccccgctcccgcggccgcgtccaagtcggctgggtcatggagggacctgtgcagtctcaacgcctgggtggtgcgagactaccgccgccttgtcgactccgtcggcgcgctcgagccggcgcttcggaggctctctgaggaacagttgaaggcgaagacggccgagttccgcagccgcctaacgcgcggggagacgctcgccgacgtccagatgcgtttgctgtggtacgtgaggcggctaggaggacgcttgggatgcggcatttcgacgtccagataattggcggtgctgtgctccatgacggctgcattgcagagatgaagacaggcgaggggaagacgcttgtttccacacttgcggcttatctaaatgcccttacagggaaaggggttcatgtggtgactgtaaatgattatttggcacagcgtgatgctgaatggatgggtcgtgttcatcgctttctcggtcttactgttggtctgattcaggcgggtatgaagtcagatgagagaagagctagctacagatgtgacattacatacactaacaactcggaacttggatttgactatcttcgtgacaacctatctcgaaacaaagaacaactagttatgagatggccaaggccattccattttgctattgtggacgaagtggactcagtacttatagatgagggaaggaatccattattaataagtggagaggataatagagatgcagttcggtatccaattgctgctaaagtcgcagaacttcttatggagggtgttcattacaccgttgaactaaagggcaataatatagatctgacagaggacggtgtagcacatgctgagattattcttgggacagatgatctatgggatgagaatgatccatgggcaaggtttgtgatgaatgctttgaaggcaaaagtgttctaccgaagggatgtccagtatattgtcagggatgggaaagctattataattaatgagttgtacttagcagcttgtgcaggggaggctttgcatatgtacagacacatgcacttgtatatattcctatttgagttttttgaagggacatag

SEQ ID NO: 25907 - DNA, 690 bp, Zea Mays
ctcctttgctgtgttctggccagctcaagaaccactgcatctgccccctataatcagtaccttgggctgccgtattcagtgaagatttcttccttgccctcaaattctagtcaaagttcactgtttgagtgtgcagtccttgtgtactgctggtataaccctctctgcatcctaggtttgcctgtcccagaacccttctccccatggactagatacgctcacttccccatggactagatacgctcactgacacacccctttcccttgcttacatattctgtaatttggggctagttattttggagctcctcactgcccttaaattccagccaagactctttgcatatgcgaggtgttcctgatgttcttaagtctacacagcttcctccctagccaccaaaatttggtctgtacagaggctgggcacaccatcaactgttgttgtggtgaccactccggtcagtttgccgccttgccgtggccggagcgattcaagaagggtcgtgccgtcgtgatctagcactgcggacagcctccacgctggccgagcaactcgcgctttctccagctgttagacaacagccggtattctcctgaaccctgtatgcttcgtgttatttcagagttcagaacagagttctctccaggtacacgaactaaaccctatgaaagtgcgactagtgatcatga

SEQ ID NO: 25908 - DNA, 1277 bp, Zea Mays
tggagctctcctttgctgtgttctggccagctcaagaaccactgcatctgccccctataatcagtaccttgggctgccgtattcagtgaagatttcttccttgccctcaaattctagtcaaagttcactgtttgagtgtgcagtccttgtgtactgctggtataaccctctctgcatcctaggtttgcctgtcccagaacccttctccccatggactagatacgctcacttccccatggactagatacgctcactgacacacccctttcccttgcttacatattctgtaatttggggctagttattttggagctcctcactgcccttaaattccagccaagactctttgcatatgcgaggtgttcctgatgttcttaagtctacacagcttcctccctagccaccaaaatttggtctgtacagaggctgggcacaccatcaactgttgttgtggtgaccactccggtcagtttgccgccttgccgtggccggagcgattcaagaagggtcgtgccgtcgtgatctagcactgcggacagcctccacgctggccgagcaactcgcgctttctccagctgttagacaacagccggtaatcaggagtgttctaggtgtctctgtggctggaagatgcttctagtcttgaaggaggattagttaggtttaggtgtgagctttggaagggttctaccttcctagttttgtatgtaagttatgcactttgagtatattaggacttgtaataaatgtaactcttcctatgtaataaccttcatttttagaaatgataagaatattttgtaaagtcttccgctcttatctccgaagtgtgtgtatcgaatgtgattactgtaatatgcatgtatggtgggagatccttgggatgatgagttcaagttgttgaactcatgatagccttgtcaagttacctggtacacgtgcatagccatctgaggccatctgggcaaggattggtgcacgtgggctcgataactcgggagggctgtcacagaatggtatcggagcgatcccccattagcatggatattaaagtaatcctttgatagacttcaaaaggattttgagtccaaattattttggaaaaacttaagaatgaataagcaaatcatgatagtagaagtgcaaatagtatatggttaatactaaggactataatatggcttaatttaagatgctaaccactaacccgcaactataatgcatttttttgcaggtacacgaactaaaccctatgaaagtgcgactagtgatcatga

SEQ ID NO: 25909 - DNA, 656 bp, Zea Mays
ctcatgttgtgttggcgcccttggagctctcctttgctgtgttctggccagctcaagaaccactgcatctgccccctataatcagtaccttgggctgccgtattcagtgaagatttcttccttgccctcaaattctagtcaaagttcactgtttgagtgtgcagtccttgtgtactgctggtataaccctctctgcatcctaggtttgcctgtcccagaacccttctccccatggactagatacgctcacttccccatggactagatacgctcactgacacacccctttcccttgcttacatattctgtaatttggggctagttattttggagctcctcactgcccttaaattccagccaagactctttgcatatgcgaggtgttcctgatgttcttaagtctacacagcttcctccctagccaccaaaatttggtctgtacagaggctgggcacaccatcaactgttgttgtggtgaccactccggtcagtttgccgccttgccgtggccggagcgattcaagaagggtcgtgccgtcgtgatctagcactgcggacagcctccacgctggccgagcaactcgcgctttctccagctgttagacaacagccggtacacgaactaaaccctatgaaagtgcgactagtgatcatga

SEQ ID NO: 25910 - DNA, 1466 bp, Zea Mays
ggtatttcgggtacccgattgtgatacccgaattacccgaaataatttcgggttttgcaagttgctacccgaaattcccgaacaaaattcgggtttcgggtatttcgggttcgggttcgggtatttcgggttcgggtttcgggttacgggttttttgcccagccctaggaacaggtgatgctccacccaggttaattaaggattggatgtgtatgtaggcctgtatgatcaaggactatcttaactggccacatgccctggatatgggacagggtaagcttgaacccggctattccatacatgaaaatacaatcgcacactaggagtggagagatggcgagagtggcatgtaccctcctggcaaaggaccgcctaaaaggggtggtgtgctcttgggtggcgcggacctgttcatgcagtggagtatccatgggaatggtagacatatgcaagagttacgagaaacatatgtcgtgtggttagagatcctcagctgagtaaatcgattcggatcgccgttatatccccggatctctgacctgcaacctaggtcaggatgtaaacattatgaataaaaatgatgttgtattgatgagatggtaaaattagactagatgcaactagattattgaaagtaaggactaatttaataagttatttctgcaaaagtatctaagttgattcatgctaaagcctttttcttgattcctatttaaccagcatatccttgagagtcatttttccttagttgggtaagacttgtgaaagcacactttgaactcagggttttcgaacccatgttgttgcaggtaatcaggagtgttctaggtgtctctgtggctggaagatgcttctagtcttgaaggaggattagttaggtttaggtgtgagctttggaagggttctaccttcctagttttgtatgtaagttatgcactttgagtatattaggacttgtaataaatgtaactcttcctatgtaataaccttcatttttagaaatgataagaatattttgtaaagtcttccgctcttatctccgaagtgtgtgtatcgaatgtgattactgtaatatgcatgtatggtgggagatccttgggatgatgagttcaagttgttgaactcatgatagccttgtcaagttacctggtacacgtgcatagccatctgaggccatctgggcaaggattggtgcacgtgggctcgataactcgggagggctgtcacagaatggtatcggagcgatcccccattagcatggatattaaagtaatcctttgatagacttcaaaaggattttgagtccaaattattttggaaaaacttaagaatgaataagcaaatcatgatagtagaagtgcaaatagtatatggttaatactaaggactataatatggcttaatttaagatgctaaccactaacccgcaactataatgcatttttttgcaggtacacgaactaaac

SEQ ID NO: 25911 - DNA, 4884 bp, Zea Mays
ctcctttgctgtgttctggccagctcaagaaccactgcatctgccccctataatcagtaccttgggctgccgtattcagtgaagatttcttccttgccctcaaattctagtcaaagttcactgtttgagtgtgcagtccttgtgtactgctggtataaccctctctgcatcctaggtttgcctgtcccagaacccttctccccatggactagatacgctcacttccccatggactagatacgctcactgacacacccctttcccttgcttacatattctgtaatttggggctagttattttggagctcctcactgcccttaaattccagccaagactctttgcatatgcgaggtgttcctgatgttcttaagtctacacagcttcctccctagccaccaaaatttggtctgtacagaggctgggcacaccatcaactgttgttgtggtgaccactccggtcagtttgccgccttgccgtggccggagcgattcaagaagggtcgtgccgtcgtgatctagcactgcggacagcctccacgctggccgagcaactcgcgctttctccagctgttagacaacagccgggtcgaagcctgaaaggtgtggctcctggtagcagaggtatggagtggtcatacattctttttggaggcaatccttgtggcggcagaaataactcctgatagtgctccaacagtttggatatctgctctggtattgcactaccctccaatgcttctgttggtctgagctcaaacatgtgttccacagcctctttacttaacagacccctcaactgcttgtcagacaaaggaatacaggaatctagttttggttgaattccttgcagctgcactgtctgcccttgatgacagaattctaacttcttttctgcccagtacacagacatgggactataaccttccagccaatccattcccaaaataatatcatagccactcaggggtaagaatttgaaatctgtatgaaaagtaatacccccacacaaccaaggacactggggtgcccagcagtcacaccacagtttcctaccatcagccactttaactggtaaaggtttaggcaattgttgtacattcttgacatctcccatcaaatgcagactcataaaactagctgaacttccagaatccaccagcaccaacatctgtttgtggtgtattgaagcccacaacctgatagttttgttggtttcactgccactcgcagctgctattgatacagctaacaccacctcctcatcctctggtgccacctgactctcacttccatcgacttcaatttctcctaccgcctgagaggtaatcgcccacatttcttccacaacatgtaatggcacactactggaacatgtatgatttgggttccatctttctccgcacttgaaacacaacccctttgctcttcgataagccttgagagcagcaagtttactatcctcagctctgtaactactatttgctcttcgcctctcatcactttggggtaatcctctatggctcaccactggaactgaactaccagccactacggaattcttttggtaacctttggacattccctggttctcaattctcctaccctctcttctacctgtccacacatcctcatgtaataaagctagggaacaagctgtatcgagattgttaggtctctgcatggccaccacagccctcacctcatccttcaagccatccacaaagcgtgctgtgatcatagccgacgtaagttgtccttcatgagctagcagttgatgaagtaacacatcaaactgttcaacatattcacttacagacccagtctgataaatatgatagaactgcctaatcaacaatccatgttgatctcttccgaaacggttaatcaggttagagcaaaactcctcccaactcatatgcctcaggtgatgctccacagactgtaaccaaaatattgccgatccttcaaaatgcatcacggccattctgatccacatctccctggctaccagatagaactcaaaataggtctcacatcgagtcttccacagcttcggattactcccatcaaaaactggaaaatccatgttgggcaccaatgatcctgacccttgtgaccaccctccaggcgaatttctatctactggatcataacgaaaaggagtttgggaccaggcttggttcatacctccatagttggtaaaatttcgccctccttccatgcctggacgccgattcggatcggggcgtcgaagctggtttactccactcgcagaatccaccatcggaggttcagatgatagagcttccactttactgcctccaccagtctcgccaaaactggttggcactcccaccggcctcttctcaaacttctccacctggatttggattccccgcatggtgtctgcaatctccttcatcttcgactcgacctccggcctccacttctgcagatctccctgctccgacatcacgcccttcaccactgtctccatgttccccagagcgccctgcatcaactccatccgccgatgagtctccctgtttccctcttcaatcttcgccaacaactgcgccaatggatcctccgtcttcgccggcgccatctcactcgccctcgcctggaatctcgtccaatattcgtggtggtgctccagagtcggctccgaataccaaatgttagacaacagccggtattctcctgaaccctgtatgcttcgtgttatttcagagttcagaacagagttctctccaggttcgtcaccgtttccagccgcttacaggagtatatatatatctccactctctttccccttttacaagacaagcataatctctagttaactactccactcaggtccaccaatcctgacattaggcctaatcactctgtggctgcgtcttctgggtcccacctccaccggccctggttctcctttctcccgctcagtgcacggaccgccagtgatgctgacaccagccgtcttcacacgagcgccaaagtcttggtgagtccctggtgctccatgtgtctcgaatttaaactctaccatacggtggccgcgcgcgtgatcgggctcgccagcctaagctttcggtcgctgtcctagatagtgttgtcctcgggttcccacgggaaaattaagcgtgtgcctgaacttgccatagatttggggtcgcgatagcgtcgtcgcagtcgtctgtgacgagttgccatggccgatcgagcggaggctcgtcagagttgtacgcagcggggtcggggttaaggttttgcaaaagaaagatagtcgagggacctaagtgaaactgtcagcgagacaaataaatagtggatcgggtcgatacaggtttagtcagaacacggggtcctttttgcaaagacgccagtgtgggcgcgcgggccatcgaccacatgccggtttggtcgggttctgggccggttggattgcttttggcccagaactgttcaccgctttaccttttcttttatccgtgagtttgtaaatagtgccaaaaatagaagaaaattgataaatcaatgggacaaattttattggatgtgttaaatcaagatctctggtgaagttggttgtaggatttttagagatgtcagtaaatattaagtgaattaagggtgatcttcgaaggactattggaattttagaaataagagttgagcaccaaaaatcatgattttttttggagaagcttgttatcagaagttgaacccttggaaaaaattggactatttaaatatgatttgcttagcaagctaattattgccctaaaaagaaaaaggacttcacctatgaaatgaggacacctagtagtttagtgaagtgataaagttgcttaaagagttttaagcttttggataataactaagatggattagttctctaggtttacctaagcaagttcaatttggtcacttttatcaagtgttaagttaggtagaaatatgtgtattgttgtcatatgttttagtttgtgatatttatgttcctcgcctctccttgtgagagtttgcattccatatcattacataagcatacatgtatttgtaattgacttgtaaaacacctagaagaagtggtgtttgaaggaggagtctactccagtggctgctgatcaagtggaggagccatctaactgggtattggatagagggatctgaagcctcttctctgcaacaaaagcaagccccggtgcattcaccccttacttgtatttttaaaaagacttttatacacttaagtctagtgaaatgtgcattaagtttataggaattgcttggaaactatttgatgcatcgattaccttgatatccattgctgttatagatacttctttggaagtatcaaatattgtttacaaaaatgcttagcctgcttagatcttgtggatagaggttgtcttatgcaataatgcctagctcaggggttatcctgaggaaggatggcttctacctgcaagaatatttttgttgggagcatggtgggatcttactgcaaagttccctataatgctcttttcatctttaggaacacaaaacaatcctaaaggtggaagtacttaactcgagacttgggctaggaacaggtaggggtgggcgttcgggttacccgaaattttcgggtcgggtaattcgggtttttaaaatttcgggttttgagaatcgatacccgaaattacaacgagtttttcaatacccgaaaattcgggtacccgaaatttcgggttcggttcgggtattcccgaactacccgaactattgtgttggcttcataaaaacacataaactctattaaattagtataaaaaatatagtttgaataatgatatacatggacatataaaacacaagcaatctacaat

SEQ ID NO: 25912 - DNA, 2534 bp, Zea Mays
tggagctctcctttgctgtgttctggccagctcaagaaccactgcatctgccccctataatcagtaccttgggctgccgtattcagtgaagatttcttccttgccctcaaattctagtcaaagttcactgtttgagtgtgcagtccttgtgtactgctggtataaccctctctgcatcctaggtttgcctgtcccagaacccttctccccatggactagatacgctcacttccccatggactagatacgctcactgacacacccctttcccttgcttacatattctgtaatttggggctagttattttggagctcctcactgcccttaaattccagccaagactctttgcatatgcgaggtgttcctgatgttcttaagtctacacagcttcctccctagccaccaaaatttggtctgtacagaggctgggcacaccatcaactgttgttgtggtgaccactccggtcagtttgccgccttgccgtggccggagcgattcaagaagggtcgtgccgtcgtgatctagcactgcggacagcctccacgctggccgagcaactcgcgctttctccagctgttagacaacagccggtattctcctgaaccctgtatgcttcgtgttatttcagagttcagaacagagttctctccaggttcgtcaccgtttccagccgcttacaggagtatatatatatctccactctctttccccttttacaagacaagcataatctctagttaactactccactcaggtccaccaatcctgacattaggcctaatcactctgtggctgcgtcttctgggtcccacctccaccggccctggttctcctttctcccgctcagtgcacggaccgccagtgatgctgacatcccctcctccttcagtagcagcttgaccccaagctggtgccataggaaagcgttgtttgatagcctgttcatcttcccaagttgctagagaatctggccagcccgaccacttgaccagcaattgtgtgaccaccttgttgccttttttatacaagcgagagtttaacacctcctcaggtacctgcaaccctgtggacaaatctggaactgagtcacatactggcgtacgagctcccactgccgactttaactgtgagacatgaaacacagggtgaacagaactgcccgctggtaacgccagttcataagcaacactattcacttgacgaatgatttcaaaaggtccgaagaaccgaaaagcaagcttttgaacagcacgatcttcaactgttttctggcaatatggctgtagcttcaggaataccttgtctcccaccgcaaaaactctctccaccctccctttgtctgcctgttttttcatccgatcctgggcacgttgcagatgaagcttaacttgttgaagcataagttgtctagtctgcagccaagtcgataaatcaggtactgagcactgctctgttggttcgagtcccaattgagaaggcgtgtgaccataaaggacctcaaatggggatttaccaagagacgtatggtaactggtgttataccaaaattccgcaagtgacaaccacgaataccattgtcgaggacaggcatggacaaagcatctgagataagcttccacacattggttcacacgctcagtttgcccatcggactgtggatgataagcactactcaaacacagtttggtaccagcaagccggaacaactcttgccaaagtttacttgtaaagataggatctctgtctgaaacaatggaagaaggtaatccatggagtttgtatacttcggaaaaatatagcttggccacggtcagagctgtaaatggatgggccaatgccagaaaatgagcatactttgaaaacttatccaccactaccatgatacaattataccgatgagatgtaggtagacctgaaatgaaatccatggtcaccacctgccaagcatgctctggtataggcaagggtaacaataaaccaggatagcggcttctatctggttttgcctggagacaaacagaacaagtactcacaaactccttaatttgacttttcattccaggccaactgaacacagacttaatacgtcgataggtaactgggaaacctgagtgacccccgactgcactgtcatgaagggcggtcatcaccttcaactgtaatgcagaatcatgtcccagccacactctgcctttatgtcgaataatcccagctgtcaacgtgaaagggtccatggaatgtccagtagccagagattgcaacaacttgttagcttgttcatcagactcataccctttggtaacctcagccaaccaacttggtactacagaggaagtggccaaagcatgtagctgcaaggttatatcatcatagtgcagatttggtcgtctggataaagcatcagccaccttgttctctactccttttttataaacaatagtgaaattcaaccccataagcttggttaatgctttttgctgccaaggagtagttaccctctgatcatctagatgaatgaggctctgctggtct

SEQ ID NO: 25913 - DNA, 2746 bp, Zea Mays
ctttattcagcttggtgttggaaatgaacggaagaagttggagaaaatagtagtgcggaatggtggccagttttctgcctgtctcacacggaagtgcacccatttagtagcaaataaacctggaggtgacaaatatgtcatggcccaaaaatggggtaatatttacattgtgaatccaaaatgggttgaccaatctgttgctcgaagagcttgtcaagatgaaaatagctacctcgtttgtcagacttcatctgcctttagtggttcaaagagttcccataaggagcaacaaaatccggagatcagtagtgcaagtgcaagctttcaacctgttccagcaacatcagttgatgattcagtatcaatgtcacaacatttgcctgcttcatttggtgatgcttcacggatcagcagcactgatattgttggtgcacctagtgtccaagagacagatgacatgcaggttgatagtcatattgctgaggactcagagccagaaaacgatgatctatatttatcaaattgtcgaatttctctggtgggttttgaagagaaagagttgttaaggcttgtcatgctgatacgtaatggaggtggatcccggcatattttgctaagtgagaagcttactcatattgttattggtacaccttcagatgaggaaaaaaaggaggtaagacgtctggctgcatggggtgtaataaatatagtgaaagtaacatggttagaagactgcaataaagcaaaaaaagaagtgaaagtatcctcaatgcatatagctactgagctcctcttgaagggattttctcaagtaagcatggaaaattctgctgatacacgtgaaactaaggtagccaaaagctcaggtgggatttttcatgttccaactgtcaatgacttgcatgaaaaacaccatgaaaaaggtgtgtcatctgaaaggaaaccaaaaagaggcaaacatgaaaacagtataagtaaaacccgatcagcagccaggactgaaaaatcaagtcaacagaatggattggccaatgttagcgagtaccagctccaatataaagtaacatcgataatgaattctggaagtagcagatcaaatatattcaaagggagaacattcagtttctcaaattcattttctcatgacaagagacctgaggttgttgattgggtcagagatggtggaggcgttatggtggatgacatacactcaactgctgcagatttcataattgagtgccacggacaaaacagcttgccttgtgacttctctcattcacttgtttcaactcaatggatacgatcatgtttggaggagaactgcttacaagatgttgggagtcatcctatcttctctcctttgcgctgtcgcatcccattcccaggatttgaaagctttcgtttctgtatttcactttcacaatatggagagaaagaaagacatctgctgaagaacttgtgctttctactgggagctaagtttacagacaaagcatataagggagtaacccatctcatctgcaaatttgcaagtggtcttaaatatgaggtttactccaaaagaggaactcccaccattacttctgagtggctctatgagtgtgtaaaacaggataaacttctccctgttgatcactttcagccaaaaccacttacatcacaggataaagatgcttatccgtgcactgccagccaatattccacacaggctaccagatttgattcctctgagctgcttagtggttgtcaagtaacaaaaaacaatgcaacacacaattctgtcaatgaagaaacaactatgcctgctgttagtagaaagagaagaatatctgttcctggtaaggttaacggtatttgtggaaacatcgaaaaaactgagaaacaactcgacaatagctctgtccctgatgtcgcagatgccatagaggttctatcatccaagatatttcaacctgacaattctgttgttcaagagcagaaagatacacactcctttgacatttcaaggagctggctgaacatgcaacagaagcaagatagcacctctgtcacaaaggttcaaaacttaaactctgtaccagtcccctccccagctcctactacttactaccctttcagtgagacgcagacagaatctcaggtcgttggatacgaagaagatttaacaggcaggcagaagatcatagacagggttcggtctcagagcattaatgtgactccgtcgagtgagattctttagttgtggaggcgaaccataacttctcccagatctgactgtcaaattgcgatagggaagatgtgttatgaaatctgcttgttgtgccatgtcggcttcaaattaagcagcatgaatggagtctacgaatgtggagtcgtattcctagccagatgacccgcgcagcataaatcaagaagatttccattgcatggcattcgatgaacggaacctcgcgctattacatcgtgatcttgtggatgtaaccacccttgtttgtagaactgacagacactaaacgcctgtgatccgtttggtcctgtacattaacaatcttgtacactatacaagagcaggtaaaggagttatatatatatatatatatatatatatatatgggtatgaacagatgtaacagttcatttttgatttaatgctcaattagtcgaggtagctggtgtagcactatgaaaatcattaaataaaataatgaatttagttaataatgatattaatagtaatgaattttct

SEQ ID NO: 25914 - DNA, 2757 bp, Zea Mays
tcgcagtgggctctgaatactttgaagaagcccattgtcaccatgaagtggttagagcaatgctggattgagcatcgtgttgtgcctcatgaaccttacaggattcttccctttactgggttgaatatctgtgtcactaaactggatccagctttctaaaagacaacacaccttgattactatattgatttcttaacatattattacaaacctggaggtgacaaatatgtcatggcccaaaaatggggtaatatttacattgtgaatccaaaatgggttgaccaatctgttgctcgaagagcaacatcagttgatgattcagtatcaatgtcacaacatttgcctgcttcatttggtgatgcttcacggatcagcagcactgatattgttggtgcacctagtgtccaagagacagatgacatgcaggttgatagtcatattgctgaggactcagagccagaaaacgatgatctatatttatcaaattgtcgaatttctctggtgggttttgaagagaaagagttgttaaggcttgtcatgctgatacgtaatggaggtggatcccggcatattttgctaagtgagaagcttactcatattgttattggtacaccttcagatgaggaaaaaaaggaggtaagacgtctggctgcatggggtgtaataaatatagtgaaagtaacatggttagaagactgcaataaagcaaaaaaagaagtgaaagtatcctcaatgcatatagctactgagctcctcttgaagggattttctcaagtaagcatggaaaattctgctgatacacgtgaaactaaggtagccaaaagctcaggtgggatttttcatgttccaactgtcaatgacttgcatgaaaaacaccatgaaaaaggtgtgtcatctgaaaggaaaccaaaaagaggcaaacatgaaaacagtataagtaaaacccgatcagcagccaggactgaaaaatcaagtcaacagaatggattggccaatgttagcgagtaccagctccaatataaagtaacatcgataatgaattctggaagtagcagatcaaatatattcaaagggagaacattcagtttctcaaattcattttctcatgacaagagacctgaggttgttgattgggtcagagatggtggaggcgttatggtggatgacatacactcaactgctgcagatttcataattgagtgccacggacaaaacagcttgccttgtgacttctctcattcacttgtttcaactcaatggatacgatcatgtttggaggagaactgcttacaagatgttgggagtcatcctatcttctctcctttgcgctgtcgcatcccattcccaggatttgaaagctttcgtttctgtatttcactttcacaatatggagagaaagaaagacatctgctgaagaacttgtgctttctactgggagctaagtttacagacaaagcatataagggagtaacccatctcatctgcaaatttgcaagtggtcttaaatatgaggtttactccaaaagaggaactcccaccattacttctgagtggctctatgagtgtgtaaaacaggataaacttctccctgttgatcactttcagccaaaaccacttacatcacaggataaagatgcttatccgtgcactgccagccaatattccacacaggctaccagatttgattcctctgagctgcttagtggttgtcaagtaacaaaaaacaatgcaacacacaattctggtaactctggtatttttgcagtcaatgaagaaacaactatgcctgctgttagtagaaagagaagaatatctgttcctggtaaggttaacggtatttgtggaaacatcgaaaaaactgagaaacaactcgacaatagctctgtccctgatgtcgcagatgccatagaggttctatcatccaagattcaggatgtgcaatctccgaggagtatatttcaacctgacaattctgttgttcaagagcagaaagatacacactcctttgacatttcaaggagctggctgaacatgcaacagaagcaagatagcacctctgtcacaaaggttcaaaacttaaactctgtaccagtcccctccccagctcctactacttactaccctttcagtgagacgcagacagaatctcaggtcgttggatacgaagaagatttaacaggcaggcagaagatcatagacagggttcggtctcagagcattaatgtgactccgtcgagtgagattctttagttgtggaggcgaaccataacttctcccagatctgactgtcaaattgcgatagggaagatgtgttatgaaatctgcttgttgtgccatgtcggcttcaaattaagcagcatgaatggagtctacgaatgtggagtcgtattcctagccagatgacccgcgcagcataaatcaagaagatttccattgcatggcattcgatgaacggaacctcgcgctattacatcgtgatcttgtggatgtaaccacccttgtttgtagaactgacagacactaaacgcctgtgatccgtttggtcctgtacattaacaatcttgtacactatacaagagcaggtaaaggagttatatatatatatatatatatatatatatatgggtatgaacagatgtaacagttcatttttgatttaatgctcaattagtcgaggtagctggtgtagcactatgaaaatcattaaataaaataatgaatttagttaataatgatattaatagtaatgaattttct

SEQ ID NO: 25915 - DNA, 3447 bp, Zea Mays
gtcggctattacaaaacccaaaagaaggtattccgtgctaggatgcgcacgggaaccgtacgagcatgagatacgttgccaaatccaaaacccaggctcccacgctgccatttcgcacaaaaactccggaggttcattctcccgccagttcccgcatctctttgaggcttccacctcaccgtcatcggcgcgcccgcatcccgctgccctccgatgacgccatcctacaactctggccccgcaggccccgccgggggtcgtagggcggcgaccttcgccggcgcttgtgtgtttctgtcgcggaatctggttgcccccgaggtgttcgacgccgtgcacgacgcgctccgcctcaacggtgccgaggtcctcctttgcgccgaccctagccgcacgggacccctcgacttccacgtcatctcatcctcctcccacgagagattcgccgatatgcggtccaaaggcttgaatttgctaggaccacagtgcattctttcctgtgctaaagaacgtcgctttctacctaaacaaagttatacgtgttgtcttgcaatggatggggttaaaacactttgttcaggctttgaaaagtctgagaaggttaggattgaagaactagtaacagccatgggaggtcatttgctaactaaacactctatggacgtgaattttgtaatcgtgaaggatgtcttggctgccaaatataaatgggctctgaatactttgaagaagcccattgtcaccatgaagtggttagagcaatgctggattgagcatcgtgttgtgcctcatgaaccttacaggattcttccctttactgggttgaatatctgtgtcactaaactggatccagatgaacggaagaagttggagaaaatagtagtgcggaatggtggccagttttctgcctgtctcacacggaagtgcacccatttagtagcaaataaacctggaggtgacaaatatgtcatggcccaaaaatggggtaatatttacattgtgaatccaaaatgggttgaccaatctgttgctcgaagagcaacatcagttgatgattcagtatcaatgtcacaacatttgcctgcttcatttggtgatgcttcacggatcagcagcactgatattgttggtgcacctagtgtccaagagacagatgacatgcaggttgatagtcatattgctgaggactcagagccagaaaacgatgatctatatttatcaaattgtcgaatttctctggtgggttttgaagagaaagagttgttaaggcttgtcatgctgatacgtaatggaggtggatcccggcatattttgctaagtgagaagcttactcatattgttattggtacaccttcagatgaggaaaaaaaggaggtaagacgtctggctgcatggggtgtaataaatatagtgaaagtaacatggttagaagactgcaataaagcaaaaaaagaagtgaaagtatcctcaatgcatatagctactgagctcctcttgaagggattttctcaagtaagcatggaaaattctgctgatacacgtgaaactaaggtagccaaaagctcaggtgggatttttcatgttccaactgtcaatgacttgcatgaaaaacaccatgaaaaaggtgtgtcatctgaaaggaaaccaaaaagaggcaaacatgaaaacagtataagtaaaacccgatcagcagccaggactgaaaaatcaagtcaacagaatggattggccaatgttagcgagtaccagctccaatataaagtaacatcgataatgaattctggaagtagcagatcaaatatattcaaagggagaacattcagtttctcaaattcattttctcatgacaagagacctgaggttgttgattgggtcagagatggtggaggcgttatggtggatgacatacactcaactgctgcagatttcataattgagtgccacggacaaaacagcttgccttgtgacttctctcattcacttgtttcaactcaatggatacgatcatgtttggaggagaactgcttacaagatgttgggagtcatcctatcttctctcctttgcgctgtcgcatcccattcccaggatttgaaagctttcgtttctgtatttcactttcacaatatggagagaaagaaagacatctgctgaagaacttgtgctttctactgggagctaagtttacagacaaagcatataagggagtaacccatctcatctgcaaatttgcaagtggtcttaaatatgaggtttactccaaaagaggaactcccaccattacttctgagtggctctatgagtgtgtaaaacaggataaacttctccctgttgatcactttcagccaaaaccacttacatcacaggataaagatgcttatccgtgcactgccagccaatattccacacaggctaccagatttgattcctctgagctgcttagtggttgtcaagtaacaaaaaacaatgcaacacacaattctgtcaatgaagaaacaactatgcctgctgttagtagaaagagaagaatatctgttcctggtaaggttaacggtatttgtggaaacatcgaaaaaactgagaaacaactcgacaatagctctgtccctgatgtcgcagatgccatagaggttctatcatccaagatatttcaacctgacaattctgttgttcaagagcagaaagatacacactcctttgacatttcaaggagctggctgaacatgcaacagaagcaagatagcacctctgtcacaaaggttcaaaacttaaactctgtaccagtcccctccccagctcctactacttactaccctttcagtgagacgcagacagaatctcaggtcgttggatacgaagaagatttaacaggcaggcagaagatcatagacagggttcggtctcagagcattaatgtgactccgtcgagtgagattctttagttgtggaggcgaaccataacttctcccagatctgactgtcaaattgcgatagggaagatgtgttatgaaatctgcttgttgtgccatgtcggcttcaaattaagcagcatgaatggagtctacgaatgtggagtcgtattcctagccagatgacccgcgcagcataaatcaagaagatttccattgcatggcattcgatgaacggaacctcgcgctattacatcgtgatcttgtggatgtaaccacccttgtttgtagaactgacagacactaaacgcctgtgatccgtttggtcctgtacattaacaatcttgtacactatacaagagcaggtaaaggagttatatatatatatatatatatatatatatatgggtatgaacagatgtaacagttcatttttgatttaatgctcaattagtcgaggtagctggtgtagcactatgaaaatcattaaataaaataatgaatttagttaataatgatattaatagtaatgaattttct

SEQ ID NO: 25916 - DNA, 3485 bp, Zea Mays
gtcggctattacaaaacccaaaagaaggtattccgtgctaggatgcgcacgggaaccgtacgagcatgagatacgttgccaaatccaaaacccaggctcccacgctgccatttcgcacaaaaactccggaggttcattctcccgccagttcccgcatctctttgaggcttccacctcaccgtcatcggcgcgcccgcatcccgctgccctccgatgacgccatcctacaactctggccccgcaggccccgccgggggtcgtagggcggcgaccttcgccggcgcttgtgtgtttctgtcgcggaatctggttgcccccgaggtgttcgacgccgtgcacgacgcgctccgcctcaacggtgccgaggtcctcctttgcgccgaccctagccgcacgggacccctcgacttccacgtcatctcatcctcctcccacgagagattcgccgatatgcggtccaaaggcttgaatttgctaggaccacagtgcattctttcctgtgctaaagaacgtcgctttctacctaaacaaagttatacgtgttgtcttgcaatggatggggttaaaacactttgttcaggctttgaaaagtctgagaaggttaggattgaagaactagtaacagccatgggaggtcatttgctaactaaacactctatggacgtgaattttgtaatcgtgaaggatgtcttggctgccaaatataaatgggctctgaatactttgaagaagcccattgtcaccatgaagtggttagagcaatgctggattgagcatcgtgttgtgcctcatgaaccttacaggattcttccctttactgggttgaatatctgtgtcactaaactggatccaggttggtgcggttgaactttattcagcttggtgttggaaatgaacggaagaagttggagaaaatagtagtgcggaatggtggccagttttctgcctgtctcacacggaagtgcacccatttagtagcaaataaacctggaggtgacaaatatgtcatggcccaaaaatggggtaatatttacattgtgaatccaaaatgggttgaccaatctgttgctcgaagagcaacatcagttgatgattcagtatcaatgtcacaacatttgcctgcttcatttggtgatgcttcacggatcagcagcactgatattgttggtgcacctagtgtccaagagacagatgacatgcaggttgatagtcatattgctgaggactcagagccagaaaacgatgatctatatttatcaaattgtcgaatttctctggtgggttttgaagagaaagagttgttaaggcttgtcatgctgatacgtaatggaggtggatcccggcatattttgctaagtgagaagcttactcatattgttattggtacaccttcagatgaggaaaaaaaggaggtaagacgtctggctgcatggggtgtaataaatatagtgaaagtaacatggttagaagactgcaataaagcaaaaaaagaagtgaaagtatcctcaatgcatatagctactgagctcctcttgaagggattttctcaagtaagcatggaaaattctgctgatacacgtgaaactaaggtagccaaaagctcaggtgggatttttcatgttccaactgtcaatgacttgcatgaaaaacaccatgaaaaaggtgtgtcatctgaaaggaaaccaaaaagaggcaaacatgaaaacagtataagtaaaacccgatcagcagccaggactgaaaaatcaagtcaacagaatggattggccaatgttagcgagtaccagctccaatataaagtaacatcgataatgaattctggaagtagcagatcaaatatattcaaagggagaacattcagtttctcaaattcattttctcatgacaagagacctgaggttgttgattgggtcagagatggtggaggcgttatggtggatgacatacactcaactgctgcagatttcataattgagtgccacggacaaaacagcttgccttgtgacttctctcattcacttgtttcaactcaatggatacgatcatgtttggaggagaactgcttacaagatgttgggagtcatcctatcttctctcctttgcgctgtcgcatcccattcccaggatttgaaagctttcgtttctgtatttcactttcacaatatggagagaaagaaagacatctgctgaagaacttgtgctttctactgggagctaagtttacagacaaagcatataagggagtaacccatctcatctgcaaatttgcaagtggtcttaaatatgaggtttactccaaaagaggaactcccaccattacttctgagtggctctatgagtgtgtaaaacaggataaacttctccctgttgatcactttcagccaaaaccacttacatcacaggataaagatgcttatccgtgcactgccagccaatattccacacaggctaccagatttgattcctctgagctgcttagtggttgtcaagtaacaaaaaacaatgcaacacacaattctgtcaatgaagaaacaactatgcctgctgttagtagaaagagaagaatatctgttcctggtaaggttaacggtatttgtggaaacatcgaaaaaactgagaaacaactcgacaatagctctgtccctgatgtcgcagatgccatagaggttctatcatccaagatatttcaacctgacaattctgttgttcaagagcagaaagatacacactcctttgacatttcaaggagctggctgaacatgcaacagaagcaagatagcacctctgtcacaaaggttcaaaacttaaactctgtaccagtcccctccccagctcctactacttactaccctttcagtgagacgcagacagaatctcaggtcgttggatacgaagaagatttaacaggcaggcagaagatcatagacagggttcggtctcagagcattaatgtgactccgtcgagtgagattctttagttgtggaggcgaaccataacttctcccagatctgactgtcaaattgcgatagggaagatgtgttatgaaatctgcttgttgtgccatgtcggcttcaaattaagcagcatgaatggagtctacgaatgtggagtcgtattcctagccagatgacccgcgcagcataaatcaagaagatttccattgcatggcattcgatgaacggaacctcgcgctattacatcgtgatcttgtggatgtaaccacccttgtttgtagaactgacagacactaaacgcctgtgatccgtttggtcctgtacattaacaatcttgtacactatacaagagcaggtaaaggagttatatatatatatatatatatatatatatatgggtatgaacagatgtaacagttcatttttgatttaatgctcaattagtcgaggtagctggtgtagcactatgaaaatcattaaataaaataatgaatttagttaataatgatattaatagtaatgaattttct

SEQ ID NO: 25917 - DNA, 3411 bp, Zea Mays
gtcggctattacaaaacccaaaagaaggtattccgtgctaggatgcgcacgggaaccgtacgagcatgagatacgttgccaaatccaaaacccaggctcccacgctgccatttcgcacaaaaactccggaggttcattctcccgccagttcccgcatctctttgaggcttccacctcaccgtcatcggcgcgcccgcatcccgctgccctccgatgacgccatcctacaactctggccccgcaggccccgccgggggtcgtagggcggcgaccttcgccggcgcttgtgtgtttctgtcgcggaatctggttgcccccgaggtgttcgacgccgtgcacgacgcgctccgcctcaacggtgccgaggtcctcctttgcgccgaccctagccgcacgggacccctcgacttccacgtcatctcatcctcctcccacgagagattcgccgatatgcggtccaaaggcttgaatttgctaggaccacagtgcattctttcctgtgctaaagaacgtcgctttctacctaaacaaagttatacgtgttgtcttgcaatggatggggttaaaacactttgttcaggctttgaaaagtctgagaaggttaggattgaagaactagtaacagccatgggaggtcatttgctaactaaacactctatggacgtgaattttgtaatcgtgaaggatgtcttggctgccaaatataaatgggctctgaatactttgaagaagcccattgtcaccatgaagtggttagagcaatgctggattgagcatcgtgttgtgcctcatgaaccttacaggattcttccctttactgggttgaatatctgtgtcactaaactggatccagctttctaaaagacaacacaccttgattactatattgatttcttaacatattattacaaacctggaggtgacaaatatgtcatggcccaaaaatggggtaatatttacattgtgaatccaaaatgggttgaccaatctgttgctcgaagagcaacatcagttgatgattcagtatcaatgtcacaacatttgcctgcttcatttggtgatgcttcacggatcagcagcactgatattgttggtgcacctagtgtccaagagacagatgacatgcaggttgatagtcatattgctgaggactcagagccagaaaacgatgatctatatttatcaaattgtcgaatttctctggtgggttttgaagagaaagagttgttaaggcttgtcatgctgatacgtaatggaggtggatcccggcatattttgctaagtgagaagcttactcatattgttattggtacaccttcagatgaggaaaaaaaggaggtaagacgtctggctgcatggggtgtaataaatatagtgaaagtaacatggttagaagactgcaataaagcaaaaaaagaagtgaaagtatcctcaatgcatatagctactgagctcctcttgaagggattttctcaagtaagcatggaaaattctgctgatacacgtgaaactaaggtagccaaaagctcaggtgggatttttcatgttccaactgtcaatgacttgcatgaaaaacaccatgaaaaaggtgtgtcatctgaaaggaaaccaaaaagaggcaaacatgaaaacagtataagtaaaacccgatcagcagccaggactgaaaaatcaagtcaacagaatggattggccaatgttagcgagtaccagctccaatataaagtaacatcgataatgaattctggaagtagcagatcaaatatattcaaagggagaacattcagtttctcaaattcattttctcatgacaagagacctgaggttgttgattgggtcagagatggtggaggcgttatggtggatgacatacactcaactgctgcagatttcataattgagtgccacggacaaaacagcttgccttgtgacttctctcattcacttgtttcaactcaatggatacgatcatgtttggaggagaactgcttacaagatgttgggagtcatcctatcttctctcctttgcgctgtcgcatcccattcccaggatttgaaagctttcgtttctgtatttcactttcacaatatggagagaaagaaagacatctgctgaagaacttgtgctttctactgggagctaagtttacagacaaagcatataagggagtaacccatctcatctgcaaatttgcaagtggtcttaaatatgaggtttactccaaaagaggaactcccaccattacttctgagtggctctatgagtgtgtaaaacaggataaacttctccctgttgatcactttcagccaaaaccacttacatcacaggataaagatgcttatccgtgcactgccagccaatattccacacaggctaccagatttgattcctctgagctgcttagtggttgtcaagtaacaaaaaacaatgcaacacacaattctgtcaatgaagaaacaactatgcctgctgttagtagaaagagaagaatatctgttcctggtaaggttaacggtatttgtggaaacatcgaaaaaactgagaaacaactcgacaatagctctgtccctgatgtcgcagatgccatagaggttctatcatccaagatatttcaacctgacaattctgttgttcaagagcagaaagatacacactcctttgacatttcaaggagctggctgaacatgcaacagaagcaagatagcacctctgtcacaaaggttcaaaacttaaactctgtaccagtcccctccccagctcctactacttactaccctttcagtgagacgcagacagaatctcaggtcgttggatacgaagaagatttaacaggcaggcagaagatcatagacagggttcggtctcagagcattaatgtgactccgtcgagtgagattctttagttgtggaggcgaaccataacttctcccagatctgactgtcaaattgcgatagggaagatgtgttatgaaatctgcttgttgtgccatgtcggcttcaaattaagcagcatgaatggagtctacgaatgtggagtcgtattcctagccagatgacccgcgcagcataaatcaagaagatttccattgcatggcattcgatgaacggaacctcgcgctattacatcgtgatcttgtggatgtaaccacccttgtttgtagaactgacagacactaaacgcctgtgatccgtttggtcctgtacattaacaatcttgtacactatacaagagcaggtaaaggagttatatatatatatatatatatatatatatatgggtatgaacagatgtaacagttcatttttgatttaatgctcaattagtcgaggtagctggtgtagcactatgaaaatcattaaataaaataatgaatttagttaataatgatattaatagtaatgaattttct

SEQ ID NO: 25918 - DNA, 3603 bp, Zea Mays
gtcggctattacaaaacccaaaagaaggtattccgtgctaggatgcgcacgggaaccgtacgagcatgagatacgttgccaaatccaaaacccaggctcccacgctgccatttcgcacaaaaactccggaggttcattctcccgccagttcccgcatctctttgaggcttccacctcaccgtcatcggcgcgcccgcatcccgctgccctccgatgacgccatcctacaactctggccccgcaggccccgccgggggtcgtagggcggcgaccttcgccggcgcttgtgtgtttctgtcgcggaatctggttgcccccgaggtgttcgacgccgtgcacgacgcgctccgcctcaacggtgccgaggtcctcctttgcgccgaccctagccgcacgggacccctcgacttccacgtcatctcatcctcctcccacgagagattcgccgatatgcggtccaaaggcttgaatttgctaggaccacagtgcattctttcctgtgctaaagaacgtcgctttctacctaaacaaagttatacgtgttgtcttgcaatggatggggttaaaacactttgttcaggctttgaaaagtctgagaaggttaggattgaagaactagtaacagccatgggaggtcatttgctaactaaacactctatggacgtgaattttgtaatcgtgaaggatgtcttggctgccaaatataaatgggctctgaatactttgaagaagcccattgtcaccatgaagtggttagagcaatgctggattgagcatcgtgttgtgcctcatgaaccttacaggattcttccctttactgggttgaatatctgtgtcactaaactggatccagatgaacggaagaagttggagaaaatagtagtgcggaatggtggccagttttctgcctgtctcacacggaagtgcacccatttagtagcaaataaacctggaggtgacaaatatgtcatggcccaaaaatggggtaatatttacattgtgaatccaaaatgggttgaccaatctgttgctcgaagagcttgtcaagatgaaaatagctacctcgtttgtcagacttcatctgcctttagtggttcaaagagttcccataaggagcaacaaaatccggagatcagtagtgcaagtgcaagctttcaacctgttccagcaacatcagttgatgattcagtatcaatgtcacaacatttgcctgcttcatttggtgatgcttcacggatcagcagcactgatattgttggtgcacctagtgtccaagagacagatgacatgcaggttgatagtcatattgctgaggactcagagccagaaaacgatgatctatatttatcaaattgtcgaatttctctggtgggttttgaagagaaagagttgttaaggcttgtcatgctgatacgtaatggaggtggatcccggcatattttgctaagtgagaagcttactcatattgttattggtacaccttcagatgaggaaaaaaaggaggtaagacgtctggctgcatggggtgtaataaatatagtgaaagtaacatggttagaagactgcaataaagcaaaaaaagaagtgaaagtatcctcaatgcatatagctactgagctcctcttgaagggattttctcaagtaagcatggaaaattctgctgatacacgtgaaactaaggtagccaaaagctcaggtgggatttttcatgttccaactgtcaatgacttgcatgaaaaacaccatgaaaaaggtgtgtcatctgaaaggaaaccaaaaagaggcaaacatgaaaacagtataagtaaaacccgatcagcagccaggactgaaaaatcaagtcaacagaatggattggccaatgttagcgagtaccagctccaatataaagtaacatcgataatgaattctggaagtagcagatcaaatatattcaaagggagaacattcagtttctcaaattcattttctcatgacaagagacctgaggttgttgattgggtcagagatggtggaggcgttatggtggatgacatacactcaactgctgcagatttcataattgagtgccacggacaaaacagcttgccttgtgacttctctcattcacttgtttcaactcaatggatacgatcatgtttggaggagaactgcttacaagatgttgggagtcatcctatcttctctcctttgcgctgtcgcatcccattcccaggatttgaaagctttcgtttctgtatttcactttcacaatatggagagaaagaaagacatctgctgaagaacttgtgctttctactgggagctaagtttacagacaaagcatataagggagtaacccatctcatctgcaaatttgcaagtggtcttaaatatgaggtttactccaaaagaggaactcccaccattacttctgagtggctctatgagtgtgtaaaacaggataaacttctccctgttgatcactttcagccaaaaccacttacatcacaggataaagatgcttatccgtgcactgccagccaatattccacacaggctaccagatttgattcctctgagctgcttagtggttgtcaagtaacaaaaaacaatgcaacacacaattctgtcaatgaagaaacaactatgcctgctgttagtagaaagagaagaatatctgttcctggtaaggttaacggtatttgtggaaacatcgaaaaaactgagaaacaactcgacaatagctctgtccctgatgtcgcagatgccatagaggttctatcatccaagattcaggatgtgcaatctccgaggagtatatttcaacctgacaattctgttgttcaagagcagaaagatacacactcctttgacatttcaaggagctggctgaacatgcaacagaagcaagatagcacctctgtcacaaaggttcaaaacttaaactctgtaccagtcccctccccagctcctactacttactaccctttcagtgagacgcagacagaatctcaggtcgttggatacgaagaagatttaacaggcaggcagaagatcatagacagggttcggtctcagagcattaatgtgactccgtcgagtgagattctttagttgtggaggcgaaccataacttctcccagatctgactgtcaaattgcgatagggaagatgtgttatgaaatctgcttgttgtgccatgtcggcttcaaattaagcagcatgaatggagtctacgaatgtggagtcgtattcctagccagatgacccgcgcagcataaatcaagaagatttccattgcatggcattcgatgaacggaacctcgcgctattacatcgtgatcttgtggatgtaaccacccttgtttgtagaactgacagacactaaacgcctgtgatccgtttggtcctgtacattaacaatcttgtacactatacaagagcaggtaaaggagttatatatatatatatatatatatatatatatgggtatgaacagatgtaacagttcatttttgatttaatgctcaattagtcgaggtagctggtgtagcactatgaaaatcattaaataaaataatgaatttagttaataatgatattaatagtaatgaattttct

SEQ ID NO: 25919 - DNA, 3474 bp, Zea Mays
gtcggctattacaaaacccaaaagaaggtattccgtgctaggatgcgcacgggaaccgtacgagcatgagatacgttgccaaatccaaaacccaggctcccacgctgccatttcgcacaaaaactccggaggttcattctcccgccagttcccgcatctctttgaggcttccacctcaccgtcatcggcgcgcccgcatcccgctgccctccgatgacgccatcctacaactctggccccgcaggccccgccgggggtcgtagggcggcgaccttcgccggcgcttgtgtgtttctgtcgcggaatctggttgcccccgaggtgttcgacgccgtgcacgacgcgctccgcctcaacggtgccgaggtcctcctttgcgccgaccctagccgcacgggacccctcgacttccacgtcatctcatcctcctcccacgagagattcgccgatatgcggtccaaaggcttgaatttgctaggaccacagtgcattctttcctgtgctaaagaacgtcgctttctacctaaacaaagttatacgtgttgtcttgcaatggatggggttaaaacactttgttcaggctttgaaaagtctgagaaggttaggattgaagaactagtaacagccatgggaggtcatttgctaactaaacactctatggacgtgaattttgtaatcgtgaaggatgtcttggctgccaaatataaatgggctctgaatactttgaagaagcccattgtcaccatgaagtggttagagcaatgctggattgagcatcgtgttgtgcctcatgaaccttacaggattcttccctttactgggttgaatatctgtgtcactaaactggatccagatgaacggaagaagttggagaaaatagtagtgcggaatggtggccagttttctgcctgtctcacacggaagtgcacccatttagtagcaaataaacctggaggtgacaaatatgtcatggcccaaaaatggggtaatatttacattgtgaatccaaaatgggttgaccaatctgttgctcgaagagcaacatcagttgatgattcagtatcaatgtcacaacatttgcctgcttcatttggtgatgcttcacggatcagcagcactgatattgttggtgcacctagtgtccaagagacagatgacatgcaggttgatagtcatattgctgaggactcagagccagaaaacgatgatctatatttatcaaattgtcgaatttctctggtgggttttgaagagaaagagttgttaaggcttgtcatgctgatacgtaatggaggtggatcccggcatattttgctaagtgagaagcttactcatattgttattggtacaccttcagatgaggaaaaaaaggaggtaagacgtctggctgcatggggtgtaataaatatagtgaaagtaacatggttagaagactgcaataaagcaaaaaaagaagtgaaagtatcctcaatgcatatagctactgagctcctcttgaagggattttctcaagtaagcatggaaaattctgctgatacacgtgaaactaaggtagccaaaagctcaggtgggatttttcatgttccaactgtcaatgacttgcatgaaaaacaccatgaaaaaggtgtgtcatctgaaaggaaaccaaaaagaggcaaacatgaaaacagtataagtaaaacccgatcagcagccaggactgaaaaatcaagtcaacagaatggattggccaatgttagcgagtaccagctccaatataaagtaacatcgataatgaattctggaagtagcagatcaaatatattcaaagggagaacattcagtttctcaaattcattttctcatgacaagagacctgaggttgttgattgggtcagagatggtggaggcgttatggtggatgacatacactcaactgctgcagatttcataattgagtgccacggacaaaacagcttgccttgtgacttctctcattcacttgtttcaactcaatggatacgatcatgtttggaggagaactgcttacaagatgttgggagtcatcctatcttctctcctttgcgctgtcgcatcccattcccaggatttgaaagctttcgtttctgtatttcactttcacaatatggagagaaagaaagacatctgctgaagaacttgtgctttctactgggagctaagtttacagacaaagcatataagggagtaacccatctcatctgcaaatttgcaagtggtcttaaatatgaggtttactccaaaagaggaactcccaccattacttctgagtggctctatgagtgtgtaaaacaggataaacttctccctgttgatcactttcagccaaaaccacttacatcacaggataaagatgcttatccgtgcactgccagccaatattccacacaggctaccagatttgattcctctgagctgcttagtggttgtcaagtaacaaaaaacaatgcaacacacaattctgtcaatgaagaaacaactatgcctgctgttagtagaaagagaagaatatctgttcctggtaaggttaacggtatttgtggaaacatcgaaaaaactgagaaacaactcgacaatagctctgtccctgatgtcgcagatgccatagaggttctatcatccaagattcaggatgtgcaatctccgaggagtatatttcaacctgacaattctgttgttcaagagcagaaagatacacactcctttgacatttcaaggagctggctgaacatgcaacagaagcaagatagcacctctgtcacaaaggttcaaaacttaaactctgtaccagtcccctccccagctcctactacttactaccctttcagtgagacgcagacagaatctcaggtcgttggatacgaagaagatttaacaggcaggcagaagatcatagacagggttcggtctcagagcattaatgtgactccgtcgagtgagattctttagttgtggaggcgaaccataacttctcccagatctgactgtcaaattgcgatagggaagatgtgttatgaaatctgcttgttgtgccatgtcggcttcaaattaagcagcatgaatggagtctacgaatgtggagtcgtattcctagccagatgacccgcgcagcataaatcaagaagatttccattgcatggcattcgatgaacggaacctcgcgctattacatcgtgatcttgtggatgtaaccacccttgtttgtagaactgacagacactaaacgcctgtgatccgtttggtcctgtacattaacaatcttgtacactatacaagagcaggtaaaggagttatatatatatatatatatatatatatatatgggtatgaacagatgtaacagttcatttttgatttaatgctcaattagtcgaggtagctggtgtagcactatgaaaatcattaaataaaataatgaatttagttaataatgatattaatagtaatgaattttct

SEQ ID NO: 25920 - DNA, 3567 bp, Zea Mays
gtcggctattacaaaacccaaaagaaggtattccgtgctaggatgcgcacgggaaccgtacgagcatgagatacgttgccaaatccaaaacccaggctcccacgctgccatttcgcacaaaaactccggaggttcattctcccgccagttcccgcatctctttgaggcttccacctcaccgtcatcggcgcgcccgcatcccgctgccctccgatgacgccatcctacaactctggccccgcaggccccgccgggggtcgtagggcggcgaccttcgccggcgcttgtgtgtttctgtcgcggaatctggttgcccccgaggtgttcgacgccgtgcacgacgcgctccgcctcaacggtgccgaggtcctcctttgcgccgaccctagccgcacgggacccctcgacttccacgtcatctcatcctcctcccacgagagattcgccgatatgcggtccaaaggcttgaatttgctaggaccacagtgcattctttcctgtgctaaagaacgtcgctttctacctaaacaaagttatacgtgttgtcttgcaatggatggggttaaaacactttgttcaggctttgaaaagtctgagaaggttaggattgaagaactagtaacagccatgggaggtcatttgctaactaaacactctatggacgtgaattttgtaatcgtgaaggatgtcttggctgccaaatataaatgggctctgaatactttgaagaagcccattgtcaccatgaagtggttagagcaatgctggattgagcatcgtgttgtgcctcatgaaccttacaggattcttccctttactgggttgaatatctgtgtcactaaactggatccagctttctaaaagacaacacaccttgattactatattgatttcttaacatattattacaaacctggaggtgacaaatatgtcatggcccaaaaatggggtaatatttacattgtgaatccaaaatgggttgaccaatctgttgctcgaagagcttgtcaagatgaaaatagctacctcgtttgtcagacttcatctgcctttagtggttcaaagagttcccataaggagcaacaaaatccggagatcagtagtgcaagtgcaagctttcaacctgttccagcaacatcagttgatgattcagtatcaatgtcacaacatttgcctgcttcatttggtgatgcttcacggatcagcagcactgatattgttggtgcacctagtgtccaagagacagatgacatgcaggttgatagtcatattgctgaggactcagagccagaaaacgatgatctatatttatcaaattgtcgaatttctctggtgggttttgaagagaaagagttgttaaggcttgtcatgctgatacgtaatggaggtggatcccggcatattttgctaagtgagaagcttactcatattgttattggtacaccttcagatgaggaaaaaaaggaggtaagacgtctggctgcatggggtgtaataaatatagtgaaagtaacatggttagaagactgcaataaagcaaaaaaagaagtgaaagtatcctcaatgcatatagctactgagctcctcttgaagggattttctcaagtaagcatggaaaattctgctgatacacgtgaaactaaggtagccaaaagctcaggtgggatttttcatgttccaactgtcaatgacttgcatgaaaaacaccatgaaaaaggtgtgtcatctgaaaggaaaccaaaaagaggcaaacatgaaaacagtataagtaaaacccgatcagcagccaggactgaaaaatcaagtcaacagaatggattggccaatgttagcgagtaccagctccaatataaagtaacatcgataatgaattctggaagtagcagatcaaatatattcaaagggagaacattcagtttctcaaattcattttctcatgacaagagacctgaggttgttgattgggtcagagatggtggaggcgttatggtggatgacatacactcaactgctgcagatttcataattgagtgccacggacaaaacagcttgccttgtgacttctctcattcacttgtttcaactcaatggatacgatcatgtttggaggagaactgcttacaagatgttgggagtcatcctatcttctctcctttgcgctgtcgcatcccattcccaggatttgaaagctttcgtttctgtatttcactttcacaatatggagagaaagaaagacatctgctgaagaacttgtgctttctactgggagctaagtttacagacaaagcatataagggagtaacccatctcatctgcaaatttgcaagtggtcttaaatatgaggtttactccaaaagaggaactcccaccattacttctgagtggctctatgagtgtgtaaaacaggataaacttctccctgttgatcactttcagccaaaaccacttacatcacaggataaagatgcttatccgtgcactgccagccaatattccacacaggctaccagatttgattcctctgagctgcttagtggttgtcaagtaacaaaaaacaatgcaacacacaattctgtcaatgaagaaacaactatgcctgctgttagtagaaagagaagaatatctgttcctggtaaggttaacggtatttgtggaaacatcgaaaaaactgagaaacaactcgacaatagctctgtccctgatgtcgcagatgccatagaggttctatcatccaagattcaggatgtgcaatctccgaggagtatatttcaacctgacaattctgttgttcaagagcagaaagatacacactcctttgacatttcaaggagctggctgaacatgcaacagaagcaagatagcacctctgtcacaaaggttcaaaacttaaactctgtaccagtcccctccccagctcctactacttactaccctttcagtgagacgcagacagaatctcaggtcgttggatacgaagaagatttaacaggcaggcagaagatcatagacagggttcggtctcagagcattaatgtgactccgtcgagtgagattctttagttgtggaggcgaaccataacttctcccagatctgactgtcaaattgcgatagggaagatgtgttatgaaatctgcttgttgtgccatgtcggcttcaaattaagcagcatgaatggagtctacgaatgtggagtcgtattcctagccagatgacccgcgcagcataaatcaagaagatttccattgcatggcattcgatgaacggaacctcgcgctattacatcgtgatcttgtggatgtaaccacccttgtttgtagaactgacagacactaaacgcctgtgatccgtttggtcctgtacattaacaatcttgtacactatacaagagcaggtaaaggagttatatatatatatatatatatatatatatatgggtatgaacagatgtaacagttcatttttgatttaatgctcaattagtcgaggtagctggtgtagcactatgaaaatcattaaataaaataatgaatttagttaataatgatattaatagtaatgaattttct

SEQ ID NO: 25921 - DNA, 3438 bp, Zea Mays
gtcggctattacaaaacccaaaagaaggtattccgtgctaggatgcgcacgggaaccgtacgagcatgagatacgttgccaaatccaaaacccaggctcccacgctgccatttcgcacaaaaactccggaggttcattctcccgccagttcccgcatctctttgaggcttccacctcaccgtcatcggcgcgcccgcatcccgctgccctccgatgacgccatcctacaactctggccccgcaggccccgccgggggtcgtagggcggcgaccttcgccggcgcttgtgtgtttctgtcgcggaatctggttgcccccgaggtgttcgacgccgtgcacgacgcgctccgcctcaacggtgccgaggtcctcctttgcgccgaccctagccgcacgggacccctcgacttccacgtcatctcatcctcctcccacgagagattcgccgatatgcggtccaaaggcttgaatttgctaggaccacagtgcattctttcctgtgctaaagaacgtcgctttctacctaaacaaagttatacgtgttgtcttgcaatggatggggttaaaacactttgttcaggctttgaaaagtctgagaaggttaggattgaagaactagtaacagccatgggaggtcatttgctaactaaacactctatggacgtgaattttgtaatcgtgaaggatgtcttggctgccaaatataaatgggctctgaatactttgaagaagcccattgtcaccatgaagtggttagagcaatgctggattgagcatcgtgttgtgcctcatgaaccttacaggattcttccctttactgggttgaatatctgtgtcactaaactggatccagctttctaaaagacaacacaccttgattactatattgatttcttaacatattattacaaacctggaggtgacaaatatgtcatggcccaaaaatggggtaatatttacattgtgaatccaaaatgggttgaccaatctgttgctcgaagagcaacatcagttgatgattcagtatcaatgtcacaacatttgcctgcttcatttggtgatgcttcacggatcagcagcactgatattgttggtgcacctagtgtccaagagacagatgacatgcaggttgatagtcatattgctgaggactcagagccagaaaacgatgatctatatttatcaaattgtcgaatttctctggtgggttttgaagagaaagagttgttaaggcttgtcatgctgatacgtaatggaggtggatcccggcatattttgctaagtgagaagcttactcatattgttattggtacaccttcagatgaggaaaaaaaggaggtaagacgtctggctgcatggggtgtaataaatatagtgaaagtaacatggttagaagactgcaataaagcaaaaaaagaagtgaaagtatcctcaatgcatatagctactgagctcctcttgaagggattttctcaagtaagcatggaaaattctgctgatacacgtgaaactaaggtagccaaaagctcaggtgggatttttcatgttccaactgtcaatgacttgcatgaaaaacaccatgaaaaaggtgtgtcatctgaaaggaaaccaaaaagaggcaaacatgaaaacagtataagtaaaacccgatcagcagccaggactgaaaaatcaagtcaacagaatggattggccaatgttagcgagtaccagctccaatataaagtaacatcgataatgaattctggaagtagcagatcaaatatattcaaagggagaacattcagtttctcaaattcattttctcatgacaagagacctgaggttgttgattgggtcagagatggtggaggcgttatggtggatgacatacactcaactgctgcagatttcataattgagtgccacggacaaaacagcttgccttgtgacttctctcattcacttgtttcaactcaatggatacgatcatgtttggaggagaactgcttacaagatgttgggagtcatcctatcttctctcctttgcgctgtcgcatcccattcccaggatttgaaagctttcgtttctgtatttcactttcacaatatggagagaaagaaagacatctgctgaagaacttgtgctttctactgggagctaagtttacagacaaagcatataagggagtaacccatctcatctgcaaatttgcaagtggtcttaaatatgaggtttactccaaaagaggaactcccaccattacttctgagtggctctatgagtgtgtaaaacaggataaacttctccctgttgatcactttcagccaaaaccacttacatcacaggataaagatgcttatccgtgcactgccagccaatattccacacaggctaccagatttgattcctctgagctgcttagtggttgtcaagtaacaaaaaacaatgcaacacacaattctgtcaatgaagaaacaactatgcctgctgttagtagaaagagaagaatatctgttcctggtaaggttaacggtatttgtggaaacatcgaaaaaactgagaaacaactcgacaatagctctgtccctgatgtcgcagatgccatagaggttctatcatccaagattcaggatgtgcaatctccgaggagtatatttcaacctgacaattctgttgttcaagagcagaaagatacacactcctttgacatttcaaggagctggctgaacatgcaacagaagcaagatagcacctctgtcacaaaggttcaaaacttaaactctgtaccagtcccctccccagctcctactacttactaccctttcagtgagacgcagacagaatctcaggtcgttggatacgaagaagatttaacaggcaggcagaagatcatagacagggttcggtctcagagcattaatgtgactccgtcgagtgagattctttagttgtggaggcgaaccataacttctcccagatctgactgtcaaattgcgatagggaagatgtgttatgaaatctgcttgttgtgccatgtcggcttcaaattaagcagcatgaatggagtctacgaatgtggagtcgtattcctagccagatgacccgcgcagcataaatcaagaagatttccattgcatggcattcgatgaacggaacctcgcgctattacatcgtgatcttgtggatgtaaccacccttgtttgtagaactgacagacactaaacgcctgtgatccgtttggtcctgtacattaacaatcttgtacactatacaagagcaggtaaaggagttatatatatatatatatatatatatatatatgggtatgaacagatgtaacagttcatttttgatttaatgctcaattagtcgaggtagctggtgtagcactatgaaaatcattaaataaaataatgaatttagttaataatgatattaatagtaatgaattttct

SEQ ID NO: 25922 - DNA, 1833 bp, Zea Mays
accaactgtgacaatccagtcaattatgatctctagcccccctccttccggctcctgtcatcctgcgcatgccatcggggcgctcgccgggacaacatttacctcgacagcgacgccgccgctctccctcgacgagagctcgtagctgtgtccgcgcaaggcttactcctttcttggccccgaccccttctccccgccgccggcgccgcgcttggcttgatgctcgacgtctgcgcgccacacgggcccgccaagctcccggctgcgtttgtcgccggcgtgcgagtcgcctgggtcgccggcaggtggtggtggcgatccgtggcggtgggggcggcgcgccatggcgtcaccacgcgggcgtcgttcttcgggctcgattcccaggttgcttcatttctgcatcatcaagaaaaaatgaatgttcttgtggaacctgatgttcatgatacatttgctagaattccaggttatggttttgtgcaaaccttctatactcaagataccaggtacaattaaacatttatgtttgtgataagtgcgaatgtgcatatattttcatgatactatttactaatgtttgtgtttcagtgaccttcatgagagagttgattttgttacatgcttgggtggtgatggactcattttgcatgcatcaaacttatttagaacttctgtaccacctgttgtctccttcaatctcggatctcttgggttcttaacttcacataatgtacatttcaataatctctgagagagaatttcaccagattaagccgtttttgtgtagaaactaagcatattatcattttgttcacctcagttcaaagatttcagacaagactcgagagatttaatccatgggaacaacacacttggagtttatataacccttagaatgcgcctaagatgtgagatctttcgtagtggaaaagcaatgcctgataaagtgtttgatgtgctgaatgaagttgttgttgatcgaggttccaatccatacctatcaaaaattgagtgttatgagcataaccaccttatcactaaggtgcaaggtgatggggtgatagttgcaacaccaacaggcagcacggcatattctactgcagctgggggatcaatgtaatttgtctaggttcatccaaatgtcccatgcatgctgtttactccaatctgccctcactcactgtcatttagacctgtcatccttccggattccgcacggcttgaattaaagataccagatgaggcaagaagcaatgcatgggtttcatttgatggcaaaaggcggcagcaactatcaagaggagactctgttcgtatatccatgagtcagcacccgctaccaactgttaataaatctgaccaaacgggtgattggttccgcagcctgatcaggtgcctcaactggaacgagagattagaccagaaggcactatagacactagaatctttttttattttttgatgtacatatgtaaattcacgcacaaatatagttttgttttttctgccaacatgtacagtgcgtaacaacaaagaactttgcatatcaaggatctaatcaggtggcttgagggataaatgagagttaataaaaaattgctcaatagaatcttgtttttcaaaacttcaaccaagtttttaacacatcgaaaatgacaaataaaaaaatgttaaatgagtagcccacaagcccaaaacaatggcttcatatttttaatgatgactgacgaacaaatcagagtaacgaaacctgtaggaaacaagtacaacattgaaaacctctaaaataaaaaagcacatcaaaagtcttcgaaattagaaaaacatgac

SEQ ID NO: 25923 - DNA, 3178 bp, Zea Mays
accaactgtgacaatccagtcaattatgatctctagcccccctccttccggctcctgtcatcctgcgcatgccatcggggcgctcgccgggacaacatttacctcgacagcgacgccgccgctctccctcgacgagagctcgtagctgtgtccgcgcaaggcttactcctttcttggccccgaccccttctccccgccgccggcgccgcgcttggcttgatgctcgacgtctgcgcgccacacgggcccgccaagctcccggctgcgtttgtcgccggcgtgcgagtcgcctgggtcgccggcaggtggtggtggcgatccgtggcggtgggggcggcgcgccatggcgtcaccacgcgggcgtcgttcttcgggctcgattcccagaattttcagacaagggacccgtcccagttgttgtggatcggtccggtgcctggtgacatcgcggagattgaggcctactgccgcatattccgtgctgccgagcagctccacaccgcagttatgtcagcactttgtgatccagagacaggagagtgtcctgtacgctatgatgtggaatcagaggatctgccaatcctggaagacaaggtcactgccgtccttggttgcatgctggcgttgctgaaccggggaaggaatgaggtgctctcagggagatcaggtgttgcaagtgctttccatggatctgtggacagcacctctgatatgatcccaccactcaccttgttccgtggagacatgaagcgttgctgtgagagtatgcagctggcacttgccagctaccttgtaccgagtgagcccagggggttgaatatatggaggaagctgcagagattgaagaacgcttgttacgatgcaggtttctcaaggcctgatggttatccatgtccgacattatttgcgaattggtttccggtgtacctttcgattgtgtcagatgattcaggaacagatgagcccgaggttgcattttggaggggagggcaagtcagtgaggaggggctggcatggctactagaaaagggattcaaaactattgttgatctccgggaagaagatgttaaagatgatttgtacctttcagcagttcaggaggctgtctcatctgggaagatagaggtggtgaatatgctggttgagatcggaactgcaccatcagctgaacaggttaaacaatttgcagctcttgtgtcagatggcgcaaagaagcccatttatctccatagcaaagaaggtgtttctaggacgtctgcaatggtctcaagatggaaacaatatgttactcgttcagagagattggctgtccaaaatcactatataaatgggaatggtaaggtcctgacaagtgacaagaccaagcagcacacgggcagcccaagctcctctatgaatcgaactgaaattggtatggtaacggaatctgataggaccatgaacaatggagaatcatgtgagatagacatagagacagctcgtcataatctggaggtcactaatgccctttccgatgaccaaagtactcaacaaggtgaaatgcttgggactgggacagaacccttgtcaaactttaaactggagagtaacccccttaaagcacaatttcctacttgtgatattttctctagaaaagagatgagcaagttttttagaagcaaaaaggtttatccaaaatctgttctgaactcaaggagacaatcaagtagcttgctggtctcaaggagaaaacaaaatttcagcacagagcgtaatggaaccattgactatgaagcagcagagttcacaattttagaaagttcaaatggaacatcatttgacaatgattatattctatcagtttcttcaggtatcactgatggaaaaccttccaacaatggagccttttcgttaattgagaaaaaggaaagggaagtttcagtcactacttttgatactagagcatcggcgagcagttctaatggaaaggttcaggttggatcacaaaaaactgctgaaaagaatggtaccccttatctggagagaaacaattcaaataatgttgatggaagtatgtgtgcatctgcaactggtgtcgttagactccagtcgagaagaaaagcagagatgtttctggtacgtactgatggattttcttgtactagagaaaaagtaacagaatcatctctggcttttacacatcctagtacccagcaacagatgcttatgtggaaatctcctccaaagactgtcttacttttgaagaaattaggcgatgagctgatggaagaagctaaagaggttgcttcatttctgcatcatcaagaaaaaatgaatgttcttgtggaacctgatgttcatgatacatttgctagaattccaggttatggttttgtgcaaaccttctatactcaagataccaggtgcaaggtgatggggtgatagttgcaacaccaacaggcagcacggcatattctactgcagctgggggatcaatggttcatccaaatgtcccatgcatgctgtttactccaatctgccctcactcactgtcatttagacctgtcatccttccggattccgcacggcttgaattaaagataccagatgaggcaagaagcaatgcatgggtttcatttgatggcaaaaggcggcagcaactatcaagaggagactctgttcgtatatccatgagtcagcacccgctaccaactgttaataaatctgaccaaacgggtgattggttccgcagcctgatcaggtgcctcaactggaacgagagattagaccagaaggcactatagacactagaatctttttttattttttgatgtacatatgtaaattcacgcacaaatatagttttgttttttctgccaacatgtacagtgcgtaacaacaaagaactttgcatatcaaggatctaatcaggtggcttgagggataaatgagagttaataaaaaattgctcaatagaatcttgtttttcaaaacttcaaccaagtttttaacacatcgaaaatgacaaataaaaaaatgttaaatgagtagcccacaagcccaaaacaatggcttcatatttttaatgatgactgacgaacaaatcagagtaacgaaacctgtaggaaacaagtacaacattgaaaacctctaaaataaaaaagcacatcaaaagtcttcgaaattagaaaaacatgac

SEQ ID NO: 25924 - DNA, 1724 bp, Zea Mays
caggaaccaactgtgacaatccagtcaattatgatctctagcccccctccttccggctcctgtcatcctgcgcatgccatcggggcgctcgccgggacaacatttacctcgacagcgacgccgccgctctccctcgacgagagctcgtagctgtgtccgcgcaaggcttactcctttcttggccccgaccccttctccccgccgccggcgccgcgcttggcttgatgctcgacgtctgcgcgccacacgggcccgccaagctcccggctgcgtttgtcgccggcgtgcgagtcgcctgggtcgccggcaggtggtggtggcgatccgtggcggtgggggcggcgcgccatggcgtcaccacgcgggcgtcgttcttcgggctcgattcccaggttgcttcatttctgcatcatcaagaaaaaatgaatgttcttgtggaacctgatgttcatgatacatttgctagaattccaggttatggttttgtgcaaaccttctatactcaagataccaggtacaattaaacatttatgtttgtgataagtgcgaatgtgcatatattttcatgatactatttactaatgtttgtgtttcagtgaccttcatgagagagttgattttgttacatgcttgggtggtgatggactcattttgcatgcatcaaacttatttagaacttctgtaccacctgttgtctccttcaatctcggatctcttgggttcttaacttcacataatgtacatttcaataatctctgagagagaatttcaccagattaagccgtttttgtgtagaaactaagcatattatcattttgttcacctcagttcaaagatttcagacaagactcgagagatttaatccatgggaacaacacacttggagtttatataacccttagaatgcgcctaagatgtgagatctttcgtagtggaaaagcaatgcctgataaagtgtttgatgtgctgaatgaagttgttgttgatcgaggttccaatccatacctatcaaaaattgagtgttatgagcataaccaccttatcactaaggtgcaaggtgatggggtgatagttgcaacaccaacaggcagcacggcatattctactgcagctgggggatcaatgataccagatgaggcaagaagcaatgcatgggtttcatttgatggcaaaaggcggcagcaactatcaagaggagactctgttcgtatatccatgagtcagcacccgctaccaactgttaataaatctgaccaaacgggtgattggttccgcagcctgatcaggtgcctcaactggaacgagagattagaccagaaggcactatagacactagaatctttttttattttttgatgtacatatgtaaattcacgcacaaatatagttttgttttttctgccaacatgtacagtgcgtaacaacaaagaactttgcatatcaaggatctaatcaggtggcttgagggataaatgagagttaataaaaaattgctcaatagaatcttgtttttcaaaacttcaaccaagtttttaacacatcgaaaatgacaaataaaaaaatgttaaatgagtagcccacaagcccaaaacaatggcttcatatttttaatgatgactgacgaacaaatcagagtaacgaaacctgtaggaaacaagtacaacattgaaaacctctaaaataaaaaagcacatcaaaagtcttcgaaattagaaaaacatgac

SEQ ID NO: 25925 - DNA, 3655 bp, Zea Mays
aggccacggccttttcaggaaccaactgtgacaatccagtcaattatgatctctagcccccctccttccggctcctgtcatcctgcgcatgccatcggggcgctcgccgggacaacatttacctcgacagcgacgccgccgctctccctcgacgagagctcgtagctgtgtccgcgcaaggcttactcctttcttggccccgaccccttctccccgccgccggcgccgcgcttggcttgatgctcgacgtctgcgcgccacacgggcccgccaagctcccggctgcgtttgtcgccggcgtgcgagtcgcctgggtcgccggcaggtggtggtggcgatccgtggcggtgggggcggcgcgccatggcgtcaccacgcgggcgtcgttcttcgggctcgattcccagacaagggacccgtcccagttgttgtggatcggtccggtgcctggtgacatcgcggagattgaggcctactgccgcatattccgtgctgccgagcagctccacaccgcagttatgtcagcactttgtgatccagagacaggagagtgtcctgtacgctatgatgtggaatcagaggatctgccaatcctggaagacaaggtcactgccgtccttggttgcatgctggcgttgctgaaccggggaaggaatgaggtgctctcagggagatcaggtgttgcaagtgctttccatggatctgtggacagcacctctgatatgatcccaccactcaccttgttccgtggagacatgaagcgttgctgtgagagtatgcagctggcacttgccagctaccttgtaccgagtgagcccagggggttgaatatatggaggaagctgcagagattgaagaacgcttgttacgatgcaggtttctcaaggcctgatggttatccatgtccgacattatttgcgaattggtttccggtgtacctttcgattgtgtcagatgattcaggaacagatgagcccgaggttgcattttggaggggagggcaagtcagtgaggaggggctggcatggctactagaaaagggattcaaaactattgttgatctccgggaagaagatgttaaagatgatttgtacctttcagcagttcaggaggctgtctcatctgggaagatagaggtggtgaatatgctggttgagatcggaactgcaccatcagctgaacaggttaaacaatttgcagctcttgtgtcagatggcgcaaagaagcccatttatctccatagcaaagaaggtgtttctaggacgtctgcaatggtctcaagatggaaacaatatgttactcgttcagagagattggctgtccaaaatcactatataaatgggaatggtaaggtcctgacaagtgacaagaccaagcagcacacgggcagcccaagctcctctatgaatcgaactgaaattggtatggtaacggaatctgataggaccatgaacaatggagaatcatgtgagatagacatagagacagctcgtcataatctggaggtcactaatgccctttccgatgaccaaagtactcaacaaggtgaaatgcttgggactgggacagaacccttgtcaaactttaaactggagagtaacccccttaaagcacaatttcctacttgtgatattttctctagaaaagagatgagcaagttttttagaagcaaaaaggtttatccaaaatctgttctgaactcaaggagacaatcaagtagcttgctggtctcaaggagaaaacaaaatttcagcacagagcgtaatggaaccattgactatgaagcagcagagttcacaattttagaaagttcaaatggaacatcatttgacaatgattatattctatcagtttcttcaggtatcactgatggaaaaccttccaacaatggagccttttcgttaattgagaaaaaggaaagggaagtttcagtcactacttttgatactagagcatcggcgagcagttctaatggaaaggttcaggttggatcacaaaaaactgctgaaaagaatggtaccccttatctggagagaaacaattcaaataatgttgatggaagtatgtgtgcatctgcaactggtgtcgttagactccagtcgagaagaaaagcagagatgtttctggtacgtactgatggattttcttgtactagagaaaaagtaacagaatcatctctggcttttacacatcctagtacccagcaacagatgcttatgtggaaatctcctccaaagactgtcttacttttgaagaaattaggcgatgagctgatggaagaagctaaagaggttgcttcatttctgcatcatcaagaaaaaatgaatgttcttgtggaacctgatgttcatgatacatttgctagaattccaggttatggttttgtgcaaaccttctatactcaagataccagtgaccttcatgagagagttgattttgttacatgcttgggtggtgatggactcattttgcatgcatcaaacttatttagaacttctgtaccacctgttgtctccttcaatctcggatctcttgggttcttaacttcacataatgtacatttcaataatctctgagagagaatttcaccagattaagccgtttttgtgtagaaactaagcatattatcattttgttcacctcagttcaaagatttcagacaagactcgagagatttaatccatgggaacaacacacttggagtttatataacccttagaatgcgcctaagatgtgagatctttcgtagtggaaaagcaatgcctgataaagtgtttgatgtgctgaatgaagttgttgttgatcgaggttccaatccatacctatcaaaaattgagtgttatgagcataaccaccttatcactaaggtgcaaggtgatggggtgatagttgcaacaccaacaggcagcacggcatattctactgcagctgggggatcaatgtaatttgtctaggttcatccaaatgtcccatgcatgctgtttactccaatctgccctcactcactgtcatttagacctgtcatccttccggattccgcacggcttgaattaaagataccagatgaggcaagaagcaatgcatgggtttcatttgatggcaaaaggcggcagcaactatcaagaggagactctgttcgtatatccatgagtcagcacccgctaccaactgttaataaatctgaccaaacgggtgattggttccgcagcctgatcaggtgcctcaactggaacgagagattagaccagaaggcactatagacactagaatctttttttattttttgatgtacatatgtaaattcacgcacaaatatagttttgttttttctgccaacatgtacagtgcgtaacaacaaagaactttgcatatcaaggatctaatcaggtggcttgagggataaatgagagttaataaaaaattgctcaatagaatcttgtttttcaaaacttcaaccaagtttttaacacatcgaaaatgacaaataaaaaaatgttaaatgagtagcccacaagcccaaaacaatggcttcatatttttaatgatgactgacgaacaaatcagagtaacgaaacctgtaggaaacaagtacaacattgaaaacctctaaaataaaaaagcacatcaaaagtcttcgaaattagaaaaacatgac

SEQ ID NO: 25926 - DNA, 3649 bp, Zea Mays
tcaaaggccacggccttttcaggaaccaactgtgacaatccagtcaattatgatctctagcccccctccttccggctcctgtcatcctgcgcatgccatcggggcgctcgccgggacaacatttacctcgacagcgacgccgccgctctccctcgacgagagctcgtagctgtgtccgcgcaaggcttactcctttcttggccccgaccccttctccccgccgccggcgccgcgcttggcttgatgctcgacgtctgcgcgccacacgggcccgccaagctcccggctgcgtttgtcgccggcgtgcgagtcgcctgggtcgccggcaggtggtggtggcgatccgtggcggtgggggcggcgcgccatggcgtcaccacgcgggcgtcgttcttcgggctcgattcccagaattttcagacaagggacccgtcccagttgttgtggatcggtccggtgcctggtgacatcgcggagattgaggcctactgccgcatattccgtgctgccgagcagctccacaccgcagttatgtcagcactttgtgatccagagacaggagagtgtcctgtacgctatgatgtggaatcagaggatctgccaatcctggaagacaaggtcactgccgtccttggttgcatgctggcgttgctgaaccggggaaggaatgaggtgctctcagggagatcaggtgttgcaagtgctttccatggatctgtggacagcacctctgatatgatcccaccactcaccttgttccgtggagacatgaagcgttgctgtgagagtatgcagctggcacttgccagctaccttgtaccgagtgagcccagggggttgaatatatggaggaagctgcagagattgaagaacgcttgttacgatgcaggtttctcaaggcctgatggttatccatgtccgacattatttgcgaattggtttccggtgtacctttcgattgtgtcagatgattcaggaacagatgagcccgaggttgcattttggaggggagggcaagtcagtgaggaggggctggcatggctactagaaaagggattcaaaactattgttgatctccgggaagaagatgttaaagatgatttgtacctttcagcagttcaggaggctgtctcatctgggaagatagaggtggtgaatatgctggttgagatcggaactgcaccatcagctgaacaggttaaacaatttgcagctcttgtgtcagatggcgcaaagaagcccatttatctccatagcaaagaaggtgtttctaggacgtctgcaatggtctcaagatggaaacaatatgttactcgttcagagagattggctgtccaaaatcactatataaatgggaatggtaaggtcctgacaagtgacaagaccaagcagcacacgggcagcccaagctcctctatgaatcgaactgaaattggtatggtaacggaatctgataggaccatgaacaatggagaatcatgtgagatagacatagagacagctcgtcataatctggaggtcactaatgccctttccgatgaccaaagtactcaacaaggtgaaatgcttgggactgggacagaacccttgtcaaactttaaactggagagtaacccccttaaagcacaatttcctacttgtgatattttctctagaaaagagatgagcaagttttttagaagcaaaaaggtttatccaaaatctgttctgaactcaaggagacaatcaagtagcttgctggtctcaaggagaaaacaaaatttcagcacagagcgtaatggaaccattgactatgaagcagcagagttcacaattttagaaagttcaaatggaacatcatttgacaatgattatattctatcagtttcttcaggtatcactgatggaaaaccttccaacaatggagccttttcgttaattgagaaaaaggaaagggaagtttcagtcactacttttgatactagagcatcggcgagcagttctaatggaaaggttcaggttggatcacaaaaaactgctgaaaagaatggtaccccttatctggagagaaacaattcaaataatgttgatggaagtatgtgtgcatctgcaactggtgtcgttagactccagtcgagaagaaaagcagagatgtttctggtacgtactgatggattttcttgtactagagaaaaagtaacagaatcatctctggcttttacacatcctagtacccagcaacagatgcttatgtggaaatctcctccaaagactgtcttacttttgaagaaattaggcgatgagctgatggaagaagctaaagaggttgcttcatttctgcatcatcaagaaaaaatgaatgttcttgtggaacctgatgttcatgatacatttgctagaattccaggttatggttttgtgcaaaccttctatactcaagataccagtgaccttcatgagagagttgattttgttacatgcttgggtggtgatggactcattttgcatgcatcaaacttatttagaacttctgtaccacctgttgtctccttcaatctcggatctcttgggttcttaacttcacataatgtacatttcaataatctctgagagagaatttcaccagattaagccgtttttgtgtagaaactaagcatattatcattttgttcacctcagttcaaagatttcagacaagactcgagagatttaatccatgggaacaacacacttggagtttatataacccttagaatgcgcctaagatgtgagatctttcgtagtggaaaagcaatgcctgataaagtgtttgatgtgctgaatgaagttgttgttgatcgaggttccaatccatacctatcaaaaattgagtgttatgagcataaccaccttatcactaaggtgcaaggtgatggggtgatagttgcaacaccaacaggcagcacggcatattctactgcagctgggggatcaatggttcatccaaatgtcccatgcatgctgtttactccaatctgccctcactcactgtcatttagacctgtcatccttccggattccgcacggcttgaattaaagatgaggcaagaagcaatgcatgggtttcatttgatggcaaaaggcggcagcaactatcaagaggagactctgttcgtatatccatgagtcagcacccgctaccaactgttaataaatctgaccaaacgggtgattggttccgcagcctgatcaggtgcctcaactggaacgagagattagaccagaaggcactatagacactagaatctttttttattttttgatgtacatatgtaaattcacgcacaaatatagttttgttttttctgccaacatgtacagtgcgtaacaacaaagaactttgcatatcaaggatctaatcaggtggcttgagggataaatgagagttaataaaaaattgctcaatagaatcttgtttttcaaaacttcaaccaagtttttaacacatcgaaaatgacaaataaaaaaatgttaaatgagtagcccacaagcccaaaacaatggcttcatatttttaatgatgactgacgaacaaatcagagtaacgaaacctgtaggaaacaagtacaacattgaaaacctctaaaataaaaaagcacatcaaaagtcttcgaaattagaaaaacatgac

SEQ ID NO: 25927 - DNA, 1757 bp, Zea Mays
ctcaaaggccacggccttttcaggaaccaactgtgacaatccagtcaattatgatctctagcccccctccttccggctcctgtcatcctgcgcatgccatcggggcgctcgccgggacaacatttacctcgacagcgacgccgccgctctccctcgacgagagctcgtagctgtgtccgcgcaaggcttactcctttcttggccccgaccccttctccccgccgccggcgccgcgcttggcttgatgctcgacgtctgcgcgccacacgggcccgccaagctcccggctgcgtttgtcgccggcgtgcgagtcgcctgggtcgccggcaggtggtggtggcgatccgtggcggtgggggcggcgcgccatggcgtcaccacgcgggcgtcgttcttcgggctcgattcccaggttgcttcatttctgcatcatcaagaaaaaatgaatgttcttgtggaacctgatgttcatgatacatttgctagaattccaggttatggttttgtgcaaaccttctatactcaagataccagtgaccttcatgagagagttgattttgttacatgcttgggtggtgatggactcattttgcatgcatcaaacttatttagaacttctgtaccacctgttgtctccttcaatctcggatctcttgggttcttaacttcacataatgtacatttcaataatctctgagagagaatttcaccagattaagccgtttttgtgtagaaactaagcatattatcattttgttcacctcagttcaaagatttcagacaagactcgagagatttaatccatgggaacaacacacttggagtttatataacccttagaatgcgcctaagatgtgagatctttcgtagtggaaaagcaatgcctgataaagtgtttgatgtgctgaatgaagttgttgttgatcgaggttccaatccatacctatcaaaaattgagtgttatgagcataaccaccttatcactaaggtgcaaggtgatggggtgatagttgcaacaccaacaggcagcacggcatattctactgcagctgggggatcaatggttcatccaaatgtcccatgcatgctgtttactccaatctgccctcactcactgtcatttagacctgtcatccttccggattccgcacggcttgaattaaagatgaggcaagaagcaatgcatgggtttcatttgatggcaaaaggcggcagcaactatcaagaggagactctgttcgtatatccatgagtcagcacccgctaccaactgttaataaatctgaccaaacgggtgattggttccgcagcctgatcaggtgcctcaactggaacgagagattagaccagaaggcactatagacactagaatctttttttattttttgatgtacatatgtaaattcacgcacaaatatagttttgttttttctgccaacatgtacagtgcgtaacaacaaagaactttgcatatcaaggatctaatcaggtggcttgagggataaatgagagttaataaaaaattgctcaatagaatcttgtttttcaaaacttcaaccaagtttttaacacatcgaaaatgacaaataaaaaaatgttaaatgagtagcccacaagcccaaaacaatggcttcatatttttaatgatgactgacgaacaaatcagagtaacgaaacctgtaggaaacaagtacaacattgaaaacctctaaaataaaaaagcacatcaaaagtcttcgaaattagaaaaacatgac

SEQ ID NO: 25928 - DNA, 3565 bp, Zea Mays
ctcctccctcaaaggccacggccttttcaggaaccaactgtgacaatccagtcaattatgatctctagcccccctccttccggctcctgtcatcctgcgcatgccatcggggcgctcgccgggacaacatttacctcgacagcgacgccgccgctctccctcgacgagagctcgtagctgtgtccgcgcaaggcttactcctttcttggccccgaccccttctccccgccgccggcgccgcgcttggcttgatgctcgacgtctgcgcgccacacgggcccgccaagctcccggctgcgtttgtcgccggcgtgcgagtcgcctgggtcgccggcaggtggtggtggcgatccgtggcggtgggggcggcgcgccatggcgtcaccacgcgggcgtcgttcttcgggctcgattcccagacaagggacccgtcccagttgttgtggatcggtccggtgcctggtgacatcgcggagattgaggcctactgccgcatattccgtgctgccgagcagctccacaccgcagttatgtcagcactttgtgatccagagacaggagagtgtcctgtacgctatgatgtggaatcagaggatctgccaatcctggaagacaaggtcactgccgtccttggttgcatgctggcgttgctgaaccggggaaggaatgaggtgctctcagggagatcaggtgttgcaagtgctttccatggatctgtggacagcacctctgatatgatcccaccactcaccttgttccgtggagacatgaagcgttgctgtgagagtatgcagctggcacttgccagctaccttgtaccgagtgagcccagggggttgaatatatggaggaagctgcagagattgaagaacgcttgttacgatgcaggtttctcaaggcctgatggttatccatgtccgacattatttgcgaattggtttccggtgtacctttcgattgtgtcagatgattcaggaacagatgagcccgaggttgcattttggaggggagggcaagtcagtgaggaggggctggcatggctactagaaaagggattcaaaactattgttgatctccgggaagaagatgttaaagatgatttgtacctttcagcagttcaggaggctgtctcatctgggaagatagaggtggtgaatatgctggttgagatcggaactgcaccatcagctgaacaggttaaacaatttgcagctcttgtgtcagatggcgcaaagaagcccatttatctccatagcaaagaaggtgtttctaggacgtctgcaatggtctcaagatggaaacaatatgttactcgttcagagagattggctgtccaaaatcactatataaatgggaatggtaaggtcctgacaagtgacaagaccaagcagcacacgggcagcccaagctcctctatgaatcgaactgaaattggtatggtaacggaatctgataggaccatgaacaatggagaatcatgtgagatagacatagagacagctcgtcataatctggaggtcactaatgccctttccgatgaccaaagtactcaacaaggtgaaatgcttgggactgggacagaacccttgtcaaactttaaactggagagtaacccccttaaagcacaatttcctacttgtgatattttctctagaaaagagatgagcaagttttttagaagcaaaaaggtttatccaaaatctgttctgaactcaaggagacaatcaagtagcttgctggtctcaaggagaaaacaaaatttcagcacagagcgtaatggaaccattgactatgaagcagcagagttcacaattttagaaagttcaaatggaacatcatttgacaatgattatattctatcagtttcttcaggtatcactgatggaaaaccttccaacaatggagccttttcgttaattgagaaaaaggaaagggaagtttcagtcactacttttgatactagagcatcggcgagcagttctaatggaaaggttcaggttggatcacaaaaaactgctgaaaagaatggtaccccttatctggagagaaacaattcaaataatgttgatggaagtatgtgtgcatctgcaactggtgtcgttagactccagtcgagaagaaaagcagagatgtttctggtacgtactgatggattttcttgtactagagaaaaagtaacagaatcatctctggcttttacacatcctagtacccagcaacagatgcttatgtggaaatctcctccaaagactgtcttacttttgaagaaattaggcgatgagctgatggaagaagctaaagaggttgcttcatttctgcatcatcaagaaaaaatgaatgttcttgtggaacctgatgttcatgatacatttgctagaattccaggttatggttttgtgcaaaccttctatactcaagataccagtgaccttcatgagagagttgattttgttacatgcttgggtggtgatggactcattttgcatgcatcaaacttatttagaacttctgtaccacctgttgtctccttcaatctcggatctcttgggttcttaacttcacataatttcaaagatttcagacaagactcgagagatttaatccatgggaacaacacacttggagtttatataacccttagaatgcgcctaagatgtgagatctttcgtagtggaaaagcaatgcctgataaagtgtttgatgtgctgaatgaagttgttgttgatcgaggttccaatccatacctatcaaaaattgagtgttatgagcataaccaccttatcactaaggtgcaaggtgatggggtgatagttgcaacaccaacaggcagcacggcatattctactgcagctgggggatcaatggttcatccaaatgtcccatgcatgctgtttactccaatctgccctcactcactgtcatttagacctgtcatccttccggattccgcacggcttgaattaaagataccagatgaggcaagaagcaatgcatgggtttcatttgatggcaaaaggcggcagcaactatcaagaggagactctgttcgtatatccatgagtcagcacccgctaccaactgttaataaatctgaccaaacgggtgattggttccgcagcctgatcaggtgcctcaactggaacgagagattagaccagaaggcactatagacactagaatctttttttattttttgatgtacatatgtaaattcacgcacaaatatagttttgttttttctgccaacatgtacagtgcgtaacaacaaagaactttgcatatcaaggatctaatcaggtggcttgagggataaatgagagttaataaaaaattgctcaatagaatcttgtttttcaaaacttcaaccaagtttttaacacatcgaaaatgacaaataaaaaaatgttaaatgagtagcccacaagcccaaaacaatggcttcatatttttaatgatgactgacgaacaaatcagagtaacgaaacctgtaggaaacaagtacaacattgaaaacctctaaaataaaaaagcacatcaaaagtcttcgaaattagaaaaacatgac

SEQ ID NO: 25929 - DNA, 3496 bp, Zea Mays
ctcctccctcaaaggccacggccttttcaggaaccaactgtgacaatccagtcaattatgatctctagcccccctccttccggctcctgtcatcctgcgcatgccatcggggcgctcgccgggacaacatttacctcgacagcgacgccgccgctctccctcgacgagagctcgtagctgtgtccgcgcaaggcttactcctttcttggccccgaccccttctccccgccgccggcgccgcgcttggcttgatgctcgacgtctgcgcgccacacgggcccgccaagctcccggctgcgtttgtcgccggcgtgcgagtcgcctgggtcgccggcaggtggtggtggcgatccgtggcggtgggggcggcgcgccatggcgtcaccacgcgggcgtcgttcttcgggctcgattcccagaattttcagacaagggacccgtcccagttgttgtggatcggtccggtgcctggtgacatcgcggagattgaggcctactgccgcatattccgtgctgccgagcagctccacaccgcagttatgtcagcactttgtgatccagagacaggagagtgtcctgtacgctatgatgtggaatcagaggatctgccaatcctggaagacaaggtcactgccgtccttggttgcatgctggcgttgctgaaccggggaaggaatgaggtgctctcagggagatcaggtgttgcaagtgctttccatggatctgtggacagcacctctgatatgatcccaccactcaccttgttccgtggagacatgaagcgttgctgtgagagtatgcagctggcacttgccagctaccttgtaccgagtgagcccagggggttgaatatatggaggaagctgcagagattgaagaacgcttgttacgatgcaggtttctcaaggcctgatggttatccatgtccgacattatttgcgaattggtttccggtgtacctttcgattgtgtcagatgattcaggaacagatgagcccgaggttgcattttggaggggagggcaagtcagtgaggaggggctggcatggctactagaaaagggattcaaaactattgttgatctccgggaagaagatgttaaagatgatttgtacctttcagcagttcaggaggctgtctcatctgggaagatagaggtggtgaatatgctggttgagatcggaactgcaccatcagctgaacaggttaaacaatttgcagctcttgtgtcagatggcgcaaagaagcccatttatctccatagcaaagaaggtgtttctaggacgtctgcaatggtctcaagatggaaacaatatgttactcgttcagagagattggctgtccaaaatcactatataaatgggaatggtaaggtcctgacaagtgacaagaccaagcagcacacgggcagcccaagctcctctatgaatcgaactgaaattggtatggtaacggaatctgataggaccatgaacaatggagaatcatgtgagatagacatagagacagctcgtcataatctggaggtcactaatgccctttccgatgaccaaagtactcaacaaggtgaaatgcttgggactgggacagaacccttgtcaaactttaaactggagagtaacccccttaaagcacaatttcctacttgtgatattttctctagaaaagagatgagcaagttttttagaagcaaaaaggtttatccaaaatctgttctgaactcaaggagacaatcaagtagcttgctggtctcaaggagaaaacaaaatttcagcacagagcgtaatggaaccattgactatgaagcagcagagttcacaattttagaaagttcaaatggaacatcatttgacaatgattatattctatcagtttcttcaggtatcactgatggaaaaccttccaacaatggagccttttcgttaattgagaaaaaggaaagggaagtttcagtcactacttttgatactagagcatcggcgagcagttctaatggaaaggttcaggttggatcacaaaaaactgctgaaaagaatggtaccccttatctggagagaaacaattcaaataatgttgatggaagtatgtgtgcatctgcaactggtgtcgttagactccagtcgagaagaaaagcagagatgtttctgcaacagatgcttatgtggaaatctcctccaaagactgtcttacttttgaagaaattaggcgatgagctgatggaagaagctaaagaggttgcttcatttctgcatcatcaagaaaaaatgaatgttcttgtggaacctgatgttcatgatacatttgctagaattccaggttatggttttgtgcaaaccttctatactcaagataccagtgaccttcatgagagagttgattttgttacatgcttgggtggtgatggactcattttgcatgcatcaaacttatttagaacttctgtaccacctgttgtctccttcaatctcggatctcttgggttcttaacttcacataatttcaaagatttcagacaagactcgagagatttaatccatgggaacaacacacttggagtttatataacccttagaatgcgcctaagatgtgagatctttcgtagtggaaaagcaatgcctgataaagtgtttgatgtgctgaatgaagttgttgttgatcgaggttccaatccatacctatcaaaaattgagtgttatgagcataaccaccttatcactaaggtgcaaggtgatggggtgatagttgcaacaccaacaggcagcacggcatattctactgcagctgggggatcaatggttcatccaaatgtcccatgcatgctgtttactccaatctgccctcactcactgtcatttagacctgtcatccttccggattccgcacggcttgaattaaagataccagatgaggcaagaagcaatgcatgggtttcatttgatggcaaaaggcggcagcaactatcaagaggagactctgttcgtatatccatgagtcagcacccgctaccaactgttaataaatctgaccaaacgggtgattggttccgcagcctgatcaggtgcctcaactggaacgagagattagaccagaaggcactatagacactagaatctttttttattttttgatgtacatatgtaaattcacgcacaaatatagttttgttttttctgccaacatgtacagtgcgtaacaacaaagaactttgcatatcaaggatctaatcaggtggcttgagggataaatgagagttaataaaaaattgctcaatagaatcttgtttttcaaaacttcaaccaagtttttaacacatcgaaaatgacaaataaaaaaatgttaaatgagtagcccacaagcccaaaacaatggcttcatatttttaatgatgactgacgaacaaatcagagtaacgaaacctgtaggaaacaagtacaacattgaaaacctctaaaataaaaaagcacatcaaaagtcttcgaaattagaaaaacatgac

SEQ ID NO: 25930 - DNA, 1681 bp, Zea Mays
ctcctccctcaaaggccacggccttttcaggaaccaactgtgacaatccagtcaattatgatctctagcccccctccttccggctcctgtcatcctgcgcatgccatcggggcgctcgccgggacaacatttacctcgacagcgacgccgccgctctccctcgacgagagctcgtagctgtgtccgcgcaaggcttactcctttcttggccccgaccccttctccccgccgccggcgccgcgcttggcttgatgctcgacgtctgcgcgccacacgggcccgccaagctcccggctgcgtttgtcgccggcgtgcgagtcgcctgggtcgccggcaggtggtggtggcgatccgtggcggtgggggcggcgcgccatggcgtcaccacgcgggcgtcgttcttcgggctcgattcccaggttgcttcatttctgcatcatcaagaaaaaatgaatgttcttgtggaacctgatgttcatgatacatttgctagaattccaggttatggttttgtgcaaaccttctatactcaagataccagtgaccttcatgagagagttgattttgttacatgcttgggtggtgatggactcattttgcatgcatcaaacttatttagaacttctgtaccacctgttgtctccttcaatctcggatctcttgggttcttaacttcacataatttcaaagatttcagacaagactcgagagatttaatccatgggaacaacacacttggagtttatataacccttagaatgcgcctaagatgtgagatctttcgtagtggaaaagcaatgcctgataaagtgtttgatgtgctgaatgaagttgttgttgatcgaggttccaatccatacctatcaaaaattgagtgttatgagcataaccaccttatcactaaggtgcaaggtgatggggtgatagttgcaacaccaacaggcagcacggcatattctactgcagctgggggatcaatggttcatccaaatgtcccatgcatgctgtttactccaatctgccctcactcactgtcatttagacctgtcatccttccggattccgcacggcttgaattaaagataccagatgaggcaagaagcaatgcatgggtttcatttgatggcaaaaggcggcagcaactatcaagaggagactctgttcgtatatccatgagtcagcacccgctaccaactgttaataaatctgaccaaacgggtgattggttccgcagcctgatcaggtgcctcaactggaacgagagattagaccagaaggcactatagacactagaatctttttttattttttgatgtacatatgtaaattcacgcacaaatatagttttgttttttctgccaacatgtacagtgcgtaacaacaaagaactttgcatatcaaggatctaatcaggtggcttgagggataaatgagagttaataaaaaattgctcaatagaatcttgtttttcaaaacttcaaccaagtttttaacacatcgaaaatgacaaataaaaaaatgttaaatgagtagcccacaagcccaaaacaatggcttcatatttttaatgatgactgacgaacaaatcagagtaacgaaacctgtaggaaacaagtacaacattgaaaacctctaaaataaaaaagcacatcaaaagtcttcgaaattagaaaaacatgac

SEQ ID NO: 25931 - DNA, 3163 bp, Zea Mays
cgccgcagctgccttcaccttcaccccttgttttcgacgattccattgctcctccctcaaaggccacggccttttcaggaaccaactgtgacaatccagtcaattatgatctctagcccccctccttccggctcctgtcatcctgcgcatgccatcggggcgctcgccgggacaacatttacctcgacagcgacgccgccgctctccctcgacgagagctcgtagctgtgtccgcgcaaggcttactcctttcttggccccgaccccttctccccgccgccggcgccgcgcttggcttgatgctcgacgtctgcgcgccacacgggcccgccaagctcccggctgcgtttgtcgccggcgtgcgagtcgcctgggtcgccggcaggtggtggtggcgatccgtggcggtgggggcggcgcgccatggcgtcaccacgcgggcgtcgttcttcgggctcgattcccagaattttcagacaagggacccgtcccagttgttgtggatcggtccggtgcctggtgacatcgcggagattgaggcctactgccgcatattccgtgctgccgagcagctccacaccgcagttatgtcagcactttgtgatccagagacaggagagtgtcctgtacgctatgatgtggaatcagaggatctgccaatcctggaagacaaggtcactgccgtccttggttgcatgctggcgttgctgaaccggggaaggaatgaggtgctctcagggagatcaggtgttgcaagtgctttccatggatctgtggacagcacctctgatatgatcccaccactcaccttgttccgtggagacatgaagcgttgctgtgagagtatgcagctggcacttgccagctaccttgtaccgagtgagcccagggggttgaatatatggaggaagctgcagagattgaagaacgcttgttacgatgcaggtttctcaaggcctgatggttatccatgtccgacattatttgcgaattggtttccggtgtacctttcgattgtgtcagatgattcaggaacagatgagcccgaggttgcattttggaggggagggcaagtcagtgaggaggggctggcatggctactagaaaagggattcaaaactattgttgatctccgggaagaagatgttaaagatgatttgtacctttcagcagttcaggaggctgtctcatctgggaagatagaggtggtgaatatgctggttgagatcggaactgcaccatcagctgaacaggttaaacaatttgcagctcttgtgtcagatggcgcaaagaagcccatttatctccatagcaaagaaggtgtttctaggacgtctgcaatggtctcaagatggaaacaatatgttactcgttcagagagattggctgtccaaaatcactatataaatgggaatggtaaggtcctgacaagtgacaagaccaagcagcacacgggcagcccaagctcctctatgaatcgaactgaaattggtatggtaacggaatctgataggaccatgaacaatggagaatcatgtgagatagacatagagacagctcgtcataatctggaggtcactaatgccctttccgatgaccaaagtactcaacaaggtgaaatgcttgggactgggacagaacccttgtcaaactttaaactggagagtaacccccttaaagcacaatttcctacttgtgatattttctctagaaaagagatgagcaagttttttagaagcaaaaaggtttatccaaaatctgttctgaactcaaggagacaatcaagtagcttgctggtctcaaggagaaaacaaaatttcagcacagagcgtaatggaaccattgactatgaagcagcagagttcacaattttagaaagttcaaatggaacatcatttgacaatgattatattctatcagtttcttcaggtatcactgatggaaaaccttccaacaatggagccttttcgttaattgagaaaaaggaaagggaagtttcagtcactacttttgatactagagcatcggcgagcagttctaatggaaaggttcaggttggatcacaaaaaactgctgaaaagaatggtaccccttatctggagagaaacaattcaaataatgttgatggaagtatgtgtgcatctgcaactggtgtcgttagactccagtcgagaagaaaagcagagatgtttctggtacgtactgatggattttcttgtactagagaaaaagtaacagaatcatctctggcttttacacatcctagtacccagcaacagatgcttatgtggaaatctcctccaaagactgtcttacttttgaagaaattaggcgatgagctgatggaagaagctaaagaggttgcttcatttctgcatcatcaagaaaaaatgaatgttcttgtggaacctgatgttcatgatacatttgctagaattccaggttatggttttgtgcaaaccttctatactcaagataccagtgaccttcatgagagagttgattttgttacatgcttgggtggtgatggactcattttgcatgcatcaaacttatttagaacttctgtaccacctgttgtctccttcaatctcggatctcttgggttcttaacttcacataatgtacatttcaataatctctgagagagaatttcaccagattaagccgtttttgtgtagaaactaagcatattatcattttgttcacctcagttcaaagatttcagacaagactcgagagatttaatccatgggaacaacacacttggagtttatataacccttagaatgcgcctaagatgtgagatctttcgtagtggaaaagcaatgcctgataaagtgtttgatgtgctgaatgaagttgttgttgatcgaggttccaatccatacctatcaaaaattgagtgttatgagcataaccaccttatcactaaggtgcaaggtgatggggtgatagttgcaacaccaacaggcagcacggcatattctactgcagctgggggatcaatgtaatttgtctaggttcatccaaatgtcccatgcatgctgtttactccaatctgccctcactcactgtcatttagacctgtcatccttccggattccgcacggcttgaattaaaggttttaccccgcaacataccttggtttgctgactcatg

SEQ ID NO: 25932 - DNA, 1161 bp, Zea Mays
tttttttctaagcacattttgtttccaaactttttttttgtgcactccgtgtgctccatctggcagttgctggaggaacacagcacacaatcgcaatggcgcacctgccgcagctgagattattgccatcatggaacacgacagtgttggtttcgacgaaatagaggtgtaggtaagggcttcgataatttggagccgcagacgacagcaaagcgctgatatggacatgaaaactctattagttgttacggacactaattaatcacacgccgtcatctcatcagcctgtccgccttcaacttccgcccgccggcggcgctggacatcgggctcaccctcaccgtgcacgccaccaaccccaacgtcgtgcccgtgcgctacgggccctctaccgtctccatcctctacggtggcgcgcacctcggcaccgcccgcctcaacgccggcgagcagcccgccacctcctgccgcctgctccacctcccggcgcgcctcgacggcgtcgagctcgcgcagcgcgcccgcgccctcctcttcgacgtcgcgcgccgccacatggagctggacgcggccgtcgagatcgccggcgaggccgcggtgctgctctggtcccgccccttctccgtccgcatcgacagccacatcaccgtcgaccccgtcttcctggaagtcgtcgaccaggagaaccgcttggagatgcagctctacctcgcttcaattttttttaccaactagactagagtagatgcatgacaaagtggtatgagttctcgtggaaggcctgttctggaaggatgttgagaagctgattgatgactacaacagtgagcgcaagagtaaatgaattggtagctcgtgtctctggccatctggggagacattggctgtctagagaaatccctcaaagtttagcttaatctgaacaggcatttttgctatactgtaccggttgaccagtgaatgaatgatgttctagacattaaccctaacgtcgtgtccatgcttgtaacctgtttgttctggtgcttccatacggcggagcagattttgaagagaaatggaacaaatcgttaaatcacattatttcgttactgcggccacttttgcagggtttaagcgtacttccgaatagcttagaagacaaatcttgatgcatagaga

SEQ ID NO: 25933 - DNA, 1157 bp, Zea Mays
tttttttctaagcacattttgtttccaaactttttttttgtgcactccgtgtgctccatctggcagttgctggaggaacacagcacacaatcgcaatggcgcacctgccgcagctgagattattgccatcatggaacacgacagtgttggtttcgacgaaatagaggtgtaggtaagggcttcgataatttggagccgcagacgacagcaaagcgctgatatggacatgaaaactctattagttgttacggacactaattaatcacacgccgtcatctcatcagcctgtccgccttcaacttccgcccgccggcggcgctggacatcgggctcaccctcaccgtgcacgccaccaaccccaacgtcgtgcccgtgcgctacgggccctctaccgtctccatcctctacggtggcgcgcacctcggcaccgcccgcctcaacgccggcgagcagcccgccacctcctgccgcctgctccacctcccggcgcgcctcgacggcgtcgagctcgcgcagcgcgcccgcgccctcctcttcgacgtcgcgcgccgccacatggagctggacgcggccgtcgagatcgccggcgaggccgcggtgctgctctggtcccgccccttctccgtccgcatcgacagccacatcaccgtcgaccccgtcttcctggaagtcgtcgaccaggagaaccgcttggagatgcagctctacctcgcttcaattttttttaccaactagactagagtagatgcatgacaaagtggagttctcgtggaaggcctgttctggaaggatgttgagaagctgattgatgactacaacagtgagcgcaagagtaaatgaattggtagctcgtgtctctggccatctggggagacattggctgtctagagaaatccctcaaagtttagcttaatctgaacaggcatttttgctatactgtaccggttgaccagtgaatgaatgatgttctagacattaaccctaacgtcgtgtccatgcttgtaacctgtttgttctggtgcttccatacggcggagcagattttgaagagaaatggaacaaatcgttaaatcacattatttcgttactgcggccacttttgcagggtttaagcgtacttccgaatagcttagaagacaaatcttgatgcatagaga

SEQ ID NO: 25934 - DNA, 1337 bp, Zea Mays
attccacccattttcctccgcctcgccttttttttctaagcacattttgtttccaaactttttttttgtgcactccgtgtgctccatctggcagttgctggaggaacacagcacacaatcgcaatggcgcacctgccgcagctgagattattgccatcatggaacacgacagtgttggtttcgacgaaatagaggtgtagcctgtccgccttcaacttccgcccgccggcggcgctggacatcgggctcaccctcaccgtgcacgccaccaaccccaacgtcgtgcccgtgcgctacgggccctctaccgtctccatcctctacggtggcgcgcacctcggcaccgcccgcctcaacgccggcgagcagcccgccacctcctgccgcctgctccacctcccggcgcgcctcgacggcgtcgagctcgcgcagcgcgcccgcgccctcctcttcgacgtcgcgcgccgccacatggagctggacgcggccgtcgagatcgccggcgaggccgcggtgctgctctggtcccgccccttctccgtccgcatcgacagccacatcaccgtcgaccccgtcttcctggaagtcgtcgaccaggagaaccgcttggagatgcagctctacctcgcttcaattttttttaccaactagactagagtagatgcatgacaaagtggtatgtgcccagtagtcttcagttcagcagatttacatttttgagtctcgagcagatgcatctcttgtggaaatctggactatagttatgcatataaataatttattgttcgaactgtcaacacgacgacctagttttcctgaatgcagtttgatagcttttgcttgaaattttacgtccttatgacatgactcggtttcttttctcctggatgttcatttgtacacatctaacattattcttgttcgggtttacaaaggaaaggagttctcgtggaaggcctgttctggaaggatgttgagaagctgattgatgactacaacagtgagcgcaagagtaaatgaattggtagctcgtgtctctggccatctggggagacattggctgtctagagaaatccctcaaagtttagcttaatctgaacaggcatttttgctatactgtaccggttgaccagtgaatgaatgatgttctagacattaaccctaacgtcgtgtccatgcttgtaacctgtttgttctggtgcttccatacggcggagcagattttgaagagaaatggaacaaatcgttaaatcacattatttcgttactgcggccacttttgcagggtttaagcgtacttccgaatagcttagaagacaaatcttgatgcatagaga

SEQ ID NO: 25935 - DNA, 1552 bp, Zea Mays
atgcttcctacccctcgcactttcttgaagcggctagcacttttggttttagacgaccggctggtagggttaaaaaaacaaatacgcttctctcctctcgccttcgcctccgagccccctgttctgaatggtgaccagacctgcccatggccccgcgctcgcttaggtcgaggcgccgccgcccgccgacccgagcatcctagctcctccccgcgggcgctgagcagcgagccatcatgcccgctgtgtcgtgcctccatcgcgttgccccactggccgctcaagcacttctttcgtgtggagctcggcagcattagcagcagccgctccaactcggagtctccgacgctacagcagtcgtcgaccgcacgtacccgcatcacggagtacatcgtcgaggaggagctccaggtcgtgctccagcgacccgccaagccagcaacagaagcttgccacaatggagcgcgggcaaccatcgttcgtggcctgacccctacggcatcattcaggtccttcttcgtcgtcttttttggcatgctagcttcgaaatttttattttgcttacttctgttttggttttgtggcgtgtgggtggatttcaaggatggagaagtcccattcgccaaaattcaaaacgtcctcccaattaaaatgtcggcatgaagaatgaggaatgaatttgtgagacttttaggcaaatgcacatcagtctcggccaatcaaaagaaaatggtagaatttttttggaggggctttcgttgcatttttcattttctctaaattcatcgtatcattagcagcaccttaattttgggtcttctctgcctctacaggtagtatcgtgttttggccactaaatcccattggcctgatgcttccttgcgagagactcaattctcatatatttttgaaagaaaagggtaaaaacaccgcgcgtaggcgcgcgttggccactagtagacattaacgggcgctcttcggataggttcttcttatccgaactaggcagatcgagattgcatacacagtaaaagtgacggattatgatgcacataccataggaggatccaaccggaaatggcggaggaagagccgaccagagaagctaggagcgcgtggcaaagggagcgaccgagcgcctgataggaaagctagggcgtgaggggctgaccggaaatggcagagaagctagggcgtgagggattgagggccggccgccggacgacgggacgaagggtggctccaccgtggctgggtgggcgcggcgctgaggagatcgagcgcctcacgggagcgaccgagcggcgagcgggactcggcgggcggcggctctcaggagacaggagattgactgaactcctggcgggcggatggcagcttctagcggctgctgcactcctggtggcgcggcttggggagaggaggtggagagaggtgggcggtagagagagaagagagagaaagggggagggagaaggagtggcggcggcttgggggagggagcagggtagtggcggctagggttgggggttgggggcatgcccggtttcat

SEQ ID NO: 25936 - DNA, 1661 bp, Zea Mays
gtgcacctgatacggagccaagtttttttctcgttcctctcttctcctgctttctaagtccagtctcccgggcagaagaggcacgagaggaaggtggggaaggaaaccacagccgcttctggcgggcgctcaccctgccccttccacctcgcctcgcctcgcaatggaggtttccaggtggaccccggcggccggcctcctgctcctgttgctcctcccgctcgcggccaccccgtcacgcgccgccacgatggcgagatcgccgtcgtcgtccactgccgtgttccagctccagggagacgtataccccaccggccactactatgtcacgatgaacattgggaacccagcgaagccctacttcctggacgtggacactggcagcgatctcacctggctgcagtgcgacgcaccctgtcggagttgcaacaaggtgccacatcccttgtatcgaccaacggcaaaccgccttgtaccgtgtgcaaacgcactctgcactgcacttcacagcggacagggctctaataacaagtgcccttcaccaaaacaatgcgactatcagataaagtacaccgacagtgcatcttctcagggtgtgctgatcaacgacagcttctcactgcccatgagatcctccaacattcgtcctggcctcacatttggctgtggatatgaccagcaagtggggaaaaatggcgctgtgcaggcagcgattgacggcatgcttgggctcgggaggggatcagttagccttgtttcacagctcaagcagcaagggatcaccaaaaatgtcgtcggccattgcctaagcacgaatggaggggggttcctcttctttggggatgatgttgtgccttcatcacgtgtaacttgggtgccgatggctcagaggacatctgggaactactactcacctggctcaggaacactgtacttcgatagacgttcactaggcgtgaagccaatggaggtggtatttgacagtggtagcacctatacttattttactgctcaaccataccaagctgttgtttctgcgctcaaaggtggtctcagcaaatcacttaaacaggtgtcagatcccactctgcctctgtgctggaaagggcagaaagcattcaaatctgtgtttgacgtcaagaatgaattcaagtcaatgtttctgagctttgccagtgccaagaatgccgccatggagatcccacctgaaaactacctcattaaaaatggaaatgtgtgcctgggcattcttgatggaacggctgccaagctgagtttcaacgtaattggagacatcacgatgcaggatcagatggtgatctatgacaacgagaaatcgcagctgggatgggcgcgtggggcatgcactaggagcgccaagtctattctgtcttcctttccctgagctcagttctatgtacttctgatagagtttaagaaaatcactatatcaaacctcctcgcaatgcatgaatttcctaactgaagagggagggagagagagagagagaatgttcctgtttatgtagagatggagtccaaaatttgtgtgcctgatgagttcttccccatatgatattaactgaaatagtatatcaattgaatgtattacattttaagttttaattcatcgtatcttaagagataacaaaaagagtgca

SEQ ID NO: 25937 - DNA, 1319 bp, Zea Mays
gtgcacctgatacggagccaagtttttttctcgttcctctcttctcctgctttctaagtccagtctcccgggcagaagaggcacgagaggaaggtggggaaggaaaccacagccgcttctggcgggcgctcaccctgccccttccacctcgcctcgcctcgcaatggaggtttccaggtggaccccggcggccggcctcctgctcctgttgctcctcccgctcgcggccaccccgtcacgcgccgccacgatggcgagatcgccgtcgtcgtccactgccgtgttccagctccagggagacgtataccccaccggctgtggatatgaccagcaagtggggaaaaatggcgctgtgcaggcagcgattgacggcatgcttgggctcgggaggggatcagttagccttgtttcacagctcaagcagcaagggatcaccaaaaatgtcgtcggccattgcctaagcacgaatggaggggggttcctcttctttggggatgatgttgtgccttcatcacgtgtaacttgggtgccgatggctcagaggacatctgggaactactactcacctggctcaggaacactgtacttcgatagacgttcactaggcgtgaagccaatggaggtggtatttgacagtggtagcacctatacttattttactgctcaaccataccaagctgttgtttctgcgctcaaaggtggtctcagcaaatcacttaaacaggtgtcagatcccactctgcctctgtgctggaaagggcagaaagcattcaaatctgtgtttgacgtcaagaatgaattcaagtcaatgtttctgagctttgccagtgccaagaatgccgccatggagatcccacctgaaaactacctcattgtcacaaaaaatggaaatgtgtgcctgggcattcttgatggaacggctgccaagctgagtttcaacgtaattggagacatcacgatgcaggatcagatggtgatctatgacaacgagaaatcgcagctgggatgggcgcgtggggcatgcactaggagcgccaagtctattctgtcttcctttccctgagctcagttctatgtacttctgatagagtttaagaaaatcactatatcaaacctcctcgcaatgcatgaatttcctaactgaagagggagggagagagagagagagaatgttcctgtttatgtagagatggagtccaaaatttgtgtgcctgatgagttcttccccatatgatattaactgaaatagtatatcaattgaatgtattacattttaagttttaattcatcgtatcttaagagataacaaaaagagtgca

SEQ ID NO: 25938 - DNA, 3873 bp, Zea Mays
cttaattcgagatattttctgcttcaaaatgctgtactgctgcatggagtaatctatgatgtactggaacagtatgaagactcagaaaatatatggacttgtgcccttctgttggctactctgtttcaggattcagtggttgttcagtcttctgaaataacacgaaccataccttccttagcatccttgctaaaatctgatgatattatcaataaatactttgctgctcaggcactggctagccttgtttccactgggagcagaggtatacagcttgctattgcgaattctggtgcagttttgggtgctgtagcattgatcggacaggtagaatctgatatgccaaaccttgttacaatggctgaagaattcaagttgtcagacaatccatgtcaaataatgttgagaagcctttttgagcttgaagatgtctgcactggtgcttccgcccggaggtccatacccttgctagtggatctacttaaaccaatgccagataggccaggtgcacctctgattgctttgcaccttctgactcaactagcggaaggtagtgagtcaaataaaattgctatggcagaggctggagctttggatgccttgactaagtatctatctttaagccctcaagactcaactgaaactactataaccaatctgttggggattttatacactaatcctgatcttctttaccatgaatcatcacgtagcacttcaaatcagctggtagctgtcttgcgtttgggttcgagaagttctaggcttagtgcagtaaggacgttgcagaaactctttgattcagagaatataagggacaccgaagtggcccggcaagctattcaaccactacttgacatgcttgagtcaggaactgaaatagaacagcaggcagcacttggtgcgcttatcaagctttctgctgggaacatcgctaaggattctgctatgtttgatgtagaaggcaacacacttgaaaatctttacaaagttttatccttcagttcgtcattggagctgaagaaggatgctgctcaactctgctatattttatttgagaactcaactgtacgtgcatcaccaattgcaacagaatgtcttcaacccctgatatcactgatgacatcaggatctagtttggctattgaaccagcagtttgtgctctaaacagattactggatgaggactacaatgcagaaattgctgcaactagcgaagttattgatcttcttgtcagttttgttcctggtacaaactatcagttgtctgaagcatgtatcggtgctctcataaagttgggcaaggatcgtccaaactgcaagcttgacatggttaaagctggtatcattgagcatgcacttgatatgattcttgatgttcctgtatctgttagttcatccattgctgaattgcttcgcattttgacaaacaacagtggcattgctaaaagttctgctgctgcaaaaatggtggagccacttttcttgcttttacgtcgccctgatgttactatgtgggatcagcacagtgccttgcaagcactcgtaaatattttggagaaacctcagagtctagcagcattgaagttgactcccagtcaaataattgagcctttaatatcatttcttgagtctccctctcaagcaattcagcaacttggcactgaggtgctctcacatcttctagaacaggaacattttcaacaggatatcactacaaaaaatgcagttgttcctctggtgcagcttgctggtattggaatcttgagcttacaacaaactgcagttaaagcacttgaaaacatctcacagagttggcccaaggcagtagccgatgcaggtggaatttttgaactttcaaaggtaattgtccaggatgatcctcagccaagtcaagcattatgggaatctgcagcacttgtgttatgcaatgttctgcgttataattctgacaactatgtcaaagtctcaatggctgtacttgtgagattgctgaactccaccatggagagtaccgtcacgatagctctcagtgctctacttgttcaagagaaaagtagctcacgctgtgctgtggccatggctgaggctggggcagtacgggcactcttggagctcctgaagagccatcgatgtgaggaatctgcagcaagattgcttgaagccctgataaacaattcaagggtccgtgaaacaaaagttgccaagtatgctattgctccactggcacagtacctgttagatcctcaatctaagaaccagtcagcaaagtttctggttactcttgcactaggtgacattttccagcatgaagctcttgcaagggcaagtgactctgtgtctgcctgccgtgctcttgtaagcctacttgaggaccagcctacggatgacatgacaacagttgctatttgtgcactgcaaagcttagtgatgcacagcaggacaaataggcgtgctgttgctgaagctgggggcattttggttgtgcaagaattgcttctttcaccaaatgtggatatttcaggacaggctgcccttctaatgaagtacctattttcaaatcatacgctgcaagaatacgtgtcgaatgagcttattcgatctcttactgaccatatatgtgatattcagcaacttcaaaaaggttcggttttctgaggccgcaaccttgtgcataccacacctggtttgtgctttgaaggatggaaatgaggctgcccaagagagcgtgcttgacaccctttgcttgcttaaagaatcttggccgcaaatgaatgaagacatcgctaaagcccagtccctgatttcagctgaagccatacctgtactacaaatgcttatgaagacatgtcctcccagttttcacgagagagccgatagtttgcttcattgcttgcctggttgcttgacagtgaccatcattcgtgggaataatctgaaacagacaatggggggtacaaatgcattttgttgcctgcaaataggaaatggtcctccaaggcaaactaaggtggtaaaccacagcatgtgcccagcttggaacgagggtttcacttggttatttgacgtggcccctaaagggcagaagctctacatcatatgcaaaagcaaaaatacgtttggaaagtcaacccttggaagagtgaccatccagatcgacaaggttgtcaccgagggtgtatacagcgggttcttcagcctcagccacgacggaggtaaggacggctcaaggaccctagagatagagatcgtatggtccaataggccatccaacgactgtatgtagcgtacggatgatttacctgacgccaattcttgtactcttggcttccatgtaaatcagccccccccccataatcatccgaattcatttatttgtacgtagaaagttaagacacttagataactcgcgccatcattcaattattgaggtcatttccgggattgtggccctgctgctgtaaactgattttgcacccgggtatttttttttgtacaggtgaatttatttcatgtagttatagcttagtgtagattggtggtgagtacggacaagccctagtgacagtaacattgggtgtgatgtgtggcgtgatatttgctcccgtgggtgtgtttccggcacttgtagcctcaggatacacatggctgagcttggcactgttctatttgtcaggcatgtttgtttacctgtttggttctggctacgcaaaactttttttttacatccaccttgccatagccgtaccagcggtacgaggaatctgaggtacctttttcttccatctcggcagaagtttgatgtttggcgaaactgtctcaggttacatggtaataacaatactatttgcaaaaccaaacacgccacatacc

SEQ ID NO: 25939 - DNA, 4237 bp, Zea Mays
tgaacatctaactacgaaaagttcaataagtctcatccacataccttctgccccataacaaatctaacactctacttgaaaggactgtcttggaggaagcgttggggcctgtgcttctggcctcctttacttgaattataaaataattcaaggtgtaaagctggtatggatctaagcatggcaagtttgaacttgtcagaacctcgagactctagagaatcaacttcgcccgcaccatcaacatcatcttctatatcaagagaaaaaggtgacctggcagaagttgatgatcctgaaagtgcaatgtccactgttgctagattgttggaagacctccatgctagcatggtgtctccatcggggaaggaagctacaaccagaaggttacttgaactggctagagcgaaaaaggaggcaaggattttgataggaacagtatgaagactcagaaaatatatggacttgtgcccttctgttggctactctgtttcaggattcagtggttgttcagtcttctgaaataacacgaaccataccttccttagcatccttgctaaaatctgatgatattatcaataaatactttgctgctcaggcactggctagccttgtttccactgggagcagaggtatacagcttgctattgcgaattctggtgcagttttgggtgctgtagcattgatcggacaggtagaatctgatatgccaaaccttgttacaatggctgaagaattcaagttgtcagacaatccatgtcaaataatgttgagaagcctttttgagcttgaagatgtctgcactggtgcttccgcccggaggtccatacccttgctagtggatctacttaaaccaatgccagataggccaggtgcacctctgattgctttgcaccttctgactcaactagcggaaggtagtgagtcaaataaaattgctatggcagaggctggagctttggatgccttgactaagtatctatctttaagccctcaagactcaactgaaactactataaccaatctgttggggattttatacactaatcctgatcttctttaccatgaatcatcacgtagcacttcaaatcagctggtagctgtcttgcgtttgggttcgagaagttctaggcttagtgcagtaaggacgttgcagaaactctttgattcagagaatataagggacaccgaagtggcccggcaagctattcaaccactacttgacatgcttgagtcaggaactgaaatagaacagcaggcagcacttggtgcgcttatcaagctttctgctgggaacatcgctaaggattctgctatgtttgatgtagaaggcaacacacttgaaaatctttacaaagttttatccttcagttcgtcattggagctgaagaaggatgctgctcaactctgctatattttatttgagaactcaactgtacgtgcatcaccaattgcaacagaatgtcttcaacccctgatatcactgatgacatcaggatctagtttggctattgaaccagcagtttgtgctctaaacagattactggatgaggactacaatgcagaaattgctgcaactagcgaagttattgatcttcttgtcagttttgttcctggtacaaactatcagttgtctgaagcatgtatcggtgctctcataaagttgggcaaggatcgtccaaactgcaagcttgacatggttaaagctggtatcattgagcatgcacttgatatgattcttgatgttcctgtatctgttagttcatccattgctgaattgcttcgcattttgacaaacaacagtggcattgctaaaagttctgctgctgcaaaaatggtggagccacttttcttgcttttacgtcgccctgatgttactatgtgggatcagcacagtgccttgcaagcactcgtaaatattttggagaaacctcagagtctagcagcattgaagttgactcccagtcaaataattgagcctttaatatcatttcttgagtctccctctcaagcaattcagcaacttggcactgaggtgctctcacatcttctagaacaggaacattttcaacaggatatcactacaaaaaatgcagttgttcctctggtgcagcttgctggtattggaatcttgagcttacaacaaactgcagttaaagcacttgaaaacatctcacagagttggcccaaggcagtagccgatgcaggtggaatttttgaactttcaaaggtaattgtccaggatgatcctcagccaagtcaagcattatgggaatctgcagcacttgtgttatgcaatgttctgcgttataattctgacaactatgtcaaagtctcaatggctgtacttgtgagattgctgaactccaccatggagagtaccgtcacgatagctctcagtgctctacttgttcaagagaaaagtagctcacgctgtgctgtggccatggctgaggctggggcagtacgggcactcttggagctcctgaagagccatcgatgtgaggaatctgcagcaagattgcttgaagccctgataaacaattcaagggtccgtgaaacaaaagttgccaagtatgctattgctccactggcacagtacctgttagatcctcaatctaagaaccagtcagcaaagtttctggttactcttgcactaggtgacattttccagcatgaagctcttgcaagggcaagtgactctgtgtctgcctgccgtgctcttgtaagcctacttgaggaccagcctacggatgacatgacaacagttgctatttgtgcactgcaaagcttagtgatgcacagcaggacaaataggcgtgctgttgctgaagctgggggcattttggttgtgcaagaattgcttctttcaccaaatgtggatatttcaggacaggctgcccttctaatgaagtacctattttcaaatcatacgctgcaagaatacgtgtcgaatgagcttattcgatctcttactgaccatatatgtgatattcagcaacttcaaaaaggttcggttttctgaggccgcaaccttgtgcataccacacctggtttgtgctttgaaggatggaaatgaggctgcccaagagagcgtgcttgacaccctttgcttgcttaaagaatcttggccgcaaatgaatgaagacatcgctaaagcccagtccctgatttcagctgaagccatacctgtactacaaatgcttatgaagacatgtcctcccagttttcacgagagagccgatagtttgcttcattgcttgcctggttgcttgacagtgaccatcattcgtgggaataatctgaaacagacaatggggggtacaaatgcattttgttgcctgcaaataggaaatggtcctccaaggcaaactaaggtggtaaaccacagcatgtgcccagcttggaacgagggtttcacttggttatttgacgtggcccctaaagggcagaagctctacatcatatgcaaaagcaaaaatacgtttggaaagtcaacccttggaagagtgaccatccagatcgacaaggttgtcaccgagggtgtatacagcgggttcttcagcctcagccacgacggaggtaaggacggctcaaggaccctagagatagagatcgtatggtccaataggccatccaacgactgtatgtagcgtacggatgatttacctgacgccaattcttgtactcttggcttccatgtaaatcagccccccccccataatcatccgaattcatttatttgtacgtagaaagttaagacacttagataactcgcgccatcattcaattattgaggtcatttccgggattgtggccctgctgctgtaaactgattttgcacccgggtatttttttttgtacaggtgaatttatttcatgtagttatagcttagtgtagattggtggtgagtacggacaagccctagtgacagtaacattgggtgtgatgtgtggcgtgatatttgctcccgtgggtgtgtttccggcacttgtagcctcaggatacacatggctgagcttggcactgttctatttgtcaggcatgtttgtttacctgtttggttctggctacgcaaaactttttttttacatccaccttgccatagccgtaccagcggtacgaggaatctgaggtacctttttcttccatctcggcagaagtttgatgtttggcgaaactgtctcaggttacatggtaataacaatactatttgcaaaaccaaacacgccacatacc

SEQ ID NO: 25940 - DNA, 7243 bp, Zea Mays
atcaaattgctcttcaagttaaggtatataagaggaagtgttgctcgttgaatcagtaccttgtctgatgaacatctaactacgaaaagttcaataagtctcatccacataccttctgccccataacaaatctaacactctacttgaaaggactgtcttggaggaagcgttggggcctgtgcttctggcctcctttacttgaattataaaataattcaaggtgtaaagctggtatggatctaagcatggcaagtttgaacttgtcagaacctcgagactctagagaatcaacttcgcccgcaccatcaacatcatcttctatatcaagagaaaaaggtgacctggcagaagttgatgatcctgaaagtgcaatgtccactgttgctagattgttggaagacctccatgctagcatggtgtctccatcggggaaggaagctacaaccagaaggttacttgaactggctagagcgaaaaaggaggcaaggattttgataggtagccattctcaggcaatgccactactcatatctacccttagagttgggtcatctgcagcaaaagtaaatgctgcagctctacttagtgcactctgtaaggaagaggacttgcgtgtgagggtcctcttaggaggctgtataccacccttaatctctcttttgaagtctgagtctgctgaagcgaagaaggctgctgctgaagctatttatgaagtatcttctggtgggcttttggatgatcacataggcaggaaaatatttgtgactgaaggtgtggtgccaactctgtgggacttgcttaatcctaggtctcaccaagatagagtagttgagggctttgtgactggggctttaaggaatctttgtggggacaaagatggttattggaaggccacacttgaggctggaggtgttgaaattattactggtcttctttcatccaagaatactgcttcacagtcgaatgctgcttctctgttggcacggtttatctctgcttctggtgatagcattcccaaagttatagatgctggggctgttaaggctctccttcaccttctaaatcgagataatatcatttctgttcgtgaaagtgcggctgatgctttggaggccctgtcttccaagtccagtattgcaaagaaagctgtggtggatgcaggaggccttcctattctgattggagctgttgtagcgccctcaaaggaatgcatgcagggtgggacatgtcattctctgcaaagccatgctgtccgtgctttatcaaatatttgtgggggaacaacttctctgttgctttaccttggtgagctctgccaagcaccccggtcacctgttcccctcgctgatattcttggagcgcttgcttattccttgatggtttttgacggctctgatgataaatcatttgaccctgttgagattgaaattactttggttgcgctcctaaaatctcatgacagcaagcttgatcgtattcttgaggctttagcaagtctatatgggaatgattgtttctccgacaggcttgatcactcttattctaagaaggttcttgttgggctgattaccatagctcctgctgatgttcaagagcttcttgttcgtgccttaactagcttgtgttgcgatggtgttggaatatgggaggctcttggaaagagagaaggggttcagttgctaatatcattacttgggctttccagtgagcagcagcaggaatatgcagtttccttattggctatcttgagtgatgaagtagatgacagcaaatgggcaataacagctgctggaggtatccctccacttgtccagctactagaaacaggatctcaaaaagcaaaggaggatgcagcttacatcatgtggaacatgtgctctgacagtgatgatatcagggcatgtattgagagtgctggggctgttatggcgctaatttggcttctaaagagtggtagccctggtggacaggaggcatcagttaaagcactgaagaagttgatacgatcagcagattctgctatgatcaatcagttactagcattactgctcagtgactcattgagctcaaaggcccatgtcattactgttctcgggcatgtccttgtgctggcgcctcagagagctctaatccagagtggagctccagctaataaagttcttaggtcactggttcttgttcttgaatcatcaaatgaagaaacacaggagattgctgcaactgtgttggctgatattttcactatgcgtcaggatatttgtgatgtaatggcaattgatgaaattgtccagccatgcatgaagcttttgacaagtggaaaccaagtgattgccacacaatctgccagagctttaggagcactgtcatgttcagctagttccatgtcaaaaaacaaaatgtcttgcttaactgaaggtgatgtgcgacctcttatagagatggcaaagacatcatctattgatgttgctgaaacagcatttgctgcattagcaaatctcctatcagatgcacagattgctaaagaagcattagatgacaatattgtcttggctttgactagagtgctcaaggatgggagtttagaaggcaagattagtgcttcgcggtcacttcgtcagttggtcaaccagtttcccctcagtgaagttctcccagattacttgcagtgctgttttataattcatgcactgttggtatgtctatctggcatcagtttagaaaatgttacaagtttggaaccccttgatgttcttacattgatggctacaacaaaggagggttcgcattatagcccccctctatgcactggttttcttgaagttccagaaagcttagaacctttagttcgctgtattagtattgggcttccacctgttcaagataagtccattcaaatcctagcaagtctctgtcagggtcgaccttcgctacttggtgaatatttaaacagaagtcaaggatgcatcacttctcttgctactagagttatagagtcaaatgacatggaaataaggatcagcagtgcagtcatcctcatatctgcaatgagggacagcagagaacggtccatcgatgttctggaagcatcaaaagttctgaagaatctgatatctgcactcattgatatgctgaagcaacattcctctttaacatccctagacattgaaatctggaaaccttccacagaaaaaagttcgcttaattatgagcaggatgttttgagtgtgcctgaacttggaaaggtttctgaagaaactgttgcactatggttgctctcactgatttgttcttatcatggaaggagtaaatatactgttatggagctcaatggcgttgacacagtatctgatagacttgctagctatactgctaaccgacaggaacagtatgaagactcagaaaatatatggacttgtgcccttctgttggctactctgtttcaggattcagtggttgttcagtcttctgaaataacacgaaccataccttccttagcatccttgctaaaatctgatgatattatcaataaatactttgctgctcaggcactggctagccttgtttccactgggagcagaggtatacagcttgctattgcgaattctggtgcagttttgggtgctgtagcattgatcggacaggtagaatctgatatgccaaaccttgttacaatggctgaagaattcaagttgtcagacaatccatgtcaaataatgttgagaagcctttttgagcttgaagatgtctgcactggtgcttccgcccggaggtccatacccttgctagtggatctacttaaaccaatgccagataggccaggtgcacctctgattgctttgcaccttctgactcaactagcggaaggtagtgagtcaaataaaattgctatggcagaggctggagctttggatgccttgactaagtatctatctttaagccctcaagactcaactgaaactactataaccaatctgttggggattttatacactaatcctgatcttctttaccatgaatcatcacgtagcacttcaaatcagctggtagctgtcttgcgtttgggttcgagaagttctaggcttagtgcagtaaggacgttgcagaaactctttgattcagagaatataagggacaccgaagtggcccggcaagctattcaaccactacttgacatgcttgagtcaggaactgaaatagaacagcaggcagcacttggtgcgcttatcaagctttctgctgggaacatcgctaaggattctgctatgtttgatgtagaaggcaacacacttgaaaatctttacaaagttttatccttcagttcgtcattggagctgaagaaggatgctgctcaactctgctatattttatttgagaactcaactgtacgtgcatcaccaattgcaacagaatgtcttcaacccctgatatcactgatgacatcaggatctagtttggctattgaaccagcagtttgtgctctaaacagattactggatgaggactacaatgcagaaattgctgcaactagcgaagttattgatcttcttgtcagttttgttcctggtacaaactatcagttgtctgaagcatgtatcggtgctctcataaagttgggcaaggatcgtccaaactgcaagcttgacatggttaaagctggtatcattgagcatgcacttgatatgattcttgatgttcctgtatctgttagttcatccattgctgaattgcttcgcattttgacaaacaacagtggcattgctaaaagttctgctgctgcaaaaatggtggagccacttttcttgcttttacgtcgccctgatgttactatgtgggatcagcacagtgccttgcaagcactcgtaaatattttggagaaacctcagagtctagcagcattgaagttgactcccagtcaaataattgagcctttaatatcatttcttgagtctccctctcaagcaattcagcaacttggcactgaggtgctctcacatcttctagaacaggaacattttcaacaggatatcactacaaaaaatgcagttgttcctctggtgcagcttgctggtattggaatcttgagcttacaacaaactgcagttaaagcacttgaaaacatctcacagagttggcccaaggcagtagccgatgcaggtggaatttttgaactttcaaaggtaattgtccaggatgatcctcagccaagtcaagcattatgggaatctgcagcacttgtgttatgcaatgttctgcgttataattctgacaactatgtcaaagtctcaatggctgtacttgtgagattgctgaactccaccatggagagtaccgtcacgatagctctcagtgctctacttgttcaagagaaaagtagctcacgctgtgctgtggccatggctgaggctggggcagtacgggcactcttggagctcctgaagagccatcgatgtgaggaatctgcagcaagattgcttgaagccctgataaacaattcaagggtccgtgaaacaaaagttgccaagtatgctattgctccactggcacagtacctgttagatcctcaatctaagaaccagtcagcaaagtttctggttactcttgcactaggtgacattttccagcatgaagctcttgcaagggcaagtgactctgtgtctgcctgccgtgctcttgtaagcctacttgaggaccagcctacggatgacatgacaacagttgctatttgtgcactgcaaagcttagtgatgcacagcaggacaaataggcgtgctgttgctgaagctgggggcattttggttgtgcaagaattgcttctttcaccaaatgtggatatttcaggacaggctgcccttctaatgaagtacctattttcaaatcatacgctgcaagaatacgtgtcgaatgagcttattcgatctcttactgctgccttagagagagagctgctctctacgtcaactatcaatgaagttattctgaagaccatatatgtgatattcagcaacttcaaaaaggttcggttttctgaggccgcaaccttgtgcataccacacctggtttgtgctttgaaggatggaaatgaggctgcccaagagagcgtgcttgacaccctttgcttgcttaaagaatcttggccgcaaatgaatgaagacatcgctaaagcccagtccctgatttcagctgaagccatacctgtactacaaatgcttatgaagacatgtcctcccagttttcacgagagagccgatagtttgcttcattgcttgcctggttgcttgacagtgaccatcattcgtgggaataatctgaaacagacaatggggggtacaaatgcattttgttgcctgcaaataggaaatggtcctccaaggcaaactaaggtggtaaaccacagcatgtgcccagcttggaacgagggtttcacttggttatttgacgtggcccctaaagggcagaagctctacatcatatgcaaaagcaaaaatacgtttggaaagtcaacccttggaagagtgaccatccagatcgacaaggttgtcaccgagggtgtatacagcgggttcttcagcctcagccacgacggaggtaaggacggctcaaggaccctagagatagagatcgtatggtccaataggccatccaacgactgtatgtagcgtacggatgatttacctgacgccaattcttgtactcttggcttccatgtaaatcagccccccccccataatcatccgaattcatttatttgtacgtagaaagttaagacacttagataactcgcgccatcattcaattattgaggtcatttccgggattgtggccctgctgctgtaaactgattttgcacccgggtatttttttttgtacaggtgaatttatttcatgtagttatagcttagtgtagattggtggtgagtacggacaagccctagtgacagtaacattgggtgtgatgtgtggcgtgatatttgctcccgtgggtgtgtttccggcacttgtagcctcaggatacacatggctgagcttggcactgttctatttgtcaggcatgtttgtttacctgtttggttctggctacgcaaaactttttttttacatccaccttgccatagccgtaccagcggtacgaggaatctgaggtacctttttcttccatctcggcagaagtttgatgtttggcgaaactgtctcaggttacatggtaataacaatactatttgcaaaaccaaacacgccacatacc

SEQ ID NO: 25941 - DNA, 7116 bp, Zea Mays
cgcccaccaccgtccacccgccaacggatctggctgcatgctttaaaacggatattaattcattattctcttggaattataaaataattcaaggtgtaaagctggtatggatctaagcatggcaagtttgaacttgtcagaacctcgagactctagagaatcaacttcgcccgcaccatcaacatcatcttctatatcaagagaaaaaggtgacctggcagaagttgatgatcctgaaagtgcaatgtccactgttgctagattgttggaagacctccatgctagcatggtgtctccatcggggaaggaagctacaaccagaaggttacttgaactggctagagcgaaaaaggaggcaaggattttgataggtagccattctcaggcaatgccactactcatatctacccttagagttgggtcatctgcagcaaaagtaaatgctgcagctctacttagtgcactctgtaaggaagaggacttgcgtgtgagggtcctcttaggaggctgtataccacccttaatctctcttttgaagtctgagtctgctgaagcgaagaaggctgctgctgaagctatttatgaagtatcttctggtgggcttttggatgatcacataggcaggaaaatatttgtgactgaaggtgtggtgccaactctgtgggacttgcttaatcctaggtctcaccaagatagagtagttgagggctttgtgactggggctttaaggaatctttgtggggacaaagatggttattggaaggccacacttgaggctggaggtgttgaaattattactggtcttctttcatccaagaatactgcttcacagtcgaatgctgcttctctgttggcacggtttatctctgcttctggtgatagcattcccaaagttatagatgctggggctgttaaggctctccttcaccttctaaatcgagataatatcatttctgttcgtgaaagtgcggctgatgctttggaggccctgtcttccaagtccagtattgcaaagaaagctgtggtggatgcaggaggccttcctattctgattggagctgttgtagcgccctcaaaggaatgcatgcagggtgggacatgtcattctctgcaaagccatgctgtccgtgctttatcaaatatttgtgggggaacaacttctctgttgctttaccttggtgagctctgccaagcaccccggtcacctgttcccctcgctgatattcttggagcgcttgcttattccttgatggtttttgacggctctgatgataaatcatttgaccctgttgagattgaaattactttggttgcgctcctaaaatctcatgacagcaagcttgatcgtattcttgaggctttagcaagtctatatgggaatgattgtttctccgacaggcttgatcactcttattctaagaaggttcttgttgggctgattaccatagctcctgctgatgttcaagagcttcttgttcgtgccttaactagcttgtgttgcgatggtgttggaatatgggaggctcttggaaagagagaaggggttcagttgctaatatcattacttgggctttccagtgagcagcagcaggaatatgcagtttccttattggctatcttgagtgatgaagtagatgacagcaaatgggcaataacagctgctggaggtatccctccacttgtccagctactagaaacaggatctcaaaaagcaaaggaggatgcagcttacatcatgtggaacatgtgctctgacagtgatgatatcagggcatgtattgagagtgctggggctgttatggcgctaatttggcttctaaagagtggtagccctggtggacaggaggcatcagttaaagcactgaagaagttgatacgatcagcagattctgctatgatcaatcagttactagcattactgctcagtgactcattgagctcaaaggcccatgtcattactgttctcgggcatgtccttgtgctggcgcctcagagagctctaatccagagtggagctccagctaataaagttcttaggtcactggttcttgttcttgaatcatcaaatgaagaaacacaggagattgctgcaactgtgttggctgatattttcactatgcgtcaggatatttgtgatgtaatggcaattgatgaaattgtccagccatgcatgaagcttttgacaagtggaaaccaagtgattgccacacaatctgccagagctttaggagcactgtcatgttcagctagttccatgtcaaaaaacaaaatgtcttgcttaactgaaggtgatgtgcgacctcttatagagatggcaaagacatcatctattgatgttgctgaaacagcatttgctgcattagcaaatctcctatcagatgcacagattgctaaagaagcattagatgacaatattgtcttggctttgactagagtgctcaaggatgggagtttagaaggcaagattagtgcttcgcggtcacttcgtcagttggtcaaccagtttcccctcagtgaagttctcccagattacttgcagtgctgttttataattcatgcactgttggtatgtctatctggcatcagtttagaaaatgttacaagtttggaaccccttgatgttcttacattgatggctacaacaaaggagggttcgcattatagcccccctctatgcactggttttcttgaagttccagaaagcttagaacctttagttcgctgtattagtattgggcttccacctgttcaagataagtccattcaaatcctagcaagtctctgtcagggtcgaccttcgctacttggtgaatatttaaacagaagtcaaggatgcatcacttctcttgctactagagttatagagtcaaatgacatggaaataaggatcagcagtgcagtcatcctcatatctgcaatgagggacagcagagaacggtccatcgatgttctggaagcatcaaaagttctgaagaatctgatatctgcactcattgatatgctgaagcaacattcctctttaacatccctagacattgaaatctggaaaccttccacagaaaaaagttcgcttaattatgagcaggatgttttgagtgtgcctgaacttggaaaggtttctgaagaaactgttgcactatggttgctctcactgatttgttcttatcatggaaggagtaaatatactgttatggagctcaatggcgttgacacagtatctgatagacttgctagctatactgctaaccgacaggaacagtatgaagactcagaaaatatatggacttgtgcccttctgttggctactctgtttcaggattcagtggttgttcagtcttctgaaataacacgaaccataccttccttagcatccttgctaaaatctgatgatattatcaataaatactttgctgctcaggcactggctagccttgtttccactgggagcagaggtatacagcttgctattgcgaattctggtgcagttttgggtgctgtagcattgatcggacaggtagaatctgatatgccaaaccttgttacaatggctgaagaattcaagttgtcagacaatccatgtcaaataatgttgagaagcctttttgagcttgaagatgtctgcactggtgcttccgcccggaggtccatacccttgctagtggatctacttaaaccaatgccagataggccaggtgcacctctgattgctttgcaccttctgactcaactagcggaaggtagtgagtcaaataaaattgctatggcagaggctggagctttggatgccttgactaagtatctatctttaagccctcaagactcaactgaaactactataaccaatctgttggggattttatacactaatcctgatcttctttaccatgaatcatcacgtagcacttcaaatcagctggtagctgtcttgcgtttgggttcgagaagttctaggcttagtgcagtaaggacgttgcagaaactctttgattcagagaatataagggacaccgaagtggcccggcaagctattcaaccactacttgacatgcttgagtcaggaactgaaatagaacagcaggcagcacttggtgcgcttatcaagctttctgctgggaacatcgctaaggattctgctatgtttgatgtagaaggcaacacacttgaaaatctttacaaagttttatccttcagttcgtcattggagctgaagaaggatgctgctcaactctgctatattttatttgagaactcaactgtacgtgcatcaccaattgcaacagaatgtcttcaacccctgatatcactgatgacatcaggatctagtttggctattgaaccagcagtttgtgctctaaacagattactggatgaggactacaatgcagaaattgctgcaactagcgaagttattgatcttcttgtcagttttgttcctggtacaaactatcagttgtctgaagcatgtatcggtgctctcataaagttgggcaaggatcgtccaaactgcaagcttgacatggttaaagctggtatcattgagcatgcacttgatatgattcttgatgttcctgtatctgttagttcatccattgctgaattgcttcgcattttgacaaacaacagtggcattgctaaaagttctgctgctgcaaaaatggtggagccacttttcttgcttttacgtcgccctgatgttactatgtgggatcagcacagtgccttgcaagcactcgtaaatattttggagaaacctcagagtctagcagcattgaagttgactcccagtcaaataattgagcctttaatatcatttcttgagtctccctctcaagcaattcagcaacttggcactgaggtgctctcacatcttctagaacaggaacattttcaacaggatatcactacaaaaaatgcagttgttcctctggtgcagcttgctggtattggaatcttgagcttacaacaaactgcagttaaagcacttgaaaacatctcacagagttggcccaaggcagtagccgatgcaggtggaatttttgaactttcaaaggtaattgtccaggatgatcctcagccaagtcaagcattatgggaatctgcagcacttgtgttatgcaatgttctgcgttataattctgacaactatgtcaaagtctcaatggctgtacttgtgagattgctgaactccaccatggagagtaccgtcacgatagctctcagtgctctacttgttcaagagaaaagtagctcacgctgtgctgtggccatggctgaggctggggcagtacgggcactcttggagctcctgaagagccatcgatgtgaggaatctgcagcaagattgcttgaagccctgataaacaattcaagggtccgtgaaacaaaagttgccaagtatgctattgctccactggcacagtacctgttagatcctcaatctaagaaccagtcagcaaagtttctggttactcttgcactaggtgacattttccagcatgaagctcttgcaagggcaagtgactctgtgtctgcctgccgtgctcttgtaagcctacttgaggaccagcctacggatgacatgacaacagttgctatttgtgcactgcaaagcttagtgatgcacagcaggacaaataggcgtgctgttgctgaagctgggggcattttggttgtgcaagaattgcttctttcaccaaatgtggatatttcaggacaggctgcccttctaatgaagtacctattttcaaatcatacgctgcaagaatacgtgtcgaatgagcttattcgatctcttactgctgccttagagagagagctgctctctacgtcaactatcaatgaagttattctgaagaccatatatgtgatattcagcaacttcaaaaaggttcggttttctgaggccgcaaccttgtgcataccacacctggtttgtgctttgaaggatggaaatgaggctgcccaagagagcgtgcttgacaccctttgcttgcttaaagaatcttggccgcaaatgaatgaagacatcgctaaagcccagtccctgatttcagctgaagccatacctgtactacaaatgcttatgaagacatgtcctcccagttttcacgagagagccgatagtttgcttcattgcttgcctggttgcttgacagtgaccatcattcgtgggaataatctgaaacagacaatggggggtacaaatgcattttgttgcctgcaaataggaaatggtcctccaaggcaaactaaggtggtaaaccacagcatgtgcccagcttggaacgagggtttcacttggttatttgacgtggcccctaaagggcagaagctctacatcatatgcaaaagcaaaaatacgtttggaaagtcaacccttggaagagtgaccatccagatcgacaaggttgtcaccgagggtgtatacagcgggttcttcagcctcagccacgacggaggtaaggacggctcaaggaccctagagatagagatcgtatggtccaataggccatccaacgactgtatgtagcgtacggatgatttacctgacgccaattcttgtactcttggcttccatgtaaatcagccccccccccataatcatccgaattcatttatttgtacgtagaaagttaagacacttagataactcgcgccatcattcaattattgaggtcatttccgggattgtggccctgctgctgtaaactgattttgcacccgggtatttttttttgtacaggtgaatttatttcatgtagttatagcttagtgtagattggtggtgagtacggacaagccctagtgacagtaacattgggtgtgatgtgtggcgtgatatttgctcccgtgggtgtgtttccggcacttgtagcctcaggatacacatggctgagcttggcactgttctatttgtcaggcatgtttgtttacctgtttggttctggctacgcaaaactttttttttacatccaccttgccatagccgtaccagcggtacgaggaatctgaggtacctttttcttccatctcggcagaagtttgatgtttggcgaaactgtctcaggttacatggtaataacaatactatttgcaaaaccaaacacgccacatacc

SEQ ID NO: 25942 - DNA, 7080 bp, Zea Mays
agacgaaccgccgccgtcgcccaccaccgtccacccgccaacggaattataaaataattcaaggtgtaaagctggtatggatctaagcatggcaagtttgaacttgtcagaacctcgagactctagagaatcaacttcgcccgcaccatcaacatcatcttctatatcaagagaaaaaggtgacctggcagaagttgatgatcctgaaagtgcaatgtccactgttgctagattgttggaagacctccatgctagcatggtgtctccatcggggaaggaagctacaaccagaaggttacttgaactggctagagcgaaaaaggaggcaaggattttgataggtagccattctcaggcaatgccactactcatatctacccttagagttgggtcatctgcagcaaaagtaaatgctgcagctctacttagtgcactctgtaaggaagaggacttgcgtgtgagggtcctcttaggaggctgtataccacccttaatctctcttttgaagtctgagtctgctgaagcgaagaaggctgctgctgaagctatttatgaagtatcttctggtgggcttttggatgatcacataggcaggaaaatatttgtgactgaaggtgtggtgccaactctgtgggacttgcttaatcctaggtctcaccaagatagagtagttgagggctttgtgactggggctttaaggaatctttgtggggacaaagatggttattggaaggccacacttgaggctggaggtgttgaaattattactggtcttctttcatccaagaatactgcttcacagtcgaatgctgcttctctgttggcacggtttatctctgcttctggtgatagcattcccaaagttatagatgctggggctgttaaggctctccttcaccttctaaatcgagataatatcatttctgttcgtgaaagtgcggctgatgctttggaggccctgtcttccaagtccagtattgcaaagaaagctgtggtggatgcaggaggccttcctattctgattggagctgttgtagcgccctcaaaggaatgcatgcagggtgggacatgtcattctctgcaaagccatgctgtccgtgctttatcaaatatttgtgggggaacaacttctctgttgctttaccttggtgagctctgccaagcaccccggtcacctgttcccctcgctgatattcttggagcgcttgcttattccttgatggtttttgacggctctgatgataaatcatttgaccctgttgagattgaaattactttggttgcgctcctaaaatctcatgacagcaagcttgatcgtattcttgaggctttagcaagtctatatgggaatgattgtttctccgacaggcttgatcactcttattctaagaaggttcttgttgggctgattaccatagctcctgctgatgttcaagagcttcttgttcgtgccttaactagcttgtgttgcgatggtgttggaatatgggaggctcttggaaagagagaaggggttcagttgctaatatcattacttgggctttccagtgagcagcagcaggaatatgcagtttccttattggctatcttgagtgatgaagtagatgacagcaaatgggcaataacagctgctggaggtatccctccacttgtccagctactagaaacaggatctcaaaaagcaaaggaggatgcagcttacatcatgtggaacatgtgctctgacagtgatgatatcagggcatgtattgagagtgctggggctgttatggcgctaatttggcttctaaagagtggtagccctggtggacaggaggcatcagttaaagcactgaagaagttgatacgatcagcagattctgctatgatcaatcagttactagcattactgctcagtgactcattgagctcaaaggcccatgtcattactgttctcgggcatgtccttgtgctggcgcctcagagagctctaatccagagtggagctccagctaataaagttcttaggtcactggttcttgttcttgaatcatcaaatgaagaaacacaggagattgctgcaactgtgttggctgatattttcactatgcgtcaggatatttgtgatgtaatggcaattgatgaaattgtccagccatgcatgaagcttttgacaagtggaaaccaagtgattgccacacaatctgccagagctttaggagcactgtcatgttcagctagttccatgtcaaaaaacaaaatgtcttgcttaactgaaggtgatgtgcgacctcttatagagatggcaaagacatcatctattgatgttgctgaaacagcatttgctgcattagcaaatctcctatcagatgcacagattgctaaagaagcattagatgacaatattgtcttggctttgactagagtgctcaaggatgggagtttagaaggcaagattagtgcttcgcggtcacttcgtcagttggtcaaccagtttcccctcagtgaagttctcccagattacttgcagtgctgttttataattcatgcactgttggtatgtctatctggcatcagtttagaaaatgttacaagtttggaaccccttgatgttcttacattgatggctacaacaaaggagggttcgcattatagcccccctctatgcactggttttcttgaagttccagaaagcttagaacctttagttcgctgtattagtattgggcttccacctgttcaagataagtccattcaaatcctagcaagtctctgtcagggtcgaccttcgctacttggtgaatatttaaacagaagtcaaggatgcatcacttctcttgctactagagttatagagtcaaatgacatggaaataaggatcagcagtgcagtcatcctcatatctgcaatgagggacagcagagaacggtccatcgatgttctggaagcatcaaaagttctgaagaatctgatatctgcactcattgatatgctgaagcaacattcctctttaacatccctagacattgaaatctggaaaccttccacagaaaaaagttcgcttaattatgagcaggatgttttgagtgtgcctgaacttggaaaggtttctgaagaaactgttgcactatggttgctctcactgatttgttcttatcatggaaggagtaaatatactgttatggagctcaatggcgttgacacagtatctgatagacttgctagctatactgctaaccgacagtatgaagactcagaaaatatatggacttgtgcccttctgttggctactctgtttcaggattcagtggttgttcagtcttctgaaataacacgaaccataccttccttagcatccttgctaaaatctgatgatattatcaataaatactttgctgctcaggcactggctagccttgtttccactgggagcagaggtatacagcttgctattgcgaattctggtgcagttttgggtgctgtagcattgatcggacaggtagaatctgatatgccaaaccttgttacaatggctgaagaattcaagttgtcagacaatccatgtcaaataatgttgagaagcctttttgagcttgaagatgtctgcactggtgcttccgcccggaggtccatacccttgctagtggatctacttaaaccaatgccagataggccaggtgcacctctgattgctttgcaccttctgactcaactagcggaaggtagtgagtcaaataaaattgctatggcagaggctggagctttggatgccttgactaagtatctatctttaagccctcaagactcaactgaaactactataaccaatctgttggggattttatacactaatcctgatcttctttaccatgaatcatcacgtagcacttcaaatcagctggtagctgtcttgcgtttgggttcgagaagttctaggcttagtgcagtaaggacgttgcagaaactctttgattcagagaatataagggacaccgaagtggcccggcaagctattcaaccactacttgacatgcttgagtcaggaactgaaatagaacagcaggcagcacttggtgcgcttatcaagctttctgctgggaacatcgctaaggattctgctatgtttgatgtagaaggcaacacacttgaaaatctttacaaagttttatccttcagttcgtcattggagctgaagaaggatgctgctcaactctgctatattttatttgagaactcaactgtacgtgcatcaccaattgcaacagaatgtcttcaacccctgatatcactgatgacatcaggatctagtttggctattgaaccagcagtttgtgctctaaacagattactggatgaggactacaatgcagaaattgctgcaactagcgaagttattgatcttcttgtcagttttgttcctggtacaaactatcagttgtctgaagcatgtatcggtgctctcataaagttgggcaaggatcgtccaaactgcaagcttgacatggttaaagctggtatcattgagcatgcacttgatatgattcttgatgttcctgtatctgttagttcatccattgctgaattgcttcgcattttgacaaacaacagtggcattgctaaaagttctgctgctgcaaaaatggtggagccacttttcttgcttttacgtcgccctgatgttactatgtgggatcagcacagtgccttgcaagcactcgtaaatattttggagaaacctcagagtctagcagcattgaagttgactcccagtcaaataattgagcctttaatatcatttcttgagtctccctctcaagcaattcagcaacttggcactgaggtgctctcacatcttctagaacaggaacattttcaacaggatatcactacaaaaaatgcagttgttcctctggtgcagcttgctggtattggaatcttgagcttacaacaaactgcagttaaagcacttgaaaacatctcacagagttggcccaaggcagtagccgatgcaggtggaatttttgaactttcaaaggtaattgtccaggatgatcctcagccaagtcaagcattatgggaatctgcagcacttgtgttatgcaatgttctgcgttataattctgacaactatgtcaaagtctcaatggctgtacttgtgagattgctgaactccaccatggagagtaccgtcacgatagctctcagtgctctacttgttcaagagaaaagtagctcacgctgtgctgtggccatggctgaggctggggcagtacgggcactcttggagctcctgaagagccatcgatgtgaggaatctgcagcaagattgcttgaagccctgataaacaattcaagggtccgtgaaacaaaagttgccaagtatgctattgctccactggcacagtacctgttagatcctcaatctaagaaccagtcagcaaagtttctggttactcttgcactaggtgacattttccagcatgaagctcttgcaagggcaagtgactctgtgtctgcctgccgtgctcttgtaagcctacttgaggaccagcctacggatgacatgacaacagttgctatttgtgcactgcaaagcttagtgatgcacagcaggacaaataggcgtgctgttgctgaagctgggggcattttggttgtgcaagaattgcttctttcaccaaatgtggatatttcaggacaggctgcccttctaatgaagtacctattttcaaatcatacgctgcaagaatacgtgtcgaatgagcttattcgatctcttactgctgccttagagagagagctgctctctacgtcaactatcaatgaagttattctgaagaccatatatgtgatattcagcaacttcaaaaaggttcggttttctgaggccgcaaccttgtgcataccacacctggtttgtgctttgaaggatggaaatgaggctgcccaagagagcgtgcttgacaccctttgcttgcttaaagaatcttggccgcaaatgaatgaagacatcgctaaagcccagtccctgatttcagctgaagccatacctgtactacaaatgcttatgaagacatgtcctcccagttttcacgagagagccgatagtttgcttcattgcttgcctggttgcttgacagtgaccatcattcgtgggaataatctgaaacagacaatggggggtacaaatgcattttgttgcctgcaaataggaaatggtcctccaaggcaaactaaggtggtaaaccacagcatgtgcccagcttggaacgagggtttcacttggttatttgacgtggcccctaaagggcagaagctctacatcatatgcaaaagcaaaaatacgtttggaaagtcaacccttggaagagtgaccatccagatcgacaaggttgtcaccgagggtgtatacagcgggttcttcagcctcagccacgacggaggtaaggacggctcaaggaccctagagatagagatcgtatggtccaataggccatccaacgactgtatgtagcgtacggatgatttacctgacgccaattcttgtactcttggcttccatgtaaatcagccccccccccataatcatccgaattcatttatttgtacgtagaaagttaagacacttagataactcgcgccatcattcaattattgaggtcatttccgggattgtggccctgctgctgtaaactgattttgcacccgggtatttttttttgtacaggtgaatttatttcatgtagttatagcttagtgtagattggtggtgagtacggacaagccctagtgacagtaacattgggtgtgatgtgtggcgtgatatttgctcccgtgggtgtgtttccggcacttgtagcctcaggatacacatggctgagcttggcactgttctatttgtcaggcatgtttgtttacctgtttggttctggctacgcaaaactttttttttacatccaccttgccatagccgtaccagcggtacgaggaatctgaggtacctttttcttccatctcggcagaagtttgatgtttggcgaaactgtctcaggttacatggtaataacaatactatttgcaaaaccaaacacgccacatacc

SEQ ID NO: 25943 - DNA, 7104 bp, Zea Mays
tctcactctccctaacggacgcaccagcacacacacaccgccagcgcagtgggcgagcgagtgcagcgacagtgagacgaaccgccgccgtcgcccaccaccgtccacccgccaacggaattataaaataattcaaggtgtaaagctggtatggatctaagcatggcaagtttgaacttgtcagaacctcgagactctagagaatcaacttcgcccgcaccatcaacatcatcttctatatcaagagaaaaaggtgacctggcagaagttgatgatcctgaaagtgcaatgtccactgttgctagattgttggaagacctccatgctagcatggtgtctccatcggggaaggaagctacaaccagaaggttacttgaactggctagagcgaaaaaggaggcaaggattttgataggtagccattctcaggcaatgccactactcatatctacccttagagttgggtcatctgcagcaaaagtaaatgctgcagctctacttagtgcactctgtaaggaagaggacttgcgtgtgagggtcctcttaggaggctgtataccacccttaatctctcttttgaagtctgagtctgctgaagcgaagaaggctgctgctgaagctatttatgaagtatcttctggtgggcttttggatgatcacataggcaggaaaatatttgtgactgaaggtgtggtgccaactctgtgggacttgcttaatcctaggtctcaccaagatagagtagttgagggctttgtgactggggctttaaggaatctttgtggggacaaagatggttattggaaggccacacttgaggctggaggtgttgaaattattactggtcttctttcatccaagaatactgcttcacagtcgaatgctgcttctctgttggcacggtttatctctgcttctggtgatagcattcccaaagttatagatgctggggctgttaaggctctccttcaccttctaaatcgagataatatcatttctgttcgtgaaagtgcggctgatgctttggaggccctgtcttccaagtccagtattgcaaagaaagctgtggtggatgcaggaggccttcctattctgattggagctgttgtagcgccctcaaaggaatgcatgcagggtgggacatgtcattctctgcaaagccatgctgtccgtgctttatcaaatatttgtgggggaacaacttctctgttgctttaccttggtgagctctgccaagcaccccggtcacctgttcccctcgctgatattcttggagcgcttgcttattccttgatggtttttgacggctctgatgataaatcatttgaccctgttgagattgaaattactttggttgcgctcctaaaatctcatgacagcaagcttgatcgtattcttgaggctttagcaagtctatatgggaatgattgtttctccgacaggcttgatcactcttattctaagaaggttcttgttgggctgattaccatagctcctgctgatgttcaagagcttcttgttcgtgccttaactagcttgtgttgcgatggtgttggaatatgggaggctcttggaaagagagaaggggttcagttgctaatatcattacttgggctttccagtgagcagcagcaggaatatgcagtttccttattggctatcttgagtgatgaagtagatgacagcaaatgggcaataacagctgctggaggtatccctccacttgtccagctactagaaacaggatctcaaaaagcaaaggaggatgcagcttacatcatgtggaacatgtgctctgacagtgatgatatcagggcatgtattgagagtgctggggctgttatggcgctaatttggcttctaaagagtggtagccctggtggacaggaggcatcagttaaagcactgaagaagttgatacgatcagcagattctgctatgatcaatcagttactagcattactgctcagtgactcattgagctcaaaggcccatgtcattactgttctcgggcatgtccttgtgctggcgcctcagagagctctaatccagagtggagctccagctaataaagttcttaggtcactggttcttgttcttgaatcatcaaatgaagaaacacaggagattgctgcaactgtgttggctgatattttcactatgcgtcaggatatttgtgatgtaatggcaattgatgaaattgtccagccatgcatgaagcttttgacaagtggaaaccaagtgattgccacacaatctgccagagctttaggagcactgtcatgttcagctagttccatgtcaaaaaacaaaatgtcttgcttaactgaaggtgatgtgcgacctcttatagagatggcaaagacatcatctattgatgttgctgaaacagcatttgctgcattagcaaatctcctatcagatgcacagattgctaaagaagcattagatgacaatattgtcttggctttgactagagtgctcaaggatgggagtttagaaggcaagattagtgcttcgcggtcacttcgtcagttggtcaaccagtttcccctcagtgaagttctcccagattacttgcagtgctgttttataattcatgcactgttggtatgtctatctggcatcagtttagaaaatgttacaagtttggaaccccttgatgttcttacattgatggctacaacaaaggagggttcgcattatagcccccctctatgcactggttttcttgaagttccagaaagcttagaacctttagttcgctgtattagtattgggcttccacctgttcaagataagtccattcaaatcctagcaagtctctgtcagggtcgaccttcgctacttggtgaatatttaaacagaagtcaaggatgcatcacttctcttgctactagagttatagagtcaaatgacatggaaataaggatcagcagtgcagtcatcctcatatctgcaatgagggacagcagagaacggtccatcgatgttctggaagcatcaaaagttctgaagaatctgatatctgcactcattgatatgctgaagcaacattcctctttaacatccctagacattgaaatctggaaaccttccacagaaaaaagttcgcttaattatgagcaggatgttttgagtgtgcctgaacttggaaaggtttctgaagaaactgttgcactatggttgctctcactgatttgttcttatcatggaaggagtaaatatactgttatggagctcaatggcgttgacacagtatctgatagacttgctagctatactgctaaccgacaggaacagtatgaagactcagaaaatatatggacttgtgcccttctgttggctactctgtttcaggattcagtggttgttcagtcttctgaaataacacgaaccataccttccttagcatccttgctaaaatctgatgatattatcaataaatactttgctgctcaggcactggctagccttgtttccactgggagcagaggtatacagcttgctattgcgaattctggtgcagttttgggtgctgtagcattgatcggacaggtagaatctgatatgccaaaccttgttacaatggctgaagaattcaagttgtcagacaatccatgtcaaataatgttgagaagcctttttgagcttgaagatgtctgcactggtgcttccgcccggaggtccatacccttgctagtggatctacttaaaccaatgccagataggccaggtgcacctctgattgctttgcaccttctgactcaactagcggaaggtagtgagtcaaataaaattgctatggcagaggctggagctttggatgccttgactaagtatctatctttaagccctcaagactcaactgaaactactataaccaatctgttggggattttatacactaatcctgatcttctttaccatgaatcatcacgtagcacttcaaatcagctggtagctgtcttgcgtttgggttcgagaagttctaggcttagtgcagtaaggacgttgcagaaactctttgattcagagaatataagggacaccgaagtggcccggcaagctattcaaccactacttgacatgcttgagtcaggaactgaaatagaacagcaggcagcacttggtgcgcttatcaagctttctgctgggaacatcgctaaggattctgctatgtttgatgtagaaggcaacacacttgaaaatctttacaaagttttatccttcagttcgtcattggagctgaagaaggatgctgctcaactctgctatattttatttgagaactcaactgtacgtgcatcaccaattgcaacagaatgtcttcaacccctgatatcactgatgacatcaggatctagtttggctattgaaccagcagtttgtgctctaaacagattactggatgaggactacaatgcagaaattgctgcaactagcgaagttattgatcttcttgtcagttttgttcctggtacaaactatcagttgtctgaagcatgtatcggtgctctcataaagttgggcaaggatcgtccaaactgcaagcttgacatggttaaagctggtatcattgagcatgcacttgatatgattcttgatgttcctgtatctgttagttcatccattgctgaattgcttcgcattttgacaaacaacagtggcattgctaaaagttctgctgctgcaaaaatggtggagccacttttcttgcttttacgtcgccctgatgttactatgtgggatcagcacagtgccttgcaagcactcgtaaatattttggagaaacctcagagtctagcagcattgaagttgactcccagtcaaataattgagcctttaatatcatttcttgagtctccctctcaagcaattcagcaacttggcactgaggtgctctcacatcttctagaacaggaacattttcaacaggatatcactacaaaaaatgcagttgttcctctggtgcagcttgctggtattggaatcttgagcttacaacaaactgcagttaaagcacttgaaaacatctcacagagttggcccaaggcagtagccgatgcaggtggaatttttgaactttcaaaggtaattgtccaggatgatcctcagccaagtcaagcattatgggaatctgcagcacttgtgttatgcaatgttctgcgttataattctgacaactatgtcaaagtctcaatggctgtacttgtgagattgctgaactccaccatggagagtaccgtcacgatagctctcagtgctctacttgttcaagagaaaagtagctcacgctgtgctgtggccatggctgaggctggggcagtacgggcactcttggagctcctgaagagccatcgatgtgaggaatctgcagcaagattgcttgaagccctgataaacaattcaagggtccgtgaaacaaaagttgccaagtatgctattgctccactggcacagtacctgttagatcctcaatctaagaaccagtcagcaaagtttctggttactcttgcactaggtgacattttccagcatgaagctcttgcaagggcaagtgactctgtgtctgcctgccgtgctcttgtaagcctacttgaggaccagcctacggatgacatgacaacagttgctatttgtgcactgcaaagcttagtgatgcacagcaggacaaataggcgtgctgttgctgaagctgggggcattttggttgtgcaagaattgcttctttcaccaaatgtggatatttcaggacaggctgcccttctaatgaagtacctattttcaaatcatacgctgcaagaatacgtgtcgaatgagcttattcgatctcttactgaccatatatgtgatattcagcaacttcaaaaaggttcggttttctgaggccgcaaccttgtgcataccacacctggtttgtgctttgaaggatggaaatgaggctgcccaagagagcgtgcttgacaccctttgcttgcttaaagaatcttggccgcaaatgaatgaagacatcgctaaagcccagtccctgatttcagctgaagccatacctgtactacaaatgcttatgaagacatgtcctcccagttttcacgagagagccgatagtttgcttcattgcttgcctggttgcttgacagtgaccatcattcgtgggaataatctgaaacagacaatggggggtacaaatgcattttgttgcctgcaaataggaaatggtcctccaaggcaaactaaggtggtaaaccacagcatgtgcccagcttggaacgagggtttcacttggttatttgacgtggcccctaaagggcagaagctctacatcatatgcaaaagcaaaaatacgtttggaaagtcaacccttggaagagtgaccatccagatcgacaaggttgtcaccgagggtgtatacagcgggttcttcagcctcagccacgacggaggtaaggacggctcaaggaccctagagatagagatcgtatggtccaataggccatccaacgactgtatgtagcgtacggatgatttacctgacgccaattcttgtactcttggcttccatgtaaatcagccccccccccataatcatccgaattcatttatttgtacgtagaaagttaagacacttagataactcgcgccatcattcaattattgaggtcatttccgggattgtggccctgctgctgtaaactgattttgcacccgggtatttttttttgtacaggtgaatttatttcatgtagttatagcttagtgtagattggtggtgagtacggacaagccctagtgacagtaacattgggtgtgatgtgtggcgtgatatttgctcccgtgggtgtgtttccggcacttgtagcctcaggatacacatggctgagcttggcactgttctatttgtcaggcatgtttgtttacctgtttggttctggctacgcaaaactttttttttacatccaccttgccatagccgtaccagcggtacgaggaatctgaggtacctttttcttccatctcggcagaagtttgatgtttggcgaaactgtctcaggttacatggtaataacaatactatttgcaaaaccaaacacgccacatacc

SEQ ID NO: 25944 - DNA, 7260 bp, Zea Mays
ctctcactctccctaacggacgcaccagcacacacacaccgccagcgcagtgggcgagcgagtgcagcgacagtgagacgaaccgccgccgtcgcccaccaccgtccacccgccaacgggtaagacttgccttggttattccttccacatacgccactcagagtcaagagtccatgatggatgcttctgctgctgcattgtagcctcatgaatttgggaattataaaataattcaaggtgtaaagctggtatggatctaagcatggcaagtttgaacttgtcagaacctcgagactctagagaatcaacttcgcccgcaccatcaacatcatcttctatatcaagagaaaaaggtgacctggcagaagttgatgatcctgaaagtgcaatgtccactgttgctagattgttggaagacctccatgctagcatggtgtctccatcggggaaggaagctacaaccagaaggttacttgaactggctagagcgaaaaaggaggcaaggattttgataggtagccattctcaggcaatgccactactcatatctacccttagagttgggtcatctgcagcaaaagtaaatgctgcagctctacttagtgcactctgtaaggaagaggacttgcgtgtgagggtcctcttaggaggctgtataccacccttaatctctcttttgaagtctgagtctgctgaagcgaagaaggctgctgctgaagctatttatgaagtatcttctggtgggcttttggatgatcacataggcaggaaaatatttgtgactgaaggtgtggtgccaactctgtgggacttgcttaatcctaggtctcaccaagatagagtagttgagggctttgtgactggggctttaaggaatctttgtggggacaaagatggttattggaaggccacacttgaggctggaggtgttgaaattattactggtcttctttcatccaagaatactgcttcacagtcgaatgctgcttctctgttggcacggtttatctctgcttctggtgatagcattcccaaagttatagatgctggggctgttaaggctctccttcaccttctaaatcgagataatatcatttctgttcgtgaaagtgcggctgatgctttggaggccctgtcttccaagtccagtattgcaaagaaagctgtggtggatgcaggaggccttcctattctgattggagctgttgtagcgccctcaaaggaatgcatgcagggtgggacatgtcattctctgcaaagccatgctgtccgtgctttatcaaatatttgtgggggaacaacttctctgttgctttaccttggtgagctctgccaagcaccccggtcacctgttcccctcgctgatattcttggagcgcttgcttattccttgatggtttttgacggctctgatgataaatcatttgaccctgttgagattgaaattactttggttgcgctcctaaaatctcatgacagcaagcttgatcgtattcttgaggctttagcaagtctatatgggaatgattgtttctccgacaggcttgatcactcttattctaagaaggttcttgttgggctgattaccatagctcctgctgatgttcaagagcttcttgttcgtgccttaactagcttgtgttgcgatggtgttggaatatgggaggctcttggaaagagagaaggggttcagttgctaatatcattacttgggctttccagtgagcagcagcaggaatatgcagtttccttattggctatcttgagtgatgaagtagatgacagcaaatgggcaataacagctgctggaggtatccctccacttgtccagctactagaaacaggatctcaaaaagcaaaggaggatgcagcttacatcatgtggaacatgtgctctgacagtgatgatatcagggcatgtattgagagtgctggggctgttatggcgctaatttggcttctaaagagtggtagccctggtggacaggaggcatcagttaaagcactgaagaagttgatacgatcagcagattctgctatgatcaatcagttactagcattactgctcagtgactcattgagctcaaaggcccatgtcattactgttctcgggcatgtccttgtgctggcgcctcagagagctctaatccagagtggagctccagctaataaagttcttaggtcactggttcttgttcttgaatcatcaaatgaagaaacacaggagattgctgcaactgtgttggctgatattttcactatgcgtcaggatatttgtgatgtaatggcaattgatgaaattgtccagccatgcatgaagcttttgacaagtggaaaccaagtgattgccacacaatctgccagagctttaggagcactgtcatgttcagctagttccatgtcaaaaaacaaaatgtcttgcttaactgaaggtgatgtgcgacctcttatagagatggcaaagacatcatctattgatgttgctgaaacagcatttgctgcattagcaaatctcctatcagatgcacagattgctaaagaagcattagatgacaatattgtcttggctttgactagagtgctcaaggatgggagtttagaaggcaagattagtgcttcgcggtcacttcgtcagttggtcaaccagtttcccctcagtgaagttctcccagattacttgcagtgctgttttataattcatgcactgttggtatgtctatctggcatcagtttagaaaatgttacaagtttggaaccccttgatgttcttacattgatggctacaacaaaggagggttcgcattatagcccccctctatgcactggttttcttgaagttccagaaagcttagaacctttagttcgctgtattagtattgggcttccacctgttcaagataagtccattcaaatcctagcaagtctctgtcagggtcgaccttcgctacttggtgaatatttaaacagaagtcaaggatgcatcacttctcttgctactagagttatagagtcaaatgacatggaaataaggatcagcagtgcagtcatcctcatatctgcaatgagggacagcagagaacggtccatcgatgttctggaagcatcaaaagttctgaagaatctgatatctgcactcattgatatgctgaagcaacattcctctttaacatccctagacattgaaatctggaaaccttccacagaaaaaagttcgcttaattatgagcaggatgttttgagtgtgcctgaacttggaaaggtttctgaagaaactgttgcactatggttgctctcactgatttgttcttatcatggaaggagtaaatatactgttatggagctcaatggcgttgacacagtatctgatagacttgctagctatactgctaaccgacaggaacagtatgaagactcagaaaatatatggacttgtgcccttctgttggctactctgtttcaggattcagtggttgttcagtcttctgaaataacacgaaccataccttccttagcatccttgctaaaatctgatgatattatcaataaatactttgctgctcaggcactggctagccttgtttccactgggagcagaggtatacagcttgctattgcgaattctggtgcagttttgggtgctgtagcattgatcggacaggtagaatctgatatgccaaaccttgttacaatggctgaagaattcaagttgtcagacaatccatgtcaaataatgttgagaagcctttttgagcttgaagatgtctgcactggtgcttccgcccggaggtccatacccttgctagtggatctacttaaaccaatgccagataggccaggtgcacctctgattgctttgcaccttctgactcaactagcggaaggtagtgagtcaaataaaattgctatggcagaggctggagctttggatgccttgactaagtatctatctttaagccctcaagactcaactgaaactactataaccaatctgttggggattttatacactaatcctgatcttctttaccatgaatcatcacgtagcacttcaaatcagctggtagctgtcttgcgtttgggttcgagaagttctaggcttagtgcagtaaggacgttgcagaaactctttgattcagagaatataagggacaccgaagtggcccggcaagctattcaaccactacttgacatgcttgagtcaggaactgaaatagaacagcaggcagcacttggtgcgcttatcaagctttctgctgggaacatcgctaaggattctgctatgtttgatgtagaaggcaacacacttgaaaatctttacaaagttttatccttcagttcgtcattggagctgaagaaggatgctgctcaactctgctatattttatttgagaactcaactgtacgtgcatcaccaattgcaacagaatgtcttcaacccctgatatcactgatgacatcaggatctagtttggctattgaaccagcagtttgtgctctaaacagattactggatgaggactacaatgcagaaattgctgcaactagcgaagttattgatcttcttgtcagttttgttcctggtacaaactatcagttgtctgaagcatgtatcggtgctctcataaagttgggcaaggatcgtccaaactgcaagcttgacatggttaaagctggtatcattgagcatgcacttgatatgattcttgatgttcctgtatctgttagttcatccattgctgaattgcttcgcattttgacaaacaacagtggcattgctaaaagttctgctgctgcaaaaatggtggagccacttttcttgcttttacgtcgccctgatgttactatgtgggatcagcacagtgccttgcaagcactcgtaaatattttggagaaacctcagagtctagcagcattgaagttgactcccagtcaaataattgagcctttaatatcatttcttgagtctccctctcaagcaattcagcaacttggcactgaggtgctctcacatcttctagaacaggaacattttcaacaggatatcactacaaaaaatgcagttgttcctctggtgcagcttgctggtattggaatcttgagcttacaacaaactgcagttaaagcacttgaaaacatctcacagagttggcccaaggcagtagccgatgcaggtggaatttttgaactttcaaaggtaattgtccaggatgatcctcagccaagtcaagcattatgggaatctgcagcacttgtgttatgcaatgttctgcgttataattctgacaactatgtcaaagtctcaatggctgtacttgtgagattgctgaactccaccatggagagtaccgtcacgatagctctcagtgctctacttgttcaagagaaaagtagctcacgctgtgctgtggccatggctgaggctggggcagtacgggcactcttggagctcctgaagagccatcgatgtgaggaatctgcagcaagattgcttgaagccctgataaacaattcaagggtccgtgaaacaaaagttgccaagtatgctattgctccactggcacagtacctgttagatcctcaatctaagaaccagtcagcaaagtttctggttactcttgcactaggtgacattttccagcatgaagctcttgcaagggcaagtgactctgtgtctgcctgccgtgctcttgtaagcctacttgaggaccagcctacggatgacatgacaacagttgctatttgtgcactgcaaagcttagtgatgcacagcaggacaaataggcgtgctgttgctgaagctgggggcattttggttgtgcaagaattgcttctttcaccaaatgtggatatttcaggacaggctgcccttctaatgaagtacctattttcaaatcatacgctgcaagaatacgtgtcgaatgagcttattcgatctcttactgctgccttagagagagagctgctctctacgtcaactatcaatgaagttattctgaagaccatatatgtgatattcagcaacttcaaaaaggttcggttttctgaggccgcaaccttgtgcataccacacctggtttgtgctttgaaggatggaaatgaggctgcccaagagagcgtgcttgacaccctttgcttgcttaaagaatcttggccgcaaatgaatgaagacatcgctaaagcccagtccctgatttcagctgaagccatacctgtactacaaatgcttatgaagacatgtcctcccagttttcacgagagagccgatagtttgcttcattgcttgcctggttgcttgacagtgaccatcattcgtgggaataatctgaaacagacaatggggggtacaaatgcattttgttgcctgcaaataggaaatggtcctccaaggcaaactaaggtggtaaaccacagcatgtgcccagcttggaacgagggtttcacttggttatttgacgtggcccctaaagggcagaagctctacatcatatgcaaaagcaaaaatacgtttggaaagtcaacccttggaagagtgaccatccagatcgacaaggttgtcaccgagggtgtatacagcgggttcttcagcctcagccacgacggaggtaaggacggctcaaggaccctagagatagagatcgtatggtccaataggccatccaacgactgtatgtagcgtacggatgatttacctgacgccaattcttgtactcttggcttccatgtaaatcagccccccccccataatcatccgaattcatttatttgtacgtagaaagttaagacacttagataactcgcgccatcattcaattattgaggtcatttccgggattgtggccctgctgctgtaaactgattttgcacccgggtatttttttttgtacaggtgaatttatttcatgtagttatagcttagtgtagattggtggtgagtacggacaagccctagtgacagtaacattgggtgtgatgtgtggcgtgatatttgctcccgtgggtgtgtttccggcacttgtagcctcaggatacacatggctgagcttggcactgttctatttgtcaggcatgtttgtttacctgtttggttctggctacgcaaaactttttttttacatccaccttgccatagccgtaccagcggtacgaggaatctgaggtacctttttcttccatctcggcagaagtttgatgtttggcgaaactgtctcaggttacatggtaataacaatactatttgcaaaaccaaacacgccacatacc

SEQ ID NO: 25945 - DNA, 7155 bp, Zea Mays
ctcacatctctcactctccctaacggacgcaccagcacacacacaccgccagcgcagtgggcgagcgagtgcagcgacagtgagacgaaccgccgccgtcgcccaccaccgtccacccgccaacggaattataaaataattcaaggtgtaaagctggtatggatctaagcatggcaagtttgaacttgtcagaacctcgagactctagagaatcaacttcgcccgcaccatcaacatcatcttctatatcaagagaaaaaggtgacctggcagaagttgatgatcctgaaagtgcaatgtccactgttgctagattgttggaagacctccatgctagcatggtgtctccatcggggaaggaagctacaaccagaaggttacttgaactggctagagcgaaaaaggaggcaaggattttgataggtagccattctcaggcaatgccactactcatatctacccttagagttgggtcatctgcagcaaaagtaaatgctgcagctctacttagtgcactctgtaaggaagaggacttgcgtgtgagggtcctcttaggaggctgtataccacccttaatctctcttttgaagtctgagtctgctgaagcgaagaaggctgctgctgaagctatttatgaagtatcttctggtgggcttttggatgatcacataggcaggaaaatatttgtgactgaaggtgtggtgccaactctgtgggacttgcttaatcctaggtctcaccaagatagagtagttgagggctttgtgactggggctttaaggaatctttgtggggacaaagatggttattggaaggccacacttgaggctggaggtgttgaaattattactggtcttctttcatccaagaatactgcttcacagtcgaatgctgcttctctgttggcacggtttatctctgcttctggtgatagcattcccaaagttatagatgctggggctgttaaggctctccttcaccttctaaatcgagataatatcatttctgttcgtgaaagtgcggctgatgctttggaggccctgtcttccaagtccagtattgcaaagaaagctgtggtggatgcaggaggccttcctattctgattggagctgttgtagcgccctcaaaggaatgcatgcagggtgggacatgtcattctctgcaaagccatgctgtccgtgctttatcaaatatttgtgggggaacaacttctctgttgctttaccttggtgagctctgccaagcaccccggtcacctgttcccctcgctgatattcttggagcgcttgcttattccttgatggtttttgacggctctgatgataaatcatttgaccctgttgagattgaaattactttggttgcgctcctaaaatctcatgacagcaagcttgatcgtattcttgaggctttagcaagtctatatgggaatgattgtttctccgacaggcttgatcactcttattctaagaaggttcttgttgggctgattaccatagctcctgctgatgttcaagagcttcttgttcgtgccttaactagcttgtgttgcgatggtgttggaatatgggaggctcttggaaagagagaaggggttcagttgctaatatcattacttgggctttccagtgagcagcagcaggaatatgcagtttccttattggctatcttgagtgatgaagtagatgacagcaaatgggcaataacagctgctggaggtatccctccacttgtccagctactagaaacaggatctcaaaaagcaaaggaggatgcagcttacatcatgtggaacatgtgctctgacagtgatgatatcagggcatgtattgagagtgctggggctgttatggcgctaatttggcttctaaagagtggtagccctggtggacaggaggcatcagttaaagcactgaagaagttgatacgatcagcagattctgctatgatcaatcagttactagcattactgctcagtgactcattgagctcaaaggcccatgtcattactgttctcgggcatgtccttgtgctggcgcctcagagagctctaatccagagtggagctccagctaataaagttcttaggtcactggttcttgttcttgaatcatcaaatgaagaaacacaggagattgctgcaactgtgttggctgatattttcactatgcgtcaggatatttgtgatgtaatggcaattgatgaaattgtccagccatgcatgaagcttttgacaagtggaaaccaagtgattgccacacaatctgccagagctttaggagcactgtcatgttcagctagttccatgtcaaaaaacaaaatgtcttgcttaactgaaggtgatgtgcgacctcttatagagatggcaaagacatcatctattgatgttgctgaaacagcatttgctgcattagcaaatctcctatcagatgcacagattgctaaagaagcattagatgacaatattgtcttggctttgactagagtgctcaaggatgggagtttagaaggcaagattagtgcttcgcggtcacttcgtcagttggtcaaccagtttcccctcagtgaagttctcccagattacttgcagtgctgttttataattcatgcactgttggtatgtctatctggcatcagtttagaaaatgttacaagtttggaaccccttgatgttcttacattgatggctacaacaaaggagggttcgcattatagcccccctctatgcactggttttcttgaagttccagaaagcttagaacctttagttcgctgtattagtattgggcttccacctgttcaagataagtccattcaaatcctagcaagtctctgtcagggtcgaccttcgctacttggtgaatatttaaacagaagtcaaggatgcatcacttctcttgctactagagttatagagtcaaatgacatggaaataaggatcagcagtgcagtcatcctcatatctgcaatgagggacagcagagaacggtccatcgatgttctggaagcatcaaaagttctgaagaatctgatatctgcactcattgatatgctgaagcaacattcctctttaacatccctagacattgaaatctggaaaccttccacagaaaaaagttcgcttaattatgagcaggatgttttgagtgtgcctgaacttggaaaggtttctgaagaaactgttgcactatggttgctctcactgatttgttcttatcatggaaggagtaaatatactgttatggagctcaatggcgttgacacagtatctgatagacttgctagctatactgctaaccgacagactcagaaaatatatggacttgtgcccttctgttggctactctgtttcaggattcagtggttgttcagtcttctgaaataacacgaaccataccttccttagcatccttgctaaaatctgatgatattatcaataaatactttgctgctcaggcactggctagccttgtttccactgggagcagaggtatacagcttgctattgcgaattctggtgcagttttgggtgctgtagcattgatcggacaggtagaatctgatatgccaaaccttgttacaatggctgaagaattcaagttgtcagacaatccatgtcaaataatgttgagaagcctttttgagcttgaagatgtctgcactggtgcttccgcccggaggtccatacccttgctagtggatctacttaaaccaatgccagataggccaggtgcacctctgattgctttgcaccttctgactcaactagcggaaggtagtgagtcaaataaaattgctatggcagaggctggagctttggatgccttgactaagtatctatctttaagccctcaagactcaactgaaactactataaccaatctgttggggattttatacactaatcctgatcttctttaccatgaatcatcacgtagcacttcaaatcagctggtagctgtcttgcgtttgggttcgagaagttctaggcttagtgcagtaaggacgttgcagaaactctttgattcagagaatataagggacaccgaagtggcccggcaagctattcaaccactacttgacatgcttgagtcaggaactgaaatagaacagcaggcagcacttggtgcgcttatcaagctttctgctgggaacatcgctaaggattctgctatgtttgatgtagaaggcaacacacttgaaaatctttacaaagttttatccttcagttcgtcattggagctgaagaaggatgctgctcaactctgctatattttatttgagaactcaactgtacgtgcatcaccaattgcaacagaatgtcttcaacccctgatatcactgatgacatcaggatctagtttggctattgaaccagcagtttgtgctctaaacagattactggatgaggactacaatgcagaaattgctgcaactagcgaagttattgatcttcttgtcagttttgttcctggtacaaactatcagttgtctgaagcatgtatcggtgctctcataaagttgggcaaggatcgtccaaactgcaagcttgacatggttaaagctggtatcattgagcatgcacttgatatgattcttgatgttcctgtatctgttagttcatccattgctgaattgcttcgcattttgacaaacaacagtggcattgctaaaagttctgctgctgcaaaaatggtggagccacttttcttgcttttacgtcgccctgatgttactatgtgggatcagcacagtgccttgcaagcactcgtaaatattttggagaaacctcagagtctagcagcattgaagttgactcccagtcaaataattgagcctttaatatcatttcttgagtctccctctcaagcaattcagcaacttggcactgaggtgctctcacatcttctagaacaggaacattttcaacaggatatcactacaaaaaatgcagttgttcctctggtgcagcttgctggtattggaatcttgagcttacaacaaactgcagttaaagcacttgaaaacatctcacagagttggcccaaggcagtagccgatgcaggtggaatttttgaactttcaaaggtaattgtccaggatgatcctcagccaagtcaagcattatgggaatctgcagcacttgtgttatgcaatgttctgcgttataattctgacaactatgtcaaagtctcaatggctgtacttgtgagattgctgaactccaccatggagagtaccgtcacgatagctctcagtgctctacttgttcaagagaaaagtagctcacgctgtgctgtggccatggctgaggctggggcagtacgggcactcttggagctcctgaagagccatcgatgtgaggaatctgcagcaagattgcttgaagccctgataaacaattcaagggtccgtgaaacaaaagttgccaagtatgctattgctccactggcacagtacctgttagatcctcaatctaagaaccagtcagcaaagtttctggttactcttgcactaggtgacattttccagcatgaagctcttgcaagggcaagtgactctgtgtctgcctgccgtgctcttgtaagcctacttgaggaccagcctacggatgacatgacaacagttgctatttgtgcactgcaaagcttagtgatgcacagcaggacaaataggcgtgctgttgctgaagctgggggcattttggttgtgcaagaattgcttctttcaccaaatgtggatatttcaggacaggctgcccttctaatgaagtacctattttcaaatcatacgctgcaagaatacgtgtcgaatgagcttattcgatctcttactgctgccttagagagagagctgctctctacgtcaactatcaatgaagttattctgaagaccatatatgtgatattcagcaacttcaaaaaggttcggttttctgaggccgcaaccttgtgcataccacacctggtttgtgctttgaaggatggaaatgaggctgcccaagagagcgtgcttgacaccctttgcttgcttaaagaatcttggccgcaaatgaatgaagacatcgctaaagcccagtccctgatttcagctgaagccatacctgtactacaaatgcttatgaagacatgtcctcccagttttcacgagagagccgatagtttgcttcattgcttgcctggttgcttgacagtgaccatcattcgtgggaataatctgaaacagacaatggggggtacaaatgcattttgttgcctgcaaataggaaatggtcctccaaggcaaactaaggtggtaaaccacagcatgtgcccagcttggaacgagggtttcacttggttatttgacgtggcccctaaagggcagaagctctacatcatatgcaaaagcaaaaatacgtttggaaagtcaacccttggaagagtgaccatccagatcgacaaggttgtcaccgagggtgtatacagcgggttcttcagcctcagccacgacggaggtaaggacggctcaaggaccctagagatagagatcgtatggtccaataggccatccaacgactgtatgtagcgtacggatgatttacctgacgccaattcttgtactcttggcttccatgtaaatcagccccccccccataatcatccgaattcatttatttgtacgtagaaagttaagacacttagataactcgcgccatcattcaattattgaggtcatttccgggattgtggccctgctgctgtaaactgattttgcacccgggtatttttttttgtacaggtgaatttatttcatgtagttatagcttagtgtagattggtggtgagtacggacaagccctagtgacagtaacattgggtgtgatgtgtggcgtgatatttgctcccgtgggtgtgtttccggcacttgtagcctcaggatacacatggctgagcttggcactgttctatttgtcaggcatgtttgtttacctgtttggttctggctacgcaaaactttttttttacatccaccttgccatagccgtaccagcggtacgaggaatctgaggtacctttttcttccatctcggcagaagtttgatgtttggcgaaactgtctcaggttacatggtaataacaatactatttgcaaaaccaaacacgccacatacc

SEQ ID NO: 25946 - DNA, 7444 bp, Zea Mays
agacactccattgtacaatagagtctcttagttgtctcctatgcttggagaaccgttttggtgtctcttcactgtacatgccctaagaaggtaccacttgtgtagttatgctgcacgtacattatacgactgtacaccgtatcggagctgtccacagccaaagtggaatttgcccaaggacgcgcaggtggctgtccatttccgaaataacgcgacaacgacaggagtgacccgcaaaaaaggcacccagtcctatcgctcctcccaacgcagttcctcacatctctcactctccctaacggacgcaccagcacacacacaccgccagcgcagtgggcgagcgagtgcagcgacagtgagacgaaccgccgccgtcgcccaccaccgtccacccgccaacggaattataaaataattcaaggtgtaaagctggtatggatctaagcatggcaagtttgaacttgtcagaacctcgagactctagagaatcaacttcgcccgcaccatcaacatcatcttctatatcaagagaaaaaggtgacctggcagaagttgatgatcctgaaagtgcaatgtccactgttgctagattgttggaagacctccatgctagcatggtgtctccatcggggaaggaagctacaaccagaaggttacttgaactggctagagcgaaaaaggaggcaaggattttgataggtagccattctcaggcaatgccactactcatatctacccttagagttgggtcatctgcagcaaaagtaaatgctgcagctctacttagtgcactctgtaaggaagaggacttgcgtgtgagggtcctcttaggaggctgtataccacccttaatctctcttttgaagtctgagtctgctgaagcgaagaaggctgctgctgaagctatttatgaagtatcttctggtgggcttttggatgatcacataggcaggaaaatatttgtgactgaaggtgtggtgccaactctgtgggacttgcttaatcctaggtctcaccaagatagagtagttgagggctttgtgactggggctttaaggaatctttgtggggacaaagatggttattggaaggccacacttgaggctggaggtgttgaaattattactggtcttctttcatccaagaatactgcttcacagtcgaatgctgcttctctgttggcacggtttatctctgcttctggtgatagcattcccaaagttatagatgctggggctgttaaggctctccttcaccttctaaatcgagataatatcatttctgttcgtgaaagtgcggctgatgctttggaggccctgtcttccaagtccagtattgcaaagaaagctgtggtggatgcaggaggccttcctattctgattggagctgttgtagcgccctcaaaggaatgcatgcagggtgggacatgtcattctctgcaaagccatgctgtccgtgctttatcaaatatttgtgggggaacaacttctctgttgctttaccttggtgagctctgccaagcaccccggtcacctgttcccctcgctgatattcttggagcgcttgcttattccttgatggtttttgacggctctgatgataaatcatttgaccctgttgagattgaaattactttggttgcgctcctaaaatctcatgacagcaagcttgatcgtattcttgaggctttagcaagtctatatgggaatgattgtttctccgacaggcttgatcactcttattctaagaaggttcttgttgggctgattaccatagctcctgctgatgttcaagagcttcttgttcgtgccttaactagcttgtgttgcgatggtgttggaatatgggaggctcttggaaagagagaaggggttcagttgctaatatcattacttgggctttccagtgagcagcagcaggaatatgcagtttccttattggctatcttgagtgatgaagtagatgacagcaaatgggcaataacagctgctggaggtatccctccacttgtccagctactagaaacaggatctcaaaaagcaaaggaggatgcagcttacatcatgtggaacatgtgctctgacagtgatgatatcagggcatgtattgagagtgctggggctgttatggcgctaatttggcttctaaagagtggtagccctggtggacaggaggcatcagttaaagcactgaagaagttgatacgatcagcagattctgctatgatcaatcagttactagcattactgctcagtgactcattgagctcaaaggcccatgtcattactgttctcgggcatgtccttgtgctggcgcctcagagagctctaatccagagtggagctccagctaataaagttcttaggtcactggttcttgttcttgaatcatcaaatgaagaaacacaggagattgctgcaactgtgttggctgatattttcactatgcgtcaggatatttgtgatgtaatggcaattgatgaaattgtccagccatgcatgaagcttttgacaagtggaaaccaagtgattgccacacaatctgccagagctttaggagcactgtcatgttcagctagttccatgtcaaaaaacaaaatgtcttgcttaactgaaggtgatgtgcgacctcttatagagatggcaaagacatcatctattgatgttgctgaaacagcatttgctgcattagcaaatctcctatcagatgcacagattgctaaagaagcattagatgacaatattgtcttggctttgactagagtgctcaaggatgggagtttagaaggcaagattagtgcttcgcggtcacttcgtcagttggtcaaccagtttcccctcagtgaagttctcccagattacttgcagtgctgttttataattcatgcactgttggtatgtctatctggcatcagtttagaaaatgttacaagtttggaaccccttgatgttcttacattgatggctacaacaaaggagggttcgcattatagcccccctctatgcactggttttcttgaagttccagaaagcttagaacctttagttcgctgtattagtattgggcttccacctgttcaagataagtccattcaaatcctagcaagtctctgtcagggtcgaccttcgctacttggtgaatatttaaacagaagtcaaggatgcatcacttctcttgctactagagttatagagtcaaatgacatggaaataaggatcagcagtgcagtcatcctcatatctgcaatgagggacagcagagaacggtccatcgatgttctggaagcatcaaaagttctgaagaatctgatatctgcactcattgatatgctgaagcaacattcctctttaacatccctagacattgaaatctggaaaccttccacagaaaaaagttcgcttaattatgagcaggatgttttgagtgtgcctgaacttggaaaggtttctgaagaaactgttgcactatggttgctctcactgatttgttcttatcatggaaggagtaaatatactgttatggagctcaatggcgttgacacagtatctgatagacttgctagctatactgctaaccgacaggaacagtatgaagactcagaaaatatatggacttgtgcccttctgttggctactctgtttcaggattcagtggttgttcagtcttctgaaataacacgaaccataccttccttagcatccttgctaaaatctgatgatattatcaataaatactttgctgctcaggcactggctagccttgtttccactgggagcagaggtatacagcttgctattgcgaattctggtgcagttttgggtgctgtagcattgatcggacaggtagaatctgatatgccaaaccttgttacaatggctgaagaattcaagttgtcagacaatccatgtcaaataatgttgagaagcctttttgagcttgaagatgtctgcactggtgcttccgcccggaggtccatacccttgctagtggatctacttaaaccaatgccagataggccaggtgcacctctgattgctttgcaccttctgactcaactagcggaaggtagtgagtcaaataaaattgctatggcagaggctggagctttggatgccttgactaagtatctatctttaagccctcaagactcaactgaaactactataaccaatctgttggggattttatacactaatcctgatcttctttaccatgaatcatcacgtagcacttcaaatcagctggtagctgtcttgcgtttgggttcgagaagttctaggcttagtgcagtaaggacgttgcagaaactctttgattcagagaatataagggacaccgaagtggcccggcaagctattcaaccactacttgacatgcttgagtcaggaactgaaatagaacagcaggcagcacttggtgcgcttatcaagctttctgctgggaacatcgctaaggattctgctatgtttgatgtagaaggcaacacacttgaaaatctttacaaagttttatccttcagttcgtcattggagctgaagaaggatgctgctcaactctgctatattttatttgagaactcaactgtacgtgcatcaccaattgcaacagaatgtcttcaacccctgatatcactgatgacatcaggatctagtttggctattgaaccagcagtttgtgctctaaacagattactggatgaggactacaatgcagaaattgctgcaactagcgaagttattgatcttcttgtcagttttgttcctggtacaaactatcagttgtctgaagcatgtatcggtgctctcataaagttgggcaaggatcgtccaaactgcaagcttgacatggttaaagctggtatcattgagcatgcacttgatatgattcttgatgttcctgtatctgttagttcatccattgctgaattgcttcgcattttgacaaacaacagtggcattgctaaaagttctgctgctgcaaaaatggtggagccacttttcttgcttttacgtcgccctgatgttactatgtgggatcagcacagtgccttgcaagcactcgtaaatattttggagaaacctcagagtctagcagcattgaagttgactcccagtcaaataattgagcctttaatatcatttcttgagtctccctctcaagcaattcagcaacttggcactgaggtgctctcacatcttctagaacaggaacattttcaacaggatatcactacaaaaaatgcagttgttcctctggtgcagcttgctggtattggaatcttgagcttacaacaaactgcagttaaagcacttgaaaacatctcacagagttggcccaaggcagtagccgatgcaggtggaatttttgaactttcaaaggtaattgtccaggatgatcctcagccaagtcaagcattatgggaatctgcagcacttgtgttatgcaatgttctgcgttataattctgacaactatgtcaaagtctcaatggctgtacttgtgagattgctgaactccaccatggagagtaccgtcacgatagctctcagtgctctacttgttcaagagaaaagtagctcacgctgtgctgtggccatggctgaggctggggcagtacgggcactcttggagctcctgaagagccatcgatgtgaggaatctgcagcaagattgcttgaagccctgataaacaattcaagggtccgtgaaacaaaagttgccaagtatgctattgctccactggcacagtacctgttagatcctcaatctaagaaccagtcagcaaagtttctggttactcttgcactaggtgacattttccagcatgaagctcttgcaagggcaagtgactctgtgtctgcctgccgtgctcttgtaagcctacttgaggaccagcctacggatgacatgacaacagttgctatttgtgcactgcaaagcttagtgatgcacagcaggacaaataggcgtgctgttgctgaagctgggggcattttggttgtgcaagaattgcttctttcaccaaatgtggatatttcaggacaggctgcccttctaatgaagtacctattttcaaatcatacgctgcaagaatacgtgtcgaatgagcttattcgatctcttactgctgccttagagagagagctgctctctacgtcaactatcaatgaagttattctgaagaccatatatgtgatattcagcaacttcaaaaaggttcggttttctgaggccgcaaccttgtgcataccacacctggtttgtgctttgaaggatggaaatgaggctgcccaagagagcgtgcttgacaccctttgcttgcttaaagaatcttggccgcaaatgaatgaagacatcgctaaagcccagtccctgatttcagctgaagccatacctgtactacaaatgcttatgaagacatgtcctcccagttttcacgagagagccgatagtttgcttcattgcttgcctggttgcttgacagtgaccatcattcgtgggaataatctgaaacagacaatggggggtacaaatgcattttgttgcctgcaaataggaaatggtcctccaaggcaaactaaggtggtaaaccacagcatgtgcccagcttggaacgagggtttcacttggttatttgacgtggcccctaaagggcagaagctctacatcatatgcaaaagcaaaaatacgtttggaaagtcaacccttggaagagtgaccatccagatcgacaaggttgtcaccgagggtgtatacagcgggttcttcagcctcagccacgacggaggtaaggacggctcaaggaccctagagatagagatcgtatggtccaataggccatccaacgactgtatgtagcgtacggatgatttacctgacgccaattcttgtactcttggcttccatgtaaatcagccccccccccataatcatccgaattcatttatttgtacgtagaaagttaagacacttagataactcgcgccatcattcaattattgaggtcatttccgggattgtggccctgctgctgtaaactgattttgcacccgggtatttttttttgtacaggtgaatttatttcatgtagttatagcttagtgtagattggtggtgagtacggacaagccctagtgacagtaacattgggtgtgatgtgtggcgtgatatttgctcccgtgggtgtgtttccggcacttgtagcctcaggatacacatggctgagcttggcactgttctatttgtcaggcatgtttgtttacctgtttggttctggctacgcaaaactttttttttacatccaccttgccatagccgtaccagcggtacgaggaatctgaggtacctttttcttccatctcggcagaagtttgatgtttggcgaaactgtctcaggttacatggtaataacaatactatttgcaaaaccaaacacgccacatacc

SEQ ID NO: 25947 - DNA, 2121 bp, Zea Mays
gcccaaaattacggcccctctctttctctctctgactacctccgtatgaggcagcttgtgctcgttcgagactgagacaccccaacacgcctccctcagcgcagatctcgccgccgccgagatgctccgccgcggcgtgcttcttctcgcggccatcctcatcgccgtcgcacactcgcccctcgcgtacgcctcggaggccgagcacaagtataaaacagaagaacctgttaagctatgggtaaacaaggttgggccttacaataaccctcaagaaacttacaactattacagtctcccgttttgtcaaccatctgaaaaccctgcacataaatggggtggtctcggagaggtccttggtggaaatgagctgattgatagtcagatcgatataaagttcataaaaaatgtggacaagggggccatttgcacaattgaacttgatgttcaaaaggttcagcaatttgctaatgccattgaaaactcatattggtttgagcttttcatagatgatctgccattgtggggttttgttggggagactgacaaaaacaatgagaaaaagcactacctttacactcacaagaacattgttgttaaatacaatggtaacaggataattcatgtgaatctaacacaagagtcacctaagcttcttgaagctggcaaaaagttggatatgacttattcagtgaagtgggtgcaaacaaatgtggcatttgcacggcgctttgaggtttacttagactacccgttctttgaacaccagattcattggttctccatcttcaattcattcatgatggttattttcttgactggtttagtgtcaatgatattgatgaggacactaagaaatgattatgcaaaatatgctcgtgaagatgatgatctggaatcacttgagcgagatgttaatgaagaatccgggtggaagcttgtccatggtgatgtgttccggcctcctcgtggccaggtgtttctttctgccctagttggtattggcactcagctggcggctcttatcctgcttgtgattgtgttggccattgttgtcatgttatatgttgggcgaggagctatcatcacaaccttcattgtgtgctacgctcttacatctttcatctctggatatgttagtggtggtctctattcaaggaatggtggaaaaaactggataaaggctatgatccttacagcatcactttttccattcttgtgtttctcgattggattgttgttaaacactattgctatcttctaccgatcattagcagctataccatttggcacaatggttgtcatgtttattctttgggctttcatctccttcccgttggttctattggggactgtagttggtagaaattggagtggtgctcccaacaacccgtgtcgtgtgaaaacgatcccgcgcccaattcctgaaaagaagtggtaccttacaccttctgttatttcactgatgggtggacttctccccttcggcagcatcttcattgagatgtacttcgtattcacttccttctggaactacaaggtgtactacgtctatggtttcatgttgctggtgtttgtcatcctcataatagtcaccatatgtgtcactattgtgggtacttatttcttgttgaatgctgagaactatcattggcaatggacatcattcttctctgctgcttctaccgccttgtatgtgtatctatactctatatactattatcatgtgaagacaaagatgtcaggatttttccagacaagcttctactttggttacaccttgatgttctgtcttggattgggaatactttgcggtgctgttggatatttgggctccaccctatttgtgaggaggatctacagaaatatcaaatgcgactaaacttggtctaggctgctagcatgtcttgtcacaatatggtgcagagtaataccttgagcttctgattgacttcggaaattacacaggaggaaggcaaaacaccttccccaggcagttctttgttctcctcctgttccgggacaatcttggaacagaaacaacagaattcaatagtttcattacctacaacaacatgagtatgaaaacactgagtacggagtgtactttcacaagtctta

SEQ ID NO: 25948 - DNA, 2117 bp, Zea Mays
gcccaaaattacggcccctctctttctctctctgactacctccgtatgaggcagcttgtgctcgttcgagactgagacaccccaacacgcctccctcagcgcagatctcgccgccgccgagatgctccgccgcggcgtgcttcttctcgcggccatcctcatcgccgtcgcacactcgcccctcgcgtacgcctcggaggccgagcacaagtataaaacagaagaacctgttaagctatgggtaaacaagaaaatgtggacaagggggccatttgcacaattgaacttgatgttcaaaaggttcagcaatttgctaatgccattgaaaactcatattggtttgagcttttcatagatgatctgccattgtggggttttgttggggagactgacaaaaacaatgagaaaaagcactacctttacactcacaagaacattgttgttaaatacaatggtaacaggataattcatgtgaatctaacacaagagtcacctaagcttcttgaagctggcaaaaagttggatatgacttattcagtgaagtgggtgcaaacaaatgtggcatttgcacggcgctttgaggtttacttagactacccgttctttgaacaccagattcattggttctccatcttcaattcattcatgatggttattttcttgactggtttagtgtcaatgatattgatgaggacactaagaaatgattatgcaaaatatgctcgtgaagatgatgatctggaatcacttgagcgagatgttaatgaagaatccgggtggaagcttgtccatggtgatgtgttccggcctcctcgtggccaggtgtttctttctgccctagttggtattggcactcagctggcggctcttatcctgcttgtgattgtgttggccattgttgtcatgttatatgttgggcgaggagctatcatcacaaccttcattgtgtgctacgctcttacatctttcatctctggatatgttagtggtggtctctattcaaggaatggtggaaaaaactggataaaggctatgatccttacagcatcactttttccattcttgtgtttctcgattggattgttgttaaacactattgctatcttctaccgatcattagcagctataccatttggcacaatggttgtcatgtttattctttgggctttcatctccttcccgttggttctattggggactgtagttggtagaaattggagtggtgctcccaacaacccgtgtcgtgtgaaaacgatcccgcgcccaattcctgaaaagaagtggtaccttacaccttctgttatttcactgatgggtggacttctccccttcggcagcatcttcattgagatgtacttcgtattcacttccttctggaactacaaggtgtactacgtctatggtttcatgttgctggtgtttgtcatcctcataatagtcaccatatgtgtcactattgtgggtacttatttcttgttgaatgctgagaactatcattggcaatggacatcattcttctctgctgcttctaccgccttgtatgtgtatctatactctatatactattatcatgtgaagacaaagatgtcaggatttttccagacaagcttctactttggttacaccttgatgttctgtcttggattgggaatactttgcggtgctgttggatatttgggctccaccctatttgtgaggaggatctacagaaatatcaaatgcgactaaacttggtctaggctgctagcatgtcttgtcacaatatggtgcagagtaataccttgagcttctgattgacttcggaaattacacaggaggttgctctccctttcgttactcttttcatcttttttggcctatcttcctggacgtgtggaactgcccatgataaatgtatacctagttggagaattagtcagagtactggaaagtacatgtaggtttttttggtgcggcctctctcggtcaattgtaggagtacattgatgaatattactgcagtgcagattccagtgggctagattcgcccctcttatgactgtttctaactacgtaccctctccgtcccaaattagaattcgttttagggaattaatgaattcatacaatagttgatc

SEQ ID NO: 25949 - DNA, 2261 bp, Zea Mays
gcccaaaattacggcccctctctttctctctctgactacctccgtatgaggcagcttgtgctcgttcgagactgagacaccccaacacgcctccctcagcgcagatctcgccgccgccgagatgctccgccgcggcgtgcttcttctcgcggccatcctcatcgccgtcgcacactcgcccctcgcgtacgcctcggaggccgagcacaagaagaacctgttaagctatgggtaaacaaggttgggccttacaataaccctcaagaaacttacaactattacagtctcccgttttgtcaaccatctgaaaaccctgcacataaatggggtggtctcggagaggtccttggtggaaatgagctgattgatagtcagatcgatataaagttcataaaaaatgtggacaagggggccatttgcacaattgaacttgatgttcaaaaggttcagcaatttgctaatgccattgaaaactcatattggtttgagcttttcatagatgatctgccattgtggggttttgttggggagactgacaaaaacaatgagaaaaagcactacctttacactcacaagaacattgttgttaaatacaatggtaacaggataattcatgtgaatctaacacaagagtcacctaagcttcttgaagctggcaaaaagttggatatgacttattcagtgaagtgggtgcaaacaaatgtggcatttgcacggcgctttgaggtttacttagactacccgttctttgaacaccagattcattggttctccatcttcaattcattcatgatggttattttcttgactggtttagtgtcaatgatattgatgaggacactaagaaatgattatgcaaaatatgctcgtgaagatgatgatctggaatcacttgagcgagatgttaatgaagaatccgggtggaagcttgtccatggtgatgtgttccggcctcctcgtggccaggtgtttctttctgccctagttggtattggcactcagctggcggctcttatcctgcttgtgattgtgttggccattgttgtcatgttatatgttgggcgaggagctatcatcacaaccttcattgtgtgctacgctcttacatctttcatctctggatatgttagtggtggtctctattcaaggaatggtggaaaaaactggataaaggctatgatccttacagcatcactttttccattcttgtgtttctcgattggattgttgttaaacactattgctatcttctaccgatcattagcagctataccatttggcacaatggttgtcatgtttattctttgggctttcatctccttcccgttggttctattggggactgtagttggtagaaattggagtggtgctcccaacaacccgtgtcgtgtgaaaacgatcccgcgcccaattcctgaaaagaagtggtaccttacaccttctgttatttcactgatgggtggacttctccccttcggcagcatcttcattgagatgtacttcgtattcacttccttctggaactacaaggtgtactacgtctatggtttcatgttgctggtgtttgtcatcctcataatagtcaccatatgtgtcactattgtgggtacttatttcttgttgaatgctgagaactatcattggcaatggacatcattcttctctgctgcttctaccgccttgtatgtgtatctatactctatatactattatcatgtgaagacaaagatgtcaggatttttccagacaagcttctactttggttacaccttgatgttctgtcttggattgggaatactttgcggtgctgttggatatttgggctccaccctatttgtgaggaggatctacagaaatatcaaatgcgactaaacttggtctaggctgctagcatgtcttgtcacaatatggtgcagagtaataccttgagcttctgattgacttcggaaattacacaggaggttgctctccctttcgttactcttttcatcttttttggcctatcttcctggacgtgtggaactgcccatgataaatgtatacctagttggagaattagtcagagtactggaaagtacatgtaggtttttttggtgcggcctctctcggtcaattgtaggagtacattgatgaatattactgcagtgcagattccagtgggctagattcgcccctcttatgactgtttctaactacgtaccctctccgtcccaaattagaattcgttttagggaattaatgaattcatacaatagttgatc

SEQ ID NO: 25950 - DNA, 665 bp, Zea Mays
accgtgtgttgttgtgtttcatgttcccacgtctacgttaatcctcccatgtcaccccagttgtttgcccaggtctatcgcgcgccgtcttcctgtagcctgtgaccacaccgtccagtttccccaccctgccgtggccagggctttccggggggttgtttgtttgttgtgtgcatgttccatcatccccttgggtcagtgaaactctccgagcttccctttccatctctgccgcaataattcctcgggaacatcgtggcgtcgtcggtgattaccgcttggggcaacctcgtcgtggccggccttgttgggaactggttgcgtgcacgctacggatcaatccacttcgggaacaccaagaacgagaattggtccttgtgaagaaggaacctactccagtgctattgatccagggatgggccatctaactgatcatcgtgttagaagtatctagaacctcttctctgcaacaaaggtgtagaatccggatgcaatggtcgacaaagaagatgaatgtcgtgcaggttcatgccaatggactgggaacagtgaaggatgaacaataggtcttgactgaggaactggagaagtctagtgactaggtgcggtggctgacgcctggggtagtcatcatcaagagttatgacattgagaagcaggtcgtg

SEQ ID NO: 25951 - DNA, 906 bp, Zea Mays
agccacgtagccaagctcatgcaaccattgacacctcagggcccttgtcttgcgtggtctgatcatgctcgaccggcgtctgtttgcctgctccatattgccacaatcttggttcagtaaagccctacctctatccccgggtctaacccagctcaccgtgtgttgttgtgtttcatgttcccacgtctacgttaatcctcccatgtcaccccagttgtttgcccaggtctatcgcgcgccgtcttcctgtagcctgtgaccacaccgtccagtttccccaccctgccgtggccagggctttccggggggttgtttgtttgttgtgtgcatgttccatcatccccttgggtcagtgaaactctccgagcttccctttccatctctgccgcaataattcctcgggaacatcgtggcgtcgtcggtgattaccgcttggggcaacctcgtcgtggccggccttgttgggaactggttgcgtgcacgctacggatcaatccacttcggggtgagccactggtgctttccctcttcttgtttcgagctctatcatgctgttggacagtgtgttgctgccggagtttgacgccaccgccggtgcgtgcgaaggaggacgcgggcgcgtgcgtggtagagctttgggcttcctggcgctagttttctctggtgctgggccaattgggccagttccggcccaagctttgtgtattgtttttctttgttatatgcctgatgccttgtttattatgccagaaatcgaagaaaattgcaaaaatgataggacaaattttgttaggtgtataaaatcaaacactctctggtagaaacattcttggaatttttgtagaaaatatatatttttagaggaataaaaggtgccgtaaaatgcttatctgaaattttagtaac

SEQ ID NO: 25952 - DNA, 86 bp, Zea Mays
gatagagaataaacctttgctgctaaaggatgtcaagttccaaaacgtacacgggcttaccagtgcttattgacctttgtttgttc

SEQ ID NO: 25953 - DNA, 681 bp, Zea Mays
gctgcatccacgttcacgtcgcttgaggaggtgagcagtcggatctggctaggtgcgcagtcgcgcgccatttgtttttttctcgtgagcgccctctgccatcccgcctcctcctggcggagcgtccgtggaggaggcggcggggtattgatggaagtggtacccttgatggacagcaagggaagaaaacttgacggttaatcctggaagatggcgagtgctctatcttggagacttggaagatggcgagtcttggaagaacatcaaaaggatggaaacaccttgccacggtaatagcgccagaacagccgtcgacggcttcaagctcctacttgtgtttccggcgtttggctgttgcggctgtatggagtcagcaagcatgtacggctgtaaaggctggagtcaggtacagccagtcagcaagcatgtacggctgtaaaggctggagtcaggcggcggctgtactgctgctaggcggcggctgtactaggacctaaattgatgttactcggtgggctgtaccatgctgatttgtacctcacgtgtgtatatggacctggtcgatgtgggcttttttgggcacaatagattgcaacatgacatgtatgggtgtagacatatatggatctagacattatattatatattatatttattcttcatgtttatattatatattat

SEQ ID NO: 25954 - DNA, 829 bp, Zea Mays
ctcaaacccccccgtaggcgctgcatccacgttcacgtcgcttgaggaggtgagcagtcggatctggctaggtgcgcagtcgcgcgccatttgtttttttctcgtgagcgccctctgccatcccgcctcctcctggtaacgcgctgctcaagattactggatctggtgagtcaccgttcagagttgggttcatgttcctggggcgcttcttcttacgttcgcaggcggagcgtccgtggaggaggcggcggggtattgatggaagtggtacccttgatggacagacagatttcaaactgaatatgaggttgtctctatcagcagcaagggaagaaaacttgacggttaatcctggaagatggcgagtgctctatcttggagacttggaagatggcgagtcttggaagaacatcaaaaggatggaaacaccttgccacggtaatagcgccagaacagccgtcgacggcttcaagctcctacttgtgtttccggcgtttggctgttgcggctgtatggagtcagcaagcatgtacggctgtaaaggctggagtcaggtacagccagtcagcaagcatgtacggctgtaaaggctggagtcaggcggcggctgtactgctgctaggcggcggctgtactaggacctaaattgatgttactcggtgggctgtaccatgctgatttgtacctcacgtgtgtatatggacctggtcgatgtgggcttttttgggcacaatagattgcaacatgacatgtatgggtgtagacatatatggatctagacattatattatatattatatttattcttcatgtttatattatatattat

SEQ ID NO: 25955 - DNA, 748 bp, Zea Mays
cagaaactgtaaacataaacagaaactgttggcagaccaacaatttgtgaatatccaatcatttgaattacaatcatatgaactatagtagcaacataaacaatttgttggcagaccaacaaacataaatagaatctgccagaaacaatttgtaattccatatccagatccagtttctcatgcatatctagtttgtgacagaaacaaaattgccttagaaatcatgagagtatctagaccaacaaacataaacagaaactcatgagagtaatttgatacagatgtggctctctaaaatataaataagatataaaaacgtgattgactctctaaaatataaaaagacttttgaagattgaaaatatatagatagtggtatttttatggaaaaatgactctccaaatgataatttagattgtgaaattttgaaacgactcttgggactacttcgtatcaatcgtgtgcaataactggtttgacatctactttacatgggtgtatatatctatatatgtaatcaatcaatctatatatgtaatcaatcaaagaagaaattaaagaagcataaaaaaactaattaacaaaccaaaacccaacccgtcgctgatctccacgcccaggtcgaccacgtggaggtgccggcgatggtggccgccgctctggaacgcctccgcgatggcgactgcgagtgaaccggagaggcgagagccgcggcggctgcggctgcgagtgaactcgagaggcaag

SEQ ID NO: 25956 - DNA, 1768 bp, Zea Mays
atggccgagcgcgcctggatcttctccctcccaggcgtttgatagatcggccgcttgttcctctccgctgctcgccggttccctttccccaagctccatggctgctacacctccccagccgagcggctcttccccacggcgctccctccctgcttctccctccctctcgcgtcttctcctcgccggcgtgctcctgctccagccatggcgcgcgcccctgcttccatggatgccgcacccgctgcttgctccccttgcttctccagtccgagctccttcccctcgacttcccatggccggcttcgtgctcacccagcccctgctctgtttcttccacggccgagtctctttttcctttgtcgtcgccgttttcctgtgccgcggcctcgcccagccgttcctcctctttcctcttgctcgggttcagtccagttcgcccctgcgcttgccatggtggccgtcgcgcccatgccggctggagctcgctcggctgcggtctcgtcccggctccctgctgtggctcgccgcgtccctgtgtttgaattggtcgaccttcactcttctccccatggtcggacaacctcgtcgatgctgctatttggtggtcgcctcttggcctgatttcgtgattgcatctgcactcctttgcttggtctgtcgtcgttctccagctgttcagcgcattcgtcgggccgtgctttgtgtcggagttccctccctgcagacctcgtcgtcgcccatggtcacagatctcattctcgcctcctgtgcgcgctgacagcattgtctcctctgtgctcgctggccatcacggcgtcccagtctatcgcgccgcgctctagtcgtcgattcgcggtcatgtctgtttctccatcaatctccctcaacggacccgcccttcacctttggtcgtgccagcaggcacttgagtcaccgtcctcgacgtttgttgacgcgcgggtcgcctcggcctaggtcctcgtctttcaccagcagctcgtcacgggaccgggtgtcgagctcctttcccaacaaacgccggacctgcatctgcgtgcgccatcagccttagctcgtcggtcacgctcgctggatgtccgatcaaggacttcaactacaggttgttgtcgttcgtgcaaacatcaaatcaaattgtgatgtggtacgataattcatcacgtgatgcgaaagatgagctgagtcgaccccaagatgctgttaagcgtgggcttcttcgcaaagtgatactgatggacgaacctgaagatggataacctgatcaagtgccaggacaaaagatagtcgtcaagtggatgtcacctaacaacaccaacctagtgttatcaaggcaagccccggtgcatttgctacctccttgctattttcaaatctttatcaccttatatgatgcattaggtgatagaagttgtgtgctaaataattgttgtatttccttccttgaaaaattgattacccttccttgataccctttttgaaaaagaatttttatgatgcttagccttgctctagaaaaataaaaaatgttttgttataaaacaaaagtgatgcttcagtgggtgggaatgttttcaaaaagaaaatacttatgatggtgaatccgtcaaaggccttgatgggtttaacatcggaaaagatgtacctctgccaggtaccaaactttggatttaaataataaagctgagaccaggcggttgacttgcacgagaagggagtctcggtgtagtgtctctgtctgagtcgattaagg

SEQ ID NO: 25957 - DNA, 2960 bp, Zea Mays
ttcctattcatcccgaggcagttccgtgccagatcatcactctcggcgattaccacacggattactcctcctccggctccatccatgatctaatctagcaagtcactccaccgcccgcctttgtagtcgtcactcttcccgatccgtcagccaacgccaccgattggtcaggcggcggcgatggcgtcccgggacgacgggtggggaggcggcgaagacggcagctcgctcttcgagggcatggtcctcttcgcgccagagcccaccgccgccgaggactcggtccctgcccctgcccctgcccccgcccccgccgaggactcggtccctgtccccgccgctgtccctgagctgccatccgccgcccgccacgacgccgacgcggcctcgtccgtgccaccaccgctggacgaggatctcttctccgatctcaccctcttcgccccgccgcaggagccgctctcgctggagcagacacccccgcccctgctcccgcaaggcgaggatcggagccacgcggcacttgccccccgcgccgctagcccctactccggggctctctcggcagccgtccacctcgtcgctgcgcaagaagaagagggcccgtgcgcatcggctgctgctgcgatctccgctagtactatagccttcctggacgcttcgccgtatccggccgctactcgtaccctcgaccagctccctgatcggcaactcgatgtccatgtcaacggctacgaggcgcacgcggaggcggtggatgttgataccaattcaccgcatgtggtggaggcggtggatgtggataccaattcgccgcgtgtggaggaggaggaggcaaaggaggacgatgacgggaaagaggatgaagatgctggagtggcagccttgggggtcaaggagaggctaggtctcctcagatctcaaatctcgggcaagctcgactccatccagcagagggctgctgctgtggctgccaagaggaggcttctggctggccggcggaggaaggtggcggaggaggcgacctccgtggcatccaggcacaaggatttggagagggagctggaggtggcctgcgaggctgaggactttgagagggcagagagtatcagcgactccctcgctgccctcgagaaggagaaggatgggctgttgacggcgctgcgtgatgctgagcttgactacgattcagtggattcggagttgcaggaggtgcttgagtcccgtattgctgccgaggaggaagctgctatccttctggagcaatttgcaaaggatgcaaatgaacatgctatttcagagagcaaacaagcacaagaattatcgtcgaaagaaatagaagggtggcaaacatcaatggagttactagaaacaaagaagttggaaatggaggttgaaacacagttggttttagaagcacgttctgggttggaagggtcaatagagcatttggttgaagaagacaaactagaggaaggtacacttagtataaaaggagaagtcctcaccaaggagttagctgaccttctagagttggtgaggttgaaagaagcagagatagctgagaacaatgcccggatccatgaagttcaagaaagaataagtgcagtggtctccagattccatggctctcagtcagatgttgatttgaagctcaattccttgaaggaagcccaatgtaaactggatctagagactgaagcacttgtgttgaaaaaaaatgaaattgataatttcatttctttaacagagcaaaaagattcagagttgagggaaatttattggtgcttgttttctctgaagcaaaaacttgccaacaatcagttgaaataagaagaaaagcttgcatcatcgattttgaagtcagagagggatagaatttgggttgctaaaaaatggaggaggaaattttgcaagacattcaaatgcttaggcaaaaaaattacagatgcaagaactactcttcaggaggtatcttcaaggagaacaagtatacaacaagaaatggattcatttaagcagaaattgagctttcattgacaaaaggggccctgaactagaggctgaaaagaaagttgcggctgctgcaagaaactttaaggaagcaggaaggatagctgcagaggcaaaagctcttaattccgaaaagaacgaactgcgtggcaagttggagaaagctgctactgatctagagttaatagaaaaggacattgcagcaactacagacaagatacaagaatgcgaagggcttgttgtactgaaagaaaaggactcagcattgacaagttacaaaagactgcggttggattgtgctgctgccagagcagaactgactgctgcaactgaaatacatgataatgaagaagttgagatactacgcaaagaagctgaaactgccgattctaaagcaatggagctcaaaacatgctatgaccttcaggtggaggacaatgacttcatgtttcagcctgtagttcctatagcattcataacaaattcaacaggacagcacttggtagaaattgcttcttcatttggcctatctcctcagaagtgacaatgcacagtggatttgcacactaccaggtctgccccctgccctcaatccaagttgtacctgtcatattgaggggaagagctgtgctagtgtgaaactttctccttccaggatatcctcctcaacgacctctctttaaatcccagcatttggaatctactccaaactagagtaggaaggaagcatagggatgatcaaatgtacaacatacattttgcatgctctgtaggaatttagcttccctatgcattttttgtgtacattaagactgtaattcttttgttgtgccagttttgattcaattgcagtgacatgccatcatggaccagtatgtagacagatttttgtttcgagaaaaaggatgtaaccagaataaaatgtccaggaatggaactccttttgc

SEQ ID NO: 25958 - DNA, 2535 bp, Zea Mays
cccgctaaacctattcgacccgtcaacgaacagatccaccctcaccagccgcctgacgttcgagccgcaccagccctaaacccttccacctccagccgccataactgtaatccctttcaccatcagctgcccctccgttcgagccgtcgacgccctaatcctatcaccttctggccgcccaaatccctttcggctcctgccgccctctttttgaggcgcatgccatggagtcgttggtcttcgagtgccaggccatggcggcacagaccatggagtcacaggctatgatggcgcaggtcttagtctttaggccatggagtcgcaatcaggcgttcaagatgctctgagacttgagtcagctgtccatctgtgtacttgattgtgatgataaattgaagccagtaattggaacgtcatttggttctctagaggaagtggaagaattgtacaagatatatgctcttgagaattttattggctgcaacattccagaacatatcgaaatccatccaccatccgatgttcactcccagtaaaaacatcaagaaatccaaagaactatttaaatcgtgtaaagggaaaaatagtaaagtgagacgaaggtagtcaaacagtcatattgctaaagtattacaggtaggagaaagaatccaacagcatgttgaggagcttctacagtgttattggcatgggaattttgttagcttctatagtgctattggtatgtcgagtagcttcaaccaggtatggactttttaactctagcgagagtttttagttgtcacacactaatggctgaattggggaaagtagtaactgaaaatgagagtaaccagcatcaacaatagtttgctttcaaaattcagaaggatagttccttgttttgtacaacattttttaagtataagagttttaaaatagaacatagcagcatgaaaggcttattttttccagaacatagtttaatagacttaataagtttaaacgacccataattctggtgctttattctatcttttatctgttgggtcattaaaatctatagactttagcgtcctatcttgtcatgtattagtgacgtatggaatcatttggagtcaatgggaagattaatagccaaaaatgttagaagatcatgcttgtttagacctctatgttgtacggaccagcaggtttgaaatgatgttgtcactgttccttgttctcaactgttgtattaagcaagtactaccatggggatgtggggtgggactagtccaaatgttgtagttactagttactagagttagcaagcagaggaattggtaatggtgatgcgttctcaacttcttatgtgtgcttgtcgttcgatcgtccatcagtttttagatgtacaaaacatatcaccgcattgacgtccatggctgcgagtacagtacagtggtcggccggttccaagtttacaaacagcaagcagtactagtgagtaggtgacattagcagtacaaacccttaaacctgcaactaagcacgacagagagtaggggcggagctcaggcccgttcatctcggttaggtggaagaaatggtcggcatatgtgtttctttcatgctttactgcatcctgcatttttattttgttgcactggcacgaccgcctggcactggcaccccctcgtactgatctgatgttgtaatagcaattagcatgcgttcagattagttaagatatggagctgagctcgctgccaacaaggtcaatactagcatccatttttttgcaaactaggacacaatcaggtgaaaagcttgagctgcattctttgtctatttaactttactagttctgtttgtttcatggtatgctgttatttacaagtaagcccaggagattcttttattgatgttaaacaattacttttggatgctcctgaaacatgcttctatgcatgatacaatttgatattgcatactaaagatgggttagctcatcagttagaagactacaaggaaatatctgaaatagcagatataacttctagtggatgttcactggagatggttgctacaacatacaatgagaggtctattaggtcacatctccgacgtgtgaaggggctactatctctgtctagtctttatgtttccctatcaacgtccttagctctgcttcaggagtccgctcaaggaaaatttgcaggacttatatatgtgttctctgttcactgatgcggctggagcgtcatgtcaactgctcaccctccccctaacaaattaaactagactgatgagtggagcttcatgttgggatgatccatgcaccttttaagttttggaacgtcgtactcaaatgtagcttgtgttagttgaacctatcgtactttcttttggaattaaattatatgatatttaaacatgtttgatgtttaatacttgtgttggatgctttatgcttcaaatatatatgcattatacaaaaagttgtgtacacttatgttgtttgatgaaattgtatgcacgatttggattgaattcaattgaatgctgattttcatt

SEQ ID NO: 25959 - DNA, 2692 bp, Zea Mays
cccgctaaacctattcgacccgtcaacgaacagatccaccctcaccagccgcctgacgttcgagccgcaccagccctaaacccttccacctccagccgccataactgtaatccctttcaccatcagctgcccctccgttcgagccgtcgacgccctaatcctatcaccttctggccgcccaaatccctttcggctcctgccgccctctttttgaggcgcatgccatggagtcgttggtcttcgagtgccaggccatggcggcacagaccatggagtcacaggctatgatggcgcaggtcttagtctttaggccatggagtcgcaatcaggcgttcaagatgctctgagacttgagtcaggttcgtccaacatgcatgatggattcagtacaccaaaaaaatgaatatccttctgacatcgctgtccatctgtgtacttgattgtgatgataaattgaagccagtaattggaacgtcatttggttctctagaggaagtggaagaattgtacaagatatatgctcttgagaattttattggctgcaacattccagaacatatcgaaatccatccaccatccgatgttcactcccagtaaaaacatcaagaaatccaaagaactatttaaatcgtgtaaagggaaaaatagtaaagtgagacgaaggtagtcaaacagtcatattgctaaagtattacaggtaggagaaagaatccaacagcatgttgaggagcttctacagtgttattggcatgggaattttgttagcttctatagtgctattggtatgtcgagtagcttcaaccaggtatggactttttaactctagcgagagtttttagttgtcacacactaatggctgaattggggaaagtagtaactgaaaatgagagtaaccagcatcaacaatagtttgctttcaaaattcagaaggatagttccttgttttgtacaacattttttaagtataagagttttaaaatagaacatagcagcatgaaaggcttattttttccagaacatagtttaatagacttaataagtttaaacgacccataattctggtgctttattctatcttttatctgttgggtcattaaaatctatagactttagcgtcctatcttgtcatgtattagtgacgtatggaatcatttggagtcaatgggaagattaatagccaaaaatgttagaagatcatgcttgtttagacctctatgttgtacggaccagcaggtttgaaatgatgttgtcactgttccttgttctcaactgttgtattaagcaagtactaccatggggatgtggggtgggactagtccaaatgttgtagttactagttactagagttagcaagcagaggaattggtaatggtgatgcgttctcaacttcttatgtgtgcttgtcgttcgatcgtccatcagtttttagatgtacaaaacatatcaccgcattgacgtccatggctgcgagtacagtacagtggtcggccggttccaagtttacaaacagcaagcagtactagtgagtaggtgacattagcagtacaaacccttaaacctgcaactaagcacgacagagagtaggggcggagctcaggcccgttcatctcggttaggtggaagaaatggtcggcatatgtgtttctttcatgctttactgcatcctgcatttttattttgttgcactggcacgaccgcctggcactggcaccccctcgtactgatctgatgttgtaatagcaattagcatgcgttcagattagttaagatatggagctgagctcgctgccaacaaggtcaatactagcatccatttttttgcaaactaggacacaatcaggtgaaaagcttgagctgcattctttgtctatttaactttactagttctgtttgtttcatggtatgctgttatttacaagtaagcccaggagattcttttattgatgttaaacaattacttttggatgctcctgaaacatgcttctatgcatgatacaatttgatattgcatactaaagatgggttagctcatcagttagaagactacaaggaaatatctgaaatagcagatataacttctagtggatgttcactggagatggttgctagtatgtaacaacttctagtttcttctctattgtcatatatacttatatagtgcttattttctggagctaaagtaaaagttctttcagcaacatacaatgagaggtctattaggtcacatctccgacgtgtgaaggggctactatctctgtctagtctttatgtttccctatcaacgtccttagctctgcttcaggagtccgctcaaggaaaatttgcaggtacatcaggacttatatatgtgttctctgttcactgatgcggctggagcgtcatgtcaactgctcaccctccccctaacaaattaaactagactgatgagtggagcttcatgttgggatgatccatgcaccttttaagttttggaacgtcgtactcaaatgtagcttgtgttagttgaacctatcgtactttcttttggaattaaattatatgatatttaaacatgtttgatgtttaatacttgtgttggatgctttatgcttcaaatatatatgcattatacaaaaagttgtgtacacttatgttgtttgatgaaattgtatgcacgatttggattgaattcaattgaatgctgattttcatt

SEQ ID NO: 25960 - DNA, 2635 bp, Zea Mays
cccgctaaacctattcgacccgtcaacgaacagatccaccctcaccagccgcctgacgttcgagccgcaccagccctaaacccttccacctccagccgccataactgtaatccctttcaccatcagctgcccctccgttcgagccgtcgacgccctaatcctatcaccttctggccgcccaaatccctttcggctcctgccgccctctttttgaggcgcatgccatggagtcgttggtcttcgagtgccaggccatggcggcacagaccatggagtcacaggctatgatggcgcaggtcttagtctttaggccatggagtcgcaatcaggcgttcaagatgctctgagacttgagtcagtgcctcgttgcagctgtccatctgtgtacttgattgtgatgataaattgaagccagtaattggaacgtcatttggttctctagaggaagtggaagaattgtacaagatatatgctcttgagaattttattggctgcaacattccagaacatatcgaaatccatccaccatccgatgttcactcccagtaaaaacatcaagaaatccaaagaactatttaaatcgtgtaaagggaaaaatagtaaagtgagacgaaggtagtcaaacagtcatattgctaaagtattacaggtaggagaaagaatccaacagcatgttgaggagcttctacagtgttattggcatgggaattttgttagcttctatagtgctattggtatgtcgagtagcttcaaccaggtatggactttttaactctagcgagagtttttagttgtcacacactaatggctgaattggggaaagtagtaactgaaaatgagagtaaccagcatcaacaatagtttgctttcaaaattcagaaggatagttccttgttttgtacaacattttttaagtataagagttttaaaatagaacatagcagcatgaaaggcttattttttccagaacatagtttaatagacttaataagtttaaacgacccataattctggtgctttattctatcttttatctgttgggtcattaaaatctatagactttagcgtcctatcttgtcatgtattagtgacgtatggaatcatttggagtcaatgggaagattaatagccaaaaatgttagaagatcatgcttgtttagacctctatgttgtacggaccagcaggtttgaaatgatgttgtcactgttccttgttctcaactgttgtattaagcaagtactaccatggggatgtggggtgggactagtccaaatgttgtagttactagttactagagttagcaagcagaggaattggtaatggtgatgcgttctcaacttcttatgtgtgcttgtcgttcgatcgtccatcagtttttagatgtacaaaacatatcaccgcattgacgtccatggctgcgagtacagtacagtggtcggccggttccaagtttacaaacagcaagcagtactagtgagtaggtgacattagcagtacaaacccttaaacctgcaactaagcacgacagagagtaggggcggagctcaggcccgttcatctcggttaggtggaagaaatggtcggcatatgtgtttctttcatgctttactgcatcctgcatttttattttgttgcactggcacgaccgcctggcactggcaccccctcgtactgatctgatgttgtaatagcaattagcatgcgttcagattagttaagatatggagctgagctcgctgccaacaaggtcaatactagcatccatttttttgcaaactaggacacaatcaggtgaaaagcttgagctgcattctttgtctatttaactttactagttctgtttgtttcatggtatgctgttatttacaagtaagcccaggagattcttttattgatgttaaacaattacttttggatgctcctgaaacatgcttctatgcatgatacaatttgatattgcatactaaagatgggttagctcatcagttagaagactacaaggaaatatctgaaatagcagatataacttctagtggatgttcactggagatggttgctagtatgtaacaacttctagtttcttctctattgtcatatatacttatatagtgcttattttctggagctaaagtaaaagttctttcagcaacatacaatgagaggtctattaggtcacatctccgacgtgtgaaggggctactatctctgtctagtctttatgtttccctatcaacgtccttagctctgcttcaggagtccgctcaaggaaaatttgcaggacttatatatgtgttctctgttcactgatgcggctggagcgtcatgtcaactgctcaccctccccctaacaaattaaactagactgatgagtggagcttcatgttgggatgatccatgcaccttttaagttttggaacgtcgtactcaaatgtagcttgtgttagttgaacctatcgtactttcttttggaattaaattatatgatatttaaacatgtttgatgtttaatacttgtgttggatgctttatgcttcaaatatatatgcattatacaaaaagttgtgtacacttatgttgtttgatgaaattgtatgcacgatttggattgaattcaattgaatgctgattttcatt

SEQ ID NO: 25961 - DNA, 2537 bp, Zea Mays
cccgctaaacctattcgacccgtcaacgaacagatccaccctcaccagccgcctgacgttcgagccgcaccagccctaaacccttccacctccagccgccataactgtaatccctttcaccatcagctgcccctccgttcgagccgtcgacgccctaatcctatcaccttctggccgcccaaatccctttcggctcctgccgccctctttttgaggcgcatgccatggagtcgttggtcttcgagtgccaggccatggcggcacagaccatggagtcacaggctatgatggcgcaggtcttagtctttaggccatggagtcgcaatcaggcgttcaagatgctctgagacttgagtcaggtctgtccatctgtgtacttgattgtgatgataaattgaagccagtaattggaacgtcatttggttctctagaggaagtggaagaattgtacaagatatatgctcttgagaattttattggctgcaacattccagaacatatcgaaatccatccaccatccgatgttcactcccagtaaaaacatcaagaaatccaaagaactatttaaatcgtgtaaagggaaaaatagtaaagtgagacgaaggtagtcaaacagtcatattgctaaagtattacaggtaggagaaagaatccaacagcatgttgaggagcttctacagtgttattggcatgggaattttgttagcttctatagtgctattggtatgtcgagtagcttcaaccaggtatggactttttaactctagcgagagtttttagttgtcacacactaatggctgaattggggaaagtagtaactgaaaatgagagtaaccagcatcaacaatagtttgctttcaaaattcagaaggatagttccttgttttgtacaacattttttaagtataagagttttaaaatagaacatagcagcatgaaaggcttattttttccagaacatagtttaatagacttaataagtttaaacgacccataattctggtgctttattctatcttttatctgttgggtcattaaaatctatagactttagcgtcctatcttgtcatgtattagtgacgtatggaatcatttggagtcaatgggaagattaatagccaaaaatgttagaagatcatgcttgtttagacctctatgttgtacggaccagcaggtttgaaatgatgttgtcactgttccttgttctcaactgttgtattaagcaagtactaccatggggatgtggggtgggactagtccaaatgttgtagttactagttactagagttagcaagcagaggaattggtaatggtgatgcgttctcaacttcttatgtgtgcttgtcgttcgatcgtccatcagtttttagatgtacaaaacatatcaccgcattgacgtccatggctgcgagtacagtacagtggtcggccggttccaagtttacaaacagcaagcagtactagtgagtaggtgacattagcagtacaaacccttaaacctgcaactaagcacgacagagagtaggggcggagctcaggcccgttcatctcggttaggtggaagaaatggtcggcatatgtgtttctttcatgctttactgcatcctgcatttttattttgttgcactggcacgaccgcctggcactggcaccccctcgtactgatctgatgttgtaatagcaattagcatgcgttcagattagttaagatatggagctgagctcgctgccaacaaggtcaatactagcatccatttttttgcaaactaggacacaatcaggtgaaaagcttgagctgcattctttgtctatttaactttactagttctgtttgtttcatggtatgctgttatttacaagtaagcccaggagattcttttattgatgttaaacaattacttttggatgctcctgaaacatgcttctatgcatgatacaatttgatattgcatactaaagatgggttagctcatcagttagaagactacaaggaaatatctgaaatagcagatataacttctagtggatgttcactggagatggttgctacaacatacaatgagaggtctattaggtcacatctccgacgtgtgaaggggctactatctctgtctagtctttatgtttccctatcaacgtccttagctctgcttcaggagtccgctcaaggaaaatttgcaggacttatatatgtgttctctgttcactgatgcggctggagcgtcatgtcaactgctcaccctccccctaacaaattaaactagactgatgagtggagcttcatgttgggatgatccatgcaccttttaagttttggaacgtcgtactcaaatgtagcttgtgttagttgaacctatcgtactttcttttggaattaaattatatgatatttaaacatgtttgatgtttaatacttgtgttggatgctttatgcttcaaatatatatgcattatacaaaaagttgtgtacacttatgttgtttgatgaaattgtatgcacgatttggattgaattcaattgaatgctgattttcatt

SEQ ID NO: 25962 - DNA, 823 bp, Zea Mays
cgctcgctcactctccacccatcttcctccactcctcctcgccgcgaagaaccaccatggccgatgtgagctaagctcatggtcgcgctcccaccgcccactattgtccagatcgagcccagtccttgcttctccgtcgtgagccgagaacttggagttcgtgcttgagctcagaggaacctcggacgcacaccgtcgatgtcgccgagcttcggtttgcgccggcgagcgtggatcgaaagccaccgcccaccgttcgtgaagccaaggacgtcgtcgacttcgccatcgaccaccgcttctccccgctcctcgcatcattaacctcaccgtcgcaacatacaatgagaggtctattaggtcacatctccgacgtgtgaaggggctactatctctgtctagtctttatgtttccctatcaacgtccttagctctgcttcaggagtccgctcaaggaaaatttgcaggacttatatatgtgttctctgttcactgatgcggctggagcgtcatgtcaactgctcaccctccccctaacaaattaaactagactgatgagtggagcttcatgttgggatgatccatgcaccttttaagttttggaacgtcgtactcaaatgtagcttgtgttagttgaacctatcgtactttcttttggaattaaattatatgatatttaaacatgtttgatgtttaatacttgtgttggatgctttatgcttcaaatatatatgcattatacaaaaagttgtgtacacttatgttgtttgatgaaattgtatgcacgatttggattgaattcaattgaatgctgattttcatt

SEQ ID NO: 25963 - DNA, 4077 bp, Zea Mays
cttcaaaaatcaagttgattatgcggataccgcaaacactgcaaattcggttgttccctacccttctagagtaatctctccacacacacactcacacgctgctgccggctgccctcctcccgccccactcgtcccctccgaaccaagtccgatccatccatccccaaatttctcctctcagcgcgtggggcagtggcggcggcagcgtgggcgcgcggaccgctacgggcacgggagcagcggtggctgcgcaggcagctgtcagcatgcggcatggtgactacgggagcccaggcggcgccggtgcggctgcagccggcggcgggcgaccgtgaggcggctgcgggagcggtgaagtccggtggcgcctgctttgttttgtgttcctatttttgatttgcgaaaggatccaagagagagaggagggggagaaggcgagaatccaagacaagagcgagcatggagtttgctacgggtgccatgggtaccctcctccccaagctgggcatgctgctgcaggaagaactccacctgaagaataatgtgaaggaggggatcaagagcctcactgccgagcttgagagcatgcaagctgcacttgtgaaggtgtctgacgtgccattagaccagcttgacccaaacgtcaagatttgggctaatgaagtcagggggctgtcctatgatattgaggacagactcgactccttcaaggtgcgcatggagggtcttgattcaaccaagcgcaaaaccatcatgggattcatccaacaaacccgtggcttggtcaccaagttcaagattcgccatgtaatatttgatgacattaaagacttcgggagccaagtaaaggaggtgaaggagcggtatgacaggtttccgaccttgttggcattgacgaagaagctaaggagctaatgaataatttgtttgaagatggtgacgagccagcgaaaaagatcaagacagtctctgttgttggatttggaggactcggcaagactactcttgttaaagcagtctatgacaaggttaagaaggagtttgattgcagtgcttttgtatcaataggtcagaaatgtgatctcaagaaagttttcaaggacgttctttatgatcttgacaagcaaaatcatgaaaatatcattgcatcagaaatggatgaaaaacaactcattgataagctacaggaattccttgcagacaagaggtacttggttgttattgatgacatatgggatatatcaacatggaagctgattagatgtgctttggtggaaagtaaccctggaagtagaataatcataactactcgcatttgtgaagttgccaaaaaggttggtggtgtttacaacaagaaaccactctctcttgatgactccaagacattattctatactagagtatttgctggtgaaagcatgagtcttgataacatatctggtgaagtgtgcaacaaaatcctaagaaaatgtggtggtgtgccattgtccatcattacgatagctagtctgcttgttggtaaacagagggaggactggtctaaggtgtatgattatattggttttgggcatgaagataacgaggttattgggaacatgagaaagatattagctttcagctattacaatctacctccttatctaaagacatgcttattgcacctaagcatatttccagaagatcacaagattgagaaaaattcattgatatggaggtggatagctgaaggttttgttattggcagagaagaactagggttatttgaggttggagagagctatttcaatgagctcataaatagaagcatgatccggtggatagagctctctagtagaagcaagattcgagatggttgtggtattcatgatatggtgcttgatcttatccgcactttgtcaggtgaagtaaacttggtcacggtatcagatgtggagcagcagtgtaccacatcatcatcatattcaccagtcagaagcattagcgctcgaagattagccttccacaaaaaaagaagcattgaacacaaccctggcacagaaataggacaggtgagatcattcaatgctttcaactgctctggtagtaggatgccccgacttttaagcttcagggtcttacgtgtactagctctggagaactgtaatttctcagcaggaaactgttgccttggaaatattggcaaattgcatcagctgaggtacctagggctagtggagacatccattcgtgacgacttgctgcctggagaaacaggacgcctcaagtttctgcagacactagatgtaagacgaagtggcataaaaatattgccagcgtctgttggtgagctaaggaaactgatgtgcctgcgtgctaccgagggcacaaggatgatggccgagattgggaagctggcgtcactggaagagcttgaggtacactctgtggacaagtcgccaaacttcgccacggggctggggcagctaaccaaggtgagggtgcttgagatccatttcgacgaaatggacgagagcacagagaaggctctcatggagtccctgcgcaacctgcggaaaatccagagtctgcagatatggtccaagaaggagaggacaattgaccttggcggcttgttggaagactggacgccaaccccttcaaatctccgtcaactgatgctgcgtggcatccatttgcccaggcgtccgtcatggattgatccctcatgtgtcccgctcctctcgtacttgtcgctcacggtccaggccgtgcaagtgcaggatctagaaatcctcgggaggctgccgttgctcagctacctctacatctggagtgagggcatcaactgcttatcctatactgctaccagcagagacgagtttcagaatctgagatatctggacacaaacctggagatcatgtgtggacagcagggagcactgcctatggttgagaagttgacatgccgtgccagcatggggaagtatgttgccttcgccaggagcagcatgcctttcgacgatggcagcgtggtgaatcctgctgctgttgctgaggcagaattgccagtaattctacctttggacattggctggcccgtgaacatgccttgcctccggggcatcacctatttgctggactaccaggactgcagtgccaaggagtgggctcatgtggagacattgctcatgcacgtgagaaaaatccaccccaactgtccacccttccgaatcaaaaagaactgcagagacaaggagattactatgatcgacgcaatcatctaccttgaagatgtcaaggatgtgttcaaggacaacccctccaaatactcggagtttcttgatctcttgcaagattataggagagacagaatcaaaatcaaagatttgatcatccgtctcaagaccctatttactggacatgatcctaatctcatccttgacttcagcgtcttcctgcccggggagtgggccatcactctcggggacctgtagaagaagccccttcatgatcgattctagctaggccatcacccatttagttaataagaccaagtcgggatgacggcgatggatctgatcatgttacccgcacaaatggcgaagaagaggacgatactcatgaagcgtaatatgcaatccctgtcaccagtggatgatctttgcttcagttaattcatcatccaaagaaaaagagaggaaaggctgatataagaacaaaaacattttcccctctttgttccgaccgctgtgttccatcatggaagtcttcctctagaaaaaaagacctatattttttaaagaacacctagtgcccggcaagaaaatacctaaataaaatttgtcggtatttagtatttatatatacttctttggtatttagtatttatatatacttctttggtatttagtatttatatatacttatttgtttctttgtcgttgcatatgaatactccctcttatcaaaaaaatgatgttttttagtttgttataagacaaactatataaaatttagccaaatttatacactaaatgcttttttctgaaatacacgggaggattgtatatcattgcattaatagaagaaagaggggaa

SEQ ID NO: 25964 - DNA, 3022 bp, Zea Mays
cctcctactttatggtacttggttgttattgatgacatatgggatatatcaacatggaagctgattagatgtgctttggtggaaagtaaccctggaagtagaataatcataactactcgcatttgtgaagttgccaaaaaggttggtggtgtttacaacaagaaaccactctctcttgatgactccaagacattattctatactagagtatttgctggtgaaagcatgagtcttgataacatatctggtgaagtgtgcaacaaaatcctaagaaaatgtggtggtgtgccattgtccatcattacgatagctagtctgcttgttggtaaacagagggaggactggtctaaggtgtatgattatattggttttgggcatgaagataacgaggttattgggaacatgagaaagatattagctttcagctattacaatctacctccttatctaaagacatgcttattgcacctaagcatatttccagaagatcacaagattgagaaaaattcattgatatggaggtggatagctgaaggttttgttattggcagagaagaactagggttatttgaggttggagagagctatttcaatgagctcataaatagaagcatgatccggtggatagagctctctagtagaagcaagattcgagatggttgtggtattcatgatatggtgcttgatcttatccgcactttgtcaggtgaagtaaacttggtcacggtatcagatgtggagcagcagtgtaccacatcatcatcatattcaccagtcagaagcattagcgctcgaagattagccttccacaaaaaaagaagcattgaacacaaccctggcacagaaataggacaggtgagatcattcaatgctttcaactgctctggtagtaggatgccccgacttttaagcttcagggtcttacgtgtactagctctggagaactgtaatttctcagcaggaaactgttgccttggaaatattggcaaattgcatcagctgaggtacctagggctagtggagacatccattcgtgacgacttgctgcctggagaaacaggacgcctcaagtttctgcagacactagatgtaagacgaagtggcataaaaatattgccagcgtctgttggtgagctaaggaaactgatgtgcctgcgtgctaccgagggcacaaggatgatggccgagattgggaagctggcgtcactggaagagcttgaggtacactctgtggacaagtcgccaaacttcgccacggggctggggcagctaaccaaggtgagggtgcttgagatccatttcgacgaaatggacgagagcacagagaaggctctcatggagtccctgcgcaacctgcggaaaatccagagtctgcagatatggtccaagaaggagaggacaattgaccttggcggcttgttggaagactggacgccaaccccttcaaatctccgtcaactgatgctgcgtggcatccatttgcccaggcgtccgtcatggattgatccctcatgtgtcccgctcctctcgtacttgtcgctcacggtccaggccgtgcaagtgcaggatctagaaatcctcgggaggctgccgttgctcagctacctctacatctggagtgagggcatcaactgcttatcctatactgctaccagcagagacgagtttcagaatctgagatatctggacacaaacctggagatcatgtgtggacagcagggagcactgcctatggttgagaagttgacatgccgtgccagcatggggaagtatgttgccttcgccaggagcagcatgcctttcgacgatggcagcgtggtgaatcctgctgctgttgctgaggcagaattgccagtaattctacctttggacattggctggcccgtgaacatgccttgcctccggggcatcacctatttgctggactaccaggactgcagtgccaaggagtgggctcatgtggagacattgctcatgcacgtgagaaaaatccaccccaactgtccacccttccgaatcaaaaagaactgcagagacaaggagattactatgatcgacgcaatcatctaccttgaagatgtcaaggatgtgttcaaggacaacccctccaaatactcggagtttcttgatctcttgcaagattataggagagacaggtcccttctattgcatgctctcctttagtcctttcatatcttggcatcgcttgcattgcatgccaagcatgatgtgtccgtttcgttctatcgttaacactataatattcctccttgtttgtttttcttatttatcagaatcaaaatcaaagatttgatcatccgtctcaagaccctatttactggacatgatcctaatctcatccttgacttcagcgtcttcctgcccggggagtgggccatcactctcggggacctgtagaagaagccccttcatgatcgattctagctaggccatcacccatttagttaataagaccaagtcgggatgacggcgatggatctgatcatgttacccgcacaaatggcgaagaagaggacgatactcatgaagcgtaatatgcaatccctgtcaccagtggatgatctttgcttcagttaattcatcatccaaagaaaaagagaggaaaggctgatataagaacaaaaacattttcccctctttgttccgaccgctgtgttccatcatggaagtcttcctctagaaaaaaagacctatattttttaaagaacacctagtgcccggcaagaaaatacctaaataaaatttgtcggtatttagtatttatatatacttctttggtatttagtatttatatatacttctttggtatttagtatttatatatacttatttgtttctttgtcgttgcatatgaatactccctcttatcaaaaaaatgatgttttttagtttgttataagacaaactatataaaatttagccaaatttatacactaaatgcttttttctgaaatacacgggaggattgtatatcattgcattaatagaagaaagaggggaa

SEQ ID NO: 25965 - DNA, 952 bp, Zea Mays
cttcaaaaatcaagttgattatgcggataccgcaaacactgcaaattcggttgttccctacccttctagagtaatctctccacacacacactcacacgctgctgccggctgccctcctcccgccccactcgtcccctccgaaccaagtccgatccatccatccccaaatttctcctctcagcgcgtggggcagtggcggcggcagcgtgggcgcgcggaccgctacgggcacgggagcagcggtggctgcgcaggcagctgtcagcatgcggcatggtgactacgggagcccaggcggcgccggtgcggctgcagccggcggcgggcgaccgtgaggcggctgcgggagcgtcgggatgacggcgatggatctgatcatgttaccggcacaaatggcgaagaagaggacgatacccatgaagcgtaatatgcaatccctgtcaccagtggaggatctttgcttcagttaattcattgtcaaggataatcttgtttacttagtcgttgtgcttagggcctgtttatttagggtgtgtttggtttgacttttggcttttggcttttgccccctaaaagccaaaagccaaccaaagggttggatctaagaagcagctttttctaaaagctgactttctcacagtgcaaatctgaaagcacacctgaacctgcttttagtggcttttcggatggaattgtgaaaacatatatcgaagaactttgaacgacttttagtggtttccaccaaatggtttttagctttttaacggctcacagcctacagcagctttttccacagctcacagcccacagcaacttttttcacagccacagcccaaccaaacagacccttacccccagattatataatctggattaaataatcctaagaggcaaacaaacagtccagcttatttgcccagattatgggcctgtttgtttacccccatggatt

SEQ ID NO: 25966 - DNA, 4669 bp, Zea Mays
gattgagctcacgctggagattaatctcataagaagaaaaaatctttgtaagttatccagcacaatgtacaagtacaatagattgcggagtaccttcttcacacatatacaaatactcactgatgaacctctattatttgaggaagggattcatatcaagggccatataatttgaaatctctatattctcttctacgctcaaaccaatatttatttttcctttgcttaatgtgcctgcttacaagttagaagaagggtggaacatgcctagctccttgccgtgtcccttgatcgtgcttcagcttgctgacacatgcagtcaggcataggaagggtgtatatggattcctgtggtttccttaatgcgaaacctttcatctcactgtgccgacgcatgtcctgcatgtggtgcttgaatcgatcccatctacgtacaagattagctttgatactccacaactagatgatgattacgaaaaaaaaatcataaaccctttcgtgttctgcccattgcaggtgttcagaactaaaagaaagtaaccagttacagaagattcaatgtatgtcagtgtcagcatgcacataaaggattcggtatactgtaattagattagaataaacacagaggcaatcatgtttggcgaaacctttatgaaataagggtcatcagatgaccgttatcttggacacaaaaatggctacatgtggacgaatttcaagccacattcattgacagtttatgaaacttcacgaggatgaacgaaattcaatttgctgagcaagaaggccggaagttcactggagtttatggaccacagggagacgatgagaaagtgtccttcctgcaggaactcagggatatcagggcgatctacagtggcccttggctagtagcaggtgactttaatctcatctatcaggctgctgacaaaaacaatgcaaacctggatacagcgatgatggcaagtttcagacgcttcttgaatgatatggaggtcaaggagatccccctgcttggaaggaaatacacttggtctaatgagcggcagtcccgtagacccgtactttggttaggctggacagagccttttgctgtgttgattgggatggtttatttccggagtcaattctgcaaagcatgacagcaggagtgtctgaccactaccccctcatacttggcctcaaagtgaagactgctggtaagcgtcggttccattttgaaagtttttggaccaaaataccgggcttcttggatgcggtgaagcagaattaggaagctcctgtgtcttcaaattgtgcagttgagcgcctatttctgaaattgcaaaggctcagtaaagggctgcagaaatggggtcagaggaaggtgggcaacatcaaagttcagatggaaatggccaaagaaatcttacatcgactggaaattgagcgtgattcaagggatctctctgaacaggagtggctgcggaggaagcttaaactacactgccttggcctggcctcccttgaaagaaccattgcccgcttgcggtcctgtatcctctatctccaagacggcgatgctaatacagccttcttccatcagcaagcaaggttcaggaagaagaatttcatacccaagcttaatgttggtgatcagatagcagtttcccaagaggacaagcaagcagttgtgctagacttttatgaaaacctgctggggaaagctgaagaaccaatttataccgttgaccttgcagaattgggtatacagcagattgagctctctcaactagatgctcctttcatggaagcggagctatgggcaactataaaagacatgccaatggacaaggcgccagggccagatggctttactgaccacttctataaatcttgctagagtatcatcaagggagatattttgatggctttagacgctatttatctgaggtcatgtcttcaaattttgtctcctgaattcggccttcattaccttgttacctaagaaacaggatgcttctcaggttacagattttcgccatatcagcttggtgcatagctttgctaaattagtaacaaaaataatggccaataggttggcccctgttctaccgattttgatcagccccaaccagactgcttttgtgaaaggtcaaagaattcatgataattttatgtttgtccaacaaacggtcaaggctctgcacaagaataagaagaaagaagctcacatcctccttaaacttgacatatctaaagcttttgattcggtctcctggtcctttttattggaaattcttaggcatattgggtttggacagcgatggattaatctcttatgtttgctgttatctacttcctctacacaagttctagtgaatggtgagccaggggagacaatttatcatagacgggggtttaagacagggagatcctttgtctccaatgctattcattttggtcatgaatattctgaatgcaataattgtatatgtctcacggaagtcctgtacagtcaaggattttccttgtacttatcttgggctaattggcaaacccacaaaggaggtcttgctgccattaattgataaggtggcagaatttttgccggggtggaaagcttccttaatgaaccgtgcaggcagattggtaatggttcgagtagtgttaactgctgctcctatttaccttttgattgccatggatctaccaaagtgggttctaaaagccatcgacaaaaggaggagttttctctgaaagggtcaggaacaagctaaaggaggtcactgtttggtctcttgggaaagggtgcagcggcctctggaatatggtggtcttggaattcataatctgtatctgcttggctgagcgttgcggatttgctggttgtggctgagaaaactgttcctagtagcctttgggcaggcctcccaactcaagtccctcgcaatgctcaggccctcttcaacattgcagtggacgtcattgttgggaacgttgagcaaacactcttctggacagacagatggctggatggccataccatatctgaagtgacacccagcttatttagtgctgtctcaaagcggacagccaagaggaagaggaagaggtagcccaagctctccaaaaccaaagatgggtggatgacatcaaaggagcgctcacagtccaggttatattcgagtacctaaaggtttggcacatggtagatggtctatttttgcagcaacatgtgccggaccaatttgtgtggagattaacacaatccggcattcacaagagtaagtcagcatatagtgcttatttcattggcaccatcacatttggaccttggagaagaatatggaagagctgggcacctcctcgctgtaagtttttcatttggctggtgttccataaccggtgttggacggttgatcgccttgctaagagaggcttgccccaccctgatgtgtgcccgctctgtgatcaagatgatgaagacattcaccatctcttggccagctgtgtttttgctagacaagtatgagcaagcatctttcttcagttgggccttactgccttggcgccagatgcttccgtttttcaaaatggtggtggacagtaatctcaactgctcctaaggaaatgcggaagggtctaaattcttttatcattttggtcgcttgggaactgtggaagcatcgtaatgcttgcttgtttgagcaacataggcccaatgttcaggaagttctcagggctgttagggatgaaagtagtctctggtgcagcgctggagcaaaaaagatccaagagctcatggccacggtgtctagtctgggggattaggagcctgttgaggttcctttccctggccgtctttcttttttctcttctgtttgggttttagcgcctccaggatgggaggcgtgacgtacagtgggtgtgcgtcaggtgttcttgtatttgttttggcactcctgcctttcttctaccttaatgaaatgacgtgcagctctcctgtgttgttcgagaaaaaagaaaagaaaatatacctgatatttggattgtcaaagagttgaactagcttccgcttatctggttttattgtctttgcatgtcctccatacatataacgtctgtgccccatcagaaagtgagggaaattgcttccttgtgtcatcacaaacacttcgctatgaagacagatagtatagtccagtgctgcaagtcttgatgaatgtccctacagagtgtgtaagaaggccaacttatcctttgatacctggcctccatttcttgatgcaatacaaacaggataagggaggcacactttctaaaatttgtttgaggactggaataatcaaggaaaaaggtaccttgaactgtgcaagctcctcaggtgtaactagagcgtgttttgtttgtagaaatggaaacaaccgtcgaagaggagtcatgtacttttcagcgttatatattttaccggatgcaacataaagggaagtagtgttgtcaaatcccattcctcgcagcatcattccgaccttgtataaactgaactagtaagaaaatataagttacatgataccttataaaacgaagcaaatacagttcccctaattttttatcagagatgaagtccaatcttataaattaggtgaggataattgttctattcaaggagtaagacaagacaatctag

SEQ ID NO: 25967 - DNA, 1924 bp, Zea Mays
ggctgaattgcgcttgtgcagcacatatcttttgagcaaatatgacagaagaaagctgtatatgttgtgatgagcagaacagggttggtgattgacaaagagactggcaagccaaaaggttatggcttttgcgagtacaaggacgaggaaactgctctaagtgcacggcggaaccttcagggttacgagatcaatggtcgtcagttacgggttgattttgctgaaaatgggaggaacactgacagaaatagagaaaagggtcgtggagggccagggatgacatctaatgttgatagtcagaaacagttagctggaacttctgttgttggagaggcaaaccttcaccagcctgttggtctcccaccagcaatacatgctgcgtctgtgatggctggcgtccttggtggagctcagactgcaaatgttcaaaacggtttacctgtccagtatggacttggaaatgatcctcttactcattatttggccagaatgtcaaggcatcagctgcatgaagtcatggttgaattgaagttcctagccactcaaaataaggaacaatccaaaactttgctgcaaggaattccacagctgccgaaggccctatttcaggcacaaataatgcttggaatggtgacaccacagatgatgcacatggcaaagagccaacagccctcgggctccttatcacaatcttcatctcacctcaatgagccatatccacagacagatgctatgattccgctagtctcaagaccttcaagtttgccaactaacataccaccgaacccaactgtcctacaggaacaaactgcaacactacatagtattcctcagcatcaacatgcatcccagcccctagtcaaaatgtttccacatggacatcagtctgggatcgccgcacaatctccaatgctacatcagcccctcgatggttcttctagtgttcctactcaatctcttgtgacctcagtaggcttaacctcacaagttcagctaccattggtgccacagcaccctggaccatctgtcatgcctacaagtgtaccacagctacctttgacccaccctcatcttgctcaggtagctgttgcacctgagaccctaccaaatgaaataagtactttggcagagtttacccatccttcaaagttgagaaaattggaggatggaacctcggtgcctggaatagtgaacagcagccatgctgtttatacagttccactgcaagcagtgggccctagcggaccatcagggagctatagtgctggttctgttagcttacagcaaccagggaatgaagagcagcttacgcctgatgtggagtcagctcttctgcagcaagtcttgcagctgacacccgagcagctgagttcgttgccaccagagcaacagcagcaggtgattgagctccagaagatgctttcagttagtaaatagaagcaactgagagctaacgcagcaaaaatgctggttgagaatctggcacatcacataatggcgagttggtaactagtggaaactggaaatgatcctcagatttgtttatgaagtcaccacgccgcctgtaacctgtaagcattgtcggcatcctgatgccatcaggatccatatggttttctttcttcagctcggagataaaagaaatgtgataggagaagagtagtgtggaaaaagggatacgcattatccatcactgttgtatcattatagggagaaaaaaataatatgtattcaaaggaactttttttcagcgcttctcgaatgggctgtagcatcacacatttttgtccttagagttttcttgcaaaaaatgtaggtaggaaatgaattttgtgtaagcttatgacgaagagattttttttatatttgttgccataggtctgtttaattgtttgaggcaagtttggaattcgtggaattgctt

SEQ ID NO: 25968 - DNA, 2107 bp, Zea Mays
agtccctcccctataataaacgggcgccacgcacgccacagccgcggcctgcgagcgaggcatacacatccacgggccacgcccaccggcatctcacggcggaagcagccaagcagccggccgggcgcctcccgtgccgccgctgagcatggccgctgctcccgtgggcgctcagaatcgctgcgtcttcgttggcaacataccatacgatgcgacagaggagcagctcgtgcagatttgcgaagaggttggcccagtcgtatccttcaggttggtgattgacaaagagactggcaagccaaaaggttatggcttttgcgagtacaaggacgaggaaactgctctaagtgcacggcggaaccttcagggttacgagatcaatggtcgtcagttacgggttgattttgctgaaaatgggaggaacactgacagaaatagagaaaagggtcgtggagggccagggatgacatctaatatagtcagaaacagttagctggaacttctgttgttggagaggcaaaccttcaccagcctgttggtctcccaccagcaatacatgctgcgtctgtgatggctggcgtccttggtggagctcagactgcaaatgttcaaaacggtttacctgtccagtatggacttggaaatgatcctcttactcattatttggccagaatgtcaaggcatcagctgcatgaagtcatggttgaattgaagttcctagccactcaaaataaggaacaatccaaaactttgctgcaaggaattccacagctgccgaaggccctatttcaggcacaaataatgcttggaatggtgacaccacagatgatgcacatggcaaagagccaacagccctcgggctccttatcacaatcttcatctcacctcaatgagccatatccacagacagatgctatgattccgctagtctcaagaccttcaagtttgccaactaacataccaccgaacccaactgtcctacaggaacaaactgcaacactacatagtattcctcagcatcaacatgcatcccagcccctagtcaaaatgtttccacatggacatcagtctgggatcgccgcacaatctccaatgctacatcagcccctcgatggttcttctagtgttcctactcaatctcttgtgacctcagtaggcttaacctcacaagttcagctaccattggtgccacagcaccctggaccatctgtcatgcctacaagtgtaccacagctacctttgacccaccctcatcttgctcaggtagctgttgcacctgagaccctaccaaatgaaataagtactttggcagagtttacccatccttcaaagttgagaaaattggaggatggaacctcggtgcctggaatagtgaacagcagccatgctgtttatacagttccactgcaagcagtgggccctagcggaccatcagggagctatagtgctggttctgttagcttacagcaaccagggaatgaagagcagcttacgcctgatgtggagtcagctcttctgcagcaagtcttgcagctgacacccgagcagctgagttcgttgccaccagagcaacagcagcaggtgattgagctccagaagatgctttcagttagtaaatagaagcaactgagagctaacgcagcaaaaatgctggttgagaatctggcacatcacataatggcgagttggtaactagtggaaactggaaatgatcctcagatttgtttatgaagtcaccacgccgcctgtaacctgtaagcattgtcggcatcctgatgccatcaggatccatatggttttctttcttcagctcggagataaaagaaatgtgataggagaagagtagtgtggaaaaagggatacgcattatccatcactgttgtatcattatagggagaaaaaaataatatgtattcaaaggaactttttttcagcgcttctcgaatgggctgtagcatcacacatttttgtccttagagttttcttgcaaaaaatgtaggtaggaaatgaattttgtgtaagcttatgacgaagagattttttttatatttgttgccataggtctgtttaattgtttgaggcaagtttggaattcgtggaattgctt

SEQ ID NO: 25969 - DNA, 1843 bp, Zea Mays
agaatttttctatggacacacgaagagtccgcaaaaaataatcaactcgttttttttctttctccgctcctccgagtgaccgagtccaaggcttcgttctgctctccggctctcccgcatccaccccgtctcatccccaatccgaccacctcatccctcgcctccatggccctacccctcgcgtcaccggcgggggcatgagccggtgactgctcacgcggcctcgtctgtctgcgcacgcgcgcggggtcggcgagtgagcattgcggcggtccgcgatcgcccgtgggggagcatggcgtcggcggcggggtcggccggcggggccggcgcggggtctggcgggctgaagacctacttcaagacccccgaggggcggcacaagctgcagtatgagaagacgcactcccccgccgtcgtgcactacagccacagcggcaagaccgtctcccagatgacagtggcatatttgaaggagaagccagcaggccagggttccacgccttcaacaccaagtgctggtagtgggatgcggtctgcagctgcaagacttctcggcactgggaatgggagccgggcacttagcttcgggagcaatggtaccagcagggctgtctcaggaagcagccgcatgggtggaggaattggtgtgtcgactagtgcaagtggatcgcaaggcatggcaaactatgatggaaagggcgcgtacatcatatttaatactgcagatacactcttcatcagtgatctcaactcacatgacaaagatccaataaagtccatccacttcagtagctcaaacccgctttgccatgcatttgacccagaggccaaggatgggcacgatctgcttgttggggtgttctcaggagatgtctattcaatgtcactgaggcagcagctgcaagatcctggaaagaagcccgtttcatatcagcattttgttaatagagacaaagataaagacaaagatccaagtcaaggtggcgctgccagcagtcggagcacttgtgttgcatgggttccagagcgtgaaggaatttttgttgttagtcatgctgatgggaatctgtacgtgtatgacaaatgcaaggatggaaatactgattggacatttccaactgtaaaggatcaaagtcaggtgctgatttcacatgcaaagtcgagtaagagcaatccaattgcaaggtggcacatctgtcaaggtgcaatcaatgacatttccttttcaccggatggtgcttacttggcaactgttgggcgtgatggccatttaagagtatttgactttgctaaagaacaactaatatttggtgggaaaagttactacggtgcactgttgtgttgctcttggagtgcggatggcaaatatttgttatcaggtggtgaagatgatcttgtgcaagtatggagcatggatgatagaaagatagttgcatggggtgaagggcataattcatgggttagtgcagtttcttttgatccgtattggtccccaccaaattctgatgaaacggaagaaaatgtcatgtatcgctttgggtcaattggacaggatacccaactgcttctctgggatctggcattggaagagattgctgtccctctacgccatccgtctggtggctcaccgacattcagtagtggaagcccatctgcacagtgggataatgcgtgccctccagccggtgttctacagccttctccacggatgcgagatgtgccaaagctctcacctctcgttgcacaccggactagagtatacccatttttggtgcaagtcttgttactcctgatggtgggcagccaatggattctctgcagatgagaggcttgtacttgc

SEQ ID NO: 25970 - DNA, 1610 bp, Zea Mays
agaatttttctatggacacacgaagagtccgcaaaaaataatcaactcgttttttttctttctccgctcctccgagtgaccgagtccaaggcttcgttctgctctccggctctcccgcatccaccccgtctcatccccaatccgaccacctcatccctcgcctccatggccctacccctcgcgtcaccggcgggggcatgagccggtgactgctcacgcggcctcgtctgtctgcgcacgcgcgcggggtcggcgagtgagcattgcggcggtccgcgatcgcccgtgggggagcatggcgtcggcggcggggtcggccggcggggccggcgcggggtctggcgggctgaagacctacttcaagacccccgaggggcggcacaagctgcagtatgagaagacgcactcccccgccgtcgtgcactacagccacagcggcaagaccgtctcccagatgacagtggcatatttgaaggagaagccagcaggccagggttccacgccttcaacaccaagtgctggtagtgggatgcggtctgcagctgcaagacttctcggcactgggaatgggagccgggcacttagcttcgggagcaatggtaccagcagggctgtctcaggaagcagccgcatgggtggaggaattggtgtgtcgactagtgcaagtggatcgcaaggcatggcaaactatgatggaaagggcgcgtacatcatatttaatactgcagatacactcttcatcagtgatctcaactcacatgacaaagatccaataaagtccatccacttcagtagctcaaacccgctttgccatgcatttgacccagaggccaaggatgggcacgatctgcttgttggggtgttctcaggagatgtctattcaatgtcactgaggcagcagctgcaagatcctggaaagaagcccgtttcatatcagcattttgttaatagagacaaagataaagacaaagatccaagtcaaggtggcgctgccagcagtcggagcacttgtgttgcatgggttccagagcgtgaaggaatttttgttgttagtcatgctgatgggaatctgtacgtgtatgacaaatgcaaggatggaaatactgattggacatttccaactgtaaaggatcaaagtcaggtgctgatttcacatgcaaagtcgagtaagagcaatccaattgcaaggtggcacatctgtcaaggtgcaatcaatgacatttccttttcaccggatggtgcttacttggcaactgttgggcgtgatggccatttaagagtatttgactttgctaaagaacaactaatatttggtgggaaaagttactacggtgcactgttgtgttgctcttggagtgcggatggcaaatatttgttatcaggtggtgaagatgatcttgtgcaagtatggagcatggatgatagaaagatagttgcatggggtgaagggcataattcatgggttagtgcagtttcttttgatccgtattggtccccaccaaattctgatgaaacggaagaaaatgtcatgtatcgctttgggtcaattggacaggtaattttttcctcgctcggaggaaatatttggtttttgttgtgggacactagag

SEQ ID NO: 25971 - DNA, 1781 bp, Zea Mays
agaatttttctatggacacacgaagagtccgcaaaaaataatcaactcgttttttttctttctccgctcctccgagtgaccgagtccaaggcttcgttctgctctccggctctcccgcatccaccccgtctcatccccaatccgaccacctcatccctcgcctccatggccctacccctcgcgtcaccggcgggggcatgagccggtgactgctcacgcggcctcgtctgtctgcgcacgcgcgcggggtcggcgagtgagcattgcggcggtccgcgatcgcccgtgggggagcatggcgtcggcggcggggtcggccggcggggccggcgcggggtctggcgggctgaagacctacttcaagacccccgaggggcggcacaagctgcagtatgagaagacgcactcccccgccgtcgtgcactacagccacagcggcaagaccgtctcccagatgacagtggcatatttgaaggagaagccagcaggccagggttccacgccttcaacaccaagtgctggtagtgggatgcggtctgcagctgcaagacttctcggcactgggaatgggagccgggcacttagcttcgggagcaatggtaccagcagggctgtctcaggaagcagccgcatgggtggaggaattggtgtgtcgactagtgcaagtggatcgcaaggcatggcaaactatgatggaaagggcgcgtacatcatatttaatactgcagatacactcttcatcagtgatctcaactcacatgacaaagatccaataaagtccatccacttcagtagctcaaacccgctttgccatgcatttgacccagaggccaaggatgggcacgatctgcttgttggggtgttctcaggagatgtctattcaatgtcactgaggcagcagctgcaagatcctggaaagaagcccgtttcatatcagcattttgttaatagagacaaagataaagacaaagatccaagtcaaggtggcgctgccagcagtcggagcacttgtgttgcatgggttccagagcgtgaaggaatttttgttgttagtcatgctgatgggaatctgtacgtgtatgacaaatgcaaggatggaaatactgattggacatttccaactgtaaaggatcaaagtcaggtgctgatttcacatgcaaagtcgaagcaatccaattgcaaggtggcacatctgtcaaggtgcaatcaatgacatttccttttcaccggatggtgcttacttggcaactgttgggcgtgatggccatttaagagtatttgactttgctaaagaacaactaatatttggtgggaaaagttactacggtgcactgttgtgttgctcttggagtgcggatggcaaatatttgttatcaggtggtgaagatgatcttgtgcaagtatggagcatggatgatagaaagatagttgcatggggtgaagggcataattcatgggttagtgcagtttcttttgatccgtattggtccccaccaaattctgatgaaacggaagaaaatgtcatgtatcgctttgggtcaattggacaggatacccaactgcttctctgggatctggcattggaagagattgctgtccctctacgccatccgtctggtggctcaccgacattcagtagtggaagcccatctgcacagtgggataatgcgtgccctccagccggtgttctacagccttctccacggatgcgagatgtgccaaagctctcacctctcgttgcacaccgggtacatgtagatcccctatccggcctggaattc

SEQ ID NO: 25972 - DNA, 1765 bp, Zea Mays
agaatttttctatggacacacgaagagtccgcaaaaaataatcaactcgttttttttctttctccgctcctccgagtgaccgagtccaaggcttcgttctgctctccggctctcccgcatccaccccgtctcatccccaatccgaccacctcatccctcgcctccatggccctacccctcgcgtcaccggcgggggcatgagccggtgactgctcacgcggcctcgtctgtctgcgcacgcgcgcggggtcggcgagtgagcattgcggcggtccgcgatcgcccgtgggggagcatggcgtcggcggcggggtcggccggcggggccggcgcggggtctggcgggctgaagacctacttcaagacccccgaggggcggcacaagctgcagtatgagaagacgcactcccccgccgtcgtgcactacagccacagcggcaagaccgtctcccagatgacagtggcatatttgaaggagaagccagcaggccagggttccacgccttcaacaccaagtgctggtagtgggatgcggtctgcagctgcaagacttctcggcactgggaatgggagccgggcacttagcttcgggagcaatggtaccagcagggctgtctcaggaagcagccgcatgggtggaggaattggtgtgtcgactagtgcaagtggatcgcaaggcatggcaaactatgatggaaagggcgcgtacatcatatttaatactgcagatacactcttcatcagtgatctcaactcacatgacaaagatccaataaagtccatccacttcagtagctcaaacccgctttgccatgcatttgacccagaggccaaggatgggcacgatctgcttgttggggtgttctcaggagatgtctattcaatgtcactgaggcagcagctgcaagatcctggaaagaagcccgtttcatatcagcattttgttaatagagacaaagataaagacaaagatccaagtcaaggtggcgctgccagcagtcggagcacttgtgttgcatgggttccagagcgtgaaggaatttttgttgttagtcatgctgatgggaatcttgcaaggatggaaatactgattggacatttccaactgtaaaggatcaaagtcaggtgctgatttcacatgcaaagtcgaagcaatccaattgcaaggtggcacatctgtcaaggtgcaatcaatgacatttccttttcaccggatggtgcttacttggcaactgttgggcgtgatggccatttaagagtatttgactttgctaaagaacaactaatatttggtgggaaaagttactacggtgcactgttgtgttgctcttggagtgcggatggcaaatatttgttatcaggtggtgaagatgatcttgtgcaagtatggagcatggatgatagaaagatagttgcatggggtgaagggcataattcatgggttagtgcagtttcttttgatccgtattggtccccaccaaattctgatgaaacggaagaaaatgtcatgtatcgctttgggtcaattggacaggatacccaactgcttctctgggatctggcattggaagagattgctgtccctctacgccatccgtctggtggctcaccgacattcagtagtggaagcccatctgcacagtgggataatgcgtgccctccagccggtgttctacagccttctccacggatgcgagatgtgccaaagctctcacctctcgttgcacaccgggtacatgtagatcccctatccggcctggaattc

SEQ ID NO: 25973 - DNA, 1770 bp, Zea Mays
agaatttttctatggacacacgaagagtccgcaaaaaataatcaactcgttttttttctttctccgctcctccgagtgaccgagtccaaggcttcgttctgctctccggctctcccgcatccaccccgtctcatccccaatccgaccacctcatccctcgcctccatggccctacccctcgcgtcaccggcgggggcatgagccggtgactgctcacgcggcctcgtctgtctgcgcacgcgcgcggggtcggcgagtgagcattgcggcggtccgcgatcgcccgtgggggagcatggcgtcggcggcggggtcggccggcggggccggcgcggggtctggcgggctgaagacctacttcaagacccccgaggggcggcacaagctgcagtatgagaagacgcactcccccgccgtcgtgcactacagccacagcggcaagaccgtctcccagatgacagtggcatatttgaaggagaagccagcaggccagggttccacgccttcaacaccaagtgctggtagtgggatgcggtctgcagctgcaagacttctcggcactgggaatgggagccgggcacttagcttcgggagcaatggtaccagcagggctgtctcaggaagcagccgcatgggtggaggaattggtgtgtcgactagtgcaagtggatcgcaaggcatggcaaactatgatggaaagggcgcgtacatcatatttaatactgcagatacactcttcatcagtgatctcaactcacatgacaaagatccaataaagtccatccacttcagtagctcaaacccgctttgccatgcatttgacccagaggccaaggatgggcacgatctgcttgttggggtgttctcaggagatgtctattcaatgtcactgaggcagcagctgcaagatcctggaaagaagcccgtttcatatcagcattttgttaatagagacaaagataaagacaaagatccaagtcaaggtggcgctgccagcagtcggagcacttgtgttgcatgggttccagagcgtgaaggaatttttgttgttagtcatgctgatgggaatcttgcaaggatggaaatactgattggacatttccaactgtaaaggatcaaagtcaggtgctgatttcacatgcaaagtcgagtaagagcaatccaattgcaaggtggcacatctgtcaaggtgcaatcaatgacatttccttttcaccggatggtgcttacttggcaactgttgggcgtgatggccatttaagagtatttgactttgctaaagaacaactaatatttggtgggaaaagttactacggtgcactgttgtgttgctcttggagtgcggatggcaaatatttgttatcaggtggtgaagatgatcttgtgcaagtatggagcatggatgatagaaagatagttgcatggggtgaagggcataattcatgggttagtgcagtttcttttgatccgtattggtccccaccaaattctgatgaaacggaagaaaatgtcatgtatcgctttgggtcaattggacaggatacccaactgcttctctgggatctggcattggaagagattgctgtccctctacgccatccgtctggtggctcaccgacattcagtagtggaagcccatctgcacagtgggataatgcgtgccctccagccggtgttctacagccttctccacggatgcgagatgtgccaaagctctcacctctcgttgcacaccgggtacatgtagatcccctatccggcctggaattc

SEQ ID NO: 25974 - DNA, 2145 bp, Zea Mays
gaaaccatccctgcaggtccctgctccctggttatattaagcagctcccaatctttggcatttgcaggcacacaacacaacacagttctccctttccactccagtccaaccaaccgtccatgggtttcttcatcccgccgcccaaggtgtacaagccggcggcagaggtcgacctcgggccggacagcgacgagcactacatcagccccaacgtgaaaggtccctcgctccctgaccagacctctcccatcccagctacagcggtgcacatgcatgcatgagaatgattgattgttcaattgagtagatggtcggaggcgatctccgtctccgcgcgcgcttgcttgctttcttccgctgctgatacatgcgtggaccgtcttgcagcgccccgcgtggccgggttcctggtgaagatgctggcctgggtgctggagacgccggtgcttggctggatcgtgctcggcgtcctcaagagggacaacctcgtctacaagctcgtctcggacgctgagatcccggagccgccgctattcacggccacccacacatggcaagcgatccaggagcagagcgtgcgcgtgacggagtcgaggctgtcgccggcggagcgcgtgcaggaggccgtcgcctgcgtcccagctgctgcccaggcccagttggagccggcggcggggttcaggcgctggacggtgcgggacttccacagggcgtacagatcaggacaggctacccctaccatggtggcgcggcgattcctggcagccgtggaggaatgttcagggccggacctgaacatgggcttcttcatcagctgcgaccctgcggacgtgctgcggcaggccgaggactccacccgcagataccagcaaggcttcttcctctgaactggaccgtcggcatgccggggatcctagcagcgacggtcgaggacacgctgatcgcgtcggtgccgggcagctagcttcttgtttctcccataaaccaaatctttcgattcacatgtctgctttgttttcacccatgaggtaatgaaaacaccacgcaaatgttgtctgctttcttttccgtgcttcctttcaggtatgcggcgattgctgatcagtcaaaaccaagccctttgcagcctgaactgaacctgcccatgctgacacgcacgaggtccatgcccagcatcaggctcgccaaatacgcaaagtggttcgacgacagctcggaggacatcaggagcctctgcgggaaggcgctgcagatgctgcgcacgcactacggctgggagagcgtggacgtcaccgtccctgagatcgaagagatgcggctggcgcactacgtgaccatgggctcggagtgcactgcctccctcgccgccaagtacctggacagcatggacaggtccgaggtcgggtgggacgtgcggatcgcgctcagcgcctacgggtccttcagcagccgagactacctcagcgcgcagcgtctccgatgccggcagatgtacttccacgagaagatcttcgagactgccgacgccatcgtcacgccgatgacaggggtgacggcgtacgcgctgcaggacgacgcgctgagcacgggggagctggactacatcaacggagctgcgctggtgaggtactcgatcgcgggcaacttcctggggctgccagcgatcaccgtgcccgtcgggtatgacaggggagggctccccgtggggctccagttcatcggccgcccgtggtcggaggccacgctgctgcacctcgcctacgccatgcaggaggcgtgcgggaagaaggtgctccggaagcccaaggtgcactacgacctcctcaccaaagagtagctccagcgagcatcgatccggcagattgctctctatgaggcgcgcggttgctgattgcatgcacctctagtgtgattgattgtttgtttgattgattgagcttgtgatgagagagtgggggaagttgaatggaatgccgtcaatgtcggacaactctcaactaggagaagaaaaaaaaacatggttgccagcaccatgcatgtgcaccaccattcgttttttaatgtcgtcctcattgaaacattatgtaagtattgtgtatacgtgtgctttagattcgtttttcactgcccaccggaaaatgaacc

SEQ ID NO: 25975 - DNA, 2310 bp, Zea Mays
gaaaccatccctgcaggtccctgctccctggttatattaagcagctcccaatctttggcatttgcaggcacacaacacaacacagttctccctttccactccagtccaaccaaccgtccatgggtttcttcatcccgccgcccaaggtgtacaagccggcggcagaggtcgacctcgggccggacagcgacgagcactacatcagccccaacgtgaaagcgccccgcgtggccgggttcctggtgaagatgctggcctgggtgctggagacgccggtgcttggctggatcgtgctcggcgtcctcaagagggacaacctcgtctacaagctcgtctcggacgctgagatcccggagccgccgctattcacggccacccacacatggcaagcgatccaggagcagagcgtgcgcgtgacggagtcgaggctgtcgccggcggagcgcgtgcaggaggccgtcgcctgcgtcccagctgctgcccaggcccagttggagccggcggcggggttcaggcgctggacggtgcgggacttccacagggcgtacagatcaggacaggctacccctaccatggtggcgcggcgattcctggcagccgtggaggaatgttcagggccggacctgaacatgggcttcttcatcagctgcgaccctgcggacgtgctgcggcaggccgaggactccacccgcagataccagcaaggtgcgtggtatatgcgtatagcagtagcagcggcggcgaaggcggcgtagcaggggcgccgctgtccgccatggacggagtactggtcgccgtcaaggacgagctcgattgcctgccgtacccgaccagcggcggcacgcggtggctggggtcggcgcggcggtgcgcggcggacgcggcgtgcgtggcgcagctgcgcgcgtgcggcgccgtgatggccggcaaggccaacatgcacgagctgggcgcgggcaccagcggcatcaacccgcaccacggcgccacgcgcaacccctacaacgtgggcagggtgtcgggcggctcctcgggcgggtccgccgccgccgtctgcgccgggctctgccccgtcgccctcggcgccgacggaggcgggtccgtgcgcatgccggcggcgctctgcggcgtcgtcgggttcaagcccactgccggccgcctctccaactccgggcttcttcctctgaactggaccgtcggcatgccggggatcctagcagcgacggtcgaggacacgctgatcgcgtatgcggcgattgctgatcagtcaaaaccaagccctttgcagcagcctgaactgaacctgcccatgctgacacgcacgaggtccatgcccagcatcaggctcgccaaatacgcaaagtggttcgacgacagctcggaggacatcaggagcctctgcgggaaggcgctgcagatgctgcgcacgcactacggctgggagagcgtggacgtcaccgtccctgagatcgaagagatgcggctggcgcactacgtgaccatgggctcggagtgcactgcctccctcgccgccaagtacctggacagcatggacaggtccgaggtcgggtgggacgtgcggatcgcgctcagcgcctacgggtccttcagcagccgagactacctcagcgcgcagcgtctccgatgccggcagatgtacttccacgagaagatcttcgagactgccgacgccatcgtcacgccgatgacaggggtgacggcgtacgcgctgcaggacgacgcgctgagcacgggggagctggactacatcaacggagctgcgctggtgaggtactcgatcgcgggcaacttcctggggctgccagcgatcaccgtgcccgtcgggtatgacaggggagggctccccgtggggctccagttcatcggccgcccgtggtcggaggccacgctgctgcacctcgcctacgccatgcaggaggcgtgcgggaagaaggtgctccggaagcccaaggtgcactacgacctcctcaccaaagagtagctccagcgagcatcgatccggcagattgctctctatgaggcgcgcggttgctgattgcatgcacctctagtgtgattgattgtttgtttgattgattgagcttgtgatgagagagtgggggaagttgaatggaatgccgtcaatgtcggacaactctcaactaggagaagaaaaaaaaacatggttgccagcaccatgcatgtgcaccaccattcgttttttaatgtcgtcctcattgaaacattatgtaagtattgtgtatacgtgtgctttagattcgtttttcactgcccaccggaaaatgaacc

SEQ ID NO: 25976 - DNA, 2432 bp, Zea Mays
gaaaccatccctgcaggtccctgctccctggttatattaagcagctcccaatctttggcatttgcaggcacacaacacaacacagttctccctttccactccagtccaaccaaccgtccatgggtttcttcatcccgccgcccaaggtgtacaagccggcggcagaggtcgacctcgggccggacagcgacgagcactacatcagccccaacgtgaaaggtccctcgctccctgaccagacctctcccatcccagctacagcggtgcacatgcatgcatgagaatgattgattgttcaattgagtagatggtcggaggcgatctccgtctccgcgcgcgcttgcttgctttcttccgctgctgatacatgcgtggaccgtcttgcagcgccccgcgtggccgggttcctggtgaagatgctggcctgggtgctggagacgccggtgcttggctggatcgtgctcggcgtcctcaagagggacaacctcgtctacaagctcgtctcggacgctgagatcccggagccgccgctattcacggccacccacacatggcaagcagcgatccaggagcagagcgtgcgcgtgacggagtcgaggctgtcgccggcggagcgcgtgcaggaggccgtcgcctgcgtcccagctgctgcccaggcccagttggagccggcggcggggttcaggcgctggacggtgcgggacttccacagggcgtacagatcaggacaggctacccctaccatggtggcgcggcgattcctggcagccgtggaggaatgttcagggccggacctgaacatgggcttcttcatcagctgcgaccctgcggacgtgctgcggcaggccgaggactccacccgcagataccagcaaggggcgccgctgtccgccatggacggagtactggtcgccgtcaaggacgagctcgattgcctgccgtacccgaccagcggcggcacgcggtggctggggtcggcgcggcggtgcgcggcggacgcggcgtgcgtggcgcagctgcgcgcgtgcggcgccgtgatggccggcaaggccaacatgcacgagctgggcgcgggcaccagcggcatcaacccgcaccacggcgccacgcgcaacccctacaacgtgggcagggtgtcgggcggctcctcgggcgggtccgccgccgccgtctgcgccgggctctgccccgtcgccctcggcgccgacggaggcgggtccgtgcgcatgccggcggcgctctgcggcgtcgtcgggttcaagcccactgccggccgcctctccaactccgggcttcttcctctgaactggaccgtcggcatgccggggatcctagcagcgacggtcgaggacacgctgatcgcgtatgcggcgattgctgatcagtcaaaaccaagccctttgcagcagcctgaactgaacctgcccatgctgacacgcacgaggtccatgcccagcatcaggctcgccaaatacgcaaagtggttcgacgacagctcggaggacatcaggagcctctgcgggaaggcgctgcagatgctgcgcacgcactacggctgggagagcgtggacgtcaccgtccctgagatcgaagagatgcggctggcgcactacgtgaccatgggctcggagtgcactgcctccctcgccgccaagtacctggacagcatggacaggtccgaggtcgggtgggacgtgcggatcgcgctcagcgcctacgggtccttcagcagccgagactacctcagcgcgcagcgtctccgatgccggcagatgtacttccacgagaagatcttcgagactgccgacgccatcgtcacgccgatgacaggggtgacggcgtacgcgctgcaggacgacgcgctgagcacgggggagctggactacatcaacggaggtatctgcgctggtgaggtactcgatcgcgggcaacttcctggggctgccagcgatcaccgtgcccgtcgggtatgacaggggagggctccccgtggggctccagttcatcggccgcccgtggtcggaggccacgctgctgcacctcgcctacgccatgcaggaggcgtgcgggaagaaggtgctccggaagcccaaggtgcactacgacctcctcaccaaagagtagctccagcgagcatcgatccggcagattgctctctatgaggcgcgcggttgctgattgcatgcacctctagtgtgattgattgtttgtttgattgattgagcttgtgatgagagagtgggggaagttgaatggaatgccgtcaatgtcggacaactctcaactaggagaagaaaaaaaaacatggttgccagcaccatgcatgtgcaccaccattcgttttttaatgtcgtcctcattgaaacattatgtaagtattgtgtatacgtgtgctttagattcgtttttcactgcccaccggaaaatgaacc

SEQ ID NO: 25977 - DNA, 2285 bp, Zea Mays
gaaaccatccctgcaggtccctgctccctggttatattaagcagctcccaatctttggcatttgcaggcacacaacacaacacagttctccctttccactccagtccaaccaaccgtccatgggtttcttcatcccgccgcccaaggtgtacaagccggcggcagaggtcgacctcgggccggacagcgacgagcactacatcagccccaacgtgaaagcgccccgcgtggccgggttcctggtgaagatgctggcctgggtgctggagacgccggtgcttggctggatcgtgctcggcgtcctcaagagggacaacctcgtctacaagctcgtctcggacgctgagatcccggagccgccgctattcacggccacccacacatggcaagcagcgatccaggagcagagcgtgcgcgtgacggagtcgaggctgtcgccggcggagcgcgtgcaggaggccgtcgcctgcgtcccagctgctgcccaggcccagttggagccggcggcggggttcaggcgctggacggtgcgggacttccacagggcgtacagatcaggacaggctacccctaccatggtggcgcggcgattcctggcagccgtggaggaatgttcagggccggacctgaacatgggcttcttcatcagctgcgaccctgcggacgtgctgcggcaggccgaggactccacccgcagataccagcaaggggcgccgctgtccgccatggacggagtactggtcgccgtcaaggacgagctcgattgcctgccgtacccgaccagcggcggcacgcggtggctggggtcggcgcggcggtgcgcggcggacgcggcgtgcgtggcgcagctgcgcgcgtgcggcgccgtgatggccggcaaggccaacatgcacgagctgggcgcgggcaccagcggcatcaacccgcaccacggcgccacgcgcaacccctacaacgtgggcagggtgtcgggcggctcctcgggcgggtccgccgccgccgtctgcgccgggctctgccccgtcgccctcggcgccgacggaggcgggtccgtgcgcatgccggcggcgctctgcggcgtcgtcgggttcaagcccactgccggccgcctctccaactccgggcttcttcctctgaactggaccgtcggcatgccggggatcctagcagcgacggtcgaggacacgctgatcgcgtcggtgccgggcagctagcttcttgtatgcggcgattgctgatcagtcaaaaccaagccctttgcagcagcctgaactgaacctgcccatgctgacacgcacgaggtccatgcccagcatcaggctcgccaaatacgcaaagtggttcgacgacagctcggaggacatcaggagcctctgcgggaaggcgctgcagatgctgcgcacgcactacggctgggagagcgtggacgtcaccgtccctgagatcgaagagatgcggctggcgcactacgtgaccatgggctcggagtgcactgcctccctcgccgccaagtacctggacagcatggacaggtccgaggtcgggtgggacgtgcggatcgcgctcagcgcctacgggtccttcagcagccgagactacctcagcgcgcagcgtctccgatgccggcagatgtacttccacgagaagatcttcgagactgccgacgccatcgtcacgccgatgacaggggtgacggcgtacgcgctgcaggacgacgcgctgagcacgggggagctggactacatcaacggagctgcgctggtgaggtactcgatcgcgggcaacttcctggggctgccagcgatcaccgtgcccgtcgggtatgacaggggagggctccccgtggggctccagttcatcggccgcccgtggtcggaggccacgctgctgcacctcgcctacgccatgcaggaggcgtgcgggaagaaggtgctccggaagcccaaggtgcactacgacctcctcaccaaagagtagctccagcgagcatcgatccggcagattgctctctatgaggcgcgcggttgctgattgcatgcacctctagtgtgattgattgtttgtttgattgattgagcttgtgatgagagagtgggggaagttgaatggaatgccgtcaatgtcggacaactctcaactaggagaagaaaaaaaaacatggttgccagcaccatgcatgtgcaccaccattcgttttttaatgtcgtcctcattgaaacattatgtaagtattgtgtatacgtgtgctttagattcgtttttcactgcccaccggaaaatgaacc

SEQ ID NO: 25978 - DNA, 3288 bp, Zea Mays
gaaaccatccctgcaggtccctgctccctggttatattaagcagctcccaatctttggcatttgcaggcacacaacacaacacagttctccctttccactccagtccaaccaaccgtccatgggtttcttcatcccgccgcccaaggtgtacaagccggcggcagaggtcgacctcgggccggacagcgacgagcactacatcagccccaacgtgaaagcgccccgcgtggccgggttcctggtgaagatgctggcctgggtgctggagacgccggtgcttggctggatcgtgctcggcgtcctcaagagggacaacctcgtctacaagctcgtctcggacgctgagatcccggagccgccgctattcacggccacccacacatggcaagcgatccaggagcagagcgtgcgcgtgacggagtcgaggctgtcgccggcggagcgcgtgcaggaggccgtcgcctgcgtcccagctgctgcccaggcccagttggagccggcggcggggttcaggcgctggacggtgcgggacttccacagggcgtacagatcaggacaggctacccctaccatggtggcgcggcgattcctggcagccgtggaggaatgttcagggccggacctgaacatgggcttcttcatcagctgcgaccctgcggacgtgctgcggcaggccgaggactccacccgcagataccagcaagctaggcagaaccggccgttaatggatcacggccgtaaaagcaccaacaagtgacagtggtataactatatagcaccatatacatgcgtactcactactcagcaaagctcagcagtcactagtcagcttcaactctgcttctagaagatgtcaggctgtcaccgtaagggttcagctctgctactggatagtattggatagtatgctgcggtcaagcactagatatagctaagaaaacttctttatataatacaatatatctaagccttgtattttatctactagacttctcaaaacacgactcgtttatgtggattatataagtaaaactatatctagatttagacaaccgtgctaaagatgttacttcaccaaaatatatctcttatatctttttacacttattttttaataatttttttaagatataaatcatttatgtgtgatgtagaggcccctgagtagaaacccagcactacttttaccgcaccaccagagtggcccctgcctggtacaagcgccaacaggcccatgaggcatgctccagtgttgcgtagcagctcagaacagtggcggcagctgctttaggcctcggttacgtctagattaaagaggattgacagacattaaatcctttctatctaattttgactatatagccagttcggtccagacgacgaacgaagcgttttgagaggaacggaggagccgtctgcactgaatgtccttggacggaaaaaccggtgctgaattaatcgctagcctgcgcaagatttgatcgcgcagtacgcgtacgtggatgtctgcatgattgatgtccggtccatccctcatcgctggatggagtgggcattcatccattgctgcatcagcatgtggctggccctggccgtagtgacgaaggactccggtccagtaggaattacctgccctgctgacctgtaggaattcaaggagggggacagggccacgtacagcccccacagcagagagatcgcatcgcctccttcgttcccgcgccgtcactgtatcgggcgccgctgtccgccatggacggagtactggtcgccgtcaaggacgagctcgattgcctgccgtacccgaccagcggcggcacgcggtggctggggtcggcgcggcggtgcgcggcggacgcggcgtgcgtggcgcagctgcgcgcgtgcggcgccgtgatggccggcaaggccaacatgcacgagctgggcgcgggcaccagcggcatcaacccgcaccacggcgccacgcgcaacccctacaacgtgggcagggtgtcgggcggctcctcgggcgggtccgccgccgccgtctgcgccgggctctgccccgtcgccctcggcgccgacggaggcgggtccgtgcgcatgccggcggcgctctgcggcgtcgtcgggttcaagcccactgccggccgcctctccaactccgggcttcttcctctgaactggaccgtcggcatgccggggatcctagcagcgacggtcgaggacacgctgatcgcgtatgcggcgattgctgatcagtcaaaaccaagccctttgcagcagcctgaactgaacctgcccatgctgacacgcacgaggtccatgcccagcatcaggctcgccaaatacgcaaagtggttcgacgacagctcggaggacatcaggagcctctgcgggaaggcgctgcagatgctgcgcacgcactacggctgggagagcgtggacgtcaccgtccctgagatcgaagagatgcggctggcgcactacgtgaccatgggctcggagtgcactgcctccctcgccgccaagtacctggacagcatggacaggtccgaggtcgggtgggacgtgcggatcgcgctcagcgcctacgggtccttcagcagccgagactacctcagcgcgcagcgtctccgatgccggcagatgtacttccacgagaagatcttcgagactgccgacgccatcgtcacgccgatgacaggggtgacggcgtacgcgctgcaggacgacgcgctgagcacgggggagctggactacatcaacggagctgcgctggtgaggtactcgatcgcgggcaacttcctggggctgccagcgatcaccgtgcccgtcgggtatgacaggggagggctccccgtggggctccagttcatcggccgcccgtggtcggaggccacgctgctgcacctcgcctacgccatgcaggaggcgtgcgggaagaaggtgctccggaagcccaaggtgcactacgacctcctcaccaaagagtagctccagcgagcatcgatccggcagattgctctctatgaggcgcgcggttgctgattgcatgcacctctagtgtgattgattgtttgtttgattgattgagcttgtgatgagagagtgggggaagttgaatggaatgccgtcaatgtcggacaactctcaactaggagaagaaaaaaaaacatggttgccagcaccatgcatgtgcaccaccattcgttttttaatgtcgtcctcattgaaacattatgtaagtattgtgtatacgtgtgctttagattcgtttttcactgcccaccggaaaatgaacc

SEQ ID NO: 25979 - DNA, 950 bp, Zea Mays
gtttctactaacccaagcacatccgttacactgctgccccgccaaaattgcaggcaggcaggcaccaggcagccgccagcgtctctctctgtttctgaaaccatccctgcaggtccctgctccctggttatattaagcagctcccaatctttggcatttgcaggcacacaacacaacacagttctccctttccactccagtccaaccaaccgtccatgggtttcttcatcccgccgcccaaggtgtacaagccggcggcagaggtcgacctcgggccggacagcgacgagcactacatcagccccaacgtgaaagcgccccgcgtggccgggttcctggtgaagatgctggcctgggtgctggagacgccggtgcttggctggatcgtgctcggcgtcctcaagagggacaacctcgtctacaagctcgtctcggacgctgagatcccggagccgccgctattcacggccacccacacatggcaagccatccgtctgcttgacaaccgatggatgcagcagcgatccaggagcagagcgtgcgcgtgacggagtcgaggctgtcgccggcggagcgcgtgcaggaggccgtcgcctgcgtcccagctgctgcccaggcccagttggagccggcggcggggttcaggcgctggacggtgcgggacttccacagggcgtacagatcaggacaggctacccctaccatggtggcgcggcgattcctggcagccgtggaggaatgttcagggccggacctgaacatgggcttcttcatcagctgcgaccctgcggacgtgctgcggcaggccgaggactccacccgcagataccagcaaggggcgccgctgtccgccatggacggagtactggtcgccgtcaaggacgagctcgattgcctgccgtacccgaccagcgctcagctggcgatagacatgcctcaccttttaccgc

SEQ ID NO: 25980 - DNA, 1624 bp, Zea Mays
gaaaccatccctgcaggtccctgctccctggttatattaagcagctcccaatctttggcatttgcaggcacacaacacaacacagttctccctttccactccagtccaaccaaccgtccatgggtttcttcatcccgccgcccaaggtgtacaagccggcggcagaggtcgacctcgggccggacagcgacgagcactacatcagccccaacgtgaaaggtccctcgctccctgaccagacctctcccatcccagctacagcggtgcacatgcatgcatgagaatgattgattgttcaattgagtagatggtcggaggcgatctccgtctccgcgcgcgcttgcttgctttcttccgctgctgatacatgcgtggaccgtcttgcagcgccccgcgtggccgggttcctggtgaagatgctggcctgggtgctggagacgccggtgcttggctggatcgtgctcggcgtcctcaagagggacaacctcgtctacaagctcgtctcggacgctgagatcccggagccgccgctattcacggccacccacacatggcaagcgatccaggagcagagcgtgcgcgtgacggagtcgaggctgtcgccggcggagcgcgtgcaggaggccgtcgcctgcgtcccagctgctgcccaggcccagttggagccggcggcggggttcaggcgctggacggtgcgggacttccacagggcgtacagatcaggacaggctacccctaccatggtggcgcggcgattcctggcagccgtggaggaatgttcagggccggacctgaacatgggcttcttcatcagctgcgaccctgcggacgtgctgcggcaggccgaggactccacccgcagataccagcaaggtgcgtggtatatgcgtatagcagtagcagcggcggcgaaggcggcgtagcagctaggcagaaccggccgttaatggatcacggccgtaaaagcaccaacaagtgacagtggtataactatatagcaccatatacatgcgtactcactactcagcaaagctcagcagtcactagtcagcttcaactctgcttctagaagatgtcaggctgtcaccgtaagggttcagctctgctactggatagtattggatagtatgctgcggtcaagcactagatatagctaagaaaacttctttatataatacaatatatctaagccttgtattttatctactagacttctcaaaacacgactcgtttatgtggattatataagtaaaactatatctagatttagacaaccgtgctaaagatgttacttcaccaaaatatatctcttatatctttttacacttattttttaataatttttttaagatataaatcatttatgtgtgatgtagaggcccctgagtagaaacccagcactacttttaccgcaccaccagagtggcccctgcctggtacaagcgccaacaggcccatgaggcatgctccagtgttgcgtagcagctcagaacagtggcggcagctgctttaggcctcggttacgtctagattaaagaggattgacagacattaaatcctttctatctaattttgactatatagccagttcggtccagacgacgaacgaagcgttttgagagga

SEQ ID NO: 25981 - DNA, 2167 bp, Zea Mays
cccggccggcgctgtcgcttccctacctcgtcgagagaatccgctgccacctacgcctacgcggccgcggtcatgagttccaccgccgctgtggcccttaatcgccgcactcgcagccgcccgccgtcggccgcatcctcccgcaggtccgatgatcccacggccgccgtcgccagtaccgccaacggcaacggcaatgtccccaccaaggccgcctcccccgatcacgcctcaggggagaggacggtcaagaagctgcggctgtccaaggcgctgacgatcccggaggggaccacgatctcggaggcgtgccggcggatggcagcgaggcgggtcgatgccgtgctgctcaccgacgccggtggcctgctctccggcatcgtcaccgacaaggtaaatttagacaccttccagttgtagaaaatggtgaggttattgcgatgttggacattacaaaatgcctctatgatgcaatatcaagactggaaaaggcagcagagcaagaaagtgcactggcagctgctgtagaaggggttgagcgacagttaggtggcaacttctcagctccacacaatctcatagagactatgagagaacggatgtttaaaccttctttgtcaaccattatcacagagaacacaaaagtagcaactgtttccctttcagatccagtttgtgtagcagcacggaaaatgcgtgagttacaagttaattcagtcattattactgctggaaatttgcttcatgggatctttaccccaagggatgtgctgatgcgtgttgtggcccaaaatctttctcctgagttaactctagtagaaaaggtaatgactgcacaccctgactgtgctacattggacacaacaatccttgatgcactacatatcatgcatgatggcaaattcttgcatattcctgttcttgatggagatgggcgggttgctgcttgtttggacgttctgcaacttacccatgctgcgatttcaatggttgaaggaggtcctggtgctgcaactgatgtggcaaacacgataatgcagaaattctgggaatctgcacttgctctagagcaacctccagaggaggattttgatagtcacagtgaattacctttagtgatgccatcagatgccagggatggcagtagtagtatttatcgtcctgctgttgataatttatttgtctttaagcttcaggacaagaagggacgcatgcatagattcacttgtggctctgaaagtttagatgagctgatatcgtctgtaatccaaaggttaggcatggttgatgagaagagggtgattcaactgttgtatgaagatgacgaaggcgacaaggtgctgttgacaaccaattctgatcttactggtgctgtgttttgtgcgaaatcatctggattgaaggtcttgaggttgcatattgacaactcagattccagcaatgaagtagtaacacagccattgccagagctggcatcatcccagggaagtcagtcgatgcatgttcattatggttatggattgatggcttgcgcgattgctctgacgggggtagctgtgatagtttacttgagacactcgaaagcgtgatgaacttctggaggatcaacaaagaattttgcatagcttatatatacgactaatacgcatagaaggatcacacacttcttcggctcatgagaaagttaagtaatcatgggccgatgacgaagattacattggtggtccaagaaaaatatgctgactgactgtcatgttctccagttacctgacgaagtcggttcttatggtggcagggaagcctatgatatggttcttatggttggcaaccatgaattcagtgatgtctcaagtaaccatgtatatgcatctctgagcatgaaaaccaagaatgaatcacatatcccaagtcgagattcttctttaacttttcactatttattgatcagtggcggtgctgcatgtaaaataacatgcatcgactgacttccctgaggttgccctgctggatactggatccgctccgaagatgagccgatcaggtgcaagatagaattagaaagctagctagcgtcgcttgcactcgagacccgcagagccgatcgatgagaatggaacaaattcaaaaaaaacatgaaggatgaattgacttttttttttgattgggg

SEQ ID NO: 25982 - DNA, 2288 bp, Zea Mays
gccagcgatcgttcccaacattcccggccggcgctgtcgcttccctacctcgtcgagagaatccgctgccacctacgcctacgcggccgcggtcatgagttccaccgccgctgtggcccttaatcgccgcactcgcagccgcccgccgtcggccgcatcctcccgcaggtccgatgatcccacggccgccgtcgccagtaccgccaacggcaacggcaatgtccccaccaaggccgcctcccccgatcacgcctcaggggagaggacggtcaagaagctgcggctgtccaaggcgctgacgatcccggaggggaccacgatctcggaggcgtgccggcggatggcagcgaggcgggtcgatgccgtgctgctcaccgacgccggtggcctgctctccggcatcgtcaccgacaaggtaaatttagacaccttccagttgtagaaaatggtgaggttattgcgatgttggacattacaaaatgcctctatgatgcaatatcaagactggaaaaggcagcagagcaagaaagtgcactggcagctgctgtagaaggggttgagcgacagttaggtggcaacttctcagctccacacaatctcatagagactatgagagaacggatgtttaaaccttctttgtcaaccattatcacagagaacacaaaagtagcaactgtttccctttcagatccagtttgtgtagcagcacggaaaatgcgtgagttacaagttaattcagtcattattactgctggaaatttgcttcatgggatctttaccccaagggatgtgctgatgcgtgttgtggcccaaaatctttctcctgagttaactctagtagaaaaggtaatgactgcacaccctgactgtgctacattggacacaacaatccttgatgcactacatatcatgcatgatggcaaattcttgcatattcctgttcttgatggagatgggcgggttgctgcttgtttggacgttctgcaacttacccatgctgcgatttcaatggtctccctttccatggctcatgccctctctttcttaatccatcttagtaatcttagtccatctgaaatggttttccctctgaaggttgaaggaggtcctggtgctgcaactgatgtggcaaacacgataatgcagaaattctgggaatctgcacttgctctagagcaacctccagaggaggattttgatagtcacaggtttagttaatgtttcttttgtgtttttttatttgtcttccctctcaatgcaattcttgcctgaattattgcattgtacagtgaattacctttagtgatgccatcagatgccagggatggcagtagtagtatttatcgtcctgctgttgataatttatttgtctttaagcttcaggacaagaagggacgcatgcatagattcacttgtggctctgaaagtttagatgagctgatatcgtctgtaatccaaaggttaggcatggttgatgagaagagggtgattcaactgttgtatgaagatgacgaaggcgacaaggtcttgaggttgcatattgacaactcagattccagcaatgaagtagtaacacagccattgccagagctggcatcatcccagggaagtcagtcgatgcatgttcattatggttatggattgatggcttgcgcgattgctctgacgggggtagctgtgatagtttacttgagacactcgaaagcgtgatgaacttctggaggatcaacaaagaattttgcatagcttatatatacgactaatacgcatagaaggatcacacacttcttcggctcatgagaaagttaagtaatcatgggccgatgacgaagattacattggtggtccaagaaaaatatgctgactgactgtcatgttctccagttacctgacgaagtcggttcttatggtggcagggaagcctatgatatggttcttatggttggcaaccatgaattcagtgatgtctcaagtaaccatgtatatgcatctctgagcatgaaaaccaagaatgaatcacatatcccaagtcgagattcttctttaacttttcactatttattgatcagtggcggtgctgcatgtaaaataacatgcatcgactgacttccctgaggttgccctgctggatactggatccgctccgaagatgagccgatcaggtgcaagatagaattagaaagctagctagcgtcgcttgcactcgagacccgcagagccgatcgatgagaatggaacaaattcaaaaaaaacatgaaggatgaattgacttttttttttgattgggg

SEQ ID NO: 25983 - DNA, 2336 bp, Zea Mays
ggaagcccaaaagagccagcgatcgttcccaacattcccggccggcgctgtcgcttccctacctcgtcgagagaatccgctgccacctacgcctacgcggccgcggtcatgagttccaccgccgctgtggcccttaatcgccgcactcgcagccgcccgccgtcggccgcatcctcccgcaggtccgatgatcccacggccgccgtcgccagtaccgccaacggcaacggcaatgtccccaccaaggccgcctcccccgatcacgcctcaggggagaggacggtcaagaagctgcggctgtccaaggcgctgacgatcccggaggggaccacgatctcggaggcgtgccggcggatggcagcgaggcgggtcgatgccgtgctgctcaccgacgccggtggcctgctctccggcatcgtcaccgacaaggacatagctacaagggtcattgccgaggggttgcgggttgagcaaacaatcatctccaagattatgacaaggaaccctttatatgtcatgggggacacacctgctattgaggcactgcagaaaatgatccaaggtaaatttagacaccttccagttgtagaaaatggtgaggttattgcgatgttggacattacaaaatgcctctatgatgcaatatcaagactggaaaaggcagcagagcaagaaagtgcactggcagctgctgtagaaggggttgagcgacagttaggtggcaacttctcagctccacacaatctcatagagactatgagagaacggatgtttaaaccttctttgtcaaccattatcacagagaacacaaaagtagcaactgtttccctttcagatccagtttgtgtagcagcacggaaaatgcgtgagttacaagttaattcagtcattattactgctggaaatttgcttcatgggatctttaccccaagggatgtgctgatgcgtgttgtggcccaaaatctttctcctgagttaactctagtagaaaaggtaatgactgcacaccctgactgtgctacattggacacaacaatccttgatgcactacatatcatgcatgatggcaaattcttgcatattcctgttcttgatggagatgggcgggttgctgcttgtttggacgttctgcaacttacccatgctgcgatttcaatggttgaaggaggtcctggtgctgcaactgatgtggcaaacacgataatgcagaaattctgggaatctgcacttgctctagagcaacctccagaggaggattttgatagtcacagtgaattacctttagtgatgccatcagatgccagggatggcagtagtagtatttatcgtcctgctgttgataatttatttgtctttaagcttcaggacaagaagggacgcatgcatagattcacttgtggctctgaaagtttagatgagctgatatcgtctgtaatccaaaggttaggcatggttgatgagaagagggtgattcaactgttgtatgaagatgacgaaggcgacaaggtgctgttgacaaccaattctgatcttactggtgctgtgttttgtgcgaaatcatctggattgaaggtcttgaggttgcatattgacaactcagattccagcaatgaagtagtaacacagccattgccagagctggcatcatcccagggaagtcagtcgatgcatgttcattatggttatggattgatggcttgcgcgattgctctgacgggggtagctgtgatagtttacttgagacactcgaaagcgtgatgaacttctggaggatcaacaaagaattttgcatagcttatatatacgactaatacgcatagaaggatcacacacttcttcggctcatgagaaagttaagtaatcatgggccgatgacgaagattacattggtggtccaagaaaaatatgctgactgactgtcatgttctccagttacctgacgaagtcggttcttatggtggcagggaagcctatgatatggttcttatggttggcaaccatgaattcagtgatgtctcaagtaaccatgtatatgcatctctgagcatgaaaaccaagaatgaatcacatatcccaagtcgagattcttctttaacttttcactatttattgatcagtggcggtgctgcatgtaaaataacatgcatcgactgacttccctgaggttgccctgctggatactggatccgctccgaagatgagccgatcaggtgcaagatagaattagaaagctagctagcgtcgcttgcactcgagacccgcagagccgatcgatgagaatggaacaaattcaaaaaaaacatgaaggatgaattgacttttttttttgattgggg

SEQ ID NO: 25984 - DNA, 2313 bp, Zea Mays
ggaagcccaaaagagccagcgatcgttcccaacattcccggccggcgctgtcgcttccctacctcgtcgagagaatccgctgccacctacgcctacgcggccgcggtcatgagttccaccgccgctgtggcccttaatcgccgcactcgcagccgcccgccgtcggccgcatcctcccgcaggtccgatgatcccacggccgccgtcgccagtaccgccaacggcaacggcaatgtccccaccaaggccgcctcccccgatcacgcctcaggggagaggacggtcaagaagctgcggctgtccaaggcgctgacgatcccggaggggaccacgatctcggaggcgtgccggcggatggcagcgaggcgggtcgatgccgtgctgctcaccgacgccggtggcctgctctccggcatcgtcaccgacaaggacatagctacaagggtcattgccgaggggttgcgggttgagcaaacaatcatctccaagattatgacaaggaaccctttatatgtcatgggggacacacctgctattgaggcactgcagaaaatgatccaaggtaaatttagacaccttccagttgtagaaaatggtgaggttattgcgatgttggacattacaaaatgcctctatgatgcaatatcaagactggaaaaggcagcagagcaagaaagtgcactggcagctgctgtagaaggggttgagcgacagttaggtggcaacttctcagctccacacaatctcatagagactatgagagaacggatgtttaaaccttctttgtcaaccattatcacagagaacacaaaatccagtttgtgtagcagcacggaaaatgcgtgagttacaagttaattcagtcattattactgctggaaatttgcttcatgggatctttaccccaagggatgtgctgatgcgtgttgtggcccaaaatctttctcctgagttaactctagtagaaaaggtaatgactgcacaccctgactgtgctacattggacacaacaatccttgatgcactacatatcatgcatgatggcaaattcttgcatattcctgttcttgatggagatgggcgggttgctgcttgtttggacgttctgcaacttacccatgctgcgatttcaatggttgaaggaggtcctggtgctgcaactgatgtggcaaacacgataatgcagaaattctgggaatctgcacttgctctagagcaacctccagaggaggattttgatagtcacagtgaattacctttagtgatgccatcagatgccagggatggcagtagtagtatttatcgtcctgctgttgataatttatttgtctttaagcttcaggacaagaagggacgcatgcatagattcacttgtggctctgaaagtttagatgagctgatatcgtctgtaatccaaaggttaggcatggttgatgagaagagggtgattcaactgttgtatgaagatgacgaaggcgacaaggtgctgttgacaaccaattctgatcttactggtgctgtgttttgtgcgaaatcatctggattgaaggtcttgaggttgcatattgacaactcagattccagcaatgaagtagtaacacagccattgccagagctggcatcatcccagggaagtcagtcgatgcatgttcattatggttatggattgatggcttgcgcgattgctctgacgggggtagctgtgatagtttacttgagacactcgaaagcgtgatgaacttctggaggatcaacaaagaattttgcatagcttatatatacgactaatacgcatagaaggatcacacacttcttcggctcatgagaaagttaagtaatcatgggccgatgacgaagattacattggtggtccaagaaaaatatgctgactgactgtcatgttctccagttacctgacgaagtcggttcttatggtggcagggaagcctatgatatggttcttatggttggcaaccatgaattcagtgatgtctcaagtaaccatgtatatgcatctctgagcatgaaaaccaagaatgaatcacatatcccaagtcgagattcttctttaacttttcactatttattgatcagtggcggtgctgcatgtaaaataacatgcatcgactgacttccctgaggttgccctgctggatactggatccgctccgaagatgagccgatcaggtgcaagatagaattagaaagctagctagcgtcgcttgcactcgagacccgcagagccgatcgatgagaatggaacaaattcaaaaaaaacatgaaggatgaattgacttttttttttgattgggg

SEQ ID NO: 25985 - DNA, 1321 bp, Zea Mays
gttgttttgagcagtgtctgtacctttcatctttaacttggttgtaggcatggatagataccaaagggtagagaagcctcggaatgacacgccaatcagccagaatgagatcagaatcactactcaggggaggatgaggaactatatcagctatgggatgtcgctgcttgaggaaaatggacatgatgagattagtatcaaggccatgggacgggccataaataagacagttatggttgttgaattgatcaagagaagggttggaggtcttcatcagaacactgctactgaatctgttgatatcacagacacatgggaacctttggaagaaggccttctcccactagagacaactcgccatgtgtcgatgatcactgtgacactgtcaaagaaccctctggatacatcatctccaggataccagccacctatcccagctgaagaggtgaaacctgcttttgactatgatcatgaagaatcgtatcccactggtcgtggaagaggacgtggtggtggcagaagaggcaggggaagaggcatgagcaatggcccccctccacctgcttatggttacaacgaagagtgggaggaggaaggagattattataacagagggcgcgggagagggcggctacgtggacgaggtgggagagggcgtggtggctactacggaggtgggaggcgtggtggctacggttatgattatggctatgcccccagaggcgggtactatgaagagcaagacgaatactatgatgagcccgaggaatatgctcctccccctggccgcggacgtggcagagggagaaggggcggcatgccttggcgtgggcgtggaggccgcgggccaccgcgcggtggccgagggagctactactaggcgcgagaaatgcgacgtgccgaatgcgtgtgcttattagttatctgttagcgtttgctgcagtgctcttctatggagctccgaccccggactggaattatctcgtaggcccttccaggtgctactctacttcagctgctgtccctgtgcaactcgtccgggcaagttttgtggctcgctcgtggttttgtagctaggttaagcgagtgaagttacactcggtagcgcagtatttcctgcgagattgtttattcttctgttaatgtacctaccttactatttcgtttggattatggatactgggtgcatccgtttcatgtttattctcctggtaatctgtagctttaccgacagtgtgtacgctgatgcctgctgccatacggggcagaagttttttttatgctgcagaacagagcagcagggaaaaaaagtcacaataca

SEQ ID NO: 25986 - DNA, 1351 bp, Zea Mays
gacacgtgaaacaccggatgacttgagcatcagcaggttcaagattatccggtttaaagacatcagaagaggctgcggcatggatagataccaaagggtagagaagcctcggaatgacacgccaatcagccagaatgagatcagaatcactactcaggggaggatgaggaactatatcagctatgggatgtcgctgcttgaggaaaatggacatgatgagattagtatcaaggccatgggacgggccataaataagacagttatggttgttgaattgatcaagagaagggttggaggtcttcatcagaacactgctactgaatctgttgatatcacagacacatgggaacctttggaagaaggccttctcccactagagacaactcgccatgtgtcgatgatcactgtgacactgtcaaagaaccctctggatacatcatctccaggataccagccacctatcccagctgaagaggtgaaacctgcttttgactatgatcatgaagaatcgtatcccactggtcgtggaagaggacgtggtggtggcagaagaggcaggggaagaggcatgagcaatggcccccctccacctgcttatggttacaacgaagagtgggaggaggaaggagattattataacagagggcgcgggagagggcggctacgtggacgaggtgggagagggcgtggtggctactacggaggtgggaggcgtggtggctacggttatgattatggctatgcccccagaggcgggtactatgaagagcaagacgaatactatgatgagcccgaggaatatgctcctccccctggccgcggacgtggcagagggagaaggggcggcatgccttggcgtgggcgtggaggccgcgggccaccgcgcggtggccgagggagctactactaggcgcgagaaatgcgacgtgccgaatgcgtgtgcttattagttatctgttagcgtttgctgcagtgctcttctatggagctccgaccccggactggaattatctcgtaggcccttccaggtgctactctacttcagctgctgtccctgtgcaactcgtccgggcaagttttgtggctcgctcgtggttttgtagctaggttaagcgagtgaagttacactcggtagcgcagtatttcctgcgagattgtttattcttctgttaatgtacctaccttactatttcgtttggattatggatactgggtgcatccgtttcatgtttattctcctggtaatctgtagctttaccgacagtgtgtacgctgatgcctgctgccatacggggcagaagttttttttatgctgcagaacagagcagcagggaaaaaaagtcacaataca

SEQ ID NO: 25987 - DNA, 1347 bp, Zea Mays
cggcggtcctctcgctgggtggaggctctgaggttcaagattatccggtttaaagacatcagaagaggctgcggcatggatagataccaaagggtagagaagcctcggaatgacacgccaatcagccagaatgagatcagaatcactactcaggggaggatgaggaactatatcagctatgggatgtcgctgcttgaggaaaatggacatgatgagattagtatcaaggccatgggacgggccataaataagacagttatggttgttgaattgatcaagagaagggttggaggtcttcatcagaacactgctactgaatctgttgatatcacagacacatgggaacctttggaagaaggccttctcccactagagacaactcgccatgtgtcgatgatcactgtgacactgtcaaagaaccctctggatacatcatctccaggataccagccacctatcccagctgaagaggtgaaacctgcttttgactatgatcatgaagaatcgtatcccactggtcgtggaagaggacgtggtggtggcagaagaggcaggggaagaggcatgagcaatggcccccctccacctgcttatggttacaacgaagagtgggaggaggaaggagattattataacagagggcgcgggagagggcggctacgtggacgaggtgggagagggcgtggtggctactacggaggtgggaggcgtggtggctacggttatgattatggctatgcccccagaggcgggtactatgaagagcaagacgaatactatgatgagcccgaggaatatgctcctccccctggccgcggacgtggcagagggagaaggggcggcatgccttggcgtgggcgtggaggccgcgggccaccgcgcggtggccgagggagctactactaggcgcgagaaatgcgacgtgccgaatgcgtgtgcttattagttatctgttagcgtttgctgcagtgctcttctatggagctccgaccccggactggaattatctcgtaggcccttccaggtgctactctacttcagctgctgtccctgtgcaactcgtccgggcaagttttgtggctcgctcgtggttttgtagctaggttaagcgagtgaagttacactcggtagcgcagtatttcctgcgagattgtttattcttctgttaatgtacctaccttactatttcgtttggattatggatactgggtgcatccgtttcatgtttattctcctggtaatctgtagctttaccgacagtgtgtacgctgatgcctgctgccatacggggcagaagttttttttatgctgcagaacagagcagcagggaaaaaaagtcacaataca

SEQ ID NO: 25988 - DNA, 1351 bp, Zea Mays
ctcgattctacgcggcttcatggattcgggggccggccggcgcggcggcggtcctctcgctgggtggaggctctgaggcatggatagataccaaagggtagagaagcctcggaatgacacgccaatcagccagaatgagatcagaatcactactcaggggaggatgaggaactatatcagctatgggatgtcgctgcttgaggaaaatggacatgatgagattagtatcaaggccatgggacgggccataaataagacagttatggttgttgaattgatcaagagaagggttggaggtcttcatcagaacactgctactgaatctgttgatatcacagacacatgggaacctttggaagaaggccttctcccactagagacaactcgccatgtgtcgatgatcactgtgacactgtcaaagaaccctctggatacatcatctccaggataccagccacctatcccagctgaagaggtgaaacctgcttttgactatgatcatgaagaatcgtatcccactggtcgtggaagaggacgtggtggtggcagaagaggcaggggaagaggcatgagcaatggcccccctccacctgcttatggttacaacgaagagtgggaggaggaaggagattattataacagagggcgcgggagagggcggctacgtggacgaggtgggagagggcgtggtggctactacggaggtgggaggcgtggtggctacggttatgattatggctatgcccccagaggcgggtactatgaagagcaagacgaatactatgatgagcccgaggaatatgctcctccccctggccgcggacgtggcagagggagaaggggcggcatgccttggcgtgggcgtggaggccgcgggccaccgcgcggtggccgagggagctactactaggcgcgagaaatgcgacgtgccgaatgcgtgtgcttattagttatctgttagcgtttgctgcagtgctcttctatggagctccgaccccggactggaattatctcgtaggcccttccaggtgctactctacttcagctgctgtccctgtgcaactcgtccgggcaagttttgtggctcgctcgtggttttgtagctaggttaagcgagtgaagttacactcggtagcgcagtatttcctgcgagattgtttattcttctgttaatgtacctaccttactatttcgtttggattatggatactgggtgcatccgtttcatgtttattctcctggtaatctgtagctttaccgacagtgtgtacgctgatgcctgctgccatacggggcagaagttttttttatgctgcagaacagagcagcagggaaaaaaagtcacaataca

SEQ ID NO: 25989 - DNA, 1464 bp, Zea Mays
ccgagatccagcgcaacggacggctctccgagcagccgcacgagaaaccgggtccagggggcagggcctggaggataacctcgccacgccagcacgccacgcggccaggcccagtgtgcgaggacgaggacgacgcgggcgcacgcagcagcaagctctgaccctgaaagctgaaaccgctccacgccctccccctccgcgcagagccagccaagccaaccagccagtcagaagaggaaccggggagcggcagctgcagcggccgagggcggagcacgcgaggcatggatagataccaaagggtagagaagcctcggaatgacacgccaatcagccagaatgagatcagaatcactactcaggggaggatgaggaactatatcagctatgggatgtcgctgcttgaggaaaatggacatgatgagattagtatcaaggccatgggacgggccataaataagacagttatggttgttgaattgatcaagagaagggttggaggtcttcatcagaacactgctactgaatctgttgatatcacagacacatgggaacctttggaagaaggccttctcccactagagacaactcgccatgtgtcgatgatcactgtgacactgtcaaagaaccctctggatacatcatctccaggataccagccacctatcccagctgaagaggtgaaacctgcttttgactatgatcatgaagaatcgtatcccactggtcgtggaagaggacgtggtggtggcagaagaggcaggggaagaggcatgagcaatggcccccctccacctgcttatggttacaacgaagagtgggaggcgtggtggctacggttatgattatggctatgcccccagaggcgggtactatgaagagcaagacgaatactatgatgagcccgaggaatatgctcctccccctggccgcggacgtggcagagggagaaggggcggcatgccttggcgtgggcgtggaggccgcgggccaccgcgcggtggccgagggagctactactaggcgcgagaaatgcgacgtgccgaatgcgtgtgcttattagttatctgttagcgtttgctgcagtgctcttctatggagctccgaccccggactggaattatctcgtaggcccttccaggtgctactctacttcagctgctgtccctgtgcaactcgtccgggcaagttttgtggctcgctcgtggttttgtagctaggttaagcgagtgaagttacactcggtagcgcagtatttcctgcgagattgtttattcttctgttaatgtacctaccttactatttcgtttggattatggatactgggtgcatccgtttcatgtttattctcctggtaatctgtagctttaccgacagtgtgtacgctgatgcctgctgccatacggggcagaagttttttttatgctgcagaacagagcagcagggaaaaaaagtcacaataca

SEQ ID NO: 25990 - DNA, 1490 bp, Zea Mays
ccgagatccagcgcaacggacggctctccgagcagccgcacgagaaaccgggtccagggggcagggcctggaggataacctcgccacgccagcacgccacgcggccaggcccagtgtgcgaggacgaggacgacgcgggcgcacgcagcagcaagctctgaccctgaaagctgaaaccgctccacgccctccccctccgcgcagagccagccaagccaaccagccagtcagaagaggaaccggggagcggcagctgcagcggccgagggcggagcacgcgaggcatggatagataccaaagggtagagaagcctcggaatgacacgccaatcagccagaatgagatcagaatcactactcaggggaggatgaggaactatatcagctatgggatgtcgctgcttgaggaaaatggacatgatgagattagtatcaaggccatgggacgggccataaataagacagttatggttgttgaattgatcaagagaagggttggaggtcttcatcagaacactgctactgaatctgttgatatcacagacacatgggaacctttggaagaaggccttctcccactagagacaactcgccatgtgtcgatgatcactgtgacactgtcaaagaaccctctggatacatcatctccaggataccagccacctatcccagctgaagaggtgaaacctgcttttgactatgatcatgaagaatcgtatcccactggtcgtggaagaggacgtggtggtggcagaagaggcaggggaagaggcatgagcaatggcccccctccacctgcttatggttacaacgaagagtgggaggaggaaggagattattataacagagggcgtggtggctacggttatgattatggctatgcccccagaggcgggtactatgaagagcaagacgaatactatgatgagcccgaggaatatgctcctccccctggccgcggacgtggcagagggagaaggggcggcatgccttggcgtgggcgtggaggccgcgggccaccgcgcggtggccgagggagctactactaggcgcgagaaatgcgacgtgccgaatgcgtgtgcttattagttatctgttagcgtttgctgcagtgctcttctatggagctccgaccccggactggaattatctcgtaggcccttccaggtgctactctacttcagctgctgtccctgtgcaactcgtccgggcaagttttgtggctcgctcgtggttttgtagctaggttaagcgagtgaagttacactcggtagcgcagtatttcctgcgagattgtttattcttctgttaatgtacctaccttactatttcgtttggattatggatactgggtgcatccgtttcatgtttattctcctggtaatctgtagctttaccgacagtgtgtacgctgatgcctgctgccatacggggcagaagttttttttatgctgcagaacagagcagcagggaaaaaaagtcacaataca

SEQ ID NO: 25991 - DNA, 1619 bp, Zea Mays
ccaggcgcccttatcctaaccgctcgccgcactcggtctacgaacgaccccgagatccagcgcaacggacggctctccgagcagccgcacgagaaaccgggtccagggggcagggcctggaggataacctcgccacgccagcacgccacgcggccaggcccagtgtgcgaggacgaggacgacgcgggcgcacgcagcagcaagctctgaccctgaaagctgaaaccgctccacgccctccccctccgcgcagagccagccaagccaaccagccagtcagaagaggaaccggggagcggcagctgcagcggccgagggcggagcacgcgaggttcaagattatccggtttaaagacatcagaagaggctgcggcatggatagataccaaagggtagagaagcctcggaatgacacgccaatcagccagaatgagatcagaatcactactcaggggaggatgaggaactatatcagctatgggatgtcgctgcttgaggaaaatggacatgatgagattagtatcaaggccatgggacgggccataaataagacagttatggttgttgaattgatcaagagaagggttggaggtcttcatcagaacactgctactgaatctgttgatatcacagacacatgggaacctttggaagaaggccttctcccactagagacaactcgccatgtgtcgatgatcactgtgacactgtcaaagaaccctctggatacatcatctccaggataccagccacctatcccagctgaagaggtgaaacctgcttttgactatgatcatgaagaatcgtatcccactggtcgtggaagaggacgtggtggtggcagaagaggcaggggaagaggcatgagcaatggcccccctccacctgcttatggttacaacgaagagtgggaggaggaaggagattattataacagagggcgcgggagagggcggctacgtggacgaggtgggagagggcgtggtggctacggttatgattatggctatgcccccagaggcgggtactatgaagagcaagacgaatactatgatgagcccgaggaatatgctcctccccctggccgcggacgtggcagagggagaaggggcggcatgccttggcgtgggcgtggaggccgcgggccaccgcgcggtggccgagggagctactactaggcgcgagaaatgcgacgtgccgaatgcgtgtgcttattagttatctgttagcgtttgctgcagtgctcttctatggagctccgaccccggactggaattatctcgtaggcccttccaggtgctactctacttcagctgctgtccctgtgcaactcgtccgggcaagttttgtggctcgctcgtggttttgtagctaggttaagcgagtgaagttacactcggtagcgcagtatttcctgcgagattgtttattcttctgttaatgtacctaccttactatttcgtttggattatggatactgggtgcatccgtttcatgtttattctcctggtaatctgtagctttaccgacagtgtgtacgctgatgcctgctgccatacggggcagaagttttttttatgctgcagaacagagcagcagggaaaaaaagtcacaataca

SEQ ID NO: 25992 - DNA, 1554 bp, Zea Mays
agcccaggcgcccttatcctaaccgctcgccgcactcggtctacgaacgaccccgagatccagcgcaacggacggctctccgagcagccgcacgagaaaccgggtccagggggcagggcctggaggataacctcgccacgccagcacgccacgcggccaggcccagtgtgcgaggacgaggacgacgcgggcgcacgcagcagcaagctctgaccctgaaagctgaaaccgctccacgccctccccctccgcgcagagccagccaagccaaccagccagtcagaagaggaaccggggagcggcagctgcagcggccgagggcggagcacgcgaggcatggatagataccaaagggtagagaagcctcggaatgacacgccaatcagccagaatgagatcagaatcactactcaggggaggatgaggaactatatcagctatgggatgtcgctgcttgaggaaaatggacatgatgagattagtatcaaggccatgggacgggccataaataagacagttatggttgttgaattgatcaagagaagggttggaggtcttcatcagaacactgctactgaatctgttgatatcacagacacatgggaacctttggaagaaggccttctcccactagagacaactcgccatgtgtcgatgatcactgtgacactgtcaaagaaccctctggatacatcatctccaggataccagccacctatcccagctgaagaggtgaaacctgcttttgactatgatcatgaagaatcgtatcccactggtcgtggaagaggacgtggtggtggcagaagaggcaggggaagaggcatgagcaatggcccccctccacctgcttatggttacaacgaagagtgggaggaggaaggagattattataacagagggcgcgggagagggcgtggtggctacggttatgattatggctatgcccccagaggcgggtactatgaagagcaagacgaatactatgatgagcccgaggaatatgctcctccccctggccgcggacgtggcagagggagaaggggcggcatgccttggcgtgggcgtggaggccgcgggccaccgcgcggtggccgagggagctactactaggcgcgagaaatgcgacgtgccgaatgcgtgtgcttattagttatctgttagcgtttgctgcagtgctcttctatggagctccgaccccggactggaattatctcgtaggcccttccaggtgctactctacttcagctgctgtccctgtgcaactcgtccgggcaagttttgtggctcgctcgtggttttgtagctaggttaagcgagtgaagttacactcggtagcgcagtatttcctgcgagattgtttattcttctgttaatgtacctaccttactatttcgtttggattatggatactgggtgcatccgtttcatgtttattctcctggtaatctgtagctttaccgacagtgtgtacgctgatgcctgctgccatacggggcagaagttttttttatgctgcagaacagagcagcagggaaaaaaagtcacaataca

SEQ ID NO: 25993 - DNA, 768 bp, Zea Mays
ctaaccgctcgccgcactcggtctacgaacgaccccgagatccagcgcaacggacggctctccgagcagccgcacgagaaaccgggtccagggggcagggcctggaggataacctcgccacgccagcacgccacgcggccaggcccagtgtgcgaggacgaggacgacgcgggcgcacgcagcagcaagctctgaccctgaaagctgaaaccgctccacgccctccccctccgcgcagagccagccaagccaaccagccagtcagaagaggaaccggggagcggcagctgcagcggccgagggcggagcacgcgaggttcaagattatccggtttaaagacatcagaagaggctgcggcatggatagataccaaagggtagagaagcctcggaatgacacgccaatcagccagaatgagatcagaatcactactcaggggaggatgaggaactatatcagctatgggatgtcgctgcttgaggaaaatggacatgatgagattagtatcaaggccatgggacgggccataaataagacagttatggttgttgaattgatcaagagaagggttggaggtcttcatcagaacactgctactgaatctgttgatatcacagacacatgggaacctttggaagaaggccttctcccactagagacaactcgccatgtgtcgatgatcactgtgacactgtcaaagaaccctctggatacatcatctccaggcttgcctgctcattattggttatgtttgatattgtacttag

SEQ ID NO: 25994 - DNA, 753 bp, Zea Mays
aggctccaagcccaggcgcccttatcctaaccgctcgccgcactcggtctacgaacgaccccgagatccagcgcaacggacggctctccgagcagccgcacgagaaaccgggtccagggggcagggcctggaggataacctcgccacgccagcacgccacgcggccaggcccagtgtgcgaggacgaggacgacgcgggcgcacgcagcagcaagctctgaccctgaaagctgaaaccgctccacgccctccccctccgcgcagagccagccaagccaaccagccagtcagaagaggaaccggggagcggcagctgcagcggccgagggcggagcacgcgaggcatggatagataccaaagggtagagaagcctcggaatgacacgccaatcagccagaatgagatcagaatcactactcaggggaggatgaggaactatatcagctatgggatgtcgctgcttgaggaaaatggacatgatgagattagtatcaaggccatgggacgggccataaataagacagttatggttgttgaattgatcaagagaagggttggaggtcttcatcagaacactgctactgaatctgttgatatcacagacacatgggaacctttggaagaaggccttctcccactagagacaactcgccatgtgtcgatgatcactgtgacactgtcaaagaaccctctggatacatcatctccaggcttgcctgctcattattggttatgtttgatattgtacttag

SEQ ID NO: 25995 - DNA, 2523 bp, Zea Mays
gtatagtttaatggttttctagtcgtccgtcctcctcggttctggctgccaaccccaagaactgccttgcctagtgcctactgcctagggaaggaccgaaggagaggtgcgcggctggtggcgtgcgagtggcagcggcgccgcgggactcttctcctcgccgctcgcctgctgggtgcgccatccctcgacgccttgcaggcgtatttggaagatctgggcgccgttggagacttggagtgcaagttctttctctggatggcggcacacgagcggtgctggacgtcaggccgcgtggctcaccatggactgcctgtctgcccccaccctccacgctgccctttatgtgaccaggagacgggcgggccccattcaattcaagggtgacaccgtgatattgctgtgaagttttgtggcacttcctgcatcccttatatggtattaacaaaaattttaattgtctgggtgatccatttgagcaaatggaaggcaacgatgtaccccttggaaacatgttgcaaggggttccctatgaaagtttagacttacgtggcagctctatgcaaaattatgctccaaactcaggaaaacatatcttcagcagctcccagatgccaggtactttcacaatgtctatgaccagggctacagagcctgatgactttcctgggtttcagttcaaagaacagggaaagagtgatgaccaccaccaccaacaccatagtcatcactcaaagaactgcaagagtgatggtgaggaacatgttgtggctgaagatgctactgataccccaagtggcaaaggcaagaagggctctgcatggcatcggatgaagtggacagattcaatggtaaaacttttgataacagcagtgtcttacactggagatgatcatggtgctgattccggcggtggcaggaggaacttcacaataatgcagaagaagggcaaatggaaggcgatatcgaaagttatgggagagagaggctgccatgtgtcaccgcaacagtgcgaggacaagttcaatgaccttaacaagagatacaaaaggctgacagacatccttggtaggggcactgcatgcaatgttgtggctaatccagcacttcttgatagcatgactcatctttcagataagatgaaagacgatgcaaaaaagatacttagctcaaagcacctattttatgaggagatgtgttcctaccacaacaacaaccgtgtaaatttgcctgaagatcatgcacttcagcattcactactgcttgcccttagatgtaaagaggagcatgatcctcagagggatccaagtggagatgctgatgaatacgatcaaagtgctgattctgattatgaggagaatgacgacgatcaacatcctgtgcatataaacatgagggagccctcaatgcacaaaaggaagcgccacagtgatgtggctttggtcacatcaagttctcatgaaggcagtgagaggtctgatccccatgctgtcacagtggacatcaacaaggctttcacagatgcaaccaacatggttttgttgcaacaagacttggcttcacaagccatagagattcagaaacgtcgcttgcagattgaagcaaaggaactggaactcacaaagcaacgtcttaagtgggagcggttcaggaagaagaaggacagagagatagaaaggattgcattggagaatgaacatatgatgattgagaacaaacgcttggagcttgagctgagacataaggagttagagctagagctgaagctgaaagacaaggggaaccatccgtaacttttgcttgaccaacactacagtatgtaagatggtaaacaagttgcggttgagcttctggaagagagctggtagattagagtagactctgacaaccattcctcatgtatgtcatggtgatgtggctatggccaactctgaagctctcatggaggatttggtttcacaagcactagagattcaggaaccttaacatgcagtgaagcgacctaactggaactccggaaagcgacgtctcaagtggaagccagaatggacatatcaatatttattgagtgaggaatgagaacaaacgatttgacttgagctgagagcctgagacgtgcaagcagctagagtggcaaaaaggccaagcgaaccactgcataagggtaggtatggtaatggattacaattcaaatgtttcttcataactaattaggagtcttcaataattttagtttaaaaataaatagaaatagagctatattcgattcttaaaatttatagtatattaccatccctatccgaggttgatcaacccttccatttgtaaggcaatctatagcagacttttttttttatcatacctcctatcctactttctattttaaatttcattatataaatagcataaacagtgttttgcataattatatgtacgatctgttgaccagagcctaaaggtgttaaattagttagtgatgcgcaagctaaacctgagaaaagttcatgttgagtggtagacatt

SEQ ID NO: 25996 - DNA, 2363 bp, Zea Mays
gtcgctttcagttcgtgctccagccttttcgtatagtttaatggttttctagtcgtccgtcctcctcggttctggctgccaaccccaagaactgccttgcctagtgcctactgcctagggaaggaccgaaggagaggtgcgcggctggtggcgtgcgagtggcagcggcgccgcgggactcttctcctcgccgctcgcctgctgggtgcgccatccctcgacggtgacaccgtgatattgctgtgaagttttgtggcacttcctgcatcccttatatggtattaacaaaaattttaattgtctgggtgatccatttgagcaaatggaaggcaacgatgtaccccttggaaacatgttgcaaggggttccctatgaaagtttagacttacgtggcagctctatgcaaaattatgctccaaactcaggaaaacatatcttcagcagctcccagatgccaggtactttcacaatgtctatgaccagggctacagagcctgatgactttcctgggtttcagttcaaagaacagggaaagagtgatgaccaccaccaccaacaccatagtcatcactcaaagaactgcaagagtgatggtgaggaacatgttgtggctgaagatgctactgataccccaagtggcaaaggcaagaagggctctgcatggcatcggatgaagtggacagattcaatggtaaaacttttgataacagcagtgtcttacactggagatgatcatggtgctgattccggcggtggcaggaggaacttcacaataatgcagaagaagggcaaatggaaggcgatatcgaaagttatgggagagagaggctgccatgtgtcaccgcaacagtgcgaggacaagttcaatgaccttaacaagagatacaaaaggctgacagacatccttggtaggggcactgcatgcaatgttgtggctaatccagcacttcttgatagcatgactcatctttcagataagatgaaagacgatgcaaaaaagatacttagctcaaagcacctattttatgaggagatgtgttcctaccacaacaacaaccgtgtaaatttgcctgaagatcatgcacttcagcattcactactgcttgcccttagatgtaaagaggagcatgatcctcagagggatccaagtggagatgctgatgaatacgatcaaagtgctgattctgattatgaggagaatgacgacgatcaacatcctgtgcatataaacatgagggagccctcaatgcacaaaaggaagcgccacagtgatgtggctttggtcacatcaagttctcatgaaggcagtgagaggtctgatccccatgctgtcacagtggacatcaacaaggctttcacagatgcaaccaacatggttttgttgcaacaagacttggcttcacaagccatagagattcagaaacgtcgcttgcagattgaagcaaaggaactggaactcacaaagcaacgtcttaagtgggagcggttcaggaagaagaaggacagagagatagaaaggattgcattggagaatgaacatatgatgattgagaacaaacgcttggagcttgagctgagacataaggagttagagctagagctgaagctgaaagacaaggggaaccatccgtaacttttgcttgaccaacactacagtatgtaagatggtaaacaagttgcggttgagcttctggaagagagctggtagattagagtagactctgacaaccattcctcatgtatgtcatggtgatgtggctatggccaactctgaagctctcatggaggatttggtttcacaagcactagagattcaggaaccttaacatgcagtgaagcgacctaactggaactccggaaagcgacgtctcaagtggaagccagaatggacatatcaatatttattgagtgaggaatgagaacaaacgatttgacttgagctgagagcctgagacgtgcaagcagctagagtggcaaaaaggccaagcgaaccactgcataagggtaggtatggtaatggattacaattcaaatgtttcttcataactaattaggagtcttcaataattttagtttaaaaataaatagaaatagagctatattcgattcttaaaatttatagtatattaccatccctatccgaggttgatcaacccttccatttgtaaggcaatctatagcagacttttttttttatcatacctcctatcctactttctattttaaatttcattatataaatagcataaacagtgttttgcataattatatgtacgatctgttgaccagagcctaaaggtgttaaattagttagtgatgcgcaagctaaacctgagaaaagttcatgttgagtggtagacatt

SEQ ID NO: 25997 - DNA, 685 bp, Zea Mays
attcaactaactttatcttattttgtagccttgtgcttctttctactgagttgtcttgtaccaactaaaaatagaggtattttatctcaggttctctactatgtgtaatctcatatcaagattaatgagtatcgtgatcgtataattttggtgagtatccatggaatgcccaggttatcctctaaatgcatagaatcctatcaacccatatggcaaggcaaagaaaatgacagtggacatcatcctagattttacaaaatcaaaggagcaaccagacatggctgtcatgatctaagatacttcaacgtgattggatcgaacccagacatatgactaggagaagctccaaggccactttgtcaagggtctctgcaatgcacttactggttgcatgatttactggaggttgtgcgcatgaatgtgccacacattggtacggggattggagttgaagcagataaatttcaccaacattggagacatgattgtcattcctatcctgtgcacactgcctcctcgccgtcattcatcgtcacccttgcagtcccgataccggagcatggttgccaggggagagcagtccgagacaaatttgccatgttggggcagtcacaggagccaaggggttgcagtcacaggtcctgctagccaggatggagcaatcataggacctcctagcagtcca

SEQ ID NO: 25998 - DNA, 411 bp, Zea Mays
gtactttcatgaatagcttaacaagataattacaagaataatccagatgcaaaagggttgtatggagtgtcctttccttactatgatgaactttcaatggtatattccaaggacatggccacaggtgaaggtgcggaagacatgacagatgctgttcaaaacttggaagaagagctagttcgtgtaaatgctaatgatgaagaggatggagaggatatgacatctgtagagacaccaaggcgttctgttgactcaacatcatctagctccaagaagcggaagaaagagtggaaaggaaagaagacttcatcaagtgacccaatgaagtgagtggtgatctcaaggttgccaccatgtcaattggaaaaatggcgcaagctatggatcgtgaggcatccaaccaagagaagg

SEQ ID NO: 25999 - DNA, 2984 bp, Zea Mays
cgtaaacagccccggaaaaattactcttgtgggttcccacctggcgactgtttttcttctccagtacacctcgccagcgcgataacttaactgcggcggcagccgccggcccgccgcccagctgcgcaggtcttcgtcgcgccggccactagaacgcagcacataagcgtgtacatgtattatgcctacttaacttcggtttttctaccgggtgtgcatgtcgaagcccatgccctttattggctccatctctgttgttgtctggtgccctactgattcagtgcatccatccactggcggccccattaggttcttcgttacggagtaagatcaattttagccatggtgctggcgcagctcgtttttctgaagtttcgggacttcaattgaacccttgagtggacagccacaaaaccatggctgcggttgccggcgtgtcggaaccgccaatggtggagcaagtgatcactgaattcttcgccaagagcctccacgtcatcctggagtcgcgctcaccctatgattcgtcgcggaacttcacactgccctccccaccgtcgtcgccactggctggcagccagccacgtgaccggtggttcaaccttgctctccgggactgccctgccgcgcttgagaattttgacctgtggaggcagagcaacctcgagcctctggtcattgacattgtcctcctgcaacgtgacaacaccagaaccgccagtgtcgaggccagcaggatcatcgagaggtgggtaattaagtacgaaactagcaggtctggcaatgttatcaagaacactgacaagaacgctagaagcagctgttctcaggatcatagcttgtacaggagggcgtacattggctcgacagtgttgttccggtcattgtatctggttgtcaggctcttgccagcataccatcttttcgaggagctcaattcatctggaaggatctgtccgttaagcctcttgcacaggatttcatcatttgttgagccattcacccgcgcagaggatgcagagatgaaacactttgcatttgctccgattgaaactctgcttggttccttaagcttgtcagtttcgtatgtacctgtgttggagttggctgcagtcccagagcagtccacaccaatgccacctgaacttataaaggattatgtcggaagccccacaacagattttcttaggaagcttgattccctaccttcagatggcattgcacctgcatgttttccagtgaccaggcggcacagttggagcactgggcatggagttagaccaccggcatcaccatttcttatgagttcagaaccccatggacgcctacagccatgtatgcctaccgataattctccgacagcatacatacatccacatattacatcatcatctgagaaaaagagaaatacagtaaatgaagagtgttattcatcgccacctctgtctccatcaccatctcatccgccttctagctacccaagaaatcctttcttcagatatgggagtgctccattaagtattcccacagtgagggctggcggaggtggtagcaggctgcctccttctccacgaaggaaggataaacagcaatgctcatctcaaaatgagaatctgacacattctcccaatgataaatcaatagtatcaaaggatttggtcaagcttagtgagtttcataatgcgaagtatttgcaaaaggttttatcgtttggtaatgatgatttaatgtattttcgtggactaaagttgacccatacctccagcaaacttttcatcatggatgaactggatgaacgggagttggtttttgcatgggaagataaagacaccatcattgatcagcttaacaggattgatctctctgactgggaggaccatgaatcgagccaggaacttggaggctcgttaacgagatctccagatgcagcgatcggtattcttatgcgcgtcctaaagaacgccccaggcctcagggaaaggctactgacagtccccagtgctggcacagttcctcaagaaccttcttcactccagagggtagtgactgaggaacatggcagcggagcatcaagctctgcggtggtgccttctgctcttctgaggtcaaggacagcggcggacgcgctgcaggagctgaacaggtacaagcagattagagaatcgatactgagccgcagcagagggcatccctgcagcaccgagctggaggagaaccccgcggatggagacccatagcatacagtatgacgacgaaagcgagctgtatataagtagagaaggctagaagctagctggctgtcttttaagttgctggtggctgctgagatgattttggaaattaggtagctgctaggaactgaccaactctctatatctgctatacatgtataagctacggcagacatatatatctgggatgatggcccacttgctgggttgtgtaaagtcgagacgtttaactgaagttcatgccgtgaaaatgtggttgaccttggctctgttctgtcgacgatttgttaccggacccatgaaagatcttgaagtgttctgtattaaaaaataggatccatttttttatctgttgagatttaatctcggataaatgtagttttcgatgcttcgatgcaagtggtacccaagaaagacacttttcgttacttaggatcaatgcttcagaaagagggagacatcgatgagaatgccagtcatagaattaaagttggatggttgaagtggtggcaagctgcaggtgtcttatgcgacccccgggtgccacacaaactaaaagacaaaaggcctgtttggaacactgcctcggcagccacatcccgccacactcaggacgccatagttgtggcgctcaaattggcagccgcaccttaggcgtgctgcggcgccgcatgcgtctgtccaaacagacccaaattctacaggacaacaatctggtcggctatgttgtatgtagcagaatgttggcccact

SEQ ID NO: 26000 - DNA, 2910 bp, Zea Mays
cgtaaacagccccggaaaaattactcttgtgggttcccacctggcgactgtttttcttctccagtacacctcgccagcgcgataacttaactgcggcggcagccgccggcccgccgcccagctgcgcaggtcttcgtcgcgccggccactagaacgcagcacataaggttcttcgttacggagtaagatcaattttagccatggtgctggcgcagctcgtttttctgaagtttcgggacttcaattgaacccttgagtggacagccacaaaaccatggctgcggttgccggcgtgtcggaaccgccaatggtggagcaagtgatcactgaattcttcgccaagagcctccacgtcatcctggagtcgcgctcaccctatgattcgtcgcggaacttcacactgccctccccaccgtcgtcgccactggctggcagccagccacgtgaccggtggttcaaccttgctctccgggactgccctgccgcgcttgagaattttgacctgtggaggcagagcaacctcgagcctctggtcattgacattgtcctcctgcaacgtgacaacaccagaaccgccagtgtcgaggccagcaggatcatcgagaggtgggtaattaagtacgaaactagcaggtctggcaatgttatcaagaacactgacaagaacgctagaagcagctgttctcaggatcatagcttgtacaggagggcgtacattggctcgacagtgttgttccggtcattgtatctggttgtcaggctcttgccagcataccatcttttcgaggagctcaattcatctggaaggatctgtccgttaagcctcttgcacaggatttcatcatttgttgagccattcacccgcgcagaggatgcagagatgaaacactttgcatttgctccgattgaaactctgcttggttccttaagcttgtcagtttcgtatgtacctgtgttggagttggctgcagtcccagagcagtccacaccaatgccacctgaacttataaaggattatgtcggaagccccacaacagattttcttaggaagcttgattccctaccttcagatggcattgcacctgcatgttttccagtgaccaggcggcacagttggagcactgggcatggagttagaccaccggcatcaccatttcttatgagttcagaaccccatggacgcctacagccatgtatgcctaccgataattctccgacagcatacatacatccacatattacatcatcatctgagaaaaagagaaatacagtaaatgaagagtgttattcatcgccacctctgtctccatcaccatctcatccgccttctagctacccaagaaatcctttcttcagatatgggagtgctccattaagtattcccacagtgagggctggcggaggtggtagcaggctgcctccttctccacgaaggaaggataaacagcaatgctcatctcaaaatgagaatctgacacattctcccaatgataaatcaatagtatcaaaggatttggtcaagcttagtgagtttcataatgcgaagtatttgcaaaaggttttatcgtttggtaatgatgatttaatgtattttcgtggactaaagttgacccatacctccagcaaacttttcatcatggatgaactggatgaacgggagttggtttttgcatgggaagataaagacaccatcattgatcagcttaacagcttcatgagaggacgaattggaaataggacatccgttgggaagataagaaacatcttatttagttcaggattgatctctctgactgggaggaccatgaatcgagccaggaacttggaggctcgttaacgagatctccagatgcagcgatcggtattcttatgcgcgtcctaaagaacgccccaggcctcagggaaaggctactgacagtccccagtgctggcacagttcctcaagaaccttcttcactccagagggtagtgactgaggaacatggcagcggagcatcaagctctgcggtggtgccttctgctcttctgaggtcaaggacagcggcggacgcgctgcaggagctgaacaggtacaagcagattagagaatcgatactgagccgcagcagagggcatccctgcagcaccgagctggaggagaaccccgcggatggagacccatagcatacagtatgacgacgaaagcgagctgtatataagtagagaaggctagaagctagctggctgtcttttaagttgctggtggctgctgagatgattttggaaattaggtagctgctaggaactgaccaactctctatatctgctatacatgtataagctacggcagacatatatatctgggatgatggcccacttgctgggttgtgtaaagtcgagacgtttaactgaagttcatgccgtgaaaatgtggttgaccttggctctgttctgtcgacgatttgttaccggacccatgaaagatcttgaagtgttctgtattaaaaaataggatccatttttttatctgttgagatttaatctcggataaatgtagttttcgatgcttcgatgcaagtggtacccaagaaagacacttttcgttacttaggatcaatgcttcagaaagagggagacatcgatgagaatgccagtcatagaattaaagttggatggttgaagtggtggcaagctgcaggtgtcttatgcgacccccgggtgccacacaaactaaaagacaaaaggcctgtttggaacactgcctcggcagccacatcccgccacactcaggacgccatagttgtggcgctcaaattggcagccgcaccttaggcgtgctgcggcgccgcatgcgtctgtccaaacagacccaaattctacaggacaacaatctggtcggctatgttgtatgtagcagaatgttggcccact

SEQ ID NO: 26001 - DNA, 2870 bp, Zea Mays
cgtaaacagccccggaaaaattactcttgtgggttcccacctggcgactgtttttcttctccagtacacctcgccagcgcgataacttaactgcggcggcagccgccggcccgccgcccagctgcgcaggtcttcgtcgcgccggccactagaacgcagcacataagtgcatccatccactggcggccccattaggttcttcgttacggagtaagatcaattttagccatggtgctggcgcagctcgtttttctgaagtttcgggacttcaattgaacccttgagtggacagccacaaaaccatggctgcggttgccggcgtgtcggaaccgccaatggtggagcaagtgatcactgaattcttcgccaagagcctccacgtcatcctggagtcgcgctcaccctatgattcgtcgcggaacttcacactgccctccccaccgtcgtcgccactggctggcagccagccacgtgaccggtggttcaaccttgctctccgggactgccctgccgcgcttgagaattttgacctgtggaggcagagcaacctcgagcctctggtcattgacattgtcctcctgcaacgtgacaacaccagaaccgccagtgtcgaggccagcaggatcatcgagaggtgggtaattaagtacgaaactagcaggtctggcaatgttatcaagaacactgacaagaacgctagaagcagctgttctcaggatcatagcttgtacaggagggcgtacattggctcgacagtgttgttccggtcattgtatctggttgtcaggctcttgccagcataccatcttttcgaggagctcaattcatctggaaggatctgtccgttaagcctcttgcacaggatttcatcatttgttgagccattcacccgcgcagaggatgcagagatgaaacactttgcatttgctccgattgaaactctgcttggttccttaagcttgtcagtttcgtatgtacctgtgttggagttggctgcagtcccagagcagtccacaccaatgccacctgaacttataaaggattatgtcggaagccccacaacagattttcttaggaagcttgattccctaccttcagatggcattgcacctgcatgttttccagtgaccaggcggcacagttggagcactgggcatggagttagaccaccggcatcaccatttcttatgagttcagaaccccatggacgcctacagccatgtatgcctaccgataattctccgacagcatacatacatccacatattacatcatcatctgagaaaaagagaaatacagtaaatgaagagtgttattcatcgccacctctgtctccatcaccatctcatccgccttctagctacccaagaaatcctttcttcagatatgggagtgctccattaagtattcccacagtgagggctggcggaggtggtagcaggctgcctccttctccacgaaggaaggataaacagcaatgctcatctcaaaatgagaatctgacacattctcccaatgataaatcaatagtatcaaaggatttggtcaagcttagtgagtttcataatgcgaagtatttgcaaaaggttttatcgtttggtaatgatgatttaatgtattttcgtggactaaagttgacccatacctccagcaaacttttcatcatggatgaactggatgaacgggagttggtttttgcatgggaagataaagacaccatcattgatcagcttaacaggattgatctctctgactgggaggaccatgaatcgagccaggaacttggaggctcgttaacgagatctccagatgcagcgatcggtattcttatgcgcgtcctaaagaacgccccaggcctcagggaaaggctactgacagtccccagtgctggcacagttcctcaagaaccttcttcactccagagggtagtgactgaggaacatggcagcggagcatcaagctctgcggtggtgccttctgctcttctgaggtcaaggacagcggcggacgcgctgcaggagctgaacaggtacaagcagattagagaatcgatactgagccgcagcagagggcatccctgcagcaccgagctggaggagaaccccgcggatggagacccatagcatacagtatgacgacgaaagcgagctgtatataagtagagaaggctagaagctagctggctgtcttttaagttgctggtggctgctgagatgattttggaaattaggtagctgctaggaactgaccaactctctatatctgctatacatgtataagctacggcagacatatatatctgggatgatggcccacttgctgggttgtgtaaagtcgagacgtttaactgaagttcatgccgtgaaaatgtggttgaccttggctctgttctgtcgacgatttgttaccggacccatgaaagatcttgaagtgttctgtattaaaaaataggatccatttttttatctgttgagatttaatctcggataaatgtagttttcgatgcttcgatgcaagtggtacccaagaaagacacttttcgttacttaggatcaatgcttcagaaagagggagacatcgatgagaatgccagtcatagaattaaagttggatggttgaagtggtggcaagctgcaggtgtcttatgcgacccccgggtgccacacaaactaaaagacaaaaggcctgtttggaacactgcctcggcagccacatcccgccacactcaggacgccatagttgtggcgctcaaattggcagccgcaccttaggcgtgctgcggcgccgcatgcgtctgtccaaacagacccaaattctacaggacaacaatctggtcggctatgttgtatgtagcagaatgttggcccact

SEQ ID NO: 26002 - DNA, 3040 bp, Zea Mays
tctccagtttgatgggccgctttctccaatgaagaagcgtagtcatacgtgcgtgcacgtgcaggaaaagaaaaggagagaggaatcggcccagagagcgggcaacgaaccaagccgtaaacagccccggaaaaattactcttgtgggttcccacctggcgactgtttttcttctccagtacacctcgccagcgcgataacttaactgcggcggcagccgccggcccgccgcccagctgcgcaggtcttcgtcgcgccggccactagaacgcagcacataagcccatgccctttattggctccatctctgttgttgtctggtgccctactgattcagtgcatccatccactggcggccccattaggttcttcgttacggagtaagatcaattttagccatggtgctggcgcagctcgtttttctgaagtttcgggacttcaattgaacccttgagtggacagccacaaaaccatggctgcggttgccggcgtgtcggaaccgccaatggtggagcaagtgatcactgaattcttcgccaagagcctccacgtcatcctggagtcgcgctcaccctatgattcgtcgcggaacttcacactgccctccccaccgtcgtcgccactggctggcagccagccacgtgaccggtggttcaaccttgctctccgggactgccctgccgcgcttgagaattttgacctgtggaggcagagcaacctcgagcctctggtcattgacattgtcctcctgcaacgtgacaacaccagaaccgccagtgtcgaggccagcaggatcatcgagaggtgggtaattaagtacgaaactagcaggtctggcaatgttatcaagaacactgacaagaacgctagaagcagctgttctcaggatcatagcttgtacaggagggcgtacattggctcgacagtgttgttccggtcattgtatctggttgtcaggctcttgccagcataccatcttttcgaggagctcaattcatctggaaggatctgtccgttaagcctcttgcacaggatttcatcatttgttgagccattcacccgcgcagaggatgcagagatgaaacactttgcatttgctccgattgaaactctgcttggttccttaagcttgtcagtttcgtatgtacctgtgttggagttggctgcagtcccagagcagtccacaccaatgccacctgaacttataaaggattatgtcggaagccccacaacagattttcttaggaagcttgattccctaccttcagatggcattgcacctgcatgttttccagtgaccaggcggcacagttggagcactgggcatggagttagaccaccggcatcaccatttcttatgagttcagaaccccatggacgcctacagccatgtatgcctaccgataattctccgacagcatacatacatccacatattacatcatcatctgagaaaaagagaaatacagtaaatgaagagtgttattcatcgccacctctgtctccatcaccatctcatccgccttctagctacccaagaaatcctttcttcagatatgggagtgctccattaagtattcccacagtgagggctggcggaggtggtagcaggctgcctccttctccacgaaggaaggataaacagcaatgctcatctcaaaatgagaatctgacacattctcccaatgataaatcaatagtatcaaaggatttggtcaagcttagtgagtttcataatgcgaagtatttgcaaaaggttttatcgtttggtaatgatgatttaatgtattttcgtggactaaagttgacccatacctccagcaaacttttcatcatggatgaactggatgaacgggagttggtttttgcatgggaagataaagacaccatcattgatcagcttaacaggattgatctctctgactgggaggaccatgaatcgagccaggaacttggaggctcgttaacgagatctccagatgcagcgatcggtattcttatgcgcgtcctaaagaacgccccaggcctcagggaaaggctactgacagtccccagtgctggcacagttcctcaagaaccttcttcactccagagggtagtgactgaggaacatggcagcggagcatcaagctctgcggtggtgccttctgctcttctgaggtcaaggacagcggcggacgcgctgcaggagctgaacaggtacaagcagattagagaatcgatactgagccgcagcagagggcatccctgcagcaccgagctggaggagaaccccgcggatggagacccatagcatacagtatgacgacgaaagcgagctgtatataagtagagaaggctagaagctagctggctgtcttttaagttgctggtggctgctgagatgattttggaaattaggtagctgctaggaactgaccaactctctatatctgctatacatgtataagctacggcagacatatatatctgggatgatggcccacttgctgggttgtgtaaagtcgagacgtttaactgaagttcatgccgtgaaaatgtggttgaccttggctctgttctgtcgacgatttgttaccggacccatgaaagatcttgaagtgttctgtattaaaaaataggatccatttttttatctgttgagatttaatctcggataaatgtagttttcgatgcttcgatgcaagtggtacccaagaaagacacttttcgttacttaggatcaatgcttcagaaagagggagacatcgatgagaatgccagtcatagaattaaagttggatggttgaagtggtggcaagctgcaggtgtcttatgcgacccccgggtgccacacaaactaaaagacaaaaggcctgtttggaacactgcctcggcagccacatcccgccacactcaggacgccatagttgtggcgctcaaattggcagccgcaccttaggcgtgctgcggcgccgcatgcgtctgtccaaacagacccaaattctacaggacaacaatctggtcggctatgttgtatgtagcagaatgttggcccact

SEQ ID NO: 26003 - DNA, 987 bp, Zea Mays
gtcaagtcctggtttcaagatccgatcctggcgaaccggcagtctgcggcgaggtccaaggagaggaagatcaagtacaccagtgagctggagaggaaggtgcagacgctgcagacagaggccaccacactttcggcacagctcacgcttcttcagagggacacctctggtttaaccactgagaacagggagctgaagctccggctgcaggccatggaagaacaagctaaactccgagatgctctaaatgacgccctgagagaagaagtccagcggcttaagatagccacagggcaggtccctaacataaacgggaatcccttcaacggaggactaccccagcagcagcaggtgccgagctatttctcacaaccacaggggatgcaatacttcagcagccaccagggccagcatcagcatccgaaccatcaccctcagagttcttcaaacggtggtggccagtccttgagtgactccatggatttcatgtgaggaccgaaggagagacagctcaggagttgcctgagatcacataccaactaaagtactgtaaaaaggttgctgatgtataccatattcagtattattatgatacgcgtcattgtaggttagctagctgttccttgtaccattaatcagaagttcattcatgcatgaattgacaacctgtcattgctttcgtttctggggttcaagtaaaatcgtttgactgcttgacgagttcagtgtcggtgttgccatgtaaagtcgttcttgtaatagtgaatgaatagttcccggttggaactagtggttttttacactgctgaaagccatcgtggttggcaataatgtctcatggtcaatgaaacgtgaaataattctgcctgtattccacccttcttgtcggaggttgacgtgatgtctttaggctgtctttttcatagggaaaccctctgcccacttttttaggaagggtgaaaccagcaccataagtcatactagtcg

SEQ ID NO: 26004 - DNA, 3886 bp, Zea Mays
gttaaatctctattttgccctttgtggaagaaatgatggctgtctcggaagccgtgaagacagataaaaaaagaaaaagaaggcaagtaaacaaagcagcaaggaccaaggaggacgaaagcgagcgagacacacaacagtgacaccagcacaagcaaggagaggcatagggaggagagcagccagcagcaggaaagctgagcagccgtcagctgagagctagagcaagagcatccaccagtggcggcagcagctagcgacaaaggctgaatccgagagtgcgcgccgcagccgtggctgccgtcccaggcgccgctgccgcttgtgagaggcgctcgtcttgtattcacgaggagggcgacgatctcccgcgcggcaaaggaactaaccactggccccgccctgtgatggctgctgtccgtgccccggcggcgaagggaggtgtaggtgctccggaggcggcggcgtggagtggcagtggtctccgcgcgaaccaggccgggcgcgccagctgccgcggcgcctagagcgagcgcctggacgtggtctctctcgcagtccgagttggagcttgggttttggcgcggagggacgccggggttctggttctggcaacgcggctggaggaaggggggaaacggagatggcggtcggggacgcgctgcgacggctgtgcgaggagatcgggtggtcctacgccgtcttctggaaggccatcggcgccgccgaccccgtgcatttggtgcgggaggacggttactgtggccacacttcatgccctgtcggatctgagccttctgaatctctgcctctgcccagcgacgctgggtgctctgttcctgcagctgacaccatctgctggcttgttaacaacgatatggcgtcgcaggttcatgtcgtcggacaagggatcgtgggccgtgccgcgttcagtggcaatcaccaatggatcgtccacggtactgccaatggtcacgggctctcctccgaggttgctgctgaggtgaacaatcagttcagagttggtattaagactattgcgatcattcctgtgctgccacggggtgtcctacagttaggctctactggtttggttatggaaaacacaaattttgttatgtttgcaaagaagttgtgttctcagctaaacaaccgttcaagcatggctgcatctgcttcggttaagaacacttctagtcagcatggtcagtcacgtcctgatactgcaactgtgtcaactagtacaccaccaaatgcattgctgagtgcatctttgcttaaggttgcgcaacagaatggtcaccctgttagagagcacagtgtctatgctgagcgtgatcttaggtttatacaacaagcatccatctgtgagagtcaatttggaagtaatttacagagtggtgttatgaactcatgtttgacctccccaagcttcgcatcagttaaaaagcagtcacttttgatgaacagcattgggcagttacagttcagtaataatgtgcattcatcagcagatttggcaagggagatcatattaaaatcccttgggcgccaggactcttctgtctgcgaaaatacaaacatgaatatgcatcgtggaagatatgtagtatccaatgatataaatggttctaggaattttgattttcttcctattggtgcgaaagaaagcagagccaacttatcaatccctgcgtcgagtcaaattttggaccacatgccaggaacattgcagcagaaacagtctctagtcccattcagggttacccaatcttctgaattttctaagaaagtggagaaccctgaaagtggatcatttcaaattccttcagttacaacttctgattctggtggtcaggtttctaacagtttcaacatggtccaagagaatcgattgagtatgtcaaacaatgtccgacaagtccaaaagattgacagatttagtgatccaagtgctaatgtcagcactcagagaatgaagaacagagatgaatgcgagccaggaatgcccattgagagagcctcctcgttcctagtcgaacctggtgcagataatgacttgtttgatatgtttggttctgaatttcatcagtcctcccacaacgttggtgctgatttggtcacctggagtggtacagagtctcagaactcagatagagatgtccctgaatcgtcaatatgtttcaatagttcaccacttttcagttcgctagacaacgagcttcactattcaggtatcttatcgctgactgatactgatcaactattggatgctgtcatatcaaatgtcaatccaagtggtaaacagtgtcctgataatagtgcttcttgcaagactgcactgatggatgttcctagcacatctcatctttgttcaatagatttgaagagataataatggaatgcacaaatctcagatacggctttggattgagagtggtcagaacatgaaatgtgagagtgcttcagcttctaatagcaaaggtcttgatgtgccaagcaaggcaaatcgcaagagatctcgaccaggagaaagccctaagccacgacctaaggaccggcagctgatacaggaccgtattaaagagcttcgtgagcttgtaccgaatggggcaaagtgtagcattgatggtttgttggagaagacagttaagcacatgcttttcttacaaagtgtgacgaaaaatgcagacaagctcaaggactctactgagtctaagatacttggtagcgaaaatggccccctttggaaagactacttcgaaggtggggctacctgggcttttgatgtcggctctcagtctatgacatgtccgatcattgtcgaggatcttgaccgacctcgtcaaatgcttgtggagatgctctgcgaggatagaggaatcttcttggagatagctgatttcatcaaaggacttggactgactatcttgaggggtgtgatggaaacacgcaaaagtaaaatctgggcacgattcactgttgaggcgaaccgggacgtaaccagaatggagatattcctatcgcttgtgcgcttattggagccaaattgtgacggcagtggagcggcggacaacactaacaacatgaacatgcatcttggtttggtgcaccaacctgtcatcccagcaacaggtctcatccaatgagattaagactaagaggaaaccctcaagcatcttccaagtgctaagagcaggaggagctcagctaactcctgccatgactagcatcaccaatacgccatgcagtgcaccacctgctttcccgagacaccttaatctgtgcaaaagtgacgtccttcttgagaccaggtcgcagaaatggaagaaggaaaacaacgcaagagtgatcatcaggcagtgttttgttcgtatgatctttagattgtttgttagttagcgctgtttggtcgtatattagtggttttttttgggtactgttatccagaatggaagttcttgggttggtttatttcacacacacaaaaagatggaatgccacctttgttataagtctcttcacattagaaccagtgagcatagctagtgaaaaattgtttgagaagactcttgagtcattgctctgatcagattatttgttattactcactgctgctgcctgccaacatccagaagtagatcactggattctagctgaagccacaatgtcatccagcagcacatggtgctgccaatgagttgcaatgtgatatgtttactttaagcaaaacagatactaataatactagtaggcaatttttgtaaaatgtttgggtatcaactagttacttatcaccatcctatactagataggtgcccgtgcgatgccacggaacataaatctcgatttgtatatcagctatgcttcctatggagcaaggaag

SEQ ID NO: 26005 - DNA, 4057 bp, Zea Mays
gttaaatctctattttgccctttgtggaagaaatgatggctgtctcggaagccgtgaagacagataaaaaaagaaaaagaaggcaagtaaacaaagcagcaaggaccaaggaggacgaaagcgagcgagacacacaacagtgacaccagcacaagcaaggagaggcatagggaggagagcagccagcagcaggaaagctgagcagccgtcagctgagagctagagcaagagcatccaccagtggcggcagcagctagcgacaaaggctgaatccgagagtgcgcgccgcagccgtggctgccgtcccaggcgccgctgccgcttgtgagaggcgctcgtcttgtattcacgaggagggcgacgatctcccgcgcggcaaaggaactaaccactggccccgccctgtgatggctgctgtccgtgccccggcggcgaagggaggtgtaggtgctccggaggcggcggcgtggagtggcagtggtctccgcgcgaaccaggccgggcgcgccagctgccgcggcgcctagagcgagcgcctggacgtggtctctctcgcagtccgagttggagcttgggttttggcgcggagggacgccggggttctggttctggcaacgcggctggaggaaggggggaaacggagatggcggtcggggacgcgctgcgacggctgtgcgaggagatcgggtggtcctacgccgtcttctggaaggccatcggcgccgccgaccccgtgcatttggtgcgggaggacggttactgtggccacacttcatgccctgtcggatctgagccttctgaatctctgcctctgcccagcgacgctgggtgctctgttcctgcagctgacaccatctgctggcttgttaacaacgatatggcgtcgcaggttcatgtcgtcggacaagggatcgtgggccgtgccgcgttcagtggcaatcaccaatggatcgtccacggtactgccaatggtcacgggctctcctccgaggttgctgctgaggtgaacaatcagttcagagttggtattaagactattgcgatcattcctgtgctgccacggggtgtcctacagttaggctctactggtttggttatggaaaacacaaattttgttatgtttgcaaagaagttgtgttctcagctaaacaaccgttcaagcatggctgcatctgcttcggttaagaacacttctagtcagcatggtcagtcacgtcctgatactgcaactgtgtcaactagtacaccaccaaatgcattgctgagtgcatctttgcttaaggttgcgcaacagaatggtcaccctgttagagagcacagtgtctatgctgagcgtgatcttaggtttatacaacaagcatccatctgtgagagtcaatttggaagtaatttacagagtggtgttatgaactcatgtttgacctccccaagcttcgcatcagttaaaaagcagtcacttttgatgaacagcattgggcagttacagttcagtaataatgtgcattcatcagcagatttggcaagggagatcatattaaaatcccttgggcgccaggactcttctatctgcgaaaatacaaacatgaatatgcatcgtggaagatatgtagtatcccttgggcgccaggactcttctgtctgcgaaaatacaaacatgaatatgcatcgtggaagatatgtagtatccaatgatataaatggttctaggaattttgattttcttcctattggtgcgaaagaaagcagagccaacttatcaatccctgcgtcgagtcaaattttggaccacatgccaggaacattgcagcagaaacagtctctagtcccattcagggttacccaatcttctgaattttctaagaaagtggagaaccctgaaagtggatcatttcaaattccttcagttacaacttctgattctggtggtcaggtttctaacagtttcaacatggtccaagagaatcgattgagtatgtcaaacaatgtccgacaagtccaaaagattgacagatttagtgatccaagtgctaatgtcagcactcagagaatgaagaacagagatgaatgcgagccaggaatgcccattgagagagcctcctcgttcctagtcgaacctggtgcagataatgacttgtttgatatgtttggttctgaatttcatcagtcctcccacaacgttggtgctgatttggtcacctggagtggtacagagtctcagaactcagatagagatgtccctgaatcgtcaatatgtttcaatagttcaccacttttcagttcgctagacaacgagcttcactattcaggtatcttatcgctgactgatactgatcaactattggatgctgtcatatcaaatgtcaatccaagtggtaaacagtgtcctgataatagtgcttcttgcaagactgcactgatggatgttcctagcacatctcatctttgttcaatagatttgaagagatgtgagtctcccagcgttccttccctgctaattaagcacgaattggcacagtttgctaaacagccatgtctcgttgataaatctgaggatggttgtctttcccagaataatggaatgcacaaatctcagatacggctttggattgagagtggtcagaacatgaaatgtgagagtgcttcagcttctaatagcaaaggtcttgatgtgccaagcaaggcaaatcgcaagagatctcgaccaggagaaagccctaagccacgacctaaggaccggcagctgatacaggaccgtattaaagagcttcgtgagcttgtaccgaatggggcaaagcattgatggtttgttggagaagacagttaagcacatgcttttcttacaaagtgtgacgaaaaatgcagacaagctcaaggactctactgagtctaagatacttggtagcgaaaatggccccctttggaaagactacttcgaaggtggggctacctgggcttttgatgtcggctctcagtctatgacatgtccgatcattgtcgaggatcttgaccgacctcgtcaaatgcttgtggagatgctctgcgaggatagaggaatcttcttggagatagctgatttcatcaaaggacttggactgactatcttgaggggtgtgatggaaacacgcaaaagtaaaatctgggcacgattcactgttgaggcgaaccgggacgtaaccagaatggagatattcctatcgcttgtgcgcttattggagccaaattgtgacggcagtggagcggcggacaacactaacaacatgaacatgcatcttggtttggtgcaccaacctgtcatcccagcaacaggtctcatccaatgagattaagactaagaggaaaccctcaagcatcttccaagtgctaagagcaggaggagctcagctaactcctgccatgactagcatcaccaatacgccatgcagtgcaccacctgctttcccgagacaccttaatctgtgcaaaagtgacgtccttcttgagaccaggtcgcagaaatggaagaaggaaaacaacgcaagagtgatcatcaggcagtgttttgttcgtatgatctttagattgtttgttagttagcgctgtttggtcgtatattagtggttttttttgggtactgttatccagaatggaagttcttgggttggtttatttcacacacacaaaaagatggaatgccacctttgttataagtctcttcacattagaaccagtgagcatagctagtgaaaaattgtttgagaagactcttgagtcattgctctgatcagattatttgttattactcactgctgctgcctgccaacatccagaagtagatcactggattctagctgaagccacaatgtcatccagcagcacatggtgctgccaatgagttgcaatgtgatatgtttactttaagcaaaacagatactaataatactagtaggcaatttttgtaaaatgtttgggtatcaactagttacttatcaccatcctatactagataggtgcccgtgcgatgccacggaacataaatctcgatttgtatatcagctatgcttcctatggagcaaggaag

SEQ ID NO: 26006 - DNA, 3031 bp, Zea Mays
gtttgtttgcagagtttctatggtcactgctgttctgttctgcaagaacttgattccaagtatactatttttgagtggtatatataattctttgagagtctataaatcaatcacatagtttgactgggaaatggggttcagcttaacaaaaaaagaggtggcagtagtcgtggagatcaaactaaaaaaaatattgaattgcagtgtctggttcatagccgctgaaaccaagatagccgtggcgttacatcaagtacttagggagtctttgaatgcactagtgttaatagttagcgactaaaattagctggagacatccaaacaccctagctaatagttcaaatattagctatttttagtaaattggttaatagttagctagctaattccactagcaattttttagccaactaactattagctctagtacattcaaatacccccttagttaatgccactaaatctaagctaaatataggggatgcttgcattgagtgcgcaaaaagacaaaaaagactttactaaatatgaacagcacttgcaacaaagaacagaaaatgagctgtaaaacatgtgattgatgtgtttatgtgaactcaaccgttattgcagctctgttttcctaattacctaatgtgatcacaaccacttgatcagctgatcagcctagtatagcgatgtgttcatatgatataacataatgccacacgtgcatcacaagcggccttgacctaatagaattgctgaacctgatatttagatttgttatgggtttcatttgttttgcactggttgcctatggcagtgatgtcatcccaagattctattggcacggtgctcaagtgtatgcagaagggtgcggtggacttccttgtgaaaccagtaagaaagaatgagctgggtaacctgtggcaacatgtgtggaggaggcatgcaatgaattgccagacaaatggatcagaaaataatgcagccagcaatcatgtaagtaccaatgttgctaatgggtcaaagacaggagaaaacaatgatgaggaaagtgatgcccaaactgttttgtcttgactagagctttggtaacaaaagggagactgaaattaagagtgctgagacgttaccagatattcgtagagatgaaatggctggctcatccaaaaaaattgaactacaaaataagtctaatgatggagtaaacacaaaagtggatgcgtcaaaagatagcgatggtgctccaagtgaaagtgagaagaatgtgcgttccaaatgccttaatggtattacttctgcaaaggtggctgagcaaataatggataatgccttgaggatcacggatgcaagttcacgtcgtccaaccaatcttggcaaagatttggctatgactgaaccagcagctgatagaaaatgccaatctttagtgatggaaaataatgctgtcaaagaaaagaaccctggtgaaaagtcgaagagtgctgtaataggtcatgctgattcttacccctcccaatttctcgagaccaacttgggaaaacaacagtatcgtaatggttacaagaatcaagaattcagggaaaaagatatctttaatcactcgaattcttctgccttctcgagatatggcaatagaaggatagaatcatcaggtgagatacagtttcttccttctcgttgcattgttgggcaagagcagcatgttcatggcaaggacccagttttccaacccaatggggtcttgctgcctcccaatgaccataatacaggtgagagtacaaggcaagctcgaattactctggacagtagcatggagggtgctgacatcatttgctccagtagtgctagggaagatgctggtgcaagtagttcttcccatagaaaggacagtatgagccatccctcatatgggtttgtacctgttccaattcctgtcggtgccatgatgccctatcattgtggtgcaattctgcagccagtatactacccacagggtccacttatgcactgtaattcatctgcaatcaacaaggcaacaattcatcaaacctctggccaatctaactaccgtgaagattgtggtagtggtagaccatctcaggttgatgaacacaaacagtcagaggaaaagcaccagttgcatcattcaagacaaattcatcgggaatcaggacaaccagttgacatggttagagctcacatggatcatgctaaccagagtgcaagctgcagccgggatatctgtaaaggaagcggatgcacgggtagcggtgaagccgataccaatgcgaacacgacggttgccctagagagtggcaacgagagtggcatccaaaatagtgacaggtctcaccgagaagctgctttgatgaagttccgcatgaaaaggaaagacagatgcttcgataaaaaggtcaggtatcatagcaggaagaagcttgcggagcagaggccaagagttaaggggcagtttgtaagccagaagctgaaagcagctatggcaacggaagccgaaactgactcgtgacgggcgctagtccagaactgtaattttggttcttcccttcgcgccaggtgtgggcgattggactggtaagtctgaaggctggcaaaagtttttttttcttccttccatggttagcctttctgtacaaaggtgaactccacgtcgggtgtttgttggcatccaagccttattttttgcgaggtacatcaagttgacaaaatgttcggagggatagggtgaaaacggtgcaagcgccatatttcgtccatacgcttaggtgtttgtggagtgtgaaagcagagcctgtacagcatattcaccacccattctgttgccattacaattgtagtaacttgtaattactactatgacaaaagtagacactgttgtagaacttacagccagcaggtcttttccatatgggacagtagcattttatttattaattggttgatcatatgaggacagtcccgaatgcaggacagttaagatttgtttgatccaatccaatcatccagcattttgcttgccttaaac

SEQ ID NO: 26007 - DNA, 3012 bp, Zea Mays
gtttgtttgcagagtttctatggtcactgctgttctgttctgcaagaacttgattccaagtatactatttttgagtggtatatataattctttgagagtctataaatcaatcacatagtttgactgggaaatggggttcagcttaacaaaaaaagaggtggcagtagtcgtggagatcaaactaaaaaaaatattgaattgcagtgtctggttcatagccgctgaaaccaagatagccgtggcgttacatcaagtacttagggagtctttgaatgcactagtgttaatagttagcgactaaaattagctggagacatccaaacaccctagctaatagttcaaatattagctatttttagtaaattggttaatagttagctagctaattccactagcaattttttagccaactaactattagctctagtacattcaaatacccccttagttaatgccactaaatctaagctaaatataggggatgcttgcattgagtgcgcaaaaagacaaaaaagactttactaaatatgaacagcacttgcaacaaagaacagaaaatgagctgtaaaacatgtgattgatgtgtttatgtgaactcaaccgttattgcagctctgttttcctaattacctaatgtgatcacaaccacttgatcagctgatcagcctagtatagcgatgtgttcatatgatataacataatgccacacgtgcatcacaagcggccttgacctaatagaattgctgaacctgatatttagatttgttatgggtttcatttgttttgcactggttgcctatggcagtgatgtcatcccaagattctattggcacggtgctcaagtgtatgcagaagggtgcggtggacttccttgtgaaaccagtaagaaagaatgagctgggtaacctgtggcaacatgtgtggaggaggcatgcaatgaattgccagacaaatggatcagaaaataatgcagccagcaatcatgtaagtaccaatgttgctaatgggtcaaagacaggagaaaacaatgatgaggaaagtgatgcccaaagctttggtaacaaaagggagactgaaattaagagtgctgagacgttaccagatattcgtagagatgaaatggctggctcatccaaaaaaattgaactacaaaataagtctaatgatggagtaaacacaaaagtggatgcgtcaaaagatagcgatggtgctccaagtgaaagtgagaagaatgtgcgttccaaatgccttaatggtattacttctgcaaaggtggctgagcaaataatggataatgccttgaggatcacggatgcaagttcacgtcgtccaaccaatcttggcaaagatttggctatgactgaaccagcagctgatagaaaatgccaatctttagtgatggaaaataatgctgtcaaagaaaagaaccctggtgaaaagtcgaagagtgctgtaataggtcatgctgattcttacccctcccaatttctcgagaccaacttgggaaaacaacagtatcgtaatggttacaagaatcaagaattcagggaaaaagatatctttaatcactcgaattcttctgccttctcgagatatggcaatagaaggatagaatcatcaggtgagatacagtttcttccttctcgttgcattgttgggcaagagcagcatgttcatggcaaggacccagttttccaacccaatggggtcttgctgcctcccaatgaccataatacaggtgagagtacaaggcaagctcgaattactctggacagtagcatggagggtgctgacatcatttgctccagtagtgctagggaagatgctggtgcaagtagttcttcccatagaaaggacagtatgagccatccctcatatgggtttgtacctgttccaattcctgtcggtgccatgatgccctatcattgtggtgcaattctgcagccagtatactacccacagggtccacttatgcactgtaattcatctgcaatcaacaaggcaacaattcatcaaacctctggccaatctaactaccgtgaagattgtggtagtggtagaccatctcaggttgatgaacacaaacagtcagaggaaaagcaccagttgcatcattcaagacaaattcatcgggaatcaggacaaccagttgacatggttagagctcacatggatcatgctaaccagagtgcaagctgcagccgggatatctgtaaaggaagcggatgcacgggtagcggtgaagccgataccaatgcgaacacgacggttgccctagagagtggcaacgagagtggcatccaaaatagtgacaggtctcaccgagaagctgctttgatgaagttccgcatgaaaaggaaagacagatgcttcgataaaaaggtcaggtatcatagcaggaagaagcttgcggagcagaggccaagagttaaggggcagtttgtaagccagaagctgaaagcagctatggcaacggaagccgaaactgactcgtgacgggcgctagtccagaactgtaattttggttcttcccttcgcgccaggtgtgggcgattggactggtaagtctgaaggctggcaaaagtttttttttcttccttccatggttagcctttctgtacaaaggtgaactccacgtcgggtgtttgttggcatccaagccttattttttgcgaggtacatcaagttgacaaaatgttcggagggatagggtgaaaacggtgcaagcgccatatttcgtccatacgcttaggtgtttgtggagtgtgaaagcagagcctgtacagcatattcaccacccattctgttgccattacaattgtagtaacttgtaattactactatgacaaaagtagacactgttgtagaacttacagccagcaggtcttttccatatgggacagtagcattttatttattaattggttgatcatatgaggacagtcccgaatgcaggacagttaagatttgtttgatccaatccaatcatccagcattttgcttgccttaaac

SEQ ID NO: 26008 - DNA, 2855 bp, Zea Mays
gtttgtttgcagagtttctatggtcactgctgttctgttctgcaagaacttgattccaagtatactatttttgagtggtatatataattctttgagagtctataaatcaatcacatagtttgactgggaaatggggttcagcttaacaaaaaaagaggtggcagtagtcgtggagatcaaactaaaaaaaatattgaattgcagtgtctggttcatagccgctgaaaccaagatagccgtggcgttacatcaagtacttagggagtctttgaatgcactagtgttaatagttagcgactaaaattagctggagacatccaaacaccctagctaatagttcaaatattagctatttttagtaaattggttaatagttagctagctaattccactagcaattttttagccaactaactattagctctagtacattcaaatacccccttagttaatgccactaaatctaagctaaatataggggatgcttgcattgagtgcgcaaaaagacaaaaaagactttactaaatatgaacagcacttgcaacaaagaacagaaaatgagctgtaaaacatgtgattgatgtgtttatgtgaactcaaccgttattgcagctctgttttcctaattacctaatgtgatcacaaccacttgatcagctgatcagcctagtatagcgatgtgttcatatgatataacataatgccacacgtgcatcacaagcggccttgacctaatagaattgctgaacctgatatttagatttgttatgggtttcatttgttttgcactggttgcctatggcagtgatgtcatcccaagattctattggcacggtgctcaagtgtatgcagaagggtgcggtggacttccttgtgaaaccagtaagaaagaatgagctgggtaacctgtggcaacatgtgtggaggaggcatgcaatgaattgccagacaaatggatcagaaaataatgcagccagcaatcatgtaagtaccaatgttgctaatgggtcaaagacaggagaaaacaatgatgaggaaagtgatgcccaagtgctccaagtgaaagtgagaagaatgtgcgttccaaatgccttaatggtattacttctgcaaaggtggctgagcaaataatggataatgccttgaggatcacggatgcaagttcacgtcgtccaaccaatcttggcaaagatttggctatgactgaaccagcagctgatagaaaatgccaatctttagtgatggaaaataatgctgtcaaagaaaagaaccctggtgaaaagtcgaagagtgctgtaataggtcatgctgattcttacccctcccaatttctcgagaccaacttgggaaaacaacagtatcgtaatggttacaagaatcaagaattcagggaaaaagatatctttaatcactcgaattcttctgccttctcgagatatggcaatagaaggatagaatcatcaggtgagatacagtttcttccttctcgttgcattgttgggcaagagcagcatgttcatggcaaggacccagttttccaacccaatggggtcttgctgcctcccaatgaccataatacaggtgagagtacaaggcaagctcgaattactctggacagtagcatggagggtgctgacatcatttgctccagtagtgctagggaagatgctggtgcaagtagttcttcccatagaaaggacagtatgagccatccctcatatgggtttgtacctgttccaattcctgtcggtgccatgatgccctatcattgtggtgcaattctgcagccagtatactacccacagggtccacttatgcactgtaattcatctgcaatcaacaaggcaacaattcatcaaacctctggccaatctaactaccgtgaagattgtggtagtggtagaccatctcaggttgatgaacacaaacagtcagaggaaaagcaccagttgcatcattcaagacaaattcatcgggaatcaggacaaccagttgacatggttagagctcacatggatcatgctaaccagagtgcaagctgcagccgggatatctgtaaaggaagcggatgcacgggtagcggtgaagccgataccaatgcgaacacgacggttgccctagagagtggcaacgagagtggcatccaaaatagtgacaggtctcaccgagaagctgctttgatgaagttccgcatgaaaaggaaagacagatgcttcgataaaaaggtcaggtatcatagcaggaagaagcttgcggagcagaggccaagagttaaggggcagtttgtaagccagaagctgaaagcagctatggcaacggaagccgaaactgactcgtgacgggcgctagtccagaactgtaattttggttcttcccttcgcgccaggtgtgggcgattggactggtaagtctgaaggctggcaaaagtttttttttcttccttccatggttagcctttctgtacaaaggtgaactccacgtcgggtgtttgttggcatccaagccttattttttgcgaggtacatcaagttgacaaaatgttcggagggatagggtgaaaacggtgcaagcgccatatttcgtccatacgcttaggtgtttgtggagtgtgaaagcagagcctgtacagcatattcaccacccattctgttgccattacaattgtagtaacttgtaattactactatgacaaaagtagacactgttgtagaacttacagccagcaggtcttttccatatgggacagtagcattttatttattaattggttgatcatatgaggacagtcccgaatgcaggacagttaagatttgtttgatccaatccaatcatccagcattttgcttgccttaaac

SEQ ID NO: 26009 - DNA, 2122 bp, Zea Mays
cactattattagccaagctgtaacttcaagcaagcgactgtgatgtcatcccaagattctattggcacggtgctcaagtgtatgcagaagggtgcggtggacttccttgtgaaaccagtaagaaagaatgagctgggtaacctgtggcaacatgtgtggaggaggcatgcaatgaattgccagacaaatggatcagaaaataatgcagccagcaatcatgtaagtaccaatgttgctaatgggtcaaagacaggagaaaacaatgatgaggaaagtgatgcccaaagctttggtaacaaaagggagactgaaattaagagtgctgagacgttaccagatattcgtagagatgaaatggctggctcatccaaaaaaattgaactacaaaataagtctaatgatggagtaaacacaaaagtggatgcgtcaaaagatagcgatggtgctccaagtgaaagtgagaagaatgtgcgttccaaatgccttaatggtattacttctgcaaaggtggctgagcaaataatggataatgccttgaggatcacggatgcaagttcacgtcgtccaaccaatcttggcaaagatttggctatgactgaaccagcagctgatagaaaatgccaatctttagtgatggaaaataatgctgtcaaagaaaagaaccctggtgaaaagtcgaagagtgctgtaataggtcatgctgattcttacccctcccaatttctcgagaccaacttgggaaaacaacagtatcgtaatggttacaagaatcaagaattcagggaaaaagatatctttaatcactcgaattcttctgccttctcgagatatggcaatagaaggatagaatcatcaggtgagatacagtttcttccttctcgttgcattgttgggcaagagcagcatgttcatggcaaggacccagttttccaacccaatggggtcttgctgcctcccaatgaccataatacaggtgagagtacaaggcaagctcgaattactctggacagtagcatggagggtgctgacatcatttgctccagtagtgctagggaagatgctggtgcaagtagttcttcccatagaaaggacagtatgagccatccctcatatgggtttgtacctgttccaattcctgtcggtgccatgatgccctatcattgtggtgcaattctgcagccagtatactacccacagggtccacttatgcactgtaattcatctgcaatcaacaaggcaacaattcatcaaacctctggccaatctaactaccgtgaagattgtggtagtggtagaccatctcaggttgatgaacacaaacagtcagaggaaaagcaccagttgcatcattcaagacaaattcatcgggaatcaggacaaccagttgacatggttagagctcacatggatcatgctaaccagagtgcaagctgcagccgggatatctgtaaaggaagcggatgcacgggtagcggtgaagccgataccaatgcgaacacgacggttgccctagagagtggcaacgagagtggcatccaaaatagtgacaggtctcaccgagaagctgctttgatgaagttccgcatgaaaaggaaagacagatgcttcgataaaaaggtcaggtatcatagcaggaagaagcttgcggagcagaggccaagagttaaggggcagtttgtaagccagaagctgaaagcagctatggcaacggaagccgaaactgactcgtgacgggcgctagtccagaactgtaattttggttcttcccttcgcgccaggtgtgggcgattggactgttgacaaaatgttcggagggatagggtgaaaacggtgcaagcgccatatttcgtccatacgcttaggtgtttgtggagtgtgaaagcagagcctgtacagcatattcaccacccattctgttgccattacaattgtagtaacttgtaattactactatgacaaaagtagacactgttgtagaacttacagccagcaggtcttttccatatgggacagtagcattttatttattaattggttgatcatatgaggacagtcccgaatgcaggacagttaagatttgtttgatccaatccaatcatccagcattttgcttgccttaaac

SEQ ID NO: 26010 - DNA, 2768 bp, Zea Mays
tcgttctcgtctcccagccccgtcgccgctgacgtggcgcccaccgcgcggaaaaaaatattgcagatattttcctcaccgctccttcccccctctctgctcgtccttgcctcccaccgcaccgccggctcttgctctgctcggttcctcctggcagcaaccgaatgtctcccgacgccgacgccgccgccgggggaggaggaggtggagaggcgagcgccggcgccggcgccggcgcgtcgtcgcctcccgcgtccgcgtccgcggcggcgaacggccgggcgctggtgcggtgggaccagatcctgccgcgccgctccctgcgggtgcttctcgtcgagcacgacgactccacgcgccagatcgtcaccgcgctcctccgcaagtgcggctaccgcgtggccgcggtcgcggacgggatgaaggcgtgggaggtcatgcgggagcgtgcctacgacttcgacctcgtcctcaccgaggtcgccatgccctccctctccggcatccagctgctctccaggatcgccgccgccgccgagtgcaagaacatccccgtcatcatgatgtcatcccaagattctattggcacggtgctcaagtgtatgcagaagggtgcggtggacttccttgtgaaaccagtaagaaagaatgagctgggtaacctgtggcaacatgtgtggaggaggcatgcaatgaattgccagacaaatggatcagaaaataatgcagccagcaatcatgtaagtaccaatgttgctaatgggtcaaagacaggagaaaacaatgatgaggaaagtgatgcccaaagctttggtaacaaaagggagactgaaattaagagtgctgagacgttaccagatattcgtagagatgaaatggctggctcatccaaaaaaattgaactacaaaataagtctaatgatggagtaaacacaaaagtggatgcgtcaaaagatagcgatggtgctccaagtgaaagtgagaagaatgtgcgttccaaatgccttaatggtattacttctgcaaaggtggctgagcaaataatggataatgccttgaggatcacggatgcaagttcacgtcgtccaaccaatcttggcaaagatttggctatgactgaaccagcagctgatagaaaatgccaatctttagtgatggaaaataatgctgtcaaagaaaagaaccctggtgaaaagtcgaagagtgctgtaataggtcatgctgattcttacccctcccaatttctcgagaccaacttgggaaaacaacagtatcgtaatggttacaagaatcaagaattcagggaaaaagatatctttaatcactcgaattcttctgccttctcgagatatggcaatagaaggatagaatcatcaggtgagatacagtttcttccttctcgttgcattgttgggcaagagcagcatgttcatggcaaggacccagttttccaacccaatggggtcttgctgcctcccaatgaccataatacaggtgagagtacaaggcaagctcgaattactctggacagtagcatggagggtgctgacatcatttgctccagtagtgctagggaagatgctggtgcaagtagttcttcccatagaaaggacagtatgagccatccctcatatgggtttgtacctgttccaattcctgtcggtgccatgatgccctatcattgtggtgcaattctgcagccagtatactacccacagggtccacttatgcactgtaattcatctgcaatcaacaaggcaacaattcatcaaacctctggccaatctaactaccgtgaagattgtggtagtggtagaccatctcaggttgatgaacacaaacagtcagaggaaaagcaccagttgcatcattcaagacaaattcatcgggaatcaggacaaccagttgacatggttagagctcacatggatcatgctaaccagagtgcaagctgcagccgggatatctgtaaaggaagcggatgcacgggtagcggtgaagccgataccaatgcgaacacgacggttgccctagagagtggcaacgagagtggcatccaaaatagtgacaggtctcaccgagaagctgctttgatgaagttccgcatgaaaaggaaagacagatgcttcgataaaaaggtcaggtatcatagcaggaagaagcttgcggagcagaggccaagagttaaggggcagtttgtaagccagaagctgaaagcagctatggcaacggaagccgaaactgactcgtgacgggcgctagtccagaactgtaattttggttcttcccttcgcgccaggtgtgggcgattggactggtaagtctgaaggctggcaaaagtttttttttcttccttccatggttagcctttctgtacaaaggtgaactccacgtcgggtgtttgttggcatccaagccttattttttgcgaggtacatcaagttgacaaaatgttcggagggatagggtgaaaacggtgcaagcgccatatttcgtccatacgcttaggtgtttgtggagtgtgaaagcagagcctgtacagcatattcaccacccattctgttgccattacaattgtagtaacttgtaattactactatgacaaaagtagacactgttgtagaacttacagccagcaggtcttttccatatgggacagtagcattttatttattaattggttgatcatatgaggacagtcccgaatgcaggacagttaagatttgtttgatccaatccaatcatccagcattttgcttgccttaaac

SEQ ID NO: 26011 - DNA, 2751 bp, Zea Mays
tcgttctcgtctcccagccccgtcgccgctgacgtggcgcccaccgcgcggaaaaaaatattgcagatattttcctcaccgctccttcccccctctctgctcgtccttgcctcccaccgcaccgccggctcttgctctgctcggttcctcctggcagcaaccgaatgtctcccgacgccgacgccgccgccgggggaggaggaggtggagaggcgagcgccggcgccggcgccggcgcgtcgtcgcctcccgcgtccgcgtccgcggcggcgaacggccgggcgctggtgcggtgggaccagatcctgccgcgccgctccctgcgggtgcttctcgtcgagcacgacgactccacgcgccagatcgtcaccgcgctcctccgcaagtgcggctaccgcgtggccgcggtcgcggacgggatgaaggcgtgggaggtcatgcgggagcgtgcctacgacttcgacctcgtcctcaccgaggtcgccatgccctccctctccggcatccagctgctctccaggatcgccgccgccgccgagtgcaagaacatccccgtcatcatgatgtcatcccaagattctattggcacggtgctcaagtgtatgcagaagggtgcggtggacttccttgtgaaaccagtaagaaagaatgagctgggtaacctgtggcaacatgtgtggaggaggcatgcaatgaattgccagacaaatggatcagaaaataatgcagccagcaatcatgtaagtaccaatgttgctaatgggtcaaagacaggagaaaacaatgatgaggaaagtgatgcccaaggagactgaaattaagagtgctgagacgttaccagatattcgtagagatgaaatggctggctcatccaaaaaaattgaactacaaaataagtctaatgatggagtaaacacaaaagtggatgcgtcaaaagatagcgatggtgctccaagtgaaagtgagaagaatgtgcgttccaaatgccttaatggtattacttctgcaaaggtggctgagcaaataatggataatgccttgaggatcacggatgcaagttcacgtcgtccaaccaatcttggcaaagatttggctatgactgaaccagcagctgatagaaaatgccaatctttagtgatggaaaataatgctgtcaaagaaaagaaccctggtgaaaagtcgaagagtgctgtaataggtcatgctgattcttacccctcccaatttctcgagaccaacttgggaaaacaacagtatcgtaatggttacaagaatcaagaattcagggaaaaagatatctttaatcactcgaattcttctgccttctcgagatatggcaatagaaggatagaatcatcaggtgagatacagtttcttccttctcgttgcattgttgggcaagagcagcatgttcatggcaaggacccagttttccaacccaatggggtcttgctgcctcccaatgaccataatacaggtgagagtacaaggcaagctcgaattactctggacagtagcatggagggtgctgacatcatttgctccagtagtgctagggaagatgctggtgcaagtagttcttcccatagaaaggacagtatgagccatccctcatatgggtttgtacctgttccaattcctgtcggtgccatgatgccctatcattgtggtgcaattctgcagccagtatactacccacagggtccacttatgcactgtaattcatctgcaatcaacaaggcaacaattcatcaaacctctggccaatctaactaccgtgaagattgtggtagtggtagaccatctcaggttgatgaacacaaacagtcagaggaaaagcaccagttgcatcattcaagacaaattcatcgggaatcaggacaaccagttgacatggttagagctcacatggatcatgctaaccagagtgcaagctgcagccgggatatctgtaaaggaagcggatgcacgggtagcggtgaagccgataccaatgcgaacacgacggttgccctagagagtggcaacgagagtggcatccaaaatagtgacaggtctcaccgagaagctgctttgatgaagttccgcatgaaaaggaaagacagatgcttcgataaaaaggtcaggtatcatagcaggaagaagcttgcggagcagaggccaagagttaaggggcagtttgtaagccagaagctgaaagcagctatggcaacggaagccgaaactgactcgtgacgggcgctagtccagaactgtaattttggttcttcccttcgcgccaggtgtgggcgattggactggtaagtctgaaggctggcaaaagtttttttttcttccttccatggttagcctttctgtacaaaggtgaactccacgtcgggtgtttgttggcatccaagccttattttttgcgaggtacatcaagttgacaaaatgttcggagggatagggtgaaaacggtgcaagcgccatatttcgtccatacgcttaggtgtttgtggagtgtgaaagcagagcctgtacagcatattcaccacccattctgttgccattacaattgtagtaacttgtaattactactatgacaaaagtagacactgttgtagaacttacagccagcaggtcttttccatatgggacagtagcattttatttattaattggttgatcatatgaggacagtcccgaatgcaggacagttaagatttgtttgatccaatccaatcatccagcattttgcttgccttaaac

SEQ ID NO: 26012 - DNA, 3066 bp, Zea Mays
ctcggcctcccactccggcttccatttcatccacgatgatgatctcgttctcgtctcccagccccgtcgccgctgacgtggcgcccaccgcgcggaaaaaaatattgcagatattttcctcaccgctccttcccccctctctgctcgtccttgcctcccaccgcaccgccggctcttgctctgctcggttcctcctggcagcaaccgaatgtctcccgacgccgacgccgccgccgggggaggaggaggtggagaggcgagcgccggcgccggcgccggcgcgtcgtcgcctcccgcgtccgcgtccgcggcggcgaacggccgggcgctggtgcggtgggaccagatcctgccgcgccgctccctgcgggtgcttctcgtcgagcacgacgactccacgcgccagatcgtcaccgcgctcctccgcaagtgcggctaccgcgtggccgcggtcgcggacgggatgaaggcgtgggaggtcatgcgggagcgtgcctacgacttcgacctcgtcctcaccgaggtcgccatgccctccctctccggcatccagctgctctccaggatcgccgccgccgccgagtgcaagaacatccccgtcatcatgatgtcatcccaagattctattggcacggtgctcaagtgtatgcagaagggtgcggtggacttccttgtgaaaccagtaagaaagaatgagctgggtaacctgtggcaacatgtgtggaggaggcatgcaatgaattgccagacaaatggatcagaaaataatgcagccagcaatcatgtaagtaccaatgttgctaatgggtcaaagacaggagaaaacaatgatgaggaaagtgatgcccaagtaagtatctaaccttgcttacagcgtacctgttcaactggcattaatgcatgtgttaagtttcacatttgcatccctgcttagcttgacaacaccagtttaatagaaagtaatgaagtttggcagtatagcactatagcatttatagacatgtccttttctatgatggttctttttcttgactttaacatagtgagtgtaactggcactgtttaatggaatcagttagagttcatcatttcatcctttatgcggttctgatataacattcatattggatttctttgccatgttacgttatggagactgttttgtcttgactagagctttggtaacaaaagggagactgaaattaagagtgctgagacgttaccagatattcgtagagatgaaatggctggctcatccaaaaaaattgaactacaaaataagtctaatgatggagtaaacacaaaagtggatgcgtcaaaagatagcgatggtgctccaagtgaaagtgagaagaatgtgcgttccaaatgccttaatggtattacttctgcaaaggtggctgagcaaataatggataatgccttgaggatcacggatgcaagttcacgtcgtccaaccaatcttggcaaagatttggctatgactgaaccagcagctgatagaaaatgccaatctttagtgatggaaaataatgctgtcaaagaaaagaaccctggtgaaaagtcgaagagtgctgtaataggtcatgctgattcttacccctcccaatttctcgagaccaacttgggaaaacaacagtatcgtaatggttacaagaatcaagaattcagggaaaaagatatctttaatcactcgaattcttctgccttctcgagatatggcaatagaaggatagaatcatcaggtgagatacagtttcttccttctcgttgcattgttgggcaagagcagcatgttcatggcaaggacccagttttccaacccaatggggtcttgctgcctcccaatgaccataatacagtagtgctagggaagatgctggtgcaagtagttcttcccatagaaaggacagtatgagccatccctcatatgggtttgtacctgttccaattcctgtcggtgccatgatgccctatcattgtggtgcaattctgcagccagtatactacccacagggtccacttatgcactgtaattcatctgcaatcaacaaggcaacaattcatcaaacctctggccaatctaactaccgtgaagattgtggtagtggtagaccatctcaggttgatgaacacaaacagtcagaggaaaagcaccagttgcatcattcaagacaaattcatcgggaatcaggacaaccagttgacatggttagagctcacatggatcatgctaaccagagtgcaagctgcagccgggatatctgtaaaggaagcggatgcacgggtagcggtgaagccgataccaatgcgaacacgacggttgccctagagagtggcaacgagagtggcatccaaaatagtgacaggtctcaccgagaagctgctttgatgaagttccgcatgaaaaggaaagacagatgcttcgataaaaaggtcaggtatcatagcaggaagaagcttgcggagcagaggccaagagttaaggggcagtttgtaagccagaagctgaaagcagctatggcaacggaagccgaaactgactcgtgacgggcgctagtccagaactgtaattttggttcttcccttcgcgccaggtgtgggcgattggactggtaagtctgaaggctggcaaaagtttttttttcttccttccatggttagcctttctgtacaaaggtgaactccacgtcgggtgtttgttggcatccaagccttattttttgcgaggtacatcaagttgacaaaatgttcggagggatagggtgaaaacggtgcaagcgccatatttcgtccatacgcttaggtgtttgtggagtgtgaaagcagagcctgtacagcatattcaccacccattctgttgccattacaattgtagtaacttgtaattactactatgacaaaagtagacactgttgtagaacttacagccagcaggtcttttccatatgggacagtagcattttatttattaattggttgatcatatgaggacagtcccgaatgcaggacagttaagatttgtttgatccaatccaatcatccagcattttgcttgccttaaac

SEQ ID NO: 26013 - DNA, 2863 bp, Zea Mays
ggaggggatggaggaaggcaggggcaaaatatctcggcctcccactccggcttccatttcatccacgatgatgatctcgttctcgtctcccagccccgtcgccgctgacgtggcgcccaccgcgcggaaaaaaatattgcagatattttcctcaccgctccttcccccctctctgctcgtccttgcctcccaccgcaccgccggctcttgctctgctcggttcctcctggcagcaaccgaatgtctcccgacgccgacgccgccgccgggggaggaggaggtggagaggcgagcgccggcgccggcgccggcgcgtcgtcgcctcccgcgtccgcgtccgcggcggcgaacggccgggcgctggtgcggtgggaccagatcctgccgcgccgctccctgcgggtgcttctcgtcgagcacgacgactccacgcgccagatcgtcaccgcgctcctccgcaagtgcggctaccgcgtggccgcggtcgcggacgggatgaaggcgtgggaggtcatgcgggagcgtgcctacgacttcgacctcgtcctcaccgaggtcgccatgccctccctctccggcatccagctgctctccaggatcgccgccgccgccgagtgcaagaacatccccgtcatcatgatgtcatcccaagattctattggcacggtgctcaagtgtatgcagaagggtgcggtggacttccttgtgaaaccagtaagaaagaatgagctgggtaacctgtggcaacatgtgtggaggaggcatgcaatgaattgccagacaaatggatcagaaaataatgcagccagcaatcatgtaagtaccaatgttgctaatgggtcaaagacaggagaaaacaatgatgaggaaagtgatgcccaaactgttttgtcttgactagagctttggtaacaaaagggagactgaaattaagagtgctgagacgttaccagatattcgtagagatgaaatggctggctcatccaaaaaaattgaactacaaaataagtctaatgatggagtaaacacaaaagtggatgcgtcaaaagatagcgatggtgctccaagtgaaagtgagaagaatgtgcgttccaaatgccttaatggtattacttctgcaaaggtggctgagcaaataatggataatgccttgaggatcacggatgcaagttcacgtcgtccaaccaatcttggcaaagatttggctatgactgaaccagcagctgatagaaaatgccaatctttagtgatggaaaataatgctgtcaaagaaaagaaccctggtgaaaagtcgaagagtgctgtaataggtcatgctgattcttacccctcccaatttctcgagaccaacttgggaaaacaacagtatcgtaatggttacaagaatcaagaattcagggaaaaagatatctttaatcactcgaattcttctgccttctcgagatatggcaatagaaggatagaatcatcaggtgagatacagtttcttccttctcgttgcattgttgggcaagagcagcatgttcatggcaaggacccagttttccaacccaatggggtcttgctgcctcccaatgaccataatacaggtgagagtacaaggcaagctcgaattactctggacagtagcatggagggtgctgacatcatttgctccagtagtgctagggaagatgctggtgcaagtagttcttcccatagaaaggacagtatgagccatccctcatatgggtttgtacctgttccaattcctgtcggtgccatgatgccctatcattgtggtgcaattctgcagccagtatactacccacagggtccacttatgcactgtaattcatctgcaatcaacaaggcaacaattcatcaaacctctggccaatctaactaccgtgaagattgtggtagtggtagaccatctcaggttgatgaacacaaacagtcagaggaaaagcaccagttgcatcattcaagacaaattcatcgggaatcaggacaaccagttgacatggttagagctcacatggatcatgctaaccagagtgcaagctgcagccgggatatctgtaaaggaagcggatgcacgggtagcggtgaagccgataccaatgcgaacacgacggttgccctagagagtggcaacgagagtggcatccaaaatagtgacaggtctcaccgagaagctgctttgatgaagttccgcatgaaaaggaaagacagatgcttcgataaaaaggtcaggtatcatagcaggaagaagcttgcggagcagaggccaagagttaaggggcagtttgtaagccagaagctgaaagcagctatggcaacggaagccgaaactgactcgtgacgggcgctagtccagaactgtaattttggttcttcccttcgcgccaggtgtgggcgattggactggtaagtctgaaggctggcaaaagtttttttttcttccttccatggttagcctttctgtacaaaggtgaactccacgtcgggtgtttgttggcatccaagccttattttttgcgaggtacatcaagttgacaaaatgttcggagggatagggtgaaaacggtgcaagcgccatatttcgtccatacgcttaggtgtttgtggagtgtgaaagcagagcctgtacagcatattcaccacccattctgttgccattacaattgtagtaacttgtaattactactatgacaaaagtagacactgttgtagaacttacagccagcaggtcttttccatatgggacagtagcattttatttattaattggttgatcatatgaggacagtcccgaatgcaggacagttaagatttgtttgatccaatccaatcatccagcattttgcttgccttaaac

SEQ ID NO: 26014 - DNA, 3263 bp, Zea Mays
aaggttctctgactaggattcctgcagaagaggaatactcaggatgaaggaggagttgtaagggtagagaaatgtgacgactaggtgacggcgtgacctccaactgcttaatagctgtccgaggcgccgaagagctaatttgagtctatagtagcgttgtgtgggttttcaaattgtcaaatttctccctgtctctatgatcggtcaaagccgagcgtaccgtgtttaataatgtcaaaaatctcatctgcgtgggcttgtcaacgcggaaaagccggtggacctcgtccgcgtggagtctcatctgcttgggcttgtcaacgcggaaaagccggtggacctcgtccgcgtggagaaaaaaaaaacagagaatatctgcgtaaactcctctgtgtcagtcatctgcaccccacttcatcagcattatccgcggctccggcctccgggcttggttcatctctttagctagcgggaggccattcgcagttggagcttcttccatagatctggttggtcactgctccaagaaggtctcggccagccggcggaaggcccctcttccagaaatggacgatcaggagaatgaagatcaagcccttgagcacatattaactgatgctaatgcagagccagtcatgctatcatatgcattcttaaaaagtattacaaatgatttctcatgtgtaatcggtaggggtgggtttggagtggtttataagggttatcttcataatgggaaaactgtagctgtgaagcagctttccaaaacagatgacttttcagaaaagcagtttcatgatgagcttatgtgtttgataagggttaaacacaggaatatagtgagatttttaggctactgctctgatacacaacaaaaaatggcagatttcaatggaagatttgttttggcagatatccgacgaaggttcctctgctttgagtttgtacctaacaaaagccttctccattatctcaaagaacaatctactggacgtgattggaaaacacgctatcaattgattgagggaatctgtcagggtttgtggtatcttcatcatgaagaacacattaatcatttggatctgaaacctgaaaatattttactggatgatgacatggtcccaaaaatatcagactttgggttatcaagacggttcagtggagaactgaatgttatcatcactgaaaatatctgcgggacattgggatatattgccccggaatatttgagcaaaggggaaatatcattcaaggccgacatttttagtctgggaatcataatcaaaaaaatattaatgggaagtaatgatttatctgattttgaaaagtggcatgaatcacaagatgtacactgcccacaattgaacagatgcattcaaatatcacaactctgtctggaagacgatcaacataaaagaccgactataggttgcatcattgacatgctgaatgacatgaaaacaacgacgactgagacaatagtatctccaggtttcggccactcaagaaataactcagggtcttctgaagaatatgagagctgtgactcgtcacacttgcctgggattcaccatggagaagtccactctgctactgaggcaagtacatgtgtctccgagttgctggagcaggtgcagtcgctgggtgtttctacagtgccatcatcccagctgcatcgaataaccagtatacccaaaggctttggcgaaacaaacactcatcatatacgctcccctgggtcgacctctgagagtagcaagctactggacgtatacccactggagctccggttcccattggagccaaacaagtgcactgaatgcccagtgaccctgacaaacaggacagactgttacgttggtgtctggattacaccggcgaaacctcacacttgccatggcttttatttttcgtacctgtggtggcagtttccaagctcatcctttttccagatcatggacccgcattccacattggtcgtaaccttggtaatggacccgctgcagctgggactgggactgcaagacactgaggacaaatttcaggtgttgatgattgtcatggaatcacagaaggatctcgaaaatttgaacccgtcgattagtagcagcacggacaatgatatgttgaggcgagtcgaggagttggggggcgaggtccaccgggcaatcctgagggctgtcagctgtgatccagcaagctgcaagccagaagtggtccacagtgttccaatggtcatttcagcaaaaactttagagaatgtcttatccatcgacgtggacctcgatatgtgttggatcctggctagtcatcgcgcaggttatgtttccatttggaactacaacacacagggaagggtgactgcattgaaggtcaccaaggaagcaggcatgctacactcgctcacacgtactcgtagtgccaccacatcgtgtgtttattcggccaaatttatcactagaaagaaattgttcgcaacaggggacggctatgggtatatctgcatctatgcatacacaatggacaaagtgaagaaatttgaagcttatcatggcaaacctgtcagcttgttggctgttcactcaacctacccgttcttgctttcgtcgtcgtcttgtgaccgctcaatcaagctttgggcctgggaccagcaatgggcgtgcactcgaacattcgacgctcacacgagcggagtgcagcatgtcaggttcaacccagctgatgtcaacacttttgttagtgtttcctgtggtggcgcctgtgtaaaggtctgggagattcattcttccacccctatcaccacattgtttggtccgaacaacgttgattatttcactgatgctgatcgccagttccttctcaacatttggtcccagaaggcaacaatattggatctacagacacaaaaaactgtccacaggctccttgttcaccagcgggagatgcgtgatgttgcttgccaccccacacttccaatattggctaccagattagatgatgggactgtttgtttgtgggacgccactacctacaggctcgttgttgcgtgtgaagacgggatggaaattctgaaaattaacatgccaacatcaacgaagtaagcaatcagcctgcaccagagatcagaccaaagagcaatattagagttaaaaatatttgcaccgcatggggcaggcctaacggtcggttctagagcctgactgaactatatgactatatctagacaactaattggccctcgaacagcttctctccactgtacg

SEQ ID NO: 26015 - DNA, 1805 bp, Zea Mays
ctcaactattgctcaatcgcgaacaaagcctctttcttcctcctttgctcttctagccttctcttgaccaacatgcaacatgagttgagtacctcatcttccaaagcactcgcacatggtatgcaatctccttgacctggctttaacttctcttgagcactcatcctcaattgaggagcttgaggcaagtacatgtgtctccgagttgctggagcaggtgcagtcgctgggtgtttctacagtgccatcatcccagctgcatcgaataaccagtatacccaaaggctttggcgaaacaaacactcatcatatacgctcccctgggtcgacctctgagagtagcaagctactggacgtatacccactggagctccggttcccattggagccaaacaagtgcactgaatgcccagtgaccctgacaaacaggacagactgttacgttggtgtctggattacaccggcgaaacctcacacttgccatggcttttatttttcgtacctgtggtggcagtttccaagctcatcctttttccagatcatggacccgcattccacattggtcgtaaccttggtaatggacccgctgcagctgggactgggactgcaagacactgaggacaaatttcaggtgttgatgattgtcatggaatcacagaaggatctcgaaaatttgaacccgtcgattagtagcagcacggacaatgatatgttgaggcgagtcgaggagttggggggcgaggtccaccgggcaatcctgagggctgtcagctgtgatccagcaagctgcaagccagaagtggtccacagtgttccaatggtcatttcagcaaaaactttagagaatgtcttatccatcgacgtggacctcgatatgtgttggatcctggctagtcatcgcgcaggttatgtttccatttggaactacaacacacagggaagggtgactgcattgaaggtcaccaaggaagcaggcatgctacactcgctcacacgtactcgtagtgccaccacatcgtgtgtttattcggccaaatttatcactagaaagaaattgttcgcaacaggggacggctatgggtatatctgcatctatgcatacacaatggacaaagtgaagaaatttgaagcttatcatggcaaacctgtcagcttgttggctgttcactcaacctacccgttcttgctttcgtcgtcgtcttgtgaccgctcaatcaagctttgggcctgggaccagcaatgggcgtgcactcgaacattcgacgctcacacgagcggagtgcagcatgtcaggttcaacccagctgatgtcaacacttttgttagtgtttcctgtggtggcgcctgtgtaaaggtctgggagattcattcttccacccctatcaccacattgtttggtccgaacaacgttgattatttcactgatgctgatcgccagttccttctcaacatttggtcccagaaggcaacaatattggatctacagacacaaaaaactgtccacaggctccttgttcaccagcgggagatgcgtgatgttgcttgccaccccacacttccaatattggctaccagattagatgatgggactgtttgtttgtgggacgccactacctacaggcttgagagaatcattcgccttgagtcctccattctacatacggcgttcaaagacacagcggactcaatatggtatacaacttttgttttttttatggtagtgcatgtgcgacagaacgttaattttggctcaagtatctgtacatctgtttgactttaattataatattagtccaaagaaaaat

SEQ ID NO: 26016 - DNA, 3272 bp, Zea Mays
aaggttctctgactaggattcctgcagaagaggaatactcaggatgaaggaggagttgtaagggtagagaaatgtgacgactaggtgacggcgtgacctccaactgcttaatagctgtccgaggcgccgaagagctaatttgagtctatagtagcgttgtgtgggttttcaaattgtcaaatttctccctgtctctatgatcggtcaaagccgagcgtaccgtgtttaataatgtcaaaaatctcatctgcgtgggcttgtcaacgcggaaaagccggtggacctcgtccgcgtggagtctcatctgcttgggcttgtcaacgcggaaaagccggtggacctcgtccgcgtggagaaaaaaaaaacagagaatatctgcgtaaactcctctgtgtcagtcatctgcaccccacttcatcagcattatccgcggctccggcctccgggcttggttcatctctttagctagcgggaggccattcgcagttggagcttcttccatagatctggttggtcactgctccaagaaggtctcggccagccggcggaaggcccctcttccagaaatggacgatcaggagaatgaagatcaagcccttgagcacatattaactgatgctaatgcagagccagtcatgctatcatatgcattcttaaaaagtattacaaatgatttctcatgtgtaatcggtaggggtgggtttggagtggtttataagggttatcttcataatgggaaaactgtagctgtgaagcagctttccaaaacagatgacttttcagaaaagcagtttcatgatgagcttatgtgtttgataagggttaaacacaggaatatagtgagatttttaggctactgctctgatacacaacaaaaaatggcagatttcaatggaagatttgttttggcagatatccgacgaaggttcctctgctttgagtttgtacctaacaaaagccttctccattatctcaaagaacaatctactggacgtgattggaaaacacgctatcaattgattgagggaatctgtcagggtttgtggtatcttcatcatgaagaacacattaatcatttggatctgaaacctgaaaatattttactggatgatgacatggtcccaaaaatatcagactttgggttatcaagacggttcagtggagaactgaatgttatcatcactgaaaatatctgcgggacattgggatatattgccccggaatatttgagcaaaggggaaatatcattcaaggccgacatttttagtctgggaatcataatcaaaaaaatattaatgggaagtaatgatttatctgattttgaaaagtggcatgaatcacaagatgtacactgcccacaattgaacagatgcattcaaatatcacaactctgtctggaagacgatcaacataaaagaccgactataggttgcatcattgacatgctgaatgacatgaaaacaacgacgactgagacaatagtatctccaggtttcggccactcaagaaataactcagggtcttctgaagaatatgagagctgtgactcgtcacacttgcctgggattcaccatggagaagtccactctgctactgaggcaagtacatgtgtctccgagttgctggagcaggtgcagtcgctgggtgtttctacagtgccatcatcccagctgcatcgaataaccagtatacccaaaggctttggcgaaacaaacactcatcatatacgctcccctgggtcgacctctgagagtagcaagctactggacgtatacccactggagctccggttcccattggagccaaacaagtgcactgaatgcccagtgaccctgacaaacaggacagactgttacgttggtgtctggattacaccggcgaaacctcacacttgccatggcttttatttttcgtacctgtggtggcagtttccaagctcatcctttttccagatcatggacccgcattccacattggtcgtaaccttggtaatggacccgctgcagctgggactgggactgcaagacactgaggacaaatttcaggtgttgatgattgtcatggaatcacagaaggatctcgaaaatttgaacccgtcgattagtagcagcacggacaatgatatgttgaggcgagtcgaggagttggggggcgaggtccaccgggcaatcctgagggctgtcagctgtgatccagcaagctgcaagccagaagtggtccacagtgttccaatggtgtgtgttgctcccttccatctgcagtacttgtccacagaacacaccaagaagtcatttcagcaaaaactttagagaatgtcttatccatcgacgtggacctcgatatgtgttggatcctggctagtcatcgcgcaggttatgtttccatttggaactacaacacacagggaagggtgactgcattgaaggtcaccaaggaagcaggcatgctacactcgctcacacgtactcgtagtgccaccacatcgtgtgtttattcggccaaatttatcactagaaagaaattgttcgcaacaggggacggctatgggtatatctgcatctatgcatacacaatggacaaagtgaagaaatttgaagcttatcatggcaaacctgtcagcttgttggctgttcactcaacctacccgttcttgctttcgtcgtcgtcttgtgaccgctcaatcaagctttgggcctgggaccagcaatgggcgtgcactcgaacattcgacgctcacacgagcggagtgcagcatgtcaggttcaacccagctgatgtcaacacttttgttagtgtttcctgtggtggcgcctgtgtaaaggtctgggagattcattcttccacccctatcaccacattgtttggtccgaacaacgttgattatttcactgatgctgatcgccagttccttctcaacatttggtcccagaaggcaacaatattggatctacagacacaaaaaactgtccacaggctccttgttcaccagcgggagatgcgtgatgttgcttgccaccccacacttccaatattggctaccagattagatgatgggactgtttgtttgtgggacgccactacctacaggcttgagagaatcattcgccttgagtcctccattctacatacggcgttcaaagacacagcggactcaatatggtatacaacttttgttttttttatggtagtgcatgtgcgacagaacgttaattttggctcaagtatctgtacatctgtttgactttaattataatattagtccaaagaaaaat

SEQ ID NO: 26017 - DNA, 3252 bp, Zea Mays
aaggttctctgactaggattcctgcagaagaggaatactcaggatgaaggaggagttgtaagggtagagaaatgtgacgactaggtgacggcgtgacctccaactgcttaatagctgtccgaggcgccgaagagctaatttgagtctatagtagcgttgtgtgggttttcaaattgtcaaatttctccctgtctctatgatcggtcaaagccgagcgtaccgtgtttaataatgtcaaaaatctcatctgcgtgggcttgtcaacgcggaaaagccggtggacctcgtccgcgtggagtctcatctgcttgggcttgtcaacgcggaaaagccggtggacctcgtccgcgtggagaaaaaaaaaacagagaatatctgcgtaaactcctctgtgtcagtcatctgcaccccacttcatcagcattatccgcggctccggcctccgggcttggttcatctctttagctagcgggaggccattcgcagttggagcttcttccatagatctggttggtcactgctccaagaaggtctcggccagccggcggaaggcccctcttccagaaatggacgatcaggagaatgaagatcaagcccttgagcacatattaactgatgctaatgcagagccagtcatgctatcatatgcattcttaaaaagtattacaaatgatttctcatgtgtaatcggtaggggtgggtttggagtggtttataagggttatcttcataatgggaaaactgtagctgtgaagcagctttccaaaacagatgacttttcagaaaagcagtttcatgatgagcttatgtgtttgataagggttaaacacaggaatatagtgagatttttaggctactgctctgatacacaacaaaaaatggcagatttcaatggaagatttgttttggcagatatccgacgaaggttcctctgctttgagtttgtacctaacaaaagccttctccattatctcaaagggtttgtggtatcttcatcatgaagaacacattaatcatttggatctgaaacctgaaaatattttactggatgatgacatggtcccaaaaatatcagactttgggttatcaagacggttcagtggagaactgaatgttatcatcactgaaaatatctgcgggacattgggatatattgccccggaatatttgagcaaaggggaaatatcattcaaggccgacatttttagtctgggaatcataatcaaaaaaatattaatgggaagtaatgatttatctgattttgaaaagtggcatgaatcacaagatgtacactgcccacaattgaacagatgcattcaaatatcacaactctgtctggaagacgatcaacataaaagaccgactataggttgcatcattgacatgctgaatgacatgaaaacaacgacgactgagacaatagtatctccaggtttcggccactcaagaaataactcagggtcttctgaagaatatgtatatctgcaatgagtgcttgattgaaacttcctctctaagaggtcgtacaatatccgaattaatcatgtaatttatccattttattataggagagctgtgactcgtcacacttgcctgggattcaccatggagaagtccactctgctactgaggcaagtacatgtgtctccgagttgctggagcaggtgcagtcgctgggtgtttctacagtgccatcatcccagctgcatcgaataaccagtatacccaaaggctttggcgaaacaaacactcatcatatacgctcccctgggtcgacctctgagagtagcaagctactggacgtatacccactggagctccggttcccattggagccaaacaagtgcactgaatgcccagtgaccctgacaaacaggacagactgttacgttggtgtctggattacaccggcgaaacctcacacttgccatggcttttatttttcgtacctgtggtggcagtttccaagctcatcctttttccagatcatggacccgcattccacattggtcgtaaccttggtaatggacccgctgcagctgggactgggactgcaagacactgaggacaaatttcaggtgttgatgattgtcatggaatcacagaaggatctcgaaaatttgaacccgtcgattagtagcagcacggacaatgatatgttgaggcgagtcgaggagttggggggcgaggtccaccgggcaatcctgagggctgtcagctgtgatccagcaagctgcaagccagaagtggtccacagtgttccaatggtcatttcagcaaaaactttagagaatgtcttatccatcgacgtggacctcgatatgtgttggatcctggctagtcatcgcgcaggttatgtttccatttggaactacaacacacagggaagggtgactgcattgaaggtcaccaaggaagcaggcatgctacactcgctcacacgtactcgtagtgccaccacatcgtgtgtttattcggccaaatttatcactagaaagaaattgttcgcaacaggggacggctatgggtatatctgcatctatgcatacacaatggacaaagtgaagaaatttgaagcttatcatggcaaacctgtcagcttgttggctgttcactcaacctacccgttcttgctttcgtcgtcgtcttgtgaccgctcaatcaagctttgggcctgggaccagcaatgggcgtgcactcgaacattcgacgctcacacgagcggagtgcagcatgtcaggttcaacccagctgatgtcaacacttttgttagtgtttcctgtggtggcgcctgtgtaaaggtctgggagattcattcttccacccctatcaccacattgtttggtccgaacaacgttgattatttcactgatgctgatcgccagttccttctcaacatttggtcccagaaggcaacaatattggatctacagacacaaaaaactgtccacaggctccttgttcaccagcgggagatgcgtgatgttgcttgccaccccacacttccaatattggctaccagattagatgatgggactgtttgtttgtgggacgccactacctacaggcttgagagaatcattcgccttgagtcctccattctacatacggcgttcaaagacacagcggactcaatatggtatacaacttttgttttttttatggtagtgcatgtgcgacagaacgttaattttggctcaagtatctgtacatctgtttgactttaattataatattagtccaaagaaaaat

SEQ ID NO: 26018 - DNA, 3219 bp, Zea Mays
aaggttctctgactaggattcctgcagaagaggaatactcaggatgaaggaggagttgtaagggtagagaaatgtgacgactaggtgacggcgtgacctccaactgcttaatagctgtccgaggcgccgaagagctaatttgagtctatagtagcgttgtgtgggttttcaaattgtcaaatttctccctgtctctatgatcggtcaaagccgagcgtaccgtgtttaataatgtcaaaaatctcatctgcgtgggcttgtcaacgcggaaaagccggtggacctcgtccgcgtggagtctcatctgcttgggcttgtcaacgcggaaaagccggtggacctcgtccgcgtggagaaaaaaaaaacagagaatatctgcgtaaactcctctgtgtcagtcatctgcaccccacttcatcagcattatccgcggctccggcctccgggcttggttcatctctttagctagcgggaggccattcgcagttggagcttcttccatagatctggttggtcactgctccaagaaggtctcggccagccggcggaaggcccctcttccagaaatggacgatcaggagaatgaagatcaagcccttgagcacatattaactgatgctaatgcagagccagtcatgctatcatatgcattcttaaaaagtattacaaatgatttctcatgtgtaatcggtaggggtgggtttggagtggtttataagggttatcttcataatgggaaaactgtagctgtgaagcagctttccaaaacagatgacttttcagaaaagcagtttcatgatgagcttatgtgtttgataagggttaaacacaggaatatagtgagatttttaggctactgctctgatacacaacaaaaaatggcagatttcaatggaagatttgttttggcagatatccgacgaaggttcctctgctttgagtttgtacctaacaaaagccttctccattatctcaaagaacaatctactggacgtgattggaaaacacgctatcaattgattgagggaatctgtcagggtttgtggtatcttcatcatgaagaacacattaatcatttggatctgaaacctgaaaatattttactggatgatgacatggtcccaaaaatatcagactttgggttatcaagacggttcagtggagaactgaatgttatcatcactgaaaatatctgcgggacattgggatatattgccccggaatatttgagcaaaggggaaatatcattcaaggccgacatttttagtctgggaatcataatcaaaaaaatattaatgggaagtaatgatttatctgattttgaaaagtggcatgaatcacaagatgtacactgcccacaattgaacagatgcattcaaatatcacaactctgtctggaagacgatcaacataaaagaccgactataggttgcatcattgacatgctgaatgacatgaaaacaacgacgactgagacaatagtatctccaggtttcggccactcaagaaataactcagggtcttctgaagaatatgagagctgtgactcgtcacacttgcctgggattcaccatggagaagtccactctgctactgaggcaagtacatgtgtctccgagttgctggagcaggtgcagtcgctgggtgtttctacagtgccatcatcccagctgcatcgaataaccagtatacccaaaggctttggcgaaacaaacactcatcatatacgctcccctgggtcgacctctgagagtagcaagctactggacgtatacccactggagctccggttcccattggagccaaacaagtgcactgaatgcccagtgaccctgacaaacaggacagactgttacgttggtgtctggattacaccggcgaaacctcacacttgccatggcttttatttttcgtacctgtggtggcagtttccaagctcatcctttttccagatcatggacccgcattccacattggtcgtaaccttggtaatggacccgctgcagctgggactgggactgcaagacactgaggacaaatttcaggtgttgatgattgtcatggaatcacagaaggatctcgaaaatttgaacccgtcgattagtagcagcacggacaatgatatgttgaggcgagtcgaggagttggggggcgaggtccaccgggcaatcctgagggctgtcagctgtgatccagcaagctgcaagccagaagtggtccacagtgttccaatggtcatttcagcaaaaactttagagaatgtcttatccatcgacgtggacctcgatatgtgttggatcctggctagtcatcgcgcaggttatgtttccatttggaactacaacacacagggaagggtgactgcattgaaggtcaccaaggaagcaggcatgctacactcgctcacacgtactcgtagtgccaccacatcgtgtgtttattcggccaaatttatcactagaaagaaattgttcgcaacaggggacggctatgggtatatctgcatctatgcatacacaatggacaaagtgaagaaatttgaagcttatcatggcaaacctgtcagcttgttggctgttcactcaacctacccgttcttgctttcgtcgtcgtcttgtgaccgctcaatcaagctttgggcctgggaccagcaatgggcgtgcactcgaacattcgacgctcacacgagcggagtgcagcatgtcaggttcaacccagctgatgtcaacacttttgttagtgtttcctgtggtggcgcctgtgtaaaggtctgggagattcattcttccacccctatcaccacattgtttggtccgaacaacgttgattatttcactgatgctgatcgccagttccttctcaacatttggtcccagaaggcaacaatattggatctacagacacaaaaaactgtccacaggctccttgttcaccagcgggagatgcgtgatgttgcttgccaccccacacttccaatattggctaccagattagatgatgggactgtttgtttgtgggacgccactacctacaggcttgagagaatcattcgccttgagtcctccattctacatacggcgttcaaagacacagcggactcaatatggtatacaacttttgttttttttatggtagtgcatgtgcgacagaacgttaattttggctcaagtatctgtacatctgtttgactttaattataatattagtccaaagaaaaat

SEQ ID NO: 26019 - DNA, 1726 bp, Zea Mays
aaggttctctgactaggattcctgcagaagaggaatactcaggatgaaggaggagttgtaagggtagagaaatgtgacgactaggtgacggcgtgacctccaactgcttaatagctgtccgaggcgccgaagagctaatttgagtctatagtagcgttgtgtgggttttcaaattgtcaaatttctccctgtctctatgatcggtcaaagccgagcgtaccgtgtttaataatgtcaaaaatctcatctgcgtgggcttgtcaacgcggaaaagccggtggacctcgtccgcgtggagtctcatctgcttgggcttgtcaacgcggaaaagccggtggacctcgtccgcgtggagaaaaaaaaaacagagaatatctgcgtaaactcctctgtgtcagtcatctgcaccccacttcatcagcattatccgcggctccggcctccgggcttggttcatctctttagctagcgggaggccattcgcagttggagcttcttccatagatctggttggtcactgctccaagaaggtctcggccagccggcggaaggcccctcttccagaaatggacgatcaggagaatgaagatcaagcccttgagcacatattaactgatgctaatgcagagccagtcatgctatcatatgcattcttaaaaagtattacaaatgatttctcatgtgtaatcggtaggggtgggtttggagtggtttataagggttatcttcataatgggaaaactgtagctgtgaagcagctttccaaaacagatgacttttcagaaaagcagtttcatgatgagcttatgtgtttgataagggttaaacacaggaatatagtgagatttttaggctactgctctgatacacaacaaaaaatggcagatttcaatggaagatttgttttggcagatatccgacgaaggttcctctgctttgagtttgtacctaacaaaagccttctccattatctcaaagaacaatctactggacgtgattggaaaacacgctatcaattgattgagggaatctgtcagggtttgtggtatcttcatcatgaagaacacattaatcatttggatctgaaacctgaaaatattttactggatgatgacatggtcccaaaaatatcagactttgggttatcaagacggttcagtggagaactgaatgttatcatcactgaaaatatctgcgggacattgggatatattgccccggaatatttgagcaaaggggaaatatcattcaaggccgacatttttagtctgggaatcataatcaaaaaaatattaatgggaagtaatgatttatctgattttgaaaagtggcatgaatcacaagatgtacactgcccacaattgaacagatgcattcaaatatcacaactctgtctggaagacgatcaacataaaagaccgactataggttgcatcattgacatgctgaatgacatgaaaacaacgacgactgagacaatagtatctccaggtttcggccactcaagaaataactcagggtcttctgaagaatatgtatatctgcaatgagtgcttgattgaaacttcctctctaagaggtcgtacaatatccgaattaatcatgtaatttatccattttattataggagagctgtgactcgtcacacttgcctgggattcaccatggagaagtccactctgctactgaggagagctgcgtatcattatattaagtagaaaaagat

SEQ ID NO: 26020 - DNA, 1005 bp, Zea Mays
atggggccgagaggcctaaggagccaggggtcgaggctggcggttatagcccggtccagcctaaagcgcaaggctaacgagccaacttttaccgccaccaaggctgtgaagtctagtggagccgtggagggacatcagccgaggggcttatcgcaaagtccgcatccaagtccatcttcatctgtccgccaacagggcttgatgtatcatttaaacaagcaactagcccagaagagtgatgaggatgtgcacctgacatcgctgtgcgcagagctgaaggatgaggtcatggctgcgcgtggaaaggtggcaccactggaggaggaggtgcggctcctaaaggaaagccttcagatgatgaccggcgagcgagatgagtctctacgccaagcctccgaggcttcctcccgagccgactccctcgcgaaggatctggagggcgagcggtctaaggcctgaggactcaaatgggagaattccggcgggatttggacatttccatcgagaactcttgaacgctctcctaggccgtggtctagaagatcgccgagcttaaggatctatctaacacggtggcagacttcggtcgaggcctcggagtcgagggcgtcccctcgggtgagtcctcacagagccgcatgcaagctttgagtggctacgtgcaaagcgaactccatgaatccatccaccttggggtgaagtgggtgctggccatagtcgcctcacactacgtgatatcaatctctagcgggtgtgcgaaggctatattctgtcggacgaggatgacctcgctgaggcagaggtgcaacggctcaccgatgttgtcaaggggctgggctcgatgctagagcaccacttcaaggaggaggtggttccgcaaatgtcgcctcctggtgttgggtcctaatccactgcggtgcctgaggacgacgtcgagggtgatgcctccccgccctcagttgcataaactatttttgccctgcggggtttttaataacatttaag

SEQ ID NO: 26021 - DNA, 473 bp, Zea Mays
gccagtccccctggcgtggggaggcccgaccctctcatggttgatgaggatggccagcccttcatcctcgacaacgtggatgagaaggaaatgtagtccgaattttggatcatggcccgggggcttatcgcaaagtccgcatccaagtccatcttcatctgtcgtgagcgcgttgtctgggtcatgctgcagcgccaacagggcttgatgtatcatttaaacaagcaactagcccagaagagtgatgaggatgtgcacctgacatcgctgtgcgcagagctgaaggatgaggtcatggctgcgcgtggaaaggtggcaccactggaggaggaggtgcggctcctaaaggaaagccttcagatgatgaccggcgagcgagatgagtctctacgccaagcctccgaggcttcctcccgagccgactccctcgcgaaggatctggagggcgagcggtctaaggcctgaggactcaa

SEQ ID NO: 26022 - DNA, 921 bp, Zea Mays
atcgcccgtccacttcaatttccatctctctgggcactccggcggaacgaagaacgcccacggatccgaggaacaagccgtctttgtgggctttagaatgcagatcttcgtgaggagccccagcggcaagatgatttgcctcagggtccaacctgacgataccttgcatacacatcaatccacgcttgacctccaagaaaagatgcaaatctatgtgaaggagacgctaaaaggcctaaccatcactcttgatgttgatagcttagatactattgacatcataaaggacaagattgaatacaacgagggatttcccaagggtcggcaatgcctcatctttggcgacgaacagctagagggcaagtacaccttggcggactacaacatttgcaacgagtccacgcttctccttgtcatccacccatgtacaagtacaagtgacgcaatgcagatctttgtgaagatgcaaaacggaaagaccaccactgttagggtcgacagctcagataccgtcaacagtatcacggtgaagatctatgaaatggagggcatcccacccctagaacagcgcatcatctttcgcggcaggcgtcttgagggcagacgcaccctggcggactacggcatccagaaggaggaaaccctccatctgatgctttgcctttgtggctggtgatgagactgatgccatgcatgcatgcatggtcattcaatattactactagtggtttgttatcagtaaaaagtatcattaattatagggatgccgtgtcatttagctaaaggtctttcttaccaggagagttctgtcatcagtaaaagtttttattgtggtacgtcagtgtgtgacatcttatatcaagagtttttttttatttacaaatatagctagtcagcagcttcaacttgcgcgtgtctcca

SEQ ID NO: 26023 - DNA, 1004 bp, Zea Mays
atcgcccgtccacttcaatttccatctctctgggcactccggcggaacgaagaacgcccacggatccgaggaacaagccgtctttgtgggctttagatcttcgtgaggagccccagcggcaagatgatttgcctcagggtccaacctgacgataccttgcatacagttaagaaaaagattttagaaaaataccaccttgtctttgaaggagtgcagatggaggataacctcacactggctgattataacatccagcatcaatccacgcttgacctccaagaaaagatgcaaatctatgtgaaggagacgctaaaaggcctaaccatcactcttgatgttgatagcttagatactattgacatcataaaggacaagattgaatacaacgagggatttcccaagggtcggcaatgcctcatctttggcgacgaacagctagagggcaagtacaccttggcggactacaacatttgcaacgagtccacgcttctccttgtcatccacccatgtacaagtacaagtgacgcaatgcagatctttgtgaagatgcaaaacggaaagaccaccactgttagggtcgacagctcagataccgtcaacagtatcacggtgaagatctatgaaatggagggcatcccacccctagaacagcgcatcatctttcgcggcaggcgtcttgagggcagacgcaccctggcggactacggcatccagaaggaggaaaccctccatctgatgctttgcctttgtggctggtgatgagactgatgccatgcatgcatgcatggtcattcaatattactactagtggtttgttatcagtaaaaagtatcattaattatagggatgccgtgtcatttagctaaaggtctttcttaccaggagagttctgtcatcagtaaaagtttttattgtggtacgtcagtgtgtgacatcttatatcaagagtttttttttatttacaaatatagctagtcagcagcttcaacttgcgcgtgtctcca

SEQ ID NO: 26024 - DNA, 2747 bp, Zea Mays
cctgcccatcccggtcctccaccgcgtccgacgtgaaacgtggagtgagttgtggacttgtggttgttccggagacatcctctccagtctccacccccactccacgaacacgattgctgcttgcctgctgcttctgcggctcgcggccatcagatccagcgccaccgatgccgccgcagccgaacgggggcaaggtgaccccgaacctggcgatggacgcggaggccacgcgcctgctcaacctcacggtgctccagcgcttggaccccgccgtcgaggacatccttatcaccgccgcgcacgtcacactctacgatttcaacatcgacctcaaccagtggagccggaaggacgtcgaggggtcgctgtttgtcgtcaagaggaactctcagccccgattccagttcatcgtcatgaaccggcgcaacactgataatctggtggaggatctcttaagtgattttgaatacgagcttcaacctccatatttgttgtaccggaacgcttcacaagaagtcaatggaatttggttttacaaccaacaggactgtgaagctgttgcaagtctatttggaaggatactgaatgcttacgccaaagtacctccaaaacctaaagtgccttccacaaaaagggcgctgctagcattggaagtgtatcaaacgcacaaccgtctggaagagtgcacccatctactgagagcatcccatcttcccatgtgccattgatcgttccatctgctgcttcaacacatcaactgcccccttcagtagcttcaacagcttcaccattgcccgtccatggaactaatgcccacactagccggccaacaaatcttgtgacaccagatttctttgcgcctccaccatcctcttcagctccactggctccgccgggtgcatctgtggttcctactgcgccacctcttcatcccacttcggcggcatctattcaacgttctcagtatggcaccccactgctccagccctttccaccgcccactccacctccttcccttaacccctcacacagtgatagacttactgttacaagggatagagtcaaagacgctctacagagacttgttcagagcgacgagttcgttgatctggtgtgccgggaattgcagagatcacttgtataggctgcttgcttagtcttgtcgggagttttctggctcgtggcaagaatgtgcctgtaattttcctttgacttttttgcatgcttcccttcccgtactattgtataggtttgtgttagtgtattggtgtagagtactataggaatggttggtagtatctgtggggtcccttggttccaaatatccgtgttggcagtgtgagaagcggaagtaaaactagcctgttcaagaacgttggaatttgatgtgctttggcgtggacaaattacagcactgagattctagaagtttttttttaattcttattaacttcgctttctggaaaaggagaaaaaaagagagatatgatgctgactttccctgttgtttgacaggcgaccgtataacctacaacccaatcatattcacattccctgaactacactgtacatgtcaacggcactctctagtggttgtggtgttcgcgatgcccgaatgcccgggcgggccgaatcggacgagttcaccggaacgtgagcatgaccaggaagccgaggaaggcggcggcgccgacgccagagcagcagagatcaaggatgccctcgcgcctggccttcgactccttgcgcgcccttttccccctgacgaactcctcgtacctgagcctggccacgtcctccgccgcgccgcggcacccccgcctgggcgcggccatggcggcggcgacggcggccagcccgtccctgccgctgacgccggcgccgtcggcgtcctcgacgcgcaggctgacctcccggacgtggccgcggcgctcgtcgcacgtgacggcggcgtcgagcgcgacgccgccgccgagcacgacggcgaagcgcgccacggtgtcccccgtgagccacttgcggtcgacggccacggcgcggcggctggacgcgttgagcgcgcggccggtggccgggtcgaagaggacccagctgagctcgaggtcggccggcgcgatcgccgcggcggccggcgacgtgaagccctcctgcagcagcgcgtcgacgcggaacggcgcgcccaggaaccagtcggaggcggcgtccgtctccacgacgcgcgacaggacgcagacccccgcgtggcgcaggtcgacggccgacacgaggcgcgcgggcaggggctgcggcggcgtgggaggggagaccgagcacgggaaggggaaggcgtcggcgaagagcgcccggtgaccgccgtcgacgcggcctgtgcagggcaggtcgcggacggagggccacatggcgaagcagagcgcccgccacgtggccgggtcggtggcgaggctgcggaggccggagctcgcgcagccgaccgccgccagcgacgcgccatccaggcggcggagcacgagggcgaggacgtccgccgggaggtcctcgatgcccgtgccgccgacgtcgtcgccggccggagaagaggcttccatcgccccaacacccatgggatgagacgaacgatggccggtgggcggccgaccgggagacagtaggagcgaggccggagaacgtggataggaaaggggttgtggtggtggttgcgcgggcgcgcacgcgcgtttctgatggcctccggcgtcggaggagggagg

SEQ ID NO: 26025 - DNA, 2860 bp, Zea Mays
cctgcccatcccggtcctccaccgcgtccgacgtgaaacgtggagtgagttgtggacttgtggttgttccggagacatcctctccagtctccacccccactccacgaacacgattgctgcttgcctgctgcttctgcggctcgcggccatcagatccagcgccaccgatgccgccgcagccgaacgggggcaaggtgaccccgaacctggcgatggacgcggaggccacgcgcctgctcaacctcacggtgctccagcgcttggaccccgccgtcgaggacatccttatcaccgccgcgcacgtcacactctacgatttcaacatcgacctcaaccagtggagccggaaggacgtcgaggggtcgctgtttgtcgtcaagaggaactctcagccccgattccagttcatcgtcatgaaccggcgcaacactgataatctggtggaggatctcttaagtgattttgaatacgagcttcaacctccatatttgttgtaccggaacgcttcacaagaagtcaatggaatttggttttacaaccaacaggactgtgaagctgttgcaagtctatttggaaggatactgaatgcttacgccaaagtacctccaaaacctaaagtgccttccacaaaaagtgagtttgaggaactggaggctgttcctacatctgctgctatagacggcccccttgaacctccgccagcgtctgccgctgtagtccttgatacccctgatgaatcattaatcaggcgctgctagcattggaagtgtatcaaacgcacaaccgtctggaagagtgcacccatctactgagagcatcccatcttcccatgtgccattgatcgttccatctgctgcttcaacacatcaactgcccccttcagtagcttcaacagcttcaccattgcccgtccatggaactaatgcccacactagccggccaacaaatcttgtgacaccagatttctttgcgcctccaccatcctcttcagctccactggctccgccgggtgcatctgtggttcctactgcgccacctcttcatcccacttcggcggcatctattcaacgttctcagtatggcaccccactgctccagccctttccaccgcccactccacctccttcccttaacccctcacacagtgatagacttactgttacaagggatagagtcaaagacgctctacagagacttgttcagagcgacgagttcgttgatctggtgtgccgggaattgcagagatcacttgtataggctgcttgcttagtcttgtcgggagttttctggctcgtggcaagaatgtgcctgtaattttcctttgacttttttgcatgcttcccttcccgtactattgtataggtttgtgttagtgtattggtgtagagtactataggaatggttggtagtatctgtggggtcccttggttccaaatatccgtgttggcagtgtgagaagcggaagtaaaactagcctgttcaagaacgttggaatttgatgtgctttggcgtggacaaattacagcactgagattctagaagtttttttttaattcttattaacttcgctttctggaaaaggagaaaaaaagagagatatgatgctgactttccctgttgtttgacaggcgaccgtataacctacaacccaatcatattcacattccctgaactacactgtacatgtcaacggcactctctagtggttgtggtgttcgcgatgcccgaatgcccgggcgggccgaatcggacgagttcaccggaacgtgagcatgaccaggaagccgaggaaggcggcggcgccgacgccagagcagcagagatcaaggatgccctcgcgcctggccttcgactccttgcgcgcccttttccccctgacgaactcctcgtacctgagcctggccacgtcctccgccgcgccgcggcacccccgcctgggcgcggccatggcggcggcgacggcggccagcccgtccctgccgctgacgccggcgccgtcggcgtcctcgacgcgcaggctgacctcccggacgtggccgcggcgctcgtcgcacgtgacggcggcgtcgagcgcgacgccgccgccgagcacgacggcgaagcgcgccacggtgtcccccgtgagccacttgcggtcgacggccacggcgcggcggctggacgcgttgagcgcgcggccggtggccgggtcgaagaggacccagctgagctcgaggtcggccggcgcgatcgccgcggcggccggcgacgtgaagccctcctgcagcagcgcgtcgacgcggaacggcgcgcccaggaaccagtcggaggcggcgtccgtctccacgacgcgcgacaggacgcagacccccgcgtggcgcaggtcgacggccgacacgaggcgcgcgggcaggggctgcggcggcgtgggaggggagaccgagcacgggaaggggaaggcgtcggcgaagagcgcccggtgaccgccgtcgacgcggcctgtgcagggcaggtcgcggacggagggccacatggcgaagcagagcgcccgccacgtggccgggtcggtggcgaggctgcggaggccggagctcgcgcagccgaccgccgccagcgacgcgccatccaggcggcggagcacgagggcgaggacgtccgccgggaggtcctcgatgcccgtgccgccgacgtcgtcgccggccggagaagaggcttccatcgccccaacacccatgggatgagacgaacgatggccggtgggcggccgaccgggagacagtaggagcgaggccggagaacgtggataggaaaggggttgtggtggtggttgcgcgggcgcgcacgcgcgtttctgatggcctccggcgtcggaggagggagg

SEQ ID NO: 26026 - DNA, 2861 bp, Zea Mays
cctgcccatcccggtcctccaccgcgtccgacgtgaaacgtggagtgagttgtggacttgtggttgttccggagacatcctctccagtctccacccccactccacgaacacgattgctgcttgcctgctgcttctgcggctcgcggccatcagatccagcgccaccgatgccgccgcagccgaacgggggcaaggtgaccccgaacctggcgatggacgcggaggccacgcgcctgctcaacctcacggtgctccagcgcttggaccccgccgtcgaggacatccttatcaccgccgcgcacgtcacactctacgatttcaacatcgacctcaaccagtggagccggaaggacgtcgaggggtcgctgtttgtcgtcaagagccccgattccagttcatcgtcatgaaccggcgcaacactgataatctggtggaggatctcttaagtgattttgaatacgagcttcaacctccatatttgttgtaccggaacgcttcacaagaagtcaatggaatttggttttacaaccaacaggactgtgaagctgttgcaagtctatttggaaggatactgaatgcttacgccaaagtacctccaaaacctaaagtgccttccacaaaaagtgagtttgaggaactggaggctgttcctacatctgctgctatagacggcccccttgaacctccgccagcgtctgccgctgtagtccttgatacccctgatgaatcattaatcagttacttcagtggcgctgctagcattggaagtgtatcaaacgcacaaccgtctggaagagtgcacccatctactgagagcatcccatcttcccatgtgccattgatcgttccatctgctgcttcaacacatcaactgcccccttcagtagcttcaacagcttcaccattgcccgtccatggaactaatgcccacactagccggccaacaaatcttgtgacaccagatttctttgcgcctccaccatcctcttcagctccactggctccgccgggtgcatctgtggttcctactgcgccacctcttcatcccacttcggcggcatctattcaacgttctcagtatggcaccccactgctccagccctttccaccgcccactccacctccttcccttaacccctcacacagtgatagacttactgttacaagggatagagtcaaagacgctctacagagacttgttcagagcgacgagttcgttgatctggtgtgccgggaattgcagagatcacttgtataggctgcttgcttagtcttgtcgggagttttctggctcgtggcaagaatgtgcctgtaattttcctttgacttttttgcatgcttcccttcccgtactattgtataggtttgtgttagtgtattggtgtagagtactataggaatggttggtagtatctgtggggtcccttggttccaaatatccgtgttggcagtgtgagaagcggaagtaaaactagcctgttcaagaacgttggaatttgatgtgctttggcgtggacaaattacagcactgagattctagaagtttttttttaattcttattaacttcgctttctggaaaaggagaaaaaaagagagatatgatgctgactttccctgttgtttgacaggcgaccgtataacctacaacccaatcatattcacattccctgaactacactgtacatgtcaacggcactctctagtggttgtggtgttcgcgatgcccgaatgcccgggcgggccgaatcggacgagttcaccggaacgtgagcatgaccaggaagccgaggaaggcggcggcgccgacgccagagcagcagagatcaaggatgccctcgcgcctggccttcgactccttgcgcgcccttttccccctgacgaactcctcgtacctgagcctggccacgtcctccgccgcgccgcggcacccccgcctgggcgcggccatggcggcggcgacggcggccagcccgtccctgccgctgacgccggcgccgtcggcgtcctcgacgcgcaggctgacctcccggacgtggccgcggcgctcgtcgcacgtgacggcggcgtcgagcgcgacgccgccgccgagcacgacggcgaagcgcgccacggtgtcccccgtgagccacttgcggtcgacggccacggcgcggcggctggacgcgttgagcgcgcggccggtggccgggtcgaagaggacccagctgagctcgaggtcggccggcgcgatcgccgcggcggccggcgacgtgaagccctcctgcagcagcgcgtcgacgcggaacggcgcgcccaggaaccagtcggaggcggcgtccgtctccacgacgcgcgacaggacgcagacccccgcgtggcgcaggtcgacggccgacacgaggcgcgcgggcaggggctgcggcggcgtgggaggggagaccgagcacgggaaggggaaggcgtcggcgaagagcgcccggtgaccgccgtcgacgcggcctgtgcagggcaggtcgcggacggagggccacatggcgaagcagagcgcccgccacgtggccgggtcggtggcgaggctgcggaggccggagctcgcgcagccgaccgccgccagcgacgcgccatccaggcggcggagcacgagggcgaggacgtccgccgggaggtcctcgatgcccgtgccgccgacgtcgtcgccggccggagaagaggcttccatcgccccaacacccatgggatgagacgaacgatggccggtgggcggccgaccgggagacagtaggagcgaggccggagaacgtggataggaaaggggttgtggtggtggttgcgcgggcgcgcacgcgcgtttctgatggcctccggcgtcggaggagggagg

SEQ ID NO: 26027 - DNA, 2867 bp, Zea Mays
cctgcccatcccggtcctccaccgcgtccgacgtgaaacgtggagtgagttgtggacttgtggttgttccggagacatcctctccagtctccacccccactccacgaacacgattgctgcttgcctgctgcttctgcggctcgcggccatcagatccagcgccaccgatgccgccgcagccgaacgggggcaaggtgaccccgaacctggcgatggacgcggaggccacgcgcctgctcaacctcacggtgctccagcgcttggaccccgccgtcgaggacatccttatcaccgccgcgcacgtcacactctacgatttcaacatcgacctcaaccaagccggaaggacgtcgaggggtcgctgtttgtcgtcaagaggaactctcagccccgattccagttcatcgtcatgaaccggcgcaacactgataatctggtggaggatctcttaagtgattttgaatacgagcttcaacctccatatttgttgtaccggaacgcttcacaagaagtcaatggaatttggttttacaaccaacaggactgtgaagctgttgcaagtctatttggaaggatactgaatgcttacgccaaagtacctccaaaacctaaagtgccttccacaaaaagtgagtttgaggaactggaggctgttcctacatctgctgctatagacggcccccttgaacctccgccagcgtctgccgctgtagtccttgatacccctgatgaatcattaatcagttacttcagtggcgctgctagcattggaagtgtatcaaacgcacaaccgtctggaagagtgcacccatctactgagagcatcccatcttcccatgtgccattgatcgttccatctgctgcttcaacacatcaactgcccccttcagtagcttcaacagcttcaccattgcccgtccatggaactaatgcccacactagccggccaacaaatcttgtgacaccagatttctttgcgcctccaccatcctcttcagctccactggctccgccgggtgcatctgtggttcctactgcgccacctcttcatcccacttcggcggcatctattcaacgttctcagtatggcaccccactgctccagccctttccaccgcccactccacctccttcccttaacccctcacacagtgatagacttactgttacaagggatagagtcaaagacgctctacagagacttgttcagagcgacgagttcgttgatctggtgtgccgggaattgcagagatcacttgtataggctgcttgcttagtcttgtcgggagttttctggctcgtggcaagaatgtgcctgtaattttcctttgacttttttgcatgcttcccttcccgtactattgtataggtttgtgttagtgtattggtgtagagtactataggaatggttggtagtatctgtggggtcccttggttccaaatatccgtgttggcagtgtgagaagcggaagtaaaactagcctgttcaagaacgttggaatttgatgtgctttggcgtggacaaattacagcactgagattctagaagtttttttttaattcttattaacttcgctttctggaaaaggagaaaaaaagagagatatgatgctgactttccctgttgtttgacaggcgaccgtataacctacaacccaatcatattcacattccctgaactacactgtacatgtcaacggcactctctagtggttgtggtgttcgcgatgcccgaatgcccgggcgggccgaatcggacgagttcaccggaacgtgagcatgaccaggaagccgaggaaggcggcggcgccgacgccagagcagcagagatcaaggatgccctcgcgcctggccttcgactccttgcgcgcccttttccccctgacgaactcctcgtacctgagcctggccacgtcctccgccgcgccgcggcacccccgcctgggcgcggccatggcggcggcgacggcggccagcccgtccctgccgctgacgccggcgccgtcggcgtcctcgacgcgcaggctgacctcccggacgtggccgcggcgctcgtcgcacgtgacggcggcgtcgagcgcgacgccgccgccgagcacgacggcgaagcgcgccacggtgtcccccgtgagccacttgcggtcgacggccacggcgcggcggctggacgcgttgagcgcgcggccggtggccgggtcgaagaggacccagctgagctcgaggtcggccggcgcgatcgccgcggcggccggcgacgtgaagccctcctgcagcagcgcgtcgacgcggaacggcgcgcccaggaaccagtcggaggcggcgtccgtctccacgacgcgcgacaggacgcagacccccgcgtggcgcaggtcgacggccgacacgaggcgcgcgggcaggggctgcggcggcgtgggaggggagaccgagcacgggaaggggaaggcgtcggcgaagagcgcccggtgaccgccgtcgacgcggcctgtgcagggcaggtcgcggacggagggccacatggcgaagcagagcgcccgccacgtggccgggtcggtggcgaggctgcggaggccggagctcgcgcagccgaccgccgccagcgacgcgccatccaggcggcggagcacgagggcgaggacgtccgccgggaggtcctcgatgcccgtgccgccgacgtcgtcgccggccggagaagaggcttccatcgccccaacacccatgggatgagacgaacgatggccggtgggcggccgaccgggagacagtaggagcgaggccggagaacgtggataggaaaggggttgtggtggtggttgcgcgggcgcgcacgcgcgtttctgatggcctccggcgtcggaggagggagg

SEQ ID NO: 26028 - DNA, 2726 bp, Zea Mays
cctgcccatcccggtcctccaccgcgtccgacgtgaaacgtggagtgagttgtggacttgtggttgttccggagacatcctctccagtctccacccccactccacgaacacgattgctgcttgcctgctgcttctgcggctcgcggccatcagatccagcgccaccgatgccgccgcagccgaacgggggcaaggtgaccccgaacctggcgatggacgcggaggccacgcgcctgctcaacctcacggtgctccagcgcttggaccccgccgtcgaggacatccttatcaccgccgcgcacgtcacactctacgatttcaacatcgacctcaaccagtggagccggaaggacgtcgaggggtcgctgtttgtcgtcaagaggaactctcagccccgattccagttcatcgtcatgaaccggcgcaacactggatactgaatgcttacgccaaagtacctccaaaacctaaagtgccttccacaaaaagtgagtttgaggaactggaggctgttcctacatctgctgctatagacggcccccttgaacctccgccagcgtctgccgctgtagtccttgatacccctgatgaatcattaatcagttacttcagtggcgctgctagcattggaagtgtatcaaacgcacaaccgtctggaagagtgcacccatctactgagagcatcccatcttcccatgtgccattgatcgttccatctgctgcttcaacacatcaactgcccccttcagtagcttcaacagcttcaccattgcccgtccatggaactaatgcccacactagccggccaacaaatcttgtgacaccagatttctttgcgcctccaccatcctcttcagctccactggctccgccgggtgcatctgtggttcctactgcgccacctcttcatcccacttcggcggcatctattcaacgttctcagtatggcaccccactgctccagccctttccaccgcccactccacctccttcccttaacccctcacacagtgatagacttactgttacaagggatagagtcaaagacgctctacagagacttgttcagagcgacgagttcgttgatctggtgtgccgggaattgcagagatcacttgtataggctgcttgcttagtcttgtcgggagttttctggctcgtggcaagaatgtgcctgtaattttcctttgacttttttgcatgcttcccttcccgtactattgtataggtttgtgttagtgtattggtgtagagtactataggaatggttggtagtatctgtggggtcccttggttccaaatatccgtgttggcagtgtgagaagcggaagtaaaactagcctgttcaagaacgttggaatttgatgtgctttggcgtggacaaattacagcactgagattctagaagtttttttttaattcttattaacttcgctttctggaaaaggagaaaaaaagagagatatgatgctgactttccctgttgtttgacaggcgaccgtataacctacaacccaatcatattcacattccctgaactacactgtacatgtcaacggcactctctagtggttgtggtgttcgcgatgcccgaatgcccgggcgggccgaatcggacgagttcaccggaacgtgagcatgaccaggaagccgaggaaggcggcggcgccgacgccagagcagcagagatcaaggatgccctcgcgcctggccttcgactccttgcgcgcccttttccccctgacgaactcctcgtacctgagcctggccacgtcctccgccgcgccgcggcacccccgcctgggcgcggccatggcggcggcgacggcggccagcccgtccctgccgctgacgccggcgccgtcggcgtcctcgacgcgcaggctgacctcccggacgtggccgcggcgctcgtcgcacgtgacggcggcgtcgagcgcgacgccgccgccgagcacgacggcgaagcgcgccacggtgtcccccgtgagccacttgcggtcgacggccacggcgcggcggctggacgcgttgagcgcgcggccggtggccgggtcgaagaggacccagctgagctcgaggtcggccggcgcgatcgccgcggcggccggcgacgtgaagccctcctgcagcagcgcgtcgacgcggaacggcgcgcccaggaaccagtcggaggcggcgtccgtctccacgacgcgcgacaggacgcagacccccgcgtggcgcaggtcgacggccgacacgaggcgcgcgggcaggggctgcggcggcgtgggaggggagaccgagcacgggaaggggaaggcgtcggcgaagagcgcccggtgaccgccgtcgacgcggcctgtgcagggcaggtcgcggacggagggccacatggcgaagcagagcgcccgccacgtggccgggtcggtggcgaggctgcggaggccggagctcgcgcagccgaccgccgccagcgacgcgccatccaggcggcggagcacgagggcgaggacgtccgccgggaggtcctcgatgcccgtgccgccgacgtcgtcgccggccggagaagaggcttccatcgccccaacacccatgggatgagacgaacgatggccggtgggcggccgaccgggagacagtaggagcgaggccggagaacgtggataggaaaggggttgtggtggtggttgcgcgggcgcgcacgcgcgtttctgatggcctccggcgtcggaggagggagg

SEQ ID NO: 26029 - DNA, 2964 bp, Zea Mays
cctgcccatcccggtcctccaccgcgtccgacgtgaaacgtggagtgagttgtggacttgtggttgttccggagacatcctctccagtctccacccccactccacgaacacgattgctgcttgcctgctgcttctgcggctcgcggccatcagatccagcgccaccgatgccgccgcagccgaacgggggcaaggtgaccccgaacctggcgatggacgcggaggccacgcgcctgctcaacctcacggtgctccagcgcttggaccccgccgtcgaggacatccttatcaccgccgcgcacgtcacactctacgatttcaacatcgacctcaaccagtggagccggaaggacgtcgaggggtcgctgtttgtcgtcaagaggaactctcagccccgattccagttcatcgtcatgaaccggcgcaacactggtacggacgacttcctggcttgcgtcttgggtcgttggtttgtttttatgatgacccacctgtggtgcctactgcctaggagctgtaccaacgataatctggtggaggatctcttaagtgattttgaatacgagcttcaacctccatatttgttgtaccggaacgcttcacaagaagtcaatggaatttggttttacaaccaacaggactgtgaagctgttgcaagtctatttggaaggatactgaatgcttacgccaaagtacctccaaaacctaaagtgccttccacaaaaagtgagtttgaggaactggaggctgttcctacatctgctgctatagacggcccccttgaacctccgccagcgtctgccgctgtagtccttgatacccctgatgaatcattaatcagttacttcagtggcgctgctagcattggaagtgtatcaaacgcacaaccgtctggaagagtgcacccatctactgagagcatcccatcttcccatgtgccattgatcgttccatctgctgcttcaacacatcaactgcccccttcagtagcttcaacagcttcaccattgcccgtccatggaactaatgcccacactagccggccaacaaatcttgtgacaccagatttctttgcgcctccaccatcctcttcagctccactggctccgccgggtgcatctgtggttcctactgcgccacctcttcatcccacttcggcggcatctattcaacgttctcagtatggcaccccactgctccagccctttccaccgcccactccacctccttcccttaacccctcacacagtgatagacttactgttacaagggatagagtcaaagacgctctacagagacttgttcagagcgacgagttcgttgatctggtgtgccgggaattgcagagatcacttgtataggctgcttgcttagtcttgtcgggagttttctggctcgtggcaagaatgtgcctgtaattttcctttgacttttttgcatgcttcccttcccgtactattgtataggtttgtgttagtgtattggtgtagagtactataggaatggttggtagtatctgtggggtcccttggttccaaatatccgtgttggcagtgtgagaagcggaagtaaaactagcctgttcaagaacgttggaatttgatgtgctttggcgtggacaaattacagcactgagattctagaagtttttttttaattcttattaacttcgctttctggaaaaggagaaaaaaagagagatatgatgctgactttccctgttgtttgacaggcgaccgtataacctacaacccaatcatattcacattccctgaactacactgtacatgtcaacggcactctctagtggttgtggtgttcgcgatgcccgaatgcccgggcgggccgaatcggacgagttcaccggaacgtgagcatgaccaggaagccgaggaaggcggcggcgccgacgccagagcagcagagatcaaggatgccctcgcgcctggccttcgactccttgcgcgcccttttccccctgacgaactcctcgtacctgagcctggccacgtcctccgccgcgccgcggcacccccgcctgggcgcggccatggcggcggcgacggcggccagcccgtccctgccgctgacgccggcgccgtcggcgtcctcgacgcgcaggctgacctcccggacgtggccgcggcgctcgtcgcacgtgacggcggcgtcgagcgcgacgccgccgccgagcacgacggcgaagcgcgccacggtgtcccccgtgagccacttgcggtcgacggccacggcgcggcggctggacgcgttgagcgcgcggccggtggccgggtcgaagaggacccagctgagctcgaggtcggccggcgcgatcgccgcggcggccggcgacgtgaagccctcctgcagcagcgcgtcgacgcggaacggcgcgcccaggaaccagtcggaggcggcgtccgtctccacgacgcgcgacaggacgcagacccccgcgtggcgcaggtcgacggccgacacgaggcgcgcgggcaggggctgcggcggcgtgggaggggagaccgagcacgggaaggggaaggcgtcggcgaagagcgcccggtgaccgccgtcgacgcggcctgtgcagggcaggtcgcggacggagggccacatggcgaagcagagcgcccgccacgtggccgggtcggtggcgaggctgcggaggccggagctcgcgcagccgaccgccgccagcgacgcgccatccaggcggcggagcacgagggcgaggacgtccgccgggaggtcctcgatgcccgtgccgccgacgtcgtcgccggccggagaagaggcttccatcgccccaacacccatgggatgagacgaacgatggccggtgggcggccgaccgggagacagtaggagcgaggccggagaacgtggataggaaaggggttgtggtggtggttgcgcgggcgcgcacgcgcgtttctgatggcctccggcgtcggaggagggagg

SEQ ID NO: 26030 - DNA, 1248 bp, Zea Mays
caaagtcactcagttgagagaaatacaaacatctgagtctagctcctgacagtcacagacctcaaaactgttctgcacatccttcagctcctttcttttgcagttgcagacttgcaggtgcatgttgtccagagataagcaggtgatggctgcgccgatggccgcggcggacggcgggctgaggcggctgttcgagaagccgctgccggagaacccgacgctgctggaggcgctctcggcgtggaaccgcaacgtgcaccaccccagcagcaagcccatcgacacggcgtccttcacggagatcttcggcgagctccacttccaggagaagcagcagcccgaccgaggcgccctcctgccgccgtcgccgtcgcccccgccgacgccgctccctccttcccgcacgctgtcgtggctcgacatcgcggccgaggccgagaagagcaaggacgactcgtcgctggacgcgctgctgaggcccaagccagcgaccaccgtggccacggtgaagaggagcgcgagcttctgcaccaagaagggctcctccgcgtcgctgctgctctgcaccgaggggctcggctccgagagcaccgtggacgctgacgacatgttcaaggacggcgacgccgaggccgaggccgaggccgccgccgccgcgctcaagggcacggacacggcggacggcagcgacgccgaggaggcggtgaaggaggagaggcagccaaagacgttcccgccgccgataccgtccatcgggcgcggcggcaagccgtacgtgtgcttccggtcgttccgggaggacggccggttcgtgctgctggaggtggtgatccccgggaaggagctcctgcaggccacgcgcgagggcggccggctcaggctgcagttcgccaacgctgccgcagcagccgcaggtggtgtgggtgtcgtcgacgaggcggtgcacggaggtgacgacgatggcgacccccgtggcaagaacgcatgcatagacgacgacgaccacgatgacgagcgctaggtgatcgtcggggttcgttgatgtacttggcatactttatcacgatcgataattgtcctactactactgctacggatgatgatgatgcaatggtgaatcatgctgatgagaagcatcggctaactaattaattaatgtttctaaagtgtttttcagaaagtgatctgaaaagcgttgtgctcgtcctattcagtcataaattcagattccacctttcttgatgctcg

SEQ ID NO: 26031 - DNA, 570 bp, Zea Mays
aggtacgctagctgaaaatcgtgcgaagcgaggggtgtggatcaaaacaacccacaagacgatgtcggccgatgatcctgaagctagatggactaagcgggtgtcagaataaaagttgatcgtcaagtggccatcatctaacaacactaacatagtgttatcccaggcaagccccggtgcatttgtcaccttccttgtgtttacaaaattttatcacttatatgctgcattaggtgataggagttgagtgattaaacacttgatgcattaccatccttgaaaggttgattaccacaccttgtcacccgttttataaaagctagagatgcttagtcttgctgatagattaagaaacatatttttgatatatgactcatgtttttacaaaaaagaaaatgggcttgggataatgaaggcatcaagacgttgataaattcattatccaggcatggcccctctgttaggcgccaaatttttgaaatagtttaaaatgggaccagacgttgagcagaaaaggtcgcccgtctgtgtcgattaaggaccgtaccgattgttggcctgatgatctag

SEQ ID NO: 26032 - DNA, 1024 bp, Zea Mays
gatggccttatccagtgccctgggcgtcatctcctcggtctctgttttccttcccatggagcactagccgcccagcctctatcttcctcaatctccagccgccctcctcacctccccagatgtgagctcgcccctgcgctccagctcgccatcgcccctccctgttcctcgtcgggctgtgcgtcctcgacttcgacctcgcctccagccgtgcacacactagaaccgtgcgccctgctccaagtctcctcgtcggtgaagcatcgccagcacaacatcttctagctcgaaccgctccactgatttaccccgccttcgtcttccagtttcggctcgtgtgctcacaccagacacgttcgccgtgcaggtacgctagctgaaaatcgtgcgaagcgaggggtgtggatcaaaacaacccacaagacgatgtcggccgatgatcctgaagctagatggactaagcgggtgtcagaataaaagttgatcgtcaagtggccatcatctaacaacactaacatagtgttatctcaggcaagccccggtgcatttgtcaccttccttgtgtttacaaaattttatcacttatatgctgcattaggtgataggagttgagtgattaaacatttgatgcattaccatccttgaaaggttgattaccacaccttgtcacccgttttataaaagctagagatgcttagtcttgctgatatattaagaaacatatttttgatatatgactcatgtttttacaaaaaagaaaatgagcttgggataatgaaggcatcaagacgttgataaattcattatccaggcatggcccctctgtcaggcgccaaatttttgaaatagtttaaaatgggatcagacgttgagcaggaaaggtcgtccgtctgtgtcgattaaggaccgtaccgattgttggcctgatgatctaggacattttaactggccacatacatcgtcatgggtaagcctgaacccgactattccatacgtgaaaagacaacagcgcactggacgtggg

SEQ ID NO: 26033 - DNA, 1975 bp, Zea Mays
cagtccgtcagtgtggtggtcagagagaaaagatgaaaaaaaagaataattcattggagccgcacgtctccttccggccttccccgacgatgccgctgccgccgggaggaacggatggatcccattggcttgccaccaccactgcccgcttcggttcctattcccgctcgctacggccccagtcgcgctcctcaccggccggcaccaccccgcccgccctcgccttttgcctgccgaggtaatctggagacctgcgatcccctcgcgcgcagacacgacgcgctttcgtttctgtcccgtggtggttagctcgttcgcatctcactgtcgatatgttttatgatgaacgattttgctgatatatcttgatctgttgtatttgtaatgtttggatcggatggatcttggcccactgctttgatgtaggtaggatttagttacccgatttgttctctaagccacaaaactgaggcagccagacaggggtgaccggctgaccgcgttttatgccttgatcgtcagtgtcgtcaccgtgtttctgcactaaaaaagaagaagctggaagcatctcacgttaccaaacgcacattcttgctaattcgattgccctcccccatcagcgttgatcaacgagtgaatctacctgatccaatggttaagtaaaccgtgtttgtgggttttgttgttttcttcagtatggccctgagttaggatgctagtgtcaagctgttcaactatgtttaatgctgacctgttaggaactactacttgtttttcacatcgaaaaaatcgactccgaaaatttgcattgcatcacccccttctctttcgcatgccgaagagagctgctgacacgcttagcatatgttgctttctagattgaatatacctaattctctacgccacacagagcaagtgttttcacatattgaaatccaatttcaccactctgctaaagaaaacaactgctgatcgaaactttggtgcagatttaggcctggcattctagcaatgcagaagaagtgatcttataatcataaaagataacaatggggatatccaaggtgaccggcatctctgcgacagcttttcttgtcacatctgttggtctgtaccagctcggcatgagaattattgtgcttcctttcctagccaccagtattgttgcttctgttgtcactgttgcatcccatgatgccatcaacctaccgtggatcctggggaagaactcagtgggaaggtttcctctttggtcagttatactgtttggtcctttcttgacgcttgctcggacatatgcaatggttaagagatacatgaggaaagagtccgtgtatgacaagattgtggatggcctatatcttggaggatggccctttctcttgaaacatttgccccctggaaacccatctgtcatagactgcacttgtgagcttccaagaatttccttcgttccagcagacgagtatctttgtcttgcaacttgggataccagagctccaacaccataccaaattgaaaaagctgcacgttgggcttgtggaaagagatctgaggggaagccggtttatgtccattgcgcatttggtcatggaagaagtgcttgtgtcgtgtgtgcaattctagtagcgctgggcattgctgagaactggaaagaggctgagaacatcatccgtgaaagaagaaagataaaaatgaacgcccttcacaggaaaaccttggaagagtggtccaaacaacgggattctcagaaaaaggctaagtagttgtaagtgtaacattttccttagagataaacttgtttgtggtgttaaagcttgtttgaaacatcatacaatggcatatctacttaggccaagtgtaatgtctgtgaaattattattattattttctcggtgtttctacctttaaacatatttgatttatatccagatttggtactatttttttgtccacctggctaattgaatgtgag

SEQ ID NO: 26034 - DNA, 2917 bp, Zea Mays
ttttttctgattaaaaatggattcgtaatttttttatagcaatagtacagtttggggtctgcaaatcccatgggtccgtccgacaagctttggtctcaaagttgggagttcgcgtggaggagaagcgcgcgccatgaatggaatgaacccccgcgcgccctgatccgacggccagcacgtcgtccgctagccttgaaaccgaagcatcctcctcctcgcccgccgccccgctccggcagttaccagtcggctctctcgtgctctctgcctgcaggctgcagcggcgcccgtccggtcgccttgccacgtcgccgcccgcgcccaccacctgagatcggaggaatggtgagcgcgtcgagcctgctcctcccgacctccgtgcgggacctggcctcctgcgtctccgacggcgccgtccgcgtcgcctgcaccagcccggcgtccacgctcacggtctcctcctcctcctccaccacctcctcgccgccgccggccacgctctccgtcgccatctcctaccgcgccaccccgcaggccccgtcgtcgccgccgctcttgctgcgcctcacctggtcgcactcccggcacgggcccccgacgctctccttcgccggacccaccgcgtcgtcccccgccgtcctcctccgccgccgcaggggcacctactgcctcccctcctccacctccacatccacccacatccccccgctcgctctcttctgggacctaaccgccgccaggtacagtccggcctcgtccccgtccccggagccagcctccgggttctacgtcgtcgccgtcgccagcgccgaggtggtgctggccgtgggcgacctggcggcggagttcatcaaggcgaagttcgagggccagatcccctgggcgcggtccatcctccccgtgtcccgcaccgaccgggtcgtggcggcggcgccgcggccgggcggggcggttcacacggcgcgggtccggttcggcgagggcgcgccggagcacgaggtggccgtgggctgctgccgcgccggcgccggcaggcccggggaggaggagctctgggtcagcgtggacggcaagcgcgccgtgcacgcgcggcgcctgcgctggaacttccggggcaaccagacggtgttcgtggacggggcgcccgtcgacgtcctgtgggacctccacggctggtggttccaggacccgcccggctgcgccgtcgtgatgctccgcgccaggagcgcgctcgagagccggctctggctggaggaggaggccagggcgcccgggttcgcgctcctcgtgcaggccttgaggacgccgccctgatcttggtggtcctttgaatcctgatgaagaggtcaaatgctcactgcctgctggttgatcatgtttccttttgactagggaatttggtgggtggtatttagcaaaccaaaccaaatccagccgggggggaatggtggctgcgttggcaatctagacgtttttaggttccggtgtgtggaatgggtttgggaaggacaccatggattttcatgtggttttggtataccaagaggagatatattgatctgtgactgctgtttgggtcatcttctttctgtctgtctgtatgtcttttcttctaaaaacttgctgcttgttatttcccgataatttgcagctctatgaggtctgtgctcgtacagtttaacaaaggattatacagtatcatcatagggtgtgccttgattcagcattaccaactatatgtattgattatacaattgctcttcactgtttatacggagtgctgcagtaacagtgatgcaggtgattccagcaccattcctagtacagcggcacagtgcgagcagtgcctcccctcaatggattcccgcaccatctccgccagacatatcgtactgtttaccaaagatccgctacatgttttccagtgctgtttacctgtgtttgcagtctacctcatcattcccatgccaccacccgtttggttctagcatgttgttacttgattatgtttagtttctgcaggcgcgcgcacacacacagcgatgtgtccctgtcatgatttatggccacatgactgggtcccccaaatacagagagagagagcatgggagaggggggcgtcaatggaaggaacacgcacttggcgttggttggtcccaacttgacccagcatccaaaacaagctgaggggttgatggcatatatatcggattattgctttgcttctcagagcttgcttgccttcccagatcctgttgcgtgcctttttgtgctctggctttgttttatctgatgcacttggcgtagagcagcaggcgaaagagactgatggcgctgccacctatcgtgcgtgcgagcatatcaccgaatctgtcactccctccgttttttaaaatacacattgcggtttttaaataaataattaaattgtataaatgttatttatttttgttctgacttattttatcattagagatattttagtaacaacttatttattccattatttgcgagagagagaaaaaaatatgctccggatccggatggcagcttcaccaaacaggccatatacacatacagacgtaaggctcagggggggcaggcaccgttccggaatccaggacgacgacgacggttcccggcacggcacgggacgccgggcgccggcagccatggatggatggatggatatatgtgatcgagctgtatggcctaggtatttttttggagttggggatggccgacaaatgcagcgctgctttcacggtccatgaacacgttgcttccaggctaaattacgcagcgtgtaagacgtattgtaatgctgctttgcttggttgctgtccagcacttcgcgctgtttcaggtatgtatggctgcgtttaggttaattctcctcttcagcacggatcctgac

SEQ ID NO: 26035 - DNA, 957 bp, Zea Mays
cccgcatgtttccgtacgtcctcccagtagcctgcgtctccatttaccatgaatcttcatgaagtctgcatccccctctcccctggccccccaggcgctccgctccaaaacgccgatgcgaccgccgcctcgacgtggctcccccccgcacagatagaaaaggaaatcctagggttacatcatctcggatctgagttcctggtgctatggaggtcgaggatacactaattcagcggttgaggctatgggggttacgatctgagttcctgctgccatggaggtcgacgacatgctaattcagcgcatgaggctctggcggttggtgccctccctttacggccatcccagctgtgatgccctctcctatcgcttccaatgctgcagagctgttccaggccgcaagcgcaaccatgttggcttgcccctttcgaggagctccatgtcctcatcaccaagaactcatcctccctttcggattactcagattagtttatacaatcatggtcaccaagagctcgtcctccctttcggattattcaggatggaagtgtgtcgaatgcttcttcagatactatttcttggtctgttaaatatacttgacccaaatgcaagttttgctcaaatgtgacaaaaaatgattgtcacattaattgtcagcacgcctgcttccagcaaagttctagaaaaggaaaagatggaatgaaactcaaattttgatggccacacatgtgtggagacttgaattcatatatatttagttaggctcaacattagcgtaaacagttgatgaccaagtttttcaattagtattttagtttagatttagagtacacttatgtatgagttatttaccaatgcttatttatgagatattgaacgatattaaaatattatgaaatatatgtgcatgtatatttctctttcatattattataatgcggaatttaaaaatgatta

SEQ ID NO: 26036 - DNA, 958 bp, Zea Mays
cccgcatgtttccgtacgtcctcccagtagcctgcgtctccatttaccatgaatcttcatgaagtctgcatccccctctcccctggccccccaggcgctccgctccaaaacgccgatgcgaccgccgcctcgacgtggctcccccccgcacagatagaaaaggaaatcctagggttacatcatctcggatctgagttcctggtgctatggaggtcgaggatacactaattcagcggttgaggctatgggggttacgatctgagttcctgctgccatggaggtcgacgacatgctaattcagcgcatgaggctctggcggttggtgccctccctttacggccatcccagctgtgatgccctctcctatcgcttccaatgctgcagagctgttccaggccgcaagcgcaaccatgttggcttgcccctttcgaggagctccatgtcctcatcaccaagaactcatcctccctttcggattactcagattagtttatacaatcatggtcaccaagagctcgtcctccctttcggattattcaggatggaagtgtgtcgaatgcttcttcagatactatttcttggtctgttaaatatacttgacccaaatgcaagttttgctcaaatgtgacaaaaaatgattgtcacattaattgtcagcacgcctgcttccagcaaagttctagaaaagggaaaagatggaatgaaactcaaattttgatggccacacatgtgtggagacttgaattcatatatatttagttaggctcaacattagcgtaaacagttgatgaccaagtttttcaattagtattttagtttagatttagagtacacttatgtatgagttatttaccaatgcttatttatgagatattgaacgatattaaaatattatgaaatatatgtgcatgtatatttctctttcatattattataatgcggaatttaaaaatgatta

SEQ ID NO: 26037 - DNA, 653 bp, Zea Mays
agtacattcagtcttgaacccacgatttacattcatgggttttgacagaagatgaaagtaatgtcaaagcgctgttcaggcgaggaaaagctaaatctgaacttggccagacagaatcagcgagggaagatttcctcaaagcgaagaagtactccccagaagacaaggagatcattcgggagctccgtttgctcgcggaacaagacaaggcactataccagaagcagaaggagctctacaaaggtctctttgggccaagtcctgaagcgaaaccgaagaaggcaaagtacctcgttgtgttttggcagtgcctggtgtcatttatcctttatctggctgggatgttcaaacggaagaacgagtaggataatttaccagaaaattgtgtagaactggtggcctaattgaccaaccttgtattataaggagtgttgaattttctgtagaactgtcggccggtccggatcaattagttgttatgaactctatacgatgttgttcactattatgccatagtttcatacagtctttcaactggagctcaaagggccttttatgccattgtatattgcagctttcatatttagattatgctagtaataatactgttgctacaactggagctctagatttcactctcctgttggatgctg

SEQ ID NO: 26038 - DNA, 1368 bp, Zea Mays
gccgcggttactttacaacaaggctccagcgaaaacgagatcacagtagaagaggcttctttcgtgcattctgaacctccccaggatggcagcgccccacccgtggtttcctctgacatggaggcccttcacgacaaggttaagaagcaaatcatcaaagaaggccatggcaggaaaccgctgaagttcgcgacgtgctttgtgcactatagagcatgggttcaaggatcatcgcataaatttgaggatacctggcaagagcaacatccaattgaactagtacttggaaaagagaaaaaacaaatgtctggtttaggcatcggtgttggcagcatgaaaagcggggagcgtgcattgttgcatgttggttgggagctaggctatggcaaagaaggaagtttttcattcccaaatgtccctccaatggcagaccttgtttatgaagttgaactcattggatttgatgatgttaaagagggtaaatcccgaagtgacatgacagttgaagagaggattgcagctgcagacaggagaaagattgagggcaatgcatatttcaaagaaaagaagcttgaggaggccatgcagcaatatgaaatggcgattgcatacatgggagatgatttcatgtttcaattatttggaaagtacagagacatggccttggctgtgaaaaatccatgccatctcaatatggctgcatgcctgatcaaactaaagagattcgatgaagctattgcgcagtgtagcattgttttgacagaagatgaaagtaatgtcaaagcgctgttcaggcgaggaaaagctaaatctgaacttggccagacagaatcagcgagggaagatttcctcaaagcgaagaagtactccccagaagacaaggagatcattcgggagctccgtttgctcgcggaacaagacaaggcactataccagaagcagaaggagctctacaaaggtctctttgggccaagtcctgaagcgaaaccgaagaaggcaaagtacctcgttgtgttttggcagtgcctggtgtcatttatcctttatctggctgggatgttcaaacggaagaacgagtaggataatttaccagaaaattgtgtagaactggtggcctaattgaccaaccttgtattataaggagtgttgaattttctgtagaactgtcggccggtccggatcaattagttgttatgaactctatacgatgttgttcactattatgccatagtttcatacagtctttcaactggagctcaaagggccttttatgccattgtatattgcagctttcatatttagattatgctagtaataatactgttgctacaactggagctctagatttcactctcctgttggatgctg

SEQ ID NO: 26039 - DNA, 1444 bp, Zea Mays
tccgtctctccatgtataatttattttattaaaaaaacagaagcacaaactaccgcagcttatcaagcaagcgctacggagcgcaggtcaccgagctctggcccgcccaagttcactacccgacccgccgcgccgcagtctagaagcttctgccggccgtctgcggcccgcccatccgcaacccatggctgtcgtcgaagaagacgctgcggcgtctgcagatcccgccgccgcgtccgatcccgccgctggctccagcgaaaacgagatcacagtagaagaggcttctttcgtgcattctgaacctccccaggatggcagcgccccacccgtggtttcctctgacatggaggcccttcacgacaaggttaagaagcaaatcatcaaagaaggccatggcaggaaaccgctgaagttcgcgacgtgctttgtgcactatagagcatgggttcaaggatcatcgcataaatttgaggatacctggcaagagcaacatccaattgaactagtacttggaaaagagaaaaaacaaatgtctggtttaggcatcggtgttggcagcatgaaaagcggggagcgtgcattgttgcatgttggttgggagctaggctatggcaaagaaggaagtttttcattcccaaatgtccctccaatggcagaccttgtttatgaagttgaactcattggatttgatgatgttaaagagggtaaatcccgaagtgacatgacagttgaagagaggattgcagctgcagacaggagaaagattgagggcaatgcatatttcaaagaaaagaagcttgaggaggccatgcagcaatatgaaatggttttgacagaagatgaaagtaatgtcaaagcgctgttcaggcgaggaaaagctaaatctgaacttggccagacagaatcagcgagggaagatttcctcaaagcgaagaagtactccccagaagacaaggagatcattcgggagctccgtttgctcgcggaacaagacaaggcactataccagaagcagaaggagctctacaaaggtctctttgggccaagtcctgaagcgaaaccgaagaaggcaaagtacctcgttgtgttttggcagtgcctggtgtcatttatcctttatctggctgggatgttcaaacggaagaacgagtaggataatttaccagaaaattgtgtagaactggtggcctaattgaccaaccttgtattataaggagtgttgaattttctgtagaactgtcggccggtccggatcaattagttgttatgaactctatacgatgttgttcactattatgccatagtttcatacagtctttcaactggagctcaaagggccttttatgccattgtatattgcagctttcatatttagattatgctagtaataatactgttgctacaactggagctctagatttcactctcctgttggatgctg

SEQ ID NO: 26040 - DNA, 1459 bp, Zea Mays
tccgtctctccatgtataatttattttattaaaaaaacagaagcacaaactaccgcagcttatcaagcaagcgctacggagcgcaggtcaccgagctctggcccgcccaagttcactacccgacccgccgcgccgcagtctagaagcttctgccggccgtctgcggcccgcccatccgcaacccatggctgtcgtcgaagaagacgctgcggcgtctgcagatcccgccgccgcgtccgatcccgccgctggctccagcgaaaacgagatcacagtagaagaggcttctttcgtgcattctgaacctccccaggatggcagcgccccacccgtggtttcctctgacatggaggcccttcacgacaaggttaagaagcaaatcatcaaagaaggccatggcaggaaaccgctgaagttcgcgacgtgctttgtgcactatagagcatgggttcaaggatcatcgcataaatttgaggatacctggcaagagcaacatccaattgaactagtacttggaaaagaccttgtttatgaagttgaactcattggatttgatgatgttaaagagggtaaatcccgaagtgacatgacagttgaagagaggattgcagctgcagacaggagaaagattgagggcaatgcatatttcaaagaaaagaagcttgaggaggccatgcagcaatatgaaatggcgattgcatacatgggagatgatttcatgtttcaattatttggaaagtacagagacatggccttggctgtgaaaaatccatgccatctcaatatggctgcatgcctgatcaaactaaagagattcgatgaagctattgcgcagtgtagcattgttttgacagaagatgaaagtaatgtcaaagcgctgttcaggcgaggaaaagctaaatctgaacttggccagacagaatcagcgagggaagatttcctcaaagcgaagaagtactccccagaagacaaggagatcattcgggagctccgtttgctcgcggaacaagacaaggcactataccagaagcagaaggagctctacaaaggtctctttgggccaagtcctgaagcgaaaccgaagaaggcaaagtacctcgttgtgttttggcagtgcctggtgtcatttatcctttatctggctgggatgttcaaacggaagaacgagtaggataatttaccagaaaattgtgtagaactggtggcctaattgaccaaccttgtattataaggagtgttgaattttctgtagaactgtcggccggtccggatcaattagttgttatgaactctatacgatgttgttcactattatgccatagtttcatacagtctttcaactggagctcaaagggccttttatgccattgtatattgcagctttcatatttagattatgctagtaataatactgttgctacaactggagctctagatttcactctcctgttggatgctg

SEQ ID NO: 26041 - DNA, 2672 bp, Zea Mays
gtctctcttcctcctcctacctcccagtcccacctttctttctttcttttttctttctttttgggtttctctttctcctggtccggtccgggagacctgctggaccagacggtgccgactcactgcaggcgttcgcttgacagccttcctattacgagacgagctcttggttttccgcagacacggactctaacaagcgagggcctgtcatggcctggcctgctgttaagtctcgtctcctgcgtgactgcgtctctcttctctctctctcgctctttctcccggagtagattttattcctattcattcctcgtgtgagtgaggtccctccgctcctcctctctctctctctctctccctctccgcggagtggagccggagtcgagaggcaggcagacgagacgaggaatgcttccttcttcccatgccgccgccgtccctgttcttctcctccctccctaattccagtgctctcacgtaccagatctgaggccgcggcggagcgtgacgacgacgaagtcggtcaggatgagccgcgaggataccctgaaagtgcagaccctcgagctcaaggtgaacatccactgcgacggctgccttaagaaagtcaagaaggtgcttcacaagatcgatggggtgtaccagagcacggttaatgcggcggagggcaaggtgacggtgtccgggctcatggacccggacaccgtcatcaggaagctgcacaaggccgggaagccggcgcagctgtggggcgccaccgccaagcctgccgtggcgacccagctcgagaaactgcagctcaaggatgccgggggcaagggccagggccagccgcccaagaacgcaggcggcaagggtcagccgcccaagaacgccgccggcaagggccagggccagggccagaagcagcagcagcccaagggtggagcgggcggcgccggcgccggcgcgaaagtggtggcgctgccgcactcgcagccgacgccgcagcagctgatgcagatgcagcagcagatgcagatgaacgggatgaagtttgctcatccggagctcatggccatgggcgcaggtcgcatgccgatgccgatgccgttcccggcggcagcgcaggcgcaggcgcaggccgccgcggccaaggaccccaagaccgtcaagttcgacctcccggggggcgaggagttcggggacgacggcagcgacctcgacgacgagttcgacgaactagacgacgtggatttcgaggacgacggcctcgacgacgacgacgacggcgacctgtacgacggccccgggatggtgatgaagcccatgggcatgcccccggccgctgctgccggtggcggcaacggaaacggcggcggcaagaagggtggcggcgggaacgaggtcccggttcagatcaatgggaacgccagcaacggcggcggggcgaagcagaacgggggcggcaaaagcggggccaagaacggcaagggccgccgcatgcgggcatgatgatgaggccgccgaacatgatgggcggcgcgggcggtttccccggcatgggccagatgggcggccacccccacatgggtggcggcggcatgccgcaggcaggcgggggcgccgcgcacggcatgccggctggtggcagcatcagcatggccgctggcggaatgcctggggccgggttctttccgcgcggcgttggcggcggcatgccggccggcgcggagatgctgggcatgtcgcagctgcctccgcagcagcagcagcacatggcggcggtgatgcagcagcagcagcagcacatggctgcgatcatgcagcagcagcagcaacagatgatgatgatgaacgggcacggccacggccacggccaccatggccacggcgggtacgggtacgggcgcccggcgatgccgcagtacccgccgccgccggcgtactactacccgatgccgcagcgccacccgcacgacagcatgttcagcgacgagaaccccaacgggtgctcggtgatgtgaggcgaggcgcggcggcggcctgcggggggctccggagaaagtgaaccaggcaaccagccagccagccaaccggaaggagggagctcgggcccgtcaggtcggaggcggccgccgtgagtggaagagtcgtcgtcggtatacatgaagaaaaaaaaaactagctatatgctatagcaccagccgtaacctcgccgccccatttcgttttcgtctttcccctagtttgttttcacctttggtactttttgtttcccttctctgaacaaagaaagagcggcatgcagcttcctcttccttgagtggaaggtaggtatagtggtaacaacaatgatagtggtgatgctagctgatggctgtcttccttcgcttctttctttcttgcttgcttgcttgcttgcttgcttgccccatatctaatgaatggacaatgtgcaagagcagtgcctctctctgcctgcctagcttgttgtgtgagagagacagagaagaatcatcatggatggaggtagatgatacagtgctactgtatctccactccagacagcgacacacgggcgaaggggtggacatggtgccatggcggcagcagcgacggagccatgatggtggctggtgagtggtgagtggcgacggcgacggcagtggtccacgctgaactagagcgag

SEQ ID NO: 26042 - DNA, 2167 bp, Zea Mays
gtctctcttcctcctcctacctcccagtcccacctttctttctttcttttttctttctttttgggtttctctttctcctggtccggtccgggagacctgctggaccagacggtgccgactcactgcaggcgttcgcttgacagccttcctattacgagacgagctcttggttttccgcagacacggactctaacaagcgagggcctgtcatggcctggcctgctgttaagtctcgtctcctgcgtgactgcgtctctcttctctctctctcgctctttctcccggagtagattttattcctattcattcctcgtgtgagtgaggtccctccgctcctcctctctctctctctctctccctctccgcggagtggagccggagtcgagaggcaggcagacgagacgaggaatgcttccttcttcccatgccgccgccgtccctgttcttctcctccctccctaattccagtgctctcacgtaccagatctgaggccgcggcggagcgtgacgacgacgaagtcggtcaggatgagccgcgaggataccctgaaagtgcagaccctcgagctcaaggtgaacatccactgcgacggctgccttaagaaagtcaagaaggtgcttcacaagatcgatggggtgtaccagagcacggttaatgcggcggagggcaaggtgacggtgtccgggctcatggacccggacaccgtcatcaggaagctgcacaaggccgggaagccggcgcagctgtggggcgccaccgccaagcctgccgtggcgacccagctcgagaaactgcagctcaaggatgccgggggcaagggccagggccagccgcccaagaacgcaggcggcaagggtcagccgcccaagaacgccgccggcaagggccagggccagggccagaagcagcagcagcccaagggtggagcgggcggcgccggcgccggcgcgaaagtggtggcgctgccgcactcgcagccgacgccgcagcagctgatgcagatgcagcagcagatgcagatgaacgggatgaagtttgctcatccggagctcatggccatgggcgcaggtcgcatgccgatgccgatgccgttcccggcggcagcgcaggcgcaggcgcaggccgccgcggccaaggaccccaagaccgtcaagttcgacctcccggggggcgaggagttcggggacgacggcagcgacctcgacgacgagttcgacgaactagacgacgtggatttcgaggacgacggcctcgacgacgacgacgacggcgacctgtacgacggccccgggatggtgatgaagcccatgggcatgcccccggccgctgctgccggtggcggcaacggaaacggcggcggcaagaagggtggcggcgggaacgaggtcccggttcagatcaatgggaacgccgccggcgtactactacccgatgccgcagcgccacccgcacgacagcatgttcagcgacgagaaccccaacgggtgctcggtgatgtgaggcgaggcgcggcggcggcctgcggggggctccggagaaagtgaaccaggcaaccagccagccagccaaccggaaggagggagctcgggcccgtcaggtcggaggcggccgccgtgagtggaagagtcgtcgtcggtatacatgaagaaaaaaaaaactagctatatgctatagcaccagccgtaacctcgccgccccatttcgttttcgtctttcccctagtttgttttcacctttggtactttttgtttcccttctctgaacaaagaaagagcggcatgcagcttcctcttccttgagtggaaggtaggtatagtggtaacaacaatgatagtggtgatgctagctgatggctgtcttccttcgcttctttctttcttgcttgcttgcttgcttgcttgcttgccccatatctaatgaatggacaatgtgcaagagcagtgcctctctctgcctgcctagcttgttgtgtgagagagacagagaagaatcatcatggatggaggtagatgatacagtgctactgtatctccactccagacagcgacacacgggcgaaggggtggacatggtgccatggcggcagcagcgacggagccatgatggtggctggtgagtggtgagtggcgacggcgacggcagtggtccacgctgaactagagcgag

SEQ ID NO: 26043 - DNA, 2434 bp, Zea Mays
gtctctcttcctcctcctacctcccagtcccacctttctttctttcttttttctttctttttgggtttctctttctcctggtccggtccgggagacctgctggaccagacggtgccgactcactgcaggcgttcgcttgacagccttcctattacgagacgagctcttggttttccgcagacacggactctaacaagcgagggcctgtcatggcctggcctgctgttaagtctcgtctcctgcgtgactgcgtctctcttctctctctctcgctctttctcccggagtagattttattcctattcattcctcgtgtgagtgaggtccctccgctcctcctctctctctctctctctccctctccgcggagtggagccggagtcgagaggcaggcagacgagacgaggaatgcttccttcttcccatgccgccgccgtccctgttcttctcctccctccctaattccagtgctctcacgtaccagatctgaggccgcggcggagcgtgacgacgacgaagtcggtcaggatgagccgcgaggataccctgaaagtgcagaccctcgagctcaaggtgaacatccactgcgacggctgccttaagaaagtcaagaaggtgcttcacaagatcgatggtaaaacgttctccttctttataaagccgcgaaccgcttgccttttttttgttattgtttgccgttctttcgtgttcgtcttctctgcctgccagggtgagacttgagagtgagaccagctcagccggaggggagaggctgctcgcctgctctcttcttctccgtaacagaaacgatggacgataacccttgtgtccattccgaaaataacttgttttcttctgttctaatacaaatgcgctgggcatggattggtgggtgttgcaggggtgtaccagagcacggttaatgcggcggagggcaaggtgacggtgtccgggctcatggacccggacaccgtcatcaggaagctgcacaaggccgggaagccggcgcagctgtggggcgccaccgccaagcctgccgtggcgacccagctcgagaaactgcagctcaaggatgccgggggcaagggccagggccagccgcccaagaacgcaggcggcaagggtcagccgcccaagaacgccgccggcaagggccagggccagggccagaagcagcagcagcccaagggtggagcgggcggcgccggcgccggcgcgaaagtggtggcgctgccgcactcgcagccgacgccgcagcagctgatgcagatgcagcagcagatgcagatgaacgggatgaagtttgctcatccggagctcatggccatgggcgcaggtcgcatgccgatgccgatgccgttcccggcggcagcgcaggcgcaggcgcaggccgccgcggccaaggaccccaagaccgtcaagttcgacctcccggggggcgaggagttcggggacgacggcagcgacctcgacgacgagttcgacgaactagacgacgtggatttcgaggacgacggcctcgacgacgacgacgacggcgacctgtacgacggccccgggatggtgatgaagcccatgggcatgcccccggccgctgctgccggtggcggcaacggaaacggcggcggcaagaagggtggcggcgggaacgaggtcccggttcagatcaatgggaacgccgccggcgtactactacccgatgccgcagcgccacccgcacgacagcatgttcagcgacgagaaccccaacgggtgctcggtgatgtgaggcgaggcgcggcggcggcctgcggggggctccggagaaagtgaaccaggcaaccagccagccagccaaccggaaggagggagctcgggcccgtcaggtcggaggcggccgccgtgagtggaagagtcgtcgtcggtatacatgaagaaaaaaaaaactagctatatgctatagcaccagccgtaacctcgccgccccatttcgttttcgtctttcccctagtttgttttcacctttggtactttttgtttcccttctctgaacaaagaaagagcggcatgcagcttcctcttccttgagtggaaggtaggtatagtggtaacaacaatgatagtggtgatgctagctgatggctgtcttccttcgcttctttctttcttgcttgcttgcttgcttgcttgcttgccccatatctaatgaatggacaatgtgcaagagcagtgcctctctctgcctgcctagcttgttgtgtgagagagacagagaagaatcatcatggatggaggtagatgatacagtgctactgtatctccactccagacagcgacacacgggcgaaggggtggacatggtgccatggcggcagcagcgacggagccatgatggtggctggtgagtggtgagtggcgacggcgacggcagtggtccacgctgaactagagcgag

SEQ ID NO: 26044 - DNA, 2198 bp, Zea Mays
gtagtcgggagccaggagacgagagtctctcttcctcctcctacctcccagtcccacctttctttctttcttttttctttctttttgggtttctctttctcctggtccggtccgggagacctgctggaccagacggtgccgactcactgcaggcgttcgcttgacagccttcctattacgagacgagctcttggttttccgcagacacggactctaacaagcgagggcctgtcatggcctggcctgctatctgaggccgcggcggagcgtgacgacgacgaagtcggtcaggatgagccgcgaggataccctgaaagtgcagaccctcgagctcaaggtgaacatccactgcgacggctgccttaagaaagtcaagaaggtgcttcacaagatcgatggtaaaacgttctccttctttataaagccgcgaaccgcttgccttttttttgttattgtttgccgttctttcgtgttcgtcttctctgcctgccagggtgagacttgagagtgagaccagctcagccggaggggagaggctgctcgcctgctctcttcttctccgtaacagaaacgatggacgataacccttgtgtccattccgaaaataacttgttttcttctgttctaatacaaatgcgctgggcatggattggtgggtgttgcaggggtgtaccagagcacggttaatgcggcggagggcaaggtgacggtgtccgggctcatggacccggacaccgtcatcaggaagctgcacaaggccgggaagccggcgcagctgtggggcgccaccgccaagcctgccgtggcgacccagctcgagaaactgcagctcaaggatgccgggggcaagggccagggccagccgcccaagaacgcaggcggcaagggtcagccgcccaagaacgccgccggcaagggccagggccagggccagaagcagcagcagcccaagggtggagcgggcggcgccggcgccggcgcgaaagtggtggcgctgccgcactcgcagccgacgccgcagcagctgatgcagatgcagcagcagatgcagatgaacgggatgaagtttgctcatccggagctcatggccatgggcgcaggtcgcatgccgatgccgatgccgttcccggcggcagcgcaggcgcaggcgcaggccgccgcggccaaggaccccaagaccgtcaagttcgacctcccggggggcgaggagttcggggacgacggcagcgacctcgacgacgagttcgacgaactagacgacgtggatttcgaggacgacggcctcgacgacgacgacgacggcgacctgtacgacggccccgggatggtgatgaagcccatgggcatgcccccggccgctgctgccggtggcggcaacggaaacggcggcggcaagaagggtggcggcgggaacgaggtcccggttcagatcaatgggaacgccgccggcgtactactacccgatgccgcagcgccacccgcacgacagcatgttcagcgacgagaaccccaacgggtgctcggtgatgtgaggcgaggcgcggcggcggcctgcggggggctccggagaaagtgaaccaggcaaccagccagccagccaaccggaaggagggagctcgggcccgtcaggtcggaggcggccgccgtgagtggaagagtcgtcgtcggtatacatgaagaaaaaaaaaactagctatatgctatagcaccagccgtaacctcgccgccccatttcgttttcgtctttcccctagtttgttttcacctttggtactttttgtttcccttctctgaacaaagaaagagcggcatgcagcttcctcttccttgagtggaaggtaggtatagtggtaacaacaatgatagtggtgatgctagctgatggctgtcttccttcgcttctttctttcttgcttgcttgcttgcttgcttgcttgccccatatctaatgaatggacaatgtgcaagagcagtgcctctctctgcctgcctagcttgttgtgtgagagagacagagaagaatcatcatggatggaggtagatgatacagtgctactgtatctccactccagacagcgacacacgggcgaaggggtggacatggtgccatggcggcagcagcgacggagccatgatggtggctggtgagtggtgagtggcgacggcgacggcagtggtccacgctgaactagagcgag

SEQ ID NO: 26045 - DNA, 2442 bp, Zea Mays
gcgggggtagtcgggagccaggagacgagagtctctcttcctcctcctacctcccagtcccacctttctttctttcttttttctttctttttgggtttctctttctcctggtccggtccgggagacctgctggaccagacggtgccgactcactgcaggcgttcgcttgacagccttcctattacgagacgagctcttggttttccgcagacacggactctaacaagcgagggcctgtcatggcctggcctgctatctgaggccgcggcggagcgtgacgacgacgaagtcggtcaggatgagccgcgaggataccctgaaagtgcagaccctcgagctcaaggtgaacatccactgcgacggctgccttaagaaagtcaagaaggtgcttcacaagatcgatggggtgtaccagagcacggttaatgcggcggagggcaaggtgacggtgtccgggctcatggacccggacaccgtcatcaggaagctgcacaaggccgggaagccggcgcagctgtggggcgccaccgccaagcctgccgtggcgacccagctcgagaaactgcagctcaaggatgccgggggcaagggccagggccagccgcccaagaacgcaggcggcaagggtcagccgcccaagaacgccgccggcaagggccagggccagggccagaagcagcagcagcccaagggtggagcgggcggcgccggcgccggcgcgaaagtggtggcgctgccgcactcgcagccgacgccgcagcagctgatgcagatgcagcagcagatgcagatgaacgggatgaagtttgctcatccggagctcatggccatgggcgcaggtcgcatgccgatgccgatgccgttcccggcggcagcgcaggcgcaggcgcaggccgccgcggccaaggaccccaagaccgtcaagttcgacctcccggggggcgaggagttcggggacgacggcagcgacctcgacgacgagttcgacgaactagacgacgtggatttcgaggacgacggcctcgacgacgacgacgacggcgacctgtacgacggccccgggatggtgatgaagcccatgggcatgcccccggccgctgctgccggtggcggcaacggaaacggcggcggcaagaagggtggcggcgggaacgaggtcccggttcagatcaatgggaacgccagcaacggcggcggggcgaagcagaacgggggcggcaaaagcggggccaagaacggcaagggccgccgcatgcgggcatgatgatgaggccgccgaacatgatgggcggcgcgggcggtttccccggcatgggccagatgggcggccacccccacatgggtggcggcggcatgccgcaggcaggcgggggcgccgcgcacggcatgccggctggtggcagcatcagcatggccgctggcggaatgcctggggccgggttctttccgcgcggcgttggcggcggcatgccggccggcgcggagatgctgggcatgtcgcagctgcctccgcagcagcagcagcacatggcggcggtgatgcagcagcagcagcagcacatggctgcgatcatgcagcagcagcagcaacagatgatgatgatgaacgggcacggccacggccacggccaccatggccacggcgggtacgggtacgggcgcccggcgatgccgcagtacccgccgccgccggcgtactactacccgatgccgcagcgccacccgcacgacagcatgttcagcgacgagaaccccaacgggtgctcggtgatgtgaggcgaggcgcggcggcggcctgcggggggctccggagaaagtgaaccaggcaaccagccagccagccaaccggaaggagggagctcgggcccgtcaggtcggaggcggccgccgtgagtggaagagtcgtcgtcggtatacatgaagaaaaaaaaaactagctatatgctatagcaccagccgtaacctcgccgccccatttcgttttcgtctttcccctagtttgttttcacctttggtactttttgtttcccttctctgaacaaagaaagagcggcatgcagcttcctcttccttgagtggaaggtaggtatagtggtaacaacaatgatagtggtgatgctagctgatggctgtcttccttcgcttctttctttcttgcttgcttgcttgcttgcttgcttgccccatatctaatgaatggacaatgtgcaagagcagtgcctctctctgcctgcctagcttgttgtgtgagagagacagagaagaatcatcatggatggaggtagatgatacagtgctactgtatctccactccagacagcgacacacgggcgaaggggtggacatggtgccatggcggcagcagcgacggagccatgatggtggctggtgagtggtgagtggcgacggcgacggcagtggtccacgctgaactagagcgag

SEQ ID NO: 26046 - DNA, 1969 bp, Zea Mays
cttgtagacactcctagagtgaggtaggtggggcgggggtagtcgggagccaggagacgagagtctctcttcctcctcctacctcccagtcccacctttctttctttcttttttctttctttttgggtttctctttctcctggtccggtccgggagacctgctggaccagacggtgccgactcactgcaggcgttcgcttgacagccttcctattacgagacgagctcttggttttccgcagacacggactctaacaagcgagggcctgtcatggcctggcctgctatctgaggccgcggcggagcgtgacgacgacgaagtcggtcaggatgagccgcgaggataccctgaaagtgcagaccctcgagctcaaggtgaacatccactgcgacggctgccttaagaaagtcaagaaggtgcttcacaagatcgatggggtgtaccagagcacggttaatgcggcggagggcaaggtgacggtgtccgggctcatggacccggacaccgtcatcaggaagctgcacaaggccgggaagccggcgcagctgtggggcgccaccgccaagcctgccgtggcgacccagctcgagaaactgcagctcaaggatgccgggggcaagggccagggccagccgcccaagaacgcaggcggcaagggtcagccgcccaagaacgccgccggcaagggccagggccagggccagaagcagcagcagcccaagggtggagcgggcggcgccggcgccggcgcgaaagtggtggcgctgccgcactcgcagccgacgccgcagcagctgatgcagatgcagcagcagatgcagatgaacgggatgaagtttgctcatccggagctcatggccatgggcgcaggtcgcatgccgatgccgatgccgttcccggcggcagcgcaggcgcaggcgcaggccgccgcggccaaggaccccaagaccgtcaagttcgacctcccggggggcgaggagttcggggacgacggcagcgacctcgacgacgagttcgacgaactagacgacgtggatttcgaggacgacggcctcgacgacgacgacgacggcgacctgtacgacggccccgggatggtgatgaagcccatgggcatgcccccggccgctgctgccggtggcggcaacggaaacggcggcggcaagaagggtggcggcgggaacgaggtcccggttcagatcaatgggaacgccgccggcgtactactacccgatgccgcagcgccacccgcacgacagcatgttcagcgacgagaaccccaacgggtgctcggtgatgtgaggcgaggcgcggcggcggcctgcggggggctccggagaaagtgaaccaggcaaccagccagccagccaaccggaaggagggagctcgggcccgtcaggtcggaggcggccgccgtgagtggaagagtcgtcgtcggtatacatgaagaaaaaaaaaactagctatatgctatagcaccagccgtaacctcgccgccccatttcgttttcgtctttcccctagtttgttttcacctttggtactttttgtttcccttctctgaacaaagaaagagcggcatgcagcttcctcttccttgagtggaaggtaggtatagtggtaacaacaatgatagtggtgatgctagctgatggctgtcttccttcgcttctttctttcttgcttgcttgcttgcttgcttgcttgccccatatctaatgaatggacaatgtgcaagagcagtgcctctctctgcctgcctagcttgttgtgtgagagagacagagaagaatcatcatggatggaggtagatgatacagtgctactgtatctccactccagacagcgacacacgggcgaaggggtggacatggtgccatggcggcagcagcgacggagccatgatggtggctggtgagtggtgagtggcgacggcgacggcagtggtccacgctgaactagagcgag

SEQ ID NO: 26047 - DNA, 2762 bp, Zea Mays
tttatgttttcttttcgttcaaagaaaccgtactgataggaaacagttgatattttacatggctctaaaagtttataataataaagaatttaccaacccaggtggaattaataataacaggaggacctgtatctaaaattagaaatccttgaaggagaacacaggaagaccacccaccatgtcagagcctatttaaaccgcgctttgggcagccatctttcacacaacacaagagccttctcgctctgatctgagcaggaggaggaagaaagccaaaggccttccttgcgcttccagggcaaagaagatctgaggccgcggcggagcgtgacgacgacgaagtcggtcaggatgagccgcgaggataccctgaaagtgcagaccctcgagctcaaggtgaacatccactgcgacggctgccttaagaaagtcaagaaggtgcttcacaagatcgatggtaaaacgttctccttctttataaagccgcgaaccgcttgccttttttttgttattgtttgccgttctttcgtgttcgtcttctctgcctgccagggtgagacttgagagtgagaccagctcagccggaggggagaggctgctcgcctgctctcttcttctccgtaacagaaacgatggacgataacccttgtgtccattccgaaaataacttgttttcttctgttctaatacaaatgcgctgggcatggattggtgggtgttgcaggggtgtaccagagcacggttaatgcggcggagggcaaggtgacggtgtccgggctcatggacccggacaccgtcatcaggaagctgcacaaggccgggaagccggcgcagctgtggggcgccaccgccaagcctgccgtggcgacccagctcgagaaactgcagctcaaggatgccgggggcaagggccagggccagccgcccaagaacgcaggcggcaagggtcagccgcccaagaacgccgccggcaagggccagggccagggccagaagcagcagcagcccaagggtggagcgggcggcgccggcgccggcgcgaaagtggtggcgctgccgcactcgcagccgacgccgcagcagctgatgcagatgcagcagcagatgcagatgaacgggatgaagtttgctcatccggagctcatggccatgggcgcaggtcgcatgccgatgccgatgccgttcccggcggcagcgcaggcgcaggcgcaggccgccgcggccaaggaccccaagaccgtcaagttcgacctcccggggggcgaggagttcggggacgacggcagcgacctcgacgacgagttcgacgaactagacgacgtggatttcgaggacgacggcctcgacgacgacgacgacggcgacctgtacgacggccccgggatggtgatgaagcccatgggcatgcccccggccgctgctgccggtggcggcaacggaaacggcggcggcaagaagggtggcggcgggaacgaggtcccggttcagatcaatgggaacgccagcaacggcggcggggcgaagcagaacgggggcggcaaaagcggggccaagaacggcaagggccgccgcatgcgggcatgatgatgaggccgccgaacatgatgggcggcgcgggcggtttccccggcatgggccagatgggcggccacccccacatgggtggcggcggcatgccgcaggcaggcgggggcgccgcgcacggcatgccggctggtggcagcatcagcatggccgctggcggaatgcctggggccgggttctttccgcgcggcgttggcggcggcatgccggccggcgcggagatgctgggcatgtcgcagctgcctccgcagcagcagcagcacatggcggcggtgatgcagcagcagcagcagcacatggctgcgatcatgcagcagcagcagcaacagatgatgatgatgaacgggcacggccacggccacggccaccatggccacggcgggtacgggtacgggcgcccggcgatgccgcagtacccgccgccgccggcgtactactacccgatgccgcagcgccacccgcacgacagcatgttcagcgacgagaaccccaacgggtgctcggtgatgtgaggcgaggcgcggcggcggcctgcggggggctccggagaaagtgaaccaggcaaccagccagccagccaaccggaaggagggagctcgggcccgtcaggtcggaggcggccgccgtgagtggaagagtcgtcgtcggtatacatgaagaaaaaaaaaactagctatatgctatagcaccagccgtaacctcgccgccccatttcgttttcgtctttcccctagtttgttttcacctttggtactttttgtttcccttctctgaacaaagaaagagcggcatgcagcttcctcttccttgagtggaaggtaggtatagtggtaacaacaatgatagtggtgatgctagctgatggctgtcttccttcgcttctttctttcttgcttgcttgcttgcttgcttgcttgccccatatctaatgaatggacaatgtgcaagagcagtgcctctctctgcctgcctagcttgttgtgtgagagagacagagaagaatcatcatggatggaggtagatgatacagtgctactgtatctccactccagacagcgacacacgggcgaaggggtggacatggtgccatggcggcagcagcgacggagccatgatggtggctggtgagtggtgagtggcgacggcgacggcagtggtccacgctgaactagagcgag

SEQ ID NO: 26048 - DNA, 1990 bp, Zea Mays
tttatgttttcttttcgttcaaagaaaccgtactgataggaaacagttgatattttacatggctctaaaagtttataataataaagaatttaccaacccaggtggaattaataataacaggaggacctgtatctaaaattagaaatccttgaaggagaacacaggaagaccacccaccatgtcagagcctatttaaaccgcgctttgggcagccatctttcacacaacacaagagccttctcgctctgatctgagcaggaggaggaagaaagccaaaggccttccttgcgcttccagggcaaagaagatctgaggccgcggcggagcgtgacgacgacgaagtcggtcaggatgagccgcgaggataccctgaaagtgcagaccctcgagctcaaggtgaacatccactgcgacggctgccttaagaaagtcaagaaggtgcttcacaagatcgatggggtgtaccagagcacggttaatgcggcggagggcaaggtgacggtgtccgggctcatggacccggacaccgtcatcaggaagctgcacaaggccgggaagccggcgcagctgtggggcgccaccgccaagcctgccgtggcgacccagctcgagaaactgcagctcaaggatgccgggggcaagggccagggccagccgcccaagaacgcaggcggcaagggtcagccgcccaagaacgccgccggcaagggccagggccagggccagaagcagcagcagcccaagggtggagcgggcggcgccggcgccggcgcgaaagtggtggcgctgccgcactcgcagccgacgccgcagcagctgatgcagatgcagcagcagatgcagatgaacgggatgaagtttgctcatccggagctcatggccatgggcgcaggtcgcatgccgatgccgatgccgttcccggcggcagcgcaggcgcaggcgcaggccgccgcggccaaggaccccaagaccgtcaagttcgacctcccggggggcgaggagttcggggacgacggcagcgacctcgacgacgagttcgacgaactagacgacgtggatttcgaggacgacggcctcgacgacgacgacgacggcgacctgtacgacggccccgggatggtgatgaagcccatgggcatgcccccggccgctgctgccggtggcggcaacggaaacggcggcggcaagaagggtggcggcgggaacgaggtcccggttcagatcaatgggaacgccgccggcgtactactacccgatgccgcagcgccacccgcacgacagcatgttcagcgacgagaaccccaacgggtgctcggtgatgtgaggcgaggcgcggcggcggcctgcggggggctccggagaaagtgaaccaggcaaccagccagccagccaaccggaaggagggagctcgggcccgtcaggtcggaggcggccgccgtgagtggaagagtcgtcgtcggtatacatgaagaaaaaaaaaactagctatatgctatagcaccagccgtaacctcgccgccccatttcgttttcgtctttcccctagtttgttttcacctttggtactttttgtttcccttctctgaacaaagaaagagcggcatgcagcttcctcttccttgagtggaaggtaggtatagtggtaacaacaatgatagtggtgatgctagctgatggctgtcttccttcgcttctttctttcttgcttgcttgcttgcttgcttgcttgccccatatctaatgaatggacaatgtgcaagagcagtgcctctctctgcctgcctagcttgttgtgtgagagagacagagaagaatcatcatggatggaggtagatgatacagtgctactgtatctccactccagacagcgacacacgggcgaaggggtggacatggtgccatggcggcagcagcgacggagccatgatggtggctggtgagtggtgagtggcgacggcgacggcagtggtccacgctgaactagagcgag

SEQ ID NO: 26049 - DNA, 2495 bp, Zea Mays
tttatgttttcttttcgttcaaagaaaccgtactgataggaaacagttgatattttacatggctctaaaagtttataataataaagaatttaccaacccaggtggaattaataataacaggaggacctgtatctaaaattagaaatccttgaaggagaacacaggaagaccacccaccatgtcagagcctatttaaaccgcgctttgggcagccatctttcacacaacacaagagccttctcgctctgatctgagcaggaggaggaagaaagccaaaggccttccttgcgcttccagggcaaagaagatctgaggccgcggcggagcgtgacgacgacgaagtcggtcaggatgagccgcgaggataccctgaaagtgcagaccctcgagctcaaggtgaacatccactgcgacggctgccttaagaaagtcaagaaggtgcttcacaagatcgatggggtgtaccagagcacggttaatgcggcggagggcaaggtgacggtgtccgggctcatggacccggacaccgtcatcaggaagctgcacaaggccgggaagccggcgcagctgtggggcgccaccgccaagcctgccgtggcgacccagctcgagaaactgcagctcaaggatgccgggggcaagggccagggccagccgcccaagaacgcaggcggcaagggtcagccgcccaagaacgccgccggcaagggccagggccagggccagaagcagcagcagcccaagggtggagcgggcggcgccggcgccggcgcgaaagtggtggcgctgccgcactcgcagccgacgccgcagcagctgatgcagatgcagcagcagatgcagatgaacgggatgaagtttgctcatccggagctcatggccatgggcgcaggtcgcatgccgatgccgatgccgttcccggcggcagcgcaggcgcaggcgcaggccgccgcggccaaggaccccaagaccgtcaagttcgacctcccggggggcgaggagttcggggacgacggcagcgacctcgacgacgagttcgacgaactagacgacgtggatttcgaggacgacggcctcgacgacgacgacgacggcgacctgtacgacggccccgggatggtgatgaagcccatgggcatgcccccggccgctgctgccggtggcggcaacggaaacggcggcggcaagaagggtggcggcgggaacgaggtcccggttcagatcaatgggaacgccagcaacggcggcggggcgaagcagaacgggggcggcaaaagcggggccaagaacggcaagggccgccgcatgcgggcatgatgatgaggccgccgaacatgatgggcggcgcgggcggtttccccggcatgggccagatgggcggccacccccacatgggtggcggcggcatgccgcaggcaggcgggggcgccgcgcacggcatgccggctggtggcagcatcagcatggccgctggcggaatgcctggggccgggttctttccgcgcggcgttggcggcggcatgccggccggcgcggagatgctgggcatgtcgcagctgcctccgcagcagcagcagcacatggcggcggtgatgcagcagcagcagcagcacatggctgcgatcatgcagcagcagcagcaacagatgatgatgatgaacgggcacggccacggccacggccaccatggccacggcgggtacgggtacgggcgcccggcgatgccgcagtacccgccgccgccggcgtactactacccgatgccgcagcgccacccgcacgacagcatgttcagcgacgagaaccccaacgggtgctcggtgatgtgaggcgaggcgcggcggcggcctgcggggggctccggagaaagtgaaccaggcaaccagccagccagccaaccggaaggagggagctcgggcccgtcaggtcggaggcggccgccgtgagtggaagagtcgtcgtcggtatacatgaagaaaaaaaaaactagctatatgctatagcaccagccgtaacctcgccgccccatttcgttttcgtctttcccctagtttgttttcacctttggtactttttgtttcccttctctgaacaaagaaagagcggcatgcagcttcctcttccttgagtggaaggtaggtatagtggtaacaacaatgatagtggtgatgctagctgatggctgtcttccttcgcttctttctttcttgcttgcttgcttgcttgcttgcttgccccatatctaatgaatggacaatgtgcaagagcagtgcctctctctgcctgcctagcttgttgtgtgagagagacagagaagaatcatcatggatggaggtagatgatacagtgctactgtatctccactccagacagcgacacacgggcgaaggggtggacatggtgccatggcggcagcagcgacggagccatgatggtggctggtgagtggtgagtggcgacggcgacggcagtggtccacgctgaactagagcgag

SEQ ID NO: 26050 - DNA, 655 bp, Zea Mays
cccaattagcgcttgaatgtttggatgctgggtgttcattgctcaatacatacatactgtaataggaagtgagatatgctacttcaagaatggagtatgccaaggcagcgccttcaaggacattcctggagggaggtatttcccagccgcgtcactgtatacgatgcctaacgagccaaactgtgtagtcaagttcaacttcgggccagattttgagttcttcccacaagatttcggaagcctgccagttcctcaaccaatgagcgaggtaactcatcaggcacttgaagtgaagaacgaggggcctaccgagaatggcatcgctgaaaaaactagctagtgtagttagcatgcttttgtataacttatacctatgttaacactaagcaagttatgatgtataagttagccgtagcagttatatctgactggattaatgcttgtgctgttactaaatgggctctatcttctccttgcctgggttaatggtgttattgtagtgctgctgatcgtggataattgttaactggttatgttatgtaagggcaacctgatcaacaattaatcatcgtctggtcgaccactaggtgacaaggtctgaccaagcgctcaagggatatatatattgaaaaaaaatcaagagatgagttttttt

SEQ ID NO: 26051 - DNA, 1306 bp, Zea Mays
cgacctgaatttccatggtaccatttcgatgagtggacaaggccaagatttctggctcgatgtagttttccgatcgagctgggcccaacactaaaacaatctaacgacccaacgacctttgggtccgggcgtgggctgcaattttcaacccatggtcaggtttagatgcgagacaacagaagattacccccgccatttgaacctccaagttcagaaactgaccccctcgtccctccccaccatcgcgatggctgacgacgccgcggcggcggcgttcgcgccctctccctcgccaccgtcacccgtagcgcaacctctgcccgacctctccccgccgccgcccttctccccaccagccggcacccctgcttccggggcgcagacgccgagcctcccggacaccccggcctccctagatccggacacccccttctccgacgccaccccgacccccgccgacgcctccgacgccgccctcgcttcggacgacggcatcaccaacccgtcggggggcaccgccggcaagcacatgacgctcgcgccgcccgccccgcccgccaagaaaccgtccaagaagaagggcggcaacagcgtctggacccgcccggcctcccgcaagggcaagaagaaggcgaggcagccgggcggcctcggccacggctccggcggccccgccggggccgccagaggctccaaccctaggcccaacgccggcggcgaggaggagttcctcctcgtccccgcgacccgcctcgccgccgagcgctccgacgacgcgcccggccagcctgtgctcctctcccgcgtcttcaagtccgagcggatcgagctctcagaggaccgcctcaccgcggccagcaccaagggattccgcatggtgcgcgcgacccgcggcgttgcggcaggggcgtggtacttcgaggtcaaggtcgtgcacctcggccccaccggccacacccgccttggatgggccaccaacaaggctgacctccagacgcccgtcggcttcgacgcctatgggtttgggtaccgtgacgtcgatggcgccaaggtgactaaggcttggagggacaagtatgctgatgaagggtacggggaaggagatgtcctggggttctacatttctctgcctgatggggagcggtatgaaccgaagcagcctgacctgattcagtacaagggaatgccttttcacgtccaagtccccaaggaggagcagaagacgccggatcctgtccctgttcacctgttaggctgctgcacaaattcatgacccctcttcagataccatataaggctacttaaa

SEQ ID NO: 26052 - DNA, 947 bp, Zea Mays
aactcgcagatggaaggcttcgatacatcgaactgcaaccgcgcgacgtggggtagaatataatctggtgcgctccccccggcccccgcgaacaacttcctgcttgcacgcaagccactccgaggccaagtctagggtttgggaatctgtaggaggggagaggggagcgcgctcagggtcagggaggcgaagatgatcgaggtggtgctgaacgaccgcctggggaagaaggtgcgggtgaagtgcaacgaggacgacaccatcggcgacctcaagaagctggtggcggcgcagacggggacgcgccccgagaagatccgcatccagaagtggtacaacatctacaaggaccacatcacgctcaaggactacgagatccacgacgggatggggctcgagctctactacaactaggcgccctgaccccaaccgtgccctgatgttaatccgaattctgaagtcatgggtgcgcttccagtcacagcgtctttagctaacaagctcgcatacatataggcaacttgagtgagctatgtagtacggatatggttgtgtggcaaactgccaatgactattgacatccttgcatatattgacatgtgacaaggatcaacctgcaaaactggtgccctgctactcgcagaccttattatcttaaataacacagttgtaggacaaccggggacagcctcttcagcgtctcgtttcgtccgtccaattctgatctactgctagggacgacaccgaggattgttgtatcaataaactacagtttgagtacttatataaatatgaaaaaccgtgatcggaaaaaagaatgtcttgaatggagtctgtagaactccaaaaatactagctttagggaagcgttttgcatccaaacacttcgtggcacactaaaatcaaactatttcataaaattgtattattattttcaaaactaaaaa

SEQ ID NO: 26053 - DNA, 504 bp, Zea Mays
gtgctggaacggatgggccgccagcacccatcgtggacgtctgaccacaccccatgtgtgttagcaccatagaaggagatttgagggcgccgcgtgcgatgcccgctgcgccgccgccaacatctcgctgcaggggaagtatctcgtcgacatgctccacctgccctcccatgggtccgcccctggccggcctctaactcagctacaacaccctctagcggcatccagcaggagctggttgcagatcccgcagatggggccaagaccgtgcgcaagccggtcttcaccaccgtcgaccagctgcacccctagatgcatggccacactcttaccatccgcgtcatctctgcctgcaccatcctcgacaaatcctccatgcacattggtcgtacccgcatcgcccagtgcctcgtcggatacaacaccgacaccgtccttgtcacgcccgcaacaatcaggatgcaccaggttaatagaatgatagtttcaagtttccatgggacc

SEQ ID NO: 26054 - DNA, 645 bp, Zea Mays
ccaagaccgtgcgcaagccggtcttcaccaccgtcgaccagctgcacccctagatgcatggccacactcttaccatccgcgtcatctctgcctgcaccatcctcgacaaatcctccatgcacattggtcgtacccgcatcgcccagtgcctcgtcggatacaacaccgacaccgtccttgtcacgcccgcaacaatcaggcaaatttgtcatagatacactcacggtgtgctggtgtgtgagtggaggaagagcttgatggaggatgagggagaggaatcagtagagcaaatgagcaagacgagacagatgtgtagctgttggtgtttctccactatcgcgacctcaatgcgcaagcatggcctatatagagtgacgagaacaccatggaattgagttgtgttgttgtggtgcggagtaggagtgtccaagcaaggagagaatcacaggcgatttctctcattgttgttctggcatcgtttctgattctacgtttaaacaaagtgtttgtctcattagggcgtgtttcctcactttttctcgcacaagaatctagtaaaaaggttctccaaataggctctttgactgctacagttcgtcgattcgattctcccatctatatcctttgtggttgcccatccggcta

SEQ ID NO: 26055 - DNA, 836 bp, Zea Mays
ccgccagcacccatcgtggacgtctgaccacaccccatgtgtgttagcaccatagaaggagatttgagggcgccgcgtgcgatgcccgctgcgccgccgccaacatctcgctgcaggggaagtatctcgtcgacatgctccacctgccctcccatgggtccgcccctggccggcctctaactcagctacaacaccctctagcggcatccagcaggagctggttgcagatcccgcagatggggccaagaccgtgcgcaagccggtcttcaccaccgtcgaccagctgcacccctagatgcatggccacactcttaccatccgcgtcatctctgcctgcaccatcctcgacaaatcctccatgcacattggtcgtacccgcatcgcccagtgcctcgtcggatacaacaccgacaccgtccttgtcacgcccgcaacaatcaggagcttgatggaggatgagggagaggaatcagtagagcaaatgagcaagacgagacagatgtgtagctgttggtgtttctccactatcgcgacctcaatgcgcaagcatggcctatatagagtgacgagaacaccatggaattgagttgtgttgttgtggtgcggagtaggagtgtccaagcaaggagagaatcacaggcgatttctctcattgttgttctggcatcgtttctgattctacgtttaaacaaagtgtttgtctcattagggcgtgtttcctcactttttctcgcacaagaatctagtaaaaaggttctccaaataggctctttgactgctacagttcgtcgattcgattctcccatctatatcctttgtggttgcccatccggcta

SEQ ID NO: 26056 - DNA, 269 bp, Zea Mays
caatagctctgttgatctagcctctcacgggcactgtgtgggggtatttataggtatccgagtgcccagcgccttgtgttaaggacgcatgtgccctcagacacctagtttatccccagaatattcccataaagcagggttacaagctgtaattacaagaatgcctttacaagctaggcccgtaacacaaaggcggccacgcggggcccgttacaatgggccagatcacgcgtgggccttagagcaggacgaggccgcgctgcggggag

SEQ ID NO: 26057 - DNA, 1102 bp, Zea Mays
atggatcgactctattgtaacatgatgaggtcagacatcccaacccggtcgccgccgcaggatgatggggtaccctttgagggtgcgggtggtggggaagaagacgaccctgtcctcctcagcctcttcccagctgaagcgcgtcaccagacggtggaggaaaacggagaccaccacgcgggcaagctcgtggcccgggcacaggcgaggccccccgccgaagggagtgaacacgctgcccccctgctgcgcgtcctggcctactactcgtactccctccttcttgctctgctgccatctccaggggtcgaaggcgcgagcgttctcgtagtgctcggggctcaggtgcacggctcggaacgacgcgaagattctgcagccctttgggataacgtaatctgacgaacacgaacgagacggggtatgctgttatagacgaacggacggacggacgaaccaatgtcccagctggtaccaaagcttgaagacgacgatagaaacacctttgaaatggatgtcggcgttcgcccgcctgaacaccccgctgatcaagttagccacgcgcagcgtctcactgatcacctgcaaataataaaaaaaaaagaacgggcgtgctagctcagatgtttgttcttttcgaattcaggagggagatcgcgagatgacgccggtagagcagggaggggatccgaagaaatttgacagggagttagttagttacgcattgtgtaaacggcatcgacttgtaatcgctccattgcagaggctgctcgtccttgcctttcctgtgtctgatgctgtcgtgctcttcctgcaaaaaaaaaaaaatgcagaagaaaccatttgggagagtactggaaaaaataaacaaagattttggatcctgtcccactatgacgctgctactataataagggtgtacagagatatatagggggcatcagcaccctatcgaattgcgggatgtttatagagaatcaaccaggcaaattgccaatcaaatctcccatgattcttagccatagtaccttgagctgcgccagtgcagtgggcgtctcggtgaggaacttgacggcgagcgtcatgagcacggaggtggtct

SEQ ID NO: 26058 - DNA, 2628 bp, Zea Mays
gcctctacgcctgcctctcctgcgccaccgtcttctgcccctcccacgctgccacgcacgcctccgcctccgcggggttagcggcgtttgcgaagcggtcgcggcaggcacggttcgcggcggttgggtgttcgtgccttgcggagcggtcgcggcgggcgcggttcgcggcgggcggttggcgggggcgggggtcgcggcgggatcgggcgggcgattgtggcagggcagtctacaacatagtcttaatagttagtacagatattgagggccaaatgcaaaaacccaccaggagcatccggcagagggtctgcttcttcaaaccactcgcatttccacatcaacatcaacacgaggccctgccgccgccgccgcccgcccgccccctcctaaaccccggcgaccaaccatggccttctccgctaaaccccactgctcctgctccaccaccaccaaaccccccacccccgtcgcccacctctctccacccccgtccctctccgtccgcgccgccgcctgcgccccgcgctccgcctatggcctctctgccgccggcgtgggcggcggcaaggcgtcccccagtaccgttcgcctccgcgctcgggcccagcgcatccgcgcgtcgcagcagcagccgcggcggcgccctgaatacgtgccgaaccgcatcgacgaccccaactacgtgcgcatcttcgacaccacgctccgcgacggggagcagtccccgggcgccaccatgacgagcgccgagaagctcgtcgtcgcgcgccagctggcccgcctcggcgtcgacatcatcgaggcggggttcccggcctcctcccccgacgacctcgacgccgtgcgctccatcgccatcgaggtcggcaacccgcccaccgccggcgctgggaccgcccacgtgcccgtcatctgcggcctgtcgcggtgcaacaggaaggacatcgacgccgcatgggaggccgtcaggcacgctcggaggccccggatccacactttcatcgccaccagcgagatccatatgcagcataagctcaggaagacgcccgagcaggtcgtcgctattgccagggagatggtggcgtacgcgcgcagcctcgggtgccccgatgttgaattcagccctgaggatgccggcaggtcaaatcgagaattcctgtatcatatactggaggaagtcattaaagctggagcaaccactcttaatatcccagacactgtcggatacactcttccttatgaatttgggaaattaattgctgacataaaggcaaacacttctggaattgaaaatgctatcatttccactcattgccagaatgaccttggtcttgcgactgccaacacattagcggagcaagacagttagaggtgactattaatggtattggtgaaagagctggaaatgcttcattggaagaggttgtcatggcaattaaatgtcgtggggagctcttagatggtctatatacgggaattaattcccagcatattactttgacaagcaaaatggtacaagagcatagtggacttcatgtgcaaccacataaggctattgttggtgccaatgcctttgctcatgaaagtggaattcatcaggatggcatgcttaaatataaaggaacatatgaaataatatcgcctgatgatattggtttaacacgtgcaaatgaatttggtattgttcttgggaaactcagcggaaggcatgcagtgagatctaagctagtggagcttggatatgaaatcagtgacaaggaatttgaagatttctttaaacgctacaaagaggtcgcagagaagaaaaagcgtgtaactgatgaagacatagaagcgttattgtcagatgagatattccagcctaaggttatttggtcccttgctgatgtacaggcaacatgtggaacacttggcttatctacagcaacagtgaaactgatagcaccagatggagaggagagaatagcatgttcagttggaacaggtccagttgatgcagcttacaaggctattgaccaaataatccagatcccaactgttctccgagaatatggtatgacctcagtcaccgaaggcatcgacgcaatcgcaacaacccgggtggttgtcaccggagatgtgaccaacaactccaaacatgccttgactggccgcgctttcaaccgctccttcagcgggagcggggcagcaatggacatcgtcgtctccagtgtcagagcttacctgagtgccctgaacaagatgtgtagctttgctggtgccgcgaaagccagcggcgaggtacctgagagtgcaagcgtccaaagcgcagagtgagcttggcgacgatttggttctcatgtggactgggcggcgtaagagccagagcaactgttaaagagggtgacatttcgtttctgtattaggctgttcaatgttgggggttttgccttgtcagtgtggtgtgactgtactgttctttttttggaggatagcccagcttggaacgtgcaggcaattttggacctaggtagtgtacaatttgtatcttatatgaacaatacttccaataatcgaaagacttaagatgggttgctggagtctgttctcgtatcatgttgcgctttggcagtgggaggtctagta

SEQ ID NO: 26059 - DNA, 2726 bp, Zea Mays
gcctctacgcctgcctctcctgcgccaccgtcttctgcccctcccacgctgccacgcacgcctccgcctccgcggggttagcggcgtttgcgaagcggtcgcggcaggcacggttcgcggcggttgggtgttcgtgccttgcggagcggtcgcggcgggcgcggttcgcggcgggcggttggcgggggcgggggtcgcggcgggatcgggcgggcgattgtggcagggcagtctacaacatagtcttaatagttagtacagatattgagggccaaatgcaaaaacccaccaggagcatccggcagagggtctgcttcttcaaaccactcgcatttccacatcaacatcaacacgaggccctgccgccgccgccgcccgcccgccccctcctaaaccccggcgaccaaccatggccttctccgctaaaccccactgctcctgctccaccaccaccaaaccccccacccccgtcgcccacctctctccacccccgtccctctccgtccgcgccgccgcctgcgccccgcgctccgcctatggcctctctgccgccggcgtgggcggcggcaaggcgtcccccagtaccgttcgcctccgcgctcgggcccagcgcatccgcgcgtcgcagcagcagccgcggcggcgccctgaatacgtgccgaaccgcatcgacgaccccaactacgtgcgcatcttcgacaccacgctccgcgacggggagcagtccccgggcgccaccatgacgagcgccgagaagctcgtcgtcgcgcgccagctggcccgcctcggcgtcgacatcatcgaggcggggttcccggcctcctcccccgacgacctcgacgccgtgcgctccatcgccatcgaggtcggcaacccgcccaccgccggcgctgggaccgcccacgtgcccgtcatctgcggcctgtcgcggtgcaacaggaaggacatcgacgccgcatgggaggccgtcaggcacgctcggaggccccggatccacactttcatcgccaccagcgagatccatatgcagcataagctcaggaagacgcccgagcaggtcgtcgctattgccagggagatggtggcgtacgcgcgcagcctcgggtgccccgatgttgaattcagccctgaggatgccggcaggtcaaatcgagaattcctgtatcatatactggaggaagtcattaaagctggagcaaccactcttaatatcccagacactgtcggatacactcttccttatgaatttgggaaattaattgctgacataaaggcaaacacttctggaattgaaaatgctatcatttccactcattgccagaatgaccttggtcttgcgactgccaacacattagcggtagtgccttttccttgtttgtttatattttatataatttattatcatgtgtctactctttaaccgggttcctaatttggcttacatttagggtgctcgctcaggagcaagacagttagaggtgactattaatggtattggtgaaagagctggaaatgcttcattggaagaggttgtcatggcaattaaatgtcgtggggagctcttagatggtctatatacgggaattaattcccagcatattactttgacaagcaaaatggtacaagagcatagtggacttcatgtgcaaccacataaggctattgttggtgccaatgcctttgctcatgaaagtggaattcatcaggatggcatgcttaaatataaaggaacatatgaaataatatcgcctgatgatattggtttaacacgtgcaaatgaatttggtattgttcttgggaaactcaggcatgcagtgagatctaagctagtggagcttggatatgaaatcagtgacaaggaatttgaagatttctttaaacgctacaaagaggtcgcagagaagaaaaagcgtgtaactgatgaagacatagaagcgttattgtcagatgagatattccagcctaaggttatttggtcccttgctgatgtacaggcaacatgtggaacacttggcttatctacagcaacagtgaaactgatagcaccagatggagaggagagaatagcatgttcagttggaacaggtccagttgatgcagcttacaaggctattgaccaaataatccagatcccaactgttctccgagaatatggtatgacctcagtcaccgaaggcatcgacgcaatcgcaacaacccgggtggttgtcaccggagatgtgaccaacaactccaaacatgccttgactggccgcgctttcaaccgctccttcagcgggagcggggcagcaatggacatcgtcgtctccagtgtcagagcttacctgagtgccctgaacaagatgtgtagctttgctggtgccgcgaaagccagcggcgaggtacctgagagtgcaagcgtccaaagcgcagagtgagcttggcgacgatttggttctcatgtggactgggcggcgtaagagccagagcaactgttaaagagggtgacatttcgtttctgtattaggctgttcaatgttgggggttttgccttgtcagtgtggtgtgactgtactgttctttttttggaggatagcccagcttggaacgtgcaggcaattttggacctaggtagtgtacaatttgtatcttatatgaacaatacttccaataatcgaaagacttaagatgggttgctggagtctgttctcgtatcatgttgcgctttggcagtgggaggtctagta

SEQ ID NO: 26060 - DNA, 357 bp, Zea Mays
atgatctcatgtgcgtgcgggcggcctggaactggacggcggcgaggcgccggtggtagagggccggctaaccacccgcgcgcccggctgccttccctttatattttctggggccggacggacgtacgtacgcgcgccggccggagagggatcggcggtaaaggctggtcggcggcggctcggattttcgagagatttggagggggggagcggatggagcgaaagaaagcacgcacgcactgcacgcaggcaggaacgcacgcacagcggccggacgacaacgcaactgtgtatgtatgtgtgtggaggggagaggaagacgatgggaaagggaaaagcaggcaggctgcttgctag

SEQ ID NO: 26061 - DNA, 751 bp, Zea Mays
ctgcataaagacatgtaaaaaaaaaaccagcagctacatcctcatgcatcctgtacactctactggaggagctacgtacctagcaagctctgagtctggacaggactcaatgtagcaaaagccccattattacaagattgatcacgaacagtggagaatttgaacaaagtaaagtaaaacagttgctgcccagaccaatagacggatcatttacatgtactaagatgcatggaacaattaatccacatcaaataccatgaaattcttgcattagtatctagctagccacaccaccatcatgcatcctcacatcacaatgcagattaaaaatctaatacaacgaaattgaagatccatcatctttggatggatggatgcatatatgtatgaaaacaaaaggcattgcttgcttgatgaaggaaactaaatacttattatgggaaggcagtggggaagtacaagttggacgggctccctcggccaccaccgctgctccctttcctggcctcgccggccaccgctgccgccatctcctggccctggtacatgagcgtggaattcatggtgaggctcaccaagctgtcgtcggcggcatcgcttcctcctccccctgccccggcgtcgtcgtcgcgcgtggtcaccatcaccgcggactgcacgagctcgaggcagagcctgagcttgttgggctcgatgtgcgtgagccccggcacggcgcccctgaagaggaactcggaggtgaggccgcgga

SEQ ID NO: 26062 - DNA, 1087 bp, Zea Mays
cacaagctgattttacttgtaagatgtttaagaaacgaagctccaagagatcagagagagaaaagaaaggcgtggacgctcattgagagcagctgctttgtctgccccaattgaagctggagaggaagatgacctggagaatgatggggaggaagaaagagaggcttggttagctaccatctcattggctctctgcaagtattgtatatatttttttattttcatacaggcatttgatcttctcgacatgctaaagaaggaagaagaaatgcttcaagctgtaaaggaaaggaaggcaaaggatgggaatgcatttgctcgtgaaatgctcgatgaacgaacgaagaaggccgaaacatggcaccataatgctgccaaccgtgtggcatattccaaaccagctgatcctatcacttgtgcaacatttgctcaagatgtcattgaaggtagagcaagcgtttcacaagctcacgagcacaaacaccagcccctgatatttggacctgcaagtattgttggtggtggtctaaccagtgaaagggaaagaatgacagcgcaagtttttcagcctagctacaggatgccaacaatgagcattgaagaagctggtttgcgcgagatgaaaatgatggagaaatggcaagaaaggaccgctgagctgatgaaagaatcaacctccgcgtggcacaaggatggcagcagctcggcccaagaggatgaggacgccgaggaggaaaaagcaagagcgtgggacgactggaaggatgacaaccctcgtggcgcaggcaacaagaagctcacgccctgtggttaatttgtgaaacacgctgtgtattgatactccacatggaacatgatgctcatgtagacggtaggatgtttaattttatcattgttgctgtgttttttctgtagtgatgttgagtgtatcgtagcctgtttgtgcaagtgcgatatgtcctccctaatacgacacgtttttctggagccaaagaaatcgtatgcctgtctgcaattgtcatgctgcttggtgccgtttggcttattaataagggaaaaaattggttgtacctgctgtgtaaagcaa

SEQ ID NO: 26063 - DNA, 1094 bp, Zea Mays
ggacatggttctcttgttgtgctgaatctatgacgcacaagctgattttacttgtaagatgtttaagagaaacgaagctccaagagatcagagagagaaaagaaaggcgtggacgctcattgagagcagctgctttgtctgccccaattgaagctggagaggaagatgacctggagaatgatggggaggaagaaagagaggcttggttagctaccatctcattggctctctgcaaggcatttgatcttctcgacatgctaaagaaggaagaagaaatgcttcaagctgtaaaggaaaggaaggcaaaggatgggaatgcatttgctcgtgaaatgctcgatgaacgaacgaagaaggccgaaacatggcaccataatgctgccaaccgtgtggcatattccaaaccagctgatcctatcacttgtgcaacatttgctcaagatgtcattgaaggtagagcaagcgtttcacaagctcacgagcacaaacaccagcccctgatatttggacctgcaagtattgttggtggtggtctaaccagtgaaagggaaagaatgacagcgcaagtttttcagcctagctacaggatgccaacaatgagcattgaagaagctggtttgcgcgagatgaaaatgatggagaaatggcaagaaaggaccgctgagctgatgaaagaatcaacctccgcgtggcacaaggatggcagcagctcggcccaagaggatgaggacgccgaggaggaaaaagcaagagcgtgggacgactggaaggatgacaaccctcgtggcgcaggcaacaagaagctcacgccctgtggttaatttgtgaaacacgctgtgtattgatactccacatggaacatgatgctcatgtagacggtaggatgtttaattttatcattgttgctgtgttttttctgtagtgatgttgagtgtatcgtagcctgtttgtgcaagtgcgatatgtcctccctaatacgacacgtttttctggagccaaagaaatcgtatgcctgtctgcaattgtcatgctgcttggtgccgtttggcttattaataagggaaaaaattggttgtacctgctgtgtaaagcaa

SEQ ID NO: 26064 - DNA, 1174 bp, Zea Mays
attgtttcactaggagttcattgctctatgtgaagtactagagcttatcccagaggatgagctagaattgtctaggcagaagcagccagatactatgacaaacagaagagcgcagaaggttgcccggttcaaacgtcaaaaggctgcagaaacgaagctccaagagatcagagagagaaaagaaaggcgtggacgctcattgagagcagctgctttgtctgccccaattgaagctggagaggaagatgacctggagaatgatggggaggaagaaagagaggcttggttagctaccatctcattggctctctgcaaggcatttgatcttctcgacatgctaaagaaggaagaagaaatgcttcaagctgtaaaggaaaggaaggcaaaggatgggaatgcatttgctcgtgaaatgctcgatgaacgaacgaagaaggccgaaacatggcaccataatgctgccaaccgtgtggcatattccaaaccagctgatcctatcacttgtgcaacatttgctcaagatgtcattgaaggtagagcaagcgtttcacaagctcacgagcacaaacaccagcccctgatatttggacctgcaagtattgttggtggtggtctaaccagtgaaagggaaagaatgacagcgcaagtttttcagcctagctacaggatgccaacaatgagcattgaagaagctggtttgcgcgagatgaaaatgatggagaaatggcaagaaaggaccgctgagctgatgaaagaatcaacctccgcgtggcacaaggatggcagcagctcggcccaagaggatgaggacgccgaggaggaaaaagcaagagcgtgggacgactggaaggatgacaaccctcgtggcgcaggcaacaagaagctcacgccctgtggttaatttgtgaaacacgctgtgtattgatactccacatggaacatgatgctcatgtagacggtaggatgtttaattttatcattgttgctgtgttttttctgtagtgatgttgagtgtatcgtagcctgtttgtgcaagtgcgatatgtcctccctaatacgacacgtttttctggagccaaagaaatcgtatgcctgtctgcaattgtcatgctgcttggtgccgtttggcttattaataagggaaaaaattggttgtacctgctgtgtaaagcaa

SEQ ID NO: 26065 - DNA, 664 bp, Zea Mays
aacggtgaaacgaacaaacccttaaggcttgttcggttagctctcaatccatgtggattgagtgtgattgagtgggtttaaatctcaaataagtcaaatttcttcttaattttttccagttccatccaatccatggataacgggattaaccgaacaaggccttatataaatttcatactctttcaatctgtcccagaaatacattttagtagggtagaccggccccaagtatcgaggcccatacagatacagtgatcttaattttttccagttccatccaatcatggataacgggattaaccgaacaaggtcttatataaatttcatactctttcaatctgtcccagaaatacattttagtagggtagaccggccccaagtatcgaggcccatacagatacagtgatgcagactactgtacttaggtcaaggtgctttgcttgtcccgatcaaaatgtcctgcgtgcctatacaacgctgagagatctggctaaactttgttgccatcatttcactacttcacatccaaatatcattcgcacgccaaacagactggtgcctagcaattcttgtccaaccatggtctacatgaccattgatgttgctggaaacaccctgtccagtagggtataaacacctccaccaagtaaaaatgcaccactgc

SEQ ID NO: 26066 - DNA, 2828 bp, Zea Mays
cggctaggacgtcagtcgacggggattaaagttattgtcgtcggtcgtcttatagccgacgggagttaccttattcccgtcggcctcggccgaggccgacgggaattagtttagtcgacgggaatcgttaggattcctgtagtgaggggcggcgccatggtggcgcaggaaggacggggccggaggcgctaagggaaggggagggggaggagggggcggcggctgggccagggaggtggccggcggcgccttggaggggggatggtggcggcggctcgtgagaaagggagggagagaggaaggcttcgataccatgtagaatagtgaaaccctaaccctagaatgggttggacagtgtattaatagaccagagtgattgggccaggcccattacaaggacggttatctaacaagttgaatagagataagtcagtcatctctataaaagagacaccattgtatcggttaagggtaagtaagaattagaagcaagccttcttgcccggccgtgttcctgcaactacaactctctccaatttcccaatcccgtcgcagtccgtaacaatctggtatcggatatgtcaggcgatccgactccgatgaccctcgagggcctcaacgccaagctcaacgccagtcttaccgccatcaccaacaacttcgccatcctcgtgcgctctatggtgcgcatggcgtgtccctcccaacaccagtctgtgccacagccgtcggcgatcacgcacccaccagcgaccacggtaccacccttgctgccactgacgtcgtcacatcgcccaatcggtgtaggtgcccccgcaccaacggggctgcccctttacctcatctacatgtcaccatcaccatcgccaattccatcgtacaccctctcatcaacgacggcgccggaattcacgatggcaactctccttcaccgccctcatgcctgtgccgccacatcagcattgcgatgacgtcttctacaggggcgtggatggcatctaagcatcgacggcgcagctataggcggcaacacattgcctcctaacacgccggcaaggacaacgcccatcttcaagcggcggcgcctagtcatcccagcaaccttgccacagctcacagagaggaaggcgattgcgtgggcgagttcctaaaaggtgtctacggcggtgcggctgtaggctgcaacgcgtggcctcctagtgtgtcggcggctgcaggaggtgcgccggcagatgctcgaggcagcctttgtggcggtcgaccttgccacacctgagcaagacctcaccctgtcggacggccatcagcaaccgcgctggcccgctgtctccaagtgcgagcatggtgtgtatcccgcaaacgacgaactccaactctacgacagcggcggtggggaaggcactcccttccttgtcatcggcgagggcacactggctagcaccaccacattccgctatcgatcaccacgagggcgcctccgctggtcattgttgcgacccattccatgtggccatccacgtgctcccctttcatccagatggcgtccatgggatccaggtggcagcgcacgtgcaggtccattgcgcagagggtgtttgtcttatcttaaggggtcaaaaaaagtaaagagtcgcagtctaattcaggtttggaataataaaataagtcgagatgtaaaagacttatttttaggtgttaggtttgtgtctagcgaagtcatcattaacgtcatcgataggttgtagctcgaggtcaagctgcatgtccaggtggggtgtagtgttagggaggcattgttcacgtggttactgtagcgcatgaacaatatcgagattagatcagatttgatttggatcaaattagttagggaagagataaggattagatcagatttggttgataagaattagattagttagggaagggataaggattagatcagattaggttagttggatagagataagtcaatcgtctctataaaagagacaccattgtatcagttaagggtaagcaagaattagaagcaagccttcttcttgcccggctgtgggcggaggccccgaccggcattcctgcaactacaaccccctctccaattccccaatcccatcacaatccataacaatgtacctaaagtccaagacctacaaatttttctaagctaaacaattaatgggagtgtataatcagaaagttaaatgaaagcttgacatatgtctttaattttaaaaccttgactgtaagcaaaaaatgcagaagggtagttggaacaagatctaaccagttaatttgcagtaaaacactcaaatttcaagaacaagtagatacctgattgggtttatccatgccgaatatcttctgaatgacaacaaactctatagaagacaaacttaataattagtggcacaaaagtagaataaactacgttgatcaattgatcttatgctgttactatattctttctgaacaattcaaagttccaatcttgtttaataaatcttaacttggtttgaacacccaccatgaagttctacctcgacctagggggcaagaccaccccccacactgcattacaattaagaagaccttctcacccctgcttcacccatacacaggggtatcgtagcccatttgaccgcaaccggggccggaccttaggcttgtgctttggcgtgggataggcgagagaattttttaaccccaatctaaaaattcgctcccacggggagtcgaactcaagacctgaggagtgctactcataccaactaagctagaagccttttcgccatcatgaaattctcaaaaataaataaataaaatacaac

SEQ ID NO: 26067 - DNA, 1838 bp, Zea Mays
gaacggcctaggcgctagcgataagccccgcccaccgcgcgcgcgccgcggcaccgtaccgggatgggcgccataggcatcgtcgtcagagcgtgcgcgcctctcgctcccgccgccgcggccgcgccggcaccctccggctccagctccagggacgccgctcaggcccagcggtggagcaagcccacgaggaccggccgcgtgctcgtgctcggcggcactggccgtgtcggaggatccacggccaccgcactctccaaactccgccctgacctcggcatcctcgtcggtggcagaaaccgctttgacagggagaaaggcgagtccattgcagccaagcttgggggccaatctgagttcgtccaggtcgacacccgcaacgcaggcatgttggaggaagcgctgcagggtgtggatttggttgtccatactgctggacctttccagagggcggaggagtgcaccgtattgcaggcggcgatatctactaagacaccatacattgatgtctgcgatgacacggactattcttggagagcaaagggcttccatgagcaagcaaaagctgccggtgttccagctattactactgctggcatctatccaggagttagcaatgtgatggctgctgagcttgtacatgctgccagaagtgaaaatggcgaacctgaaagactaaggtactggtggtgctggtccaacaattctgacaacaagttttctacttcttggggaggatgtgattgcatataacaagggagaagaaatcaaattgaagccctatagtggagctctgaacattgattttggaaagggggtcagaaagaaaaatgtctacttattgaatttgcctgaagtcaagagtgctttcaagatattaggtgtgccaactgttagtgctcgatttggagttcttgagggatagaaataaagttcagaagttggttcagtctgttgatcctttggttcgagccgttgatggtattgcaggagagcatgtctctatgagaatcggtgggatttgcaaccgctgcatttgctttagcagttcttgagggcaacacacaaccaggagtttggtttccggaagagccggagggaatacggatagaagcaaggaagctgcttcttgagcgtgcatctcaagggacaagtaccttcgtgatgaacaagccttcctggatggtagaaactgatccgaaggaagtcggcctaggaatttttgtgtgagaagatcgagttgcttaaattattggggtgcttgaaaagggcagctaaatcttgggagtagtttaccatccgcgagaagttgaatgcggcaaccagcagcatgttgaagtccttgcgctattttgtttttgaaagggttgtatatgaaccatgatgattatgaagaaaaagaatacaggtcagttacacgattttgttcaccacaggtggtaagcttggaacttatctgtcgtttggttcacgaaatgtaatataaatagcaatataataattcacagttgaataccagcggtaacctatactactctattaaaaacctaatgtggatatctggtgctatcatgactttatcctccgcgctgacactctgggctcgtcccatacacgctgcctcagcgtcgggctaagtgagtcccacacccagcgcccacatacgtagtgttttcttagctagccttatagaccttcagcgctcgcacagttagcaccagatcacgcgctcgcacagttagcaccagatcacatgtaccttaatatttagaaataaacaataattgtataaaaagaccaccagatcatacatatcttagtgtttagaaataaaaaat

SEQ ID NO: 26068 - DNA, 1894 bp, Zea Mays
gaacggcctaggcgctagcgataagccccgcccaccgcgcgcgcgccgcggcaccgtaccgggatgggcgccataggcatcgtcgtcagagcgtgcgcgcctctcgctcccgccgccgcggccgcgccggcaccctccggctccagctccagggacgccgctcaggcccagcggtggagcaagcccacgaggaccggccgcgtgctcgtgctcggcggcactggccgtgtcggaggatccacggccaccgcactctccaaactccgccctgacctcggcatcctcgtcggtggcagaaaccgggagaaaggcgagtccattgcagccaagcttgggggccaatctgagttcgtccaggtcgacacccgcaacgcaggcatgttggaggaagcgctgcagggtgtggatttggttgtccatactgctggacctttccagagggcggaggagtgcaccgtattgcaggcggcgatatctactaagacaccatacattgatgtctgcgatgacacggactattcttggagagcaaagggcttccatgagcaagcaaaagctgccggtgttccagctattactactgctggcatctatccaggagttagcaatgtgatggctgctgagcttgtacatgctgccagaagtgaaaatggcgaacctgaaagactaaggtactggtggtgctggtccaacaattctgacaacaagttttctacttcttggggaggatgtgattgcatataacaagggagaagaaatcaaattgaagccctatagtggagctctgaacattgattttggaaagggggtcagaaagaaaaatgtctacttattgaatttgcctgaagtcaagagtgctttcaagatattaggtgtgccaactgttagtgctcgatttggagttcttgagggatagaaataaagttcagaagttggttcagtctgttgatcctttggttcgagccgttgatggtattgcaggagagcatgtctctatgagagtagatttggactgctcaaatggtcggaatactattggattatttactcataaaaaactatctgtatcggtgggatttgcaaccgctgcatttgctttagcagttcttgagggcaacacacaaccaggagtttggtttccggaagagccggagggaatacggatagaagcaaggaagctgcttcttgagcgtgcatctcaagggacaagtaccttcgtgatgaacaagccttcctggatggtagaaactgatccgaaggaagtcggcctaggaatttttgtgtgagaagatcgagttgcttaaattattggggtgcttgaaaagggcagctaaatcttgggagtagtttaccatccgcgagaagttgaatgcggcaaccagcagcatgttgaagtccttgcgctattttgtttttgaaagggttgtatatgaaccatgatgattatgaagaaaaagaatacaggtcagttacacgattttgttcaccacaggtggtaagcttggaacttatctgtcgtttggttcacgaaatgtaatataaatagcaatataataattcacagttgaataccagcggtaacctatactactctattaaaaacctaatgtggatatctggtgctatcatgactttatcctccgcgctgacactctgggctcgtcccatacacgctgcctcagcgtcgggctaagtgagtcccacacccagcgcccacatacgtagtgttttcttagctagccttatagaccttcagcgctcgcacagttagcaccagatcacgcgctcgcacagttagcaccagatcacatgtaccttaatatttagaaataaacaataattgtataaaaagaccaccagatcatacatatcttagtgtttagaaataaaaaat

SEQ ID NO: 26069 - DNA, 2261 bp, Zea Mays
gtcagaacggcctaggcgctagcgataagccccgcccaccgcgcgcgcgccgcggcaccgtaccgggatgggcgccataggcatcgtcgtcagagcgtgcgcgcctctcgctcccgccgccgcggccgcgccggcaccctccggctccagctccagggacgccgctcaggcccagcggtggagcaagcccacgaggaccggccgcgtgctcgtgctcggcggcactggccgtgtcggaggatccacggccaccgcactctccaaactccgccctgacctcggcatcctcgtcggtggcagaaaccgctttgacagggagaaaggcgagtccattgcagccaagcttgggggccaatctgagttcgtccaggtcgacacccgcaacgcaggcatgttggaggaagcgctgcagggtgtggatttggttgtccatactgctggacctttccagagggcggaggagtgcaccgtattgcaggcggcgatatctactaagacaccatacattgatgtctgcgatgacacggactattcttggagagcaaagggcttccatgagcaagcaaaagctgccggtgttccagctattactactgctggcatctatccaggagttagcaatgtgatggctgctgagcttgtacatgctgccagaagtgaaaatggcgaacctgaaagactaaggttagagttctctgttgtctagactctagaacaggaaacgaccaaatagccattcagtgtacactaagggttgtatttggttttctgttggcatgtagtagttaaattaccattcctcatgatgtgttttctctcctagctaggctaggagtattcctgcataattgctgttgcatcaacctgtttcttcaatgtttccttgatctatgaagctagtaattagtgttttgtgaacatccatacctattctatatgttgctaaacccctcttttagattcttctactatactgcaggtactggtggtgctggtccaacaattctgacaacaagttttctacttcttggggaggatgtgattgcatataacaagggagaagaaatcaaattgaagccctatagtggagctctgaacattgattttggaaagggggtcagaaagaaaaatgtctacttattgaatttgcctgaagtcaagagtgctttcaagatattaggtgtgccaactgttagtgctcgatttggtactgctcctttcttctggaattggggaatgcaggctttcgcaaactttttacctgttgagttcttgagggatagaaataaagttcagaagttggttcagtctgttgatcctttggttcgagccgttgatggtattgcaggagagcatgtctctatgagagtagatttggactgctcaaatggtcggaatactattggattatttactcataaaaaactatctgtatcggtgggatttgcaaccgctgcatttgctttagcagttcttgagggcaacacacaaccaggagtttggtttccggaagagccggagggaatacggatagaagcaaggaagctgcttcttgagcgtgcatctcaagggacaagtaccttcgtgatgaacaagccttcctggatggtagaaactgatccgaaggaagtcggcctaggaatttttgtgtgagaagatcgagttgcttaaattattggggtgcttgaaaagggcagctaaatcttgggagtagtttaccatccgcgagaagttgaatgcggcaaccagcagcatgttgaagtccttgcgctattttgtttttgaaagggttgtatatgaaccatgatgattatgaagaaaaagaatacaggtcagttacacgattttgttcaccacaggtggtaagcttggaacttatctgtcgtttggttcacgaaatgtaatataaatagcaatataataattcacagttgaataccagcggtaacctatactactctattaaaaacctaatgtggatatctggtgctatcatgactttatcctccgcgctgacactctgggctcgtcccatacacgctgcctcagcgtcgggctaagtgagtcccacacccagcgcccacatacgtagtgttttcttagctagccttatagaccttcagcgctcgcacagttagcaccagatcacgcgctcgcacagttagcaccagatcacatgtaccttaatatttagaaataaacaataattgtataaaaagaccaccagatcatacatatcttagtgtttagaaataaaaaat

SEQ ID NO: 26070 - DNA, 1901 bp, Zea Mays
gtcagaacggcctaggcgctagcgataagccccgcccaccgcgcgcgcgccgcggcaccgtaccgggatgggcgccataggcatcgtcgtcagagcgtgcgcgcctctcgctcccgccgccgcggccgcgccggcaccctccggctccagctccagggacgccgctcaggcccagcggtggagcaagcccacgaggaccggccgcgtgctcgtgctcggcggcactggccgtgtcggaggatccacggccaccgcactctccaaactccgccctgacctcggcatcctcgtcggtggcagaaaccgctttgacagggagaaaggcgagtccattgcagccaagcttgggggccaatctgagttcgtccaggtcgacacccgcaacgcaggcatgttggaggaagcgctgcagggtgtggatttggttgtccatactgctggacctttccagagggcggaggagtgcaccgtattgcaggcggcgatatctactaagacaccatacattgatgtctgcgatgacacggactattcttggagagcaaagggcttccatgagcaagcaaaagctgccggtgttccagctattactactgctggcatctatccaggagttagcaatgtgatggctgctgagcttgtacatgctgccagaagtgaaaatggcgaacctgaaagactaaggtactggtggtgctggtccaacaattctgacaacaagttttctacttcttggggaggatgtgattgcatataacaagggagaagaaatcaaattgaagccctatagtggagctctgaacattgattttggaaagggggtcagaaagaaaaatgtctacttattgaatttgcctgaagtcaagagtgctttcaagatattaggtgtgccaactgttagtgctcgatttggtactgctcctttcttctggaattggggaatgcaggctttcgcaaactttttacctgttgagttcttgagggatagaaataaagttcagaagttggttcagtctgttgatcctttggttcgagccgttgatggtattgcaggagagcatgtctctatgagaatcggtgggatttgcaaccgctgcatttgctttagcagttcttgagggcaacacacaaccaggagtttggtttccggaagagccggagggaatacggatagaagcaaggaagctgcttcttgagcgtgcatctcaagggacaagtaccttcgtgatgaacaagccttcctggatggtagaaactgatccgaaggaagtcggcctaggaatttttgtgtgagaagatcgagttgcttaaattattggggtgcttgaaaagggcagctaaatcttgggagtagtttaccatccgcgagaagttgaatgcggcaaccagcagcatgttgaagtccttgcgctattttgtttttgaaagggttgtatatgaaccatgatgattatgaagaaaaagaatacaggtcagttacacgattttgttcaccacaggtggtaagcttggaacttatctgtcgtttggttcacgaaatgtaatataaatagcaatataataattcacagttgaataccagcggtaacctatactactctattaaaaacctaatgtggatatctggtgctatcatgactttatcctccgcgctgacactctgggctcgtcccatacacgctgcctcagcgtcgggctaagtgagtcccacacccagcgcccacatacgtagtgttttcttagctagccttatagaccttcagcgctcgcacagttagcaccagatcacgcgctcgcacagttagcaccagatcacatgtaccttaatatttagaaataaacaataattgtataaaaagaccaccagatcatacatatcttagtgtttagaaataaaaaat

SEQ ID NO: 26071 - DNA, 1976 bp, Zea Mays
tgcggtcagagtcagaacggcctaggcgctagcgataagccccgcccaccgcgcgcgcgccgcggcaccgtaccgggatgggcgccataggcatcgtcgtcagagcgtgcgcgcctctcgctcccgccgccgcggccgcgccggcaccctccggctccagctccagggacgccgctcaggcccagcggtggagcaagcccacgaggaccggccgcgtgctcgtgctcggcggcactggccgtgtcggaggatccacggccaccgcactctccaaactccgccctgacctcggcatcctcgtcggtggcagaaaccgctttgacagggagaaaggcgagtccattgcagccaagcttgggggccaatctgagttcgtccaggtcgacacccgcaacgcaggcatgttggaggaagcgctgcagggtgtggatttggttgtccatactgctggacctttccagagggcggaggagtgcaccgtattgcaggcggcgatatctactaagacaccatacattgatgtctgcgatgacacggactattcttggagagcaaagggcttccatgagcaagcaaaagctgccggtgttccagctattactactgctggcatctatccaggagttagcaatgtgatggctgctgagcttgtacatgctgccagaagtgaaaatggcgaacctgaaagactaaggtactggtggtgctggtccaacaattctgacaacaagttttctacttcttggggaggatgtgattgcatataacaagggagaagaaatcaaattgaagccctatagtggagctctgaacattgattttggaaagggggtcagaaagaaaaatgtctacttattgaatttgcctgaagtcaagagtgctttcaagatattaggtgtgccaactgttagtgctcgatttggtactgctcctttcttctggaattggggaatgcaggctttcgcaaactttttacctgttgagttcttgagggatagaaataaagttcagaagttggttcagtctgttgatcctttggttcgagccgttgatggtattgcaggagagcatgtctctatgagagtagatttggactgctcaaatggtcggaatactattggattatttactcataaaaaactatctgtatcggtgggatttgcaaccgctgcatttgctttagcagttcttgagggcaacacacaaccaggagtttggtttccggaagagccggagggaatacggatagaagcaaggaagctgcttcttgagcgtgcatctcaagggacaagtaccttcgtgatgaacaagccttcctggatggtagaaactgatccgaaggaagtcggcctaggaatttttgtgtgagaagatcgagttgcttaaattattggggtgcttgaaaagggcagctaaatcttgggagtagtttaccatccgcgagaagttgaatgcggcaaccagcagcatgttgaagtccttgcgctattttgtttttgaaagggttgtatatgaaccatgatgattatgaagaaaaagaatacaggtcagttacacgattttgttcaccacaggtggtaagcttggaacttatctgtcgtttggttcacgaaatgtaatataaatagcaatataataattcacagttgaataccagcggtaacctatactactctattaaaaacctaatgtggatatctggtgctatcatgactttatcctccgcgctgacactctgggctcgtcccatacacgctgcctcagcgtcgggctaagtgagtcccacacccagcgcccacatacgtagtgttttcttagctagccttatagaccttcagcgctcgcacagttagcaccagatcacgcgctcgcacagttagcaccagatcacatgtaccttaatatttagaaataaacaataattgtataaaaagaccaccagatcatacatatcttagtgtttagaaataaaaaat

SEQ ID NO: 26072 - DNA, 1904 bp, Zea Mays
cgcggcactcgttctgcggtcagagtcagaacggcctaggcgctagcgataagccccgcccaccgcgcgcgcgccgcggcaccgtaccgggatgggcgccataggcatcgtcgtcagagcgtgcgcgcctctcgctcccgccgccgcggccgcgccggcaccctccggctccagctccagggacgccgctcaggcccagcggtggagcaagcccacgaggaccggccgcgtgctcgtgctcggcggcactggccgtgtcggaggatccacggccaccgcactctccaaactccgccctgacctcggcatcctcgtcggtggcagaaaccgctttgacagggagaaaggcgagtccattgcagccaagcttgggggccaatctgagttcgtccaggtcgacacccgcaacgcaggcatgttggaggaagcgctgcagggtgtggatttggttgtccatactgctggacctttccagagggcggaggagtgcaccgtattgcaggcggcgatatctactaagacaccatacattgatgtctgcgatgacacggactattcttggagagcaaagggcttccatgagcaagcaaaagctgccggtgttccagctattactactgctggcatctatccaggagttagcaatgtgatggctgctgagcttgtacatgctgccagaagtgaaaatggcgaacctgaaagactaaggtactggtggtgctggtccaacaattctgacaacaagttttctacttcttggggaggatgtgattgcatataacaagggagaagaaatcaaattgaagccctatagtggagctctgaacattgattttggaaagggggtcagaaagaaaaatgtctacttattgaatttgcctgaagtcaagagtgctttcaagatattaggagttcttgagggatagaaataaagttcagaagttggttcagtctgttgatcctttggttcgagccgttgatggtattgcaggagagcatgtctctatgagagtagatttggactgctcaaatggtcggaatactattggattatttactcataaaaaactatctgtatcggtgggatttgcaaccgctgcatttgctttagcagttcttgagggcaacacacaaccaggagtttggtttccggaagagccggagggaatacggatagaagcaaggaagctgcttcttgagcgtgcatctcaagggacaagtaccttcgtgatgaacaagccttcctggatggtagaaactgatccgaaggaagtcggcctaggaatttttgtgtgagaagatcgagttgcttaaattattggggtgcttgaaaagggcagctaaatcttgggagtagtttaccatccgcgagaagttgaatgcggcaaccagcagcatgttgaagtccttgcgctattttgtttttgaaagggttgtatatgaaccatgatgattatgaagaaaaagaatacaggtcagttacacgattttgttcaccacaggtggtaagcttggaacttatctgtcgtttggttcacgaaatgtaatataaatagcaatataataattcacagttgaataccagcggtaacctatactactctattaaaaacctaatgtggatatctggtgctatcatgactttatcctccgcgctgacactctgggctcgtcccatacacgctgcctcagcgtcgggctaagtgagtcccacacccagcgcccacatacgtagtgttttcttagctagccttatagaccttcagcgctcgcacagttagcaccagatcacgcgctcgcacagttagcaccagatcacatgtaccttaatatttagaaataaacaataattgtataaaaagaccaccagatcatacatatcttagtgtttagaaataaaaaat

SEQ ID NO: 26073 - DNA, 1961 bp, Zea Mays
cacacatccgacacgtcctcgcggtagcggcgcggcactcgttctgcggtcagagtcagaacggcctaggcgctagcgataagccccgcccaccgcgcgcgcgccgcggcaccgtaccgggatgggcgccataggcatcgtcgtcagagcgtgcgcgcctctcgctcccgccgccgcggccgcgccggcaccctccggctccagctccagggacgccgctcaggcccagcggtggagcaagcccacgaggaccggccgcgtgctcgtgctcggcggcactggccgtgtcggaggatccacggccaccgcactctccaaactccgccctgacctcggcatcctcgtcggtggcagaaaccgctttgacagggagaaaggcgagtccattgcagccaagcttgggggccaatctgagttcgtccaggtcgacacccgcaacgcaggcatgttggaggaagcgctgcagggtgtggatttggttgtccatactgctggacctttccagagggcggaggagtgcaccgtattgcaggcggcgatatctactaagacaccatacattgatgtctgcgatgacacggactattcttggagagcaaagggcttccatgagcaagcaaaagctgccggtgttccagctattactactgctggcatctatccaggagttagcaatgtgatggctgctgagcttgtacatgctgccagaagtgaaaatggcgaacctgaaagactaaggtactggtggtgctggtccaacaattctgacaacaagttttctacttcttggggaggatgtgattgcatataacaagggagaagaaatcaaattgaagccctatagtggagctctgaacattgattttggaaagggggtcagaaagaaaaatgtctacttattgaatttgcctgaagtcaagagtgctttcaagatattaggtgtgccaactgttagtgctcgatttggagttcttgagggatagaaataaagttcagaagttggttcagtctgttgatcctttggttcgagccgttgatggtattgcaggagagcatgtctctatgagagtagatttggactgctcaaatggtcggaatactattggattatttactcataaaaaactatctgtatcggtgggatttgcaaccgctgcatttgctttagcagttcttgagggcaacacacaaccaggagtttggtttccggaagagccggagggaatacggatagaagcaaggaagctgcttcttgagcgtgcatctcaagggacaagtaccttcgtgatgaacaagccttcctggatggtagaaactgatccgaaggaagtcggcctaggaatttttgtgtgagaagatcgagttgcttaaattattggggtgcttgaaaagggcagctaaatcttgggagtagtttaccatccgcgagaagttgaatgcggcaaccagcagcatgttgaagtccttgcgctattttgtttttgaaagggttgtatatgaaccatgatgattatgaagaaaaagaatacaggtcagttacacgattttgttcaccacaggtggtaagcttggaacttatctgtcgtttggttcacgaaatgtaatataaatagcaatataataattcacagttgaataccagcggtaacctatactactctattaaaaacctaatgtggatatctggtgctatcatgactttatcctccgcgctgacactctgggctcgtcccatacacgctgcctcagcgtcgggctaagtgagtcccacacccagcgcccacatacgtagtgttttcttagctagccttatagaccttcagcgctcgcacagttagcaccagatcacgcgctcgcacagttagcaccagatcacatgtaccttaatatttagaaataaacaataattgtataaaaagaccaccagatcatacatatcttagtgtttagaaataaaaaat

SEQ ID NO: 26074 - DNA, 3840 bp, Zea Mays
agaatctggattcgagataaaaaaatgaagggtttatggttatcacggcgccacagcgagtgctgcacttggtggcgcagatcaagaggaccaaatctgcttcctttctcctgagacagtttgtaaaattctcggatccattttaaagaatttggcattggtactcaaaacatcaacttttgaatgggcaaggttagcacattctttgttgcctgctgaacctgagcacttgatggttccagaagaaaattcctcaataattaacttcgagatggctcggattgcctttaaagttcttcagggtagcttgttttcactttggagacttgaggaaaattctgtatttccttctattctggctgctctttttgtcattgaatgggaatgtagcatgtctttagctcttgatgaagagaagtgtttggaaagtaatatagaagatacggaagttggtgtttctatgtgcagcagttcaaaaggttgtttggaggaggaaatgcatttgaaggttaaccttgcagaaagcatacatgttttttgccaaagcttaagtccatccttttgggataatcttcactcatgcacattgaatagattggcaactattctacctcagtgtgtcagaaacttggaaagtttttttgatgttttattatctgagggggaacattggccgctctggttgatgccatctttacaaaatggacatttatctgtgaaggtccagctggatccagatattacagatgaaattgaactcaaacacgagcgatttgttgcctttgttgataggcttattctcaaacttggctttagtgaagtggttttaggtattccaggaaatatacagtctgccacatcacaatcaattgatatcacttcacctgtctcttccttgtccagagtatgggtggctggtgaggtcctttgcacttggacatggaaagggggctgtgcattgaaaacattcttacctttgctggttcagtacatgaaagacgagtcatatcttgagatcaacattgtgccattgttgcttgatacactgttaggtggcgcccttatgcatgatagtggtccgtgggtactgtttaatgcttggcatctttctgacaacgagatcgataaaattcaagatcgttttcttcgtgctcttgtggctttgttatttactattaatacaaatgattgtctctggagagaatctgatgcacttgtattttttgagcaactgctgagcaatctttttattggctcatcagttaatagaaaatgcctgaagattctaccctatgttatgacctccatcataaaacagttctcagccttgaacaacggagattcttcgtatgctgatttggtgcggaaaagcatacagagttggcttgatgcaaccatttcttgtctgtcatcaagctcaagggaggtacctgtgcaagatattgaggactggatgcaagtggtgttgtcttgcttcccattgaggataactggaggagcccgggaattggtagctgtggttgagcgagagatcagtgatacagaaagatcactgatgttgactctgtttcagaaataccagattttctatggtagtacagcttcatcattggtcactagtggaactgccgtatcaacgacagttgaattactgggagtgaaactgacagctgttttggttggttattgctggagcaaccttaaggagaatgattggcattttgtgttccgcatggtattcaaatgcattgaatcgtctgttttgcttgtggaagaaatgactgatggcataaatgatgccacaataaaccaggtatcaagtgaagatgccttggagaagcttaaattagtggttggcactacagataagttaacattaagccttgcagaatctgctttggttacaatgtgtcagctcaaccatctttgtaatatccaagaagcagaaaactcccagtgtgtacagcttattaaatcaggggactatgctgagagtaatgacaagatggtagagagtgtcctccgtttgttcttggcctctggtgtttcagaggcaatcacaaaatcttgcagtgaagaggcttcgtctgtcataggttctagtcgccatgcttatttgcacttttgggaacttgtggcatcattcataaaaaatgctccactgcaaagtagaaagtctgcacttgagtccatggaactgtggggactgaccaagggttcagtcagtggactatattcgattcttttctcctcacaaccaatatttcacttacaacttgcagctttctctctacttctctctgagcccttctgtcaactttcactggttaaaaattattcaatgggagaaagttgctcatctgctcagcaatctggcacaagccaaagtgctgagttgatgccagattcagacaagacagtgcatctaagagaggaactttcagacttaatcgagttcccaacatctgaacttctcaaaactgatctgacagctcgagatagggttgatgtattcattgcctggtcattgttgctgtcccacctgcaaacactaccagcatcttccagtatcaagggagatgtgcttcaatacatacaagaaaaggtcagtccgtgcatattggattgcattttccagcatatcccagtaaaggccgctgcaccgaatgggaagaaaaaggataccgagctagcgcctgaagcagaagctgctgccaaagcttcgaagaatgccatagctacttgttctttgcttccgtacttggagtctctttggcccatcgggactttgcagatggcctcacttgcaggctcactgtacgggatgatgattaggctgctgccttcttttgtgcgcacatggtttactaccttgagagaccgttcattgtcatactcaatcgagtccttcaccaaacaatggtgcagccctcctcttcttctagatgagttttctcaggttaaggagtccgtatacggcgatgagaatttctcggttagcgtcaacaggtcggctttcgagatcgttgctacatacaaaaaggaggagacaggaatcgaccttgtcatacgcctcccgagctgttaccctctgcgccacgttgatgtcgaatgcacgagaagtttgggtatcagtgaagtcaagtgcagaaaatggctgctttcgctcacgtcattcgtccgcagccagaatggcgcgatagcagaggcgatccgcacgtggaagagcaatttcgacaaggagtttgagggcgtggaggagtgcccaatctgttacagcattctccacaccagcaaccacaacctgccgcggctggcgtgcaagacgtgcaagcacaagttccacggcgcctgcctctacaagtggttctccacgtccaacaaatcgacttgcccgctgtgccagactccgttctagtcctagctctagacacatgcttgtttgttggcaccacaccgttcgatccttcgatgtaaatggcgtgtgtacgcagcgcagtgttcagcgttttggctgttaaatactctcgaaacaggacgggacctgcagagactgagttcagaggtcttataatctacaattaccgtggattcgctagattatttttaggttaattgaacatgaaaatgtctaaattcttaacacttaatggtcttatgaaaacaaacataaaaaactatataaaatcaactgaatctactagtgcacgtctattttcgtcaaagaccggagcatgttttttttggtggtggtggtgggccgtggggtaggagttacaaagacgataggttgatcccgcatctgtaaataatttccaaataaaaaaactggaaacgtag

SEQ ID NO: 26075 - DNA, 6029 bp, Zea Mays
acctatctgttttgagttcagcagcatctaggttcacatggcaccaccaacagcctctgagatgtggatggtgaagtactccagaacctaaagaggctgggaaggaaagatgcaacaacaaagatcaaggccttatctactctctctatactctttggacaaaaaccttgtgaggaagttgtgcagattgttccacaatgggcatttgagtacaagaggctgctacttgactataacagagaagttcgccgtgctactcatgaggccatgtctagcctcatcacagcagttaggaaaggtatagcaccgcacctgaagtctttaatgggtccttggtggttttctcaatttgatcctgctcctgaggttgctcaagctgcccgacgttcgttcgaggcagcattcccacagtcagatagaagactggatgcattaatgttatgtgtgaaggaaacatttctttacctaaatgagaacttgaagctaacaccacaagctttgtctgacaaggctataccaatggatgaactggaagatatgcatcagagggtaatgtcatcatcactgttagctatggcaactcttatagaaattttactaggagtgaaattgcaaagttgtgatggtgagagtaccaatactgaaaacaaaaatatgtcaaaagttaggtcaactgtactttcttctgctgaagctgcattttgtatgcataaatgttttcttgacgtcctcaagtcaaaaagttctgttatacggtcagctacatactcactgcttacaagttacatcaaacatgttcctcatgtttttgacgaagaaaccatgaagaaactttccccaactctacttggtgcattccatgagaaggatgcgtcatgccactcttctatgtgggatacaattcttgttttctctagaaagtttccagaggcttggtcatattgtaatattcacaaagttgtcctcagtcgggtttggcatttcctacaaaatggatgttatgggtccaaacaagtttcatatcctcttctagttcagtttttggactctatgccacctaaagcagtcatgggacaacaatttgtttttgattttttgcataatctttgggctggaaggaaccagaggcagttatcagctgctgatagtttggctttctgtggtgcctttaaacagagttttttgtggcttctaaaaaatgcatcaagatattctactggagattcttcagatgatgtacccatcaagcttataactgatgtacttgccaaaatagtttggcgtgactaccttttattgtctggagacacaattggtggcggtgttctcttatctcgtaaaacttcagggttagctgcgaacatgcactacccaacatactatcttcaggatttgaagaaatgcatcactgaaatactggatgtgattgcagatacagaaaatcatttacttaatatttcttgtcagtcgctgttaagtgactgtttggacataattcaacaaggagagaagctttccaagtttcagaatcatgtagaacaacttgtgtcgttctttctatctttggatcaaattgttgtatgcaaaggtgaattatggccactggaaaggttagcaaaaccattggttgagcaatctttgccagctattaagttcatggacactccatgccttgttaaacttctttcagttttggttgaaatatttgggcccacccccttattttttaagacttgtaaggaaaatgatgaaaagttggatatcaagtcttatctggagtttttcaatgatgaattgctcccttggtgtttggatggaaaatatagcacctgtaactcaaagattgatttgttactttccttatttcaagatgaatccttctttgaccaatggtgttccatcatcaaatgtacgacaactgaacaaaagcagtccgttgatgataagacctcaaatattctgggacgatatgaattgcttacactgttacttcagaaaatcagagaaaagattgctggggggaagctaagaaatttgcaggaaaatggttatcttctgcaacatttgcgtcttgatatattagattctactgcagcttctgtcctctgtgatttgcctgcttcagattgccaagttagttttatatgtgctgcacttggtggcgcagatcaagaggaccaaatctgcttcctttctcctgagacagtttgtaaaattctcggatccattttaaagaatttggcattggtactcaaaacatcaacttttgaatgggcaaggttagcacattctttgttgcctgctgaacctgagcacttgatggttccagaagaaaattcctcaataattaacttcgagatggctcggattgcctttaaagttcttcagggtagcttgttttcactttggagacttgaggaaaattctgtatttccttctattctggctgctctttttgtcattgaatgggaatgtagcatgtctttagctcttgatgaagagaagtgtttggaaagtaatatagaagatacggaagttggtgtttctatgtgcagcagttcaaaaggttgtttggaggaggaaatgcatttgaaggttaaccttgcagaaagcatacatgttttttgccaaagcttaagtccatccttttgggataatcttcactcatgcacattgaatagattggcaactattctacctcagtgtgtcaggtatgctgtatttcagacaagagacttgcatgcggaaaggacatcaatcttatgttccgagtgggtggtggacatgttgaagctcacctgtctcgatcacagaaacttggaaagtttttttgatgttttattatctgagggggaacattggccgctctggttgatgccatctttacaaaatggacatttatctgtgaaggtccagctggatccagatattacagatgaaattgaactcaaacacgagcgatttgttgcctttgttgataggcttattctcaaacttggctttagtgaagtggttttaggtattccaggaaatatacagtctgccacatcacaatcaattgatatcacttcacctgtctcttccttgtccagagtatgggtggctggtgaggtcctttgcacttggacatggaaagggggctgtgcattgaaaacattcttacctttgctggttcagtacatgaaagacgagtcatatcttgagatcaacattgtgccattgttgcttgatacactgttaggtggcgcccttatgcatgatagtggtccgtgggtactgtttaatgcttggcatctttctgacaacgagatcgataaaattcaagatcgttttcttcgtgctcttgtggctttgttatttactattaatacaaatgattgtctctggagagaatctgatgcacttgtattttttgagcaactgctgagcaatctttttattggctcatcagttaatagaaaatgcctgaagattctaccctatgttatgacctccatcataaaacagttctcagccttgaacaacggagattcttcgtatgctgatttggtgcggaaaagcatacagagttggcttgatgcaaccatttcttgtctgtcatcaagctcaagggaggtacctgtgcaagatattgaggactggatgcaagtggtgttgtcttgcttcccattgaggataactggaggagcccgggaattggtagctgtggttgagcgagagatcagtgatacagaaagatcactgatgttgactctgtttcagaaataccagattttctatggtagtacagcttcatcattggtcactagtggaactgccgtatcaacgacagttgaattactgggagtgaaactgacagctgttttggttggttattgctggagcaaccttaaggagaatgattggcattttgtgttccgcatggtattcaaatgcattgaatcgtctgttttgcttgtggaagaaatgactgatggcataaatgatgccacaataaaccaggtatcaagtgaagatgccttggagaagcttaaattagtggttggcactacagataagttaacattaagccttgcagaatctgctttggttacaatgtgtcagctcaaccatctttgtaatatccaagaagcagaaaactcccagtgtgtacagcttattaaatcaggggactatgctgagagtaatgacaagatggtagagagtgtcctccgtttgttcttggcctctggtgtttcagaggcaatcacaaaatcttgcagtgaagaggcttcgtctgtcataggttctagtcgccatgcttatttgcacttttgggaacttgtggcatcattcataaaaaatgctccactgcaaagtagaaagtctgcacttgagtccatggaactgtggggactgaccaagggttcagtcagtggactatattcgattcttttctcctcacaaccaatatttcacttacaacttgcagctttctctctacttctctctgagcccttctgtcaactttcactggttaaaaattattcaatgggagaaagttgctcatctgctcagcaatctggcacaagccaaagtgctgagttgatgccagattcagacaagacagtgcatctaagagaggaactttcagacttaatcgagttcccaacatctgaacttctcaaaactgatctgacagctcgagatagggttgatgtattcattgcctggtcattgttgctgtcccacctgcaaacactaccagcatcttccagtatcaagggagatgtgcttcaatacatacaagaaaaggtcagtccgtgcatattggattgcattttccagcatatcccagtaaaggccgctgcaccgaatgggaagaaaaaggataccgagctagcgcctgaagcagaagctgctgccaaagcttcgaagaatgccatagctacttgttctttgcttccgtacttggagtctctttggcccatcgggactttgcagatggcctcacttgcaggctcactgtacgggatgatgattaggctgctgccttcttttgtgcgcacatggtttactaccttgagagaccgttcattgtcatactcaatcgagtccttcaccaaacaatggtgcagccctcctcttcttctagatgagttttctcaggttaaggagtccgtatacggcgatgagaatttctcggttagcgtcaacaggtcggctttcgagatcgttgctacatacaaaaaggaggagacaggaatcgaccttgtcatacgcctcccgagctgttaccctctgcgccacgttgatgtcgaatgcacgagaagtttgggtatcagtgaagtcaagtgcagaaaatggctgctttcgctcacgtcattcgtccgcagccagaatggcgcgatagcagaggcgatccgcacgtggaagagcaatttcgacaaggagtttgagggcgtggaggagtgcccaatctgttacagcattctccacaccagcaaccacaacctgccgcggctggcgtgcaagacgtgcaagcacaagttccacggcgcctgcctctacaagtggttctccacgtccaacaaatcgacttgcccgctgtgccagactccgttctagtcctagctctagacacatgcttgtttgttggcaccacaccgttcgatccttcgatgtaaatggcgtgtgtacgcagcgcagtgttcagcgttttggctgttaaatactctcgaaacaggacgggacctgcagagactgagttcagaggtcttataatctacaattaccgtggattcgctagattatttttaggttaattgaacatgaaaatgtctaaattcttaacacttaatggtcttatgaaaacaaacataaaaaactatataaaatcaactgaatctactagtgcacgtctattttcgtcaaagaccggagcatgttttttttggtggtggtggtgggccgtggggtaggagttacaaagacgataggttgatcccgcatctgtaaataatttccaaataaaaaaactggaaacgtag

SEQ ID NO: 26076 - DNA, 4830 bp, Zea Mays
atggggaagcagaagggccgcgcgtccagcagcggcatggcggcgtcgctggtaccgcacgcccatggcgccgtccccaccgtcggtttcggcggctaccatggcgccgtccgtgttgagcccgctgcgccctccgacccagacgccccgattcgccttaccccagatgtggatggtgaagtactccagaacctaaagaggctgggaaggaaagatgcaacaacaaagatcaaggccttatctactctctctatactctttggacaaaaaccttgtgaggaagttgtgcagattgttccacaatgggcatttgagtacaagaggctgctacttgactataacagagaagttcgccgtgctactcatgaggccatgtctagcctcatcacagcagttaggaaaggtatagcaccgcacctgaagtctttaatgggtccttggtggttttctcaatttgatcctgctcctgaggttgctcaagctgcccgacgttcgttcgaggcagcattcccacagtcagatagaagactggatgcattaatgttatgtgtgaaggaaacatttctttacctaaatgagaacttgaagctaacaccacaagctttgtctgacaaggctataccaatggatgaactggaagatatgcatcagagggtaatgtcatcatcactgttagctatggcaactcttatagaaattttactaggagtgaaattgcaaagttgtgatggtgagagtaccaatactgaaaacaaaaatatgtcaaaagttaggtcaactgtactttcttctgctgaagctgcattttgtatgcataaatgttttcttgacgtcctcaagtcaaaaagttctgttatacggtcagctacatactcactgcttacaagttacatcaaacatgttcctcatgtttttgacgaagaaaccatgaagaaactttccccaactctacttggtgcattccatgagaaggatgcgtcatgccactcttctatgtgggatacaattcttgttttctctagaaagtttccagaggcttggtcatattgtaatattcacaaagttgtcctcagtcgggtttggcatttcctacaaaatggatgttatgggtccaaacaagtttcatatcctcttctagttcagtttttggactctatgccacctaaagcagtcatgggacaacaatttgtttttgattttttgcataatctttgggctggaaggaaccagaggcagttatcagctgctgatagtttggctttctgtggtgcctttaaacagagttttttgtggcttctaaaaaatgcatcaagatattctactggagattcttcagatgatgtacccatcaagcttataactgatgtacttgccaaaatagtttggcgtgactaccttttattgtctggagacacaattggtggcggtgttctcttatctcgtaaaacttcagggttagctgcgaacatgcactacccaacatactatcttcaggatttgaagaaatgcatcactgaaatactggatgtgattgcagatacagaaaatcatttacttaatatttcttgtcagtcgctgttaagtgactgtttggacataattcaacaaggagagaagctttccaagtttcagaatcatgtagaacaacttgtgtcgttctttctatctttggatcaaattgttgtatgcaaaggtgaattatggccactggaaaggttagcaaaaccattggttgagcaatctttgccagctattaagttcatggacactccatgccttgttaaacttctttcagttttggttgaaatatttgggcccacccccttattttttaagacttgtaaggaaaatgatgaaaagttggatatcaagtcttatctggagtttttcaatgatgaattgctcccttggtgtttggatggaaaatatagcacctgtaactcaaagattgatttgttactttccttatttcaagatgaatccttctttgaccaatggtgttccatcatcaaatgtacgacaactgaacaaaagcagtccgttgatgataagacctcaaatattctgggacgatatgaattgcttacactgttacttcagaaaatcagagaaaagattgctggggggaagctaagaaatttgcaggaaaatggttatcttctgcaacatttgcgtcttgatatattagattctactgcagcttctgtcctctgtgatttgcctgcttcagattgccaagttagttttatatgttaatagaaaatgcctgaagattctaccctatgttatgacctccatcataaaacagttctcagccttgaacaacggagattcttcgtatgctgatttggtgcggaaaagcatacagagttggcttgatgcaaccatttcttgtctgtcatcaagctcaagggaggtacctgtgcaagatattgaggactggatgcaagtggtgttgtcttgcttcccattgaggataactggaggagcccgggaattggtagctgtggttgagcgagagatcagtgatacagaaagatcactgatgttgactctgtttcagaaataccagattttctatggtagtacagcttcatcattggtcactagtggaactgccgtatcaacgacagttgaattactgggagtgaaactgacagctgttttggttggttattgctggagcaaccttaaggagaatgattggcattttgtgttccgcatggtattcaaatgcattgaatcgtctgttttgcttgtggaagaaatgactgatggcataaatgatgccacaataaaccaggtatcaagtgaagatgccttggagaagcttaaattagtggttggcactacagataagttaacattaagccttgcagaatctgctttggttacaatgtgtcagctcaaccatctttgtaatatccaagaagcagaaaactcccagtgtgtacagcttattaaatcaggggactatgctgagagtaatgacaagatggtagagagtgtcctccgtttgttcttggcctctggtgtttcagaggcaatcacaaaatcttgcagtgaagaggcttcgtctgtcataggttctagtcgccatgcttatttgcacttttgggaacttgtggcatcattcataaaaaatgctccactgcaaagtagaaagtctgcacttgagtccatggaactgtggggactgaccaagggttcagtcagtggactatattcgattcttttctcctcacaaccaatatttcacttacaacttgcagctttctctctacttctctctgagcccttctgtcaactttcactggttaaaaattattcaatgggagaaagttgctcatctgctcagcaatctggcacaagccaaagtgctgagttgatgccagattcagacaagacagtgcatctaagagaggaactttcagacttaatcgagttcccaacatctgaacttctcaaaactgatctgacagctcgagatagggttgatgtattcattgcctggtcattgttgctgtcccacctgcaaacactaccagcatcttccagtatcaagggagatgtgcttcaatacatacaagaaaaggtcagtccgtgcatattggattgcattttccagcatatcccagtaaaggccgctgcaccgaatgggaagaaaaaggataccgagctagcgcctgaagcagaagctgctgccaaagcttcgaagaatgccatagctacttgttctttgcttccgtacttggagtctctttggcccatcgggactttgcagatggcctcacttgcaggctcactgtacgggatgatgattaggctgctgccttcttttgtgcgcacatggtttactaccttgagagaccgttcattgtcatactcaatcgagtccttcaccaaacaatggtgcagccctcctcttcttctagatgagttttctcaggttaaggagtccgtatacggcgatgagaatttctcggttagcgtcaacaggtcggctttcgagatcgttgctacatacaaaaaggaggagacaggaatcgaccttgtcatacgcctcccgagctgttaccctctgcgccacgttgatgtcgaatgcacgagaagtttgggtatcagtgaagtcaagtgcagaaaatggctgctttcgctcacgtcattcgtccgcagccagaatggcgcgatagcagaggcgatccgcacgtggaagagcaatttcgacaaggagtttgagggcgtggaggagtgcccaatctgttacagcattctccacaccagcaaccacaacctgccgcggctggcgtgcaagacgtgcaagcacaagttccacggcgcctgcctctacaagtggttctccacgtccaacaaatcgacttgcccgctgtgccagactccgttctagtcctagctctagacacatgcttgtttgttggcaccacaccgttcgatccttcgatgtaaatggcgtgtgtacgcagcgcagtgttcagcgttttggctgttaaatactctcgaaacaggacgggacctgcagagactgagttcagaggtcttataatctacaattaccgtggattcgctagattatttttaggttaattgaacatgaaaatgtctaaattcttaacacttaatggtcttatgaaaacaaacataaaaaactatataaaatcaactgaatctactagtgcacgtctattttcgtcaaagaccggagcatgttttttttggtggtggtggtgggccgtggggtaggagttacaaagacgataggttgatcccgcatctgtaaataatttccaaataaaaaaactggaaacgtag

SEQ ID NO: 26077 - DNA, 5338 bp, Zea Mays
atggggaagcagaagggccgcgcgtccagcagcggcatggcggcgtcgctggtaccgcacgcccatggcgccgtccccaccgtcggtttcggcggctaccatggcgccgtccgtgttgagcccgctgcgccctccgacccagacgccccgattcgccttaccccagatgtggatggtgaagtactccagaacctaaagaggctgggaaggaaagatgcaacaacaaagatcaaggccttatctactctctctatactctttggacaaaaaccttgtgaggaagttgtgcagattgttccacaatgggcatttgagtacaagaggctgctacttgactataacagagaagttcgccgtgctactcatgaggccatgtctagcctcatcacagcagttaggaaaggtatagcaccgcacctgaagtctttaatgggtccttggtggttttctcaatttgatcctgctcctgaggttgctcaagctgcccgacgttcgttcgaggcagcattcccacagtcagatagaagactggatgcattaatgttatgtgtgaaggaaacatttctttacctaaatgagaacttgaagctaacaccacaagctttgtctgacaaggctataccaatggatgaactggaagatatgcatcagagggtaatgtcatcatcactgttagctatggcaactcttatagaaattttactaggagtgaaattgcaaagttgtgatggtgagagtaccaatactgaaaacaaaaatatgtcaaaagttaggtcaactgtactttcttctgctgaagctgcattttgtatgcataaatgttttcttgacgtcctcaagtcaaaaagttctgttatacggtcagctacatactcactgcttacaagttacatcaaacatgttcctcatgtttttgacgaagaaaccatgaagaaactttccccaactctacttggtgcattccatgagaaggatgcgtcatgccactcttctatgtgggatacaattcttgttttctctagaaagtttccagaggcttggtcatattgtaatattcacaaagttgtcctcagtcgggtttggcatttcctacaaaatggatgttatgggtccaaacaagtttcatatcctcttctagttcagtttttggactctatgccacctaaagcagtcatgggacaacaatttgtttttgattttttgcataatctttgggctggaaggaaccagaggcagttatcagctgctgatagtttggctttctgtggtgcctttaaacagagttttttgtggcttctaaaaaatgcatcaagatattctactggagattcttcagatgatgtacccatcaagcttataactgatgtacttgccaaaatagtttggcgtgactaccttttattgtctggagacacaattggtggcggtgttctcttatctcgtaaaacttcagggttagctgcgaacatgcactacccaacatactatcttcaggatttgaagaaatgcatcactgaaatactggatgtgattgcagatacagaaaatcatttacttaatatttcttgtcagtcgctgttaagtgactgtttggacataattcaacaaggagagaagctttccaagtttcagaatcatgtagaacaacttgtgtcgttctttctatctttggatcaaattgttgtatgcaaaggtgaattatggccactggaaaggttagcaaaaccattggttgagcaatctttgccagctattaagttcatggacactccatgccttgttaaacttctttcagttttggttgaaatatttgggcccacccccttattttttaagacttgtaaggaaaatgatgaaaagttggatatcaagtcttatctggagtttttcaatgatgaattgctcccttggtgtttggatggaaaatatagcacctgtaactcaaagattgatttgttactttccttatttcaagatgaatccttctttgaccaatggtgttccatcatcaaatgtacgacaactgaacaaaagcagtccgttgatgataagacctcaaatattctgggacgatatgaattgcttacactgttacttcagaaaatcagagaaaagattgctggggggaagctaagaaatttgcaggaaaatggttatcttctgcaacatttgcgtcttgatatattagattctactgcagcttctgtcctctgtgatttgcctgcttcagattgccaagttagttttatatggaactcaaacacgagcgatttgttgcctttgttgataggcttattctcaaacttggctttagtgaagtggttttaggtattccaggaaatatacagtctgccacatcacaatcaattgatatcacttcacctgtctcttccttgtccagagtatgggtggctggtgaggtcctttgcacttggacatggaaagggggctgtgcattgaaaacattcttacctttgctggttcagtacatgaaagacgagtcatatcttgagatcaacattgtgccattgttgcttgatacactgttaggtggcgcccttatgcatgatagtggtccgtgggtactgtttaatgcttggcatctttctgacaacgagatcgataaaattcaagatcgttttcttcgtgctcttgtggctttgttatttactattaatacaaatgattgtctctggagagaatctgatgcacttgtattttttgagcaactgctgagcaatctttttattggctcatcagttaatagaaaatgcctgaagattctaccctatgttatgacctccatcataaaacagttctcagccttgaacaacggagattcttcgtatgctgatttggtgcggaaaagcatacagagttggcttgatgcaaccatttcttgtctgtcatcaagctcaagggaggtacctgtgcaagatattgaggactggatgcaagtggtgttgtcttgcttcccattgaggataactggaggagcccgggaattggtagctgtggttgagcgagagatcagtgatacagaaagatcactgatgttgactctgtttcagaaataccagattttctatggtagtacagcttcatcattggtcactagtggaactgccgtatcaacgacagttgaattactgggagtgaaactgacagctgttttggttggttattgctggagcaaccttaaggagaatgattggcattttgtgttccgcatggtattcaaatgcattgaatcgtctgttttgcttgtggaagaaatgactgatggcataaatgatgccacaataaaccaggtatcaagtgaagatgccttggagaagcttaaattagtggttggcactacagataagttaacattaagccttgcagaatctgctttggttacaatgtgtcagctcaaccatctttgtaatatccaagaagcagaaaactcccagtgtgtacagcttattaaatcaggggactatgctgagagtaatgacaagatggtagagagtgtcctccgtttgttcttggcctctggtgtttcagaggcaatcacaaaatcttgcagtgaagaggcttcgtctgtcataggttctagtcgccatgcttatttgcacttttgggaacttgtggcatcattcataaaaaatgctccactgcaaagtagaaagtctgcacttgagtccatggaactgtggggactgaccaagggttcagtcagtggactatattcgattcttttctcctcacaaccaatatttcacttacaacttgcagctttctctctacttctctctgagcccttctgtcaactttcactggttaaaaattattcaatgggagaaagttgctcatctgctcagcaatctggcacaagccaaagtgctgagttgatgccagattcagacaagacagtgcatctaagagaggaactttcagacttaatcgagttcccaacatctgaacttctcaaaactgatctgacagctcgagatagggttgatgtattcattgcctggtcattgttgctgtcccacctgcaaacactaccagcatcttccagtatcaagggagatgtgcttcaatacatacaagaaaaggtcagtccgtgcatattggattgcattttccagcatatcccagtaaaggccgctgcaccgaatgggaagaaaaaggataccgagctagcgcctgaagcagaagctgctgccaaagcttcgaagaatgccatagctacttgttctttgcttccgtacttggagtctctttggcccatcgggactttgcagatggcctcacttgcaggctcactgtacgggatgatgattaggctgctgccttcttttgtgcgcacatggtttactaccttgagagaccgttcattgtcatactcaatcgagtccttcaccaaacaatggtgcagccctcctcttcttctagatgagttttctcaggttaaggagtccgtatacggcgatgagaatttctcggttagcgtcaacaggtcggctttcgagatcgttgctacatacaaaaaggaggagacaggaatcgaccttgtcatacgcctcccgagctgttaccctctgcgccacgttgatgtcgaatgcacgagaagtttgggtatcagtgaagtcaagtgcagaaaatggctgctttcgctcacgtcattcgtccgcagccagaatggcgcgatagcagaggcgatccgcacgtggaagagcaatttcgacaaggagtttgagggcgtggaggagtgcccaatctgttacagcattctccacaccagcaaccacaacctgccgcggctggcgtgcaagacgtgcaagcacaagttccacggcgcctgcctctacaagtggttctccacgtccaacaaatcgacttgcccgctgtgccagactccgttctagtcctagctctagacacatgcttgtttgttggcaccacaccgttcgatccttcgatgtaaatggcgtgtgtacgcagcgcagtgttcagcgttttggctgttaaatactctcgaaacaggacgggacctgcagagactgagttcagaggtcttataatctacaattaccgtggattcgctagattatttttaggttaattgaacatgaaaatgtctaaattcttaacacttaatggtcttatgaaaacaaacataaaaaactatataaaatcaactgaatctactagtgcacgtctattttcgtcaaagaccggagcatgttttttttggtggtggtggtgggccgtggggtaggagttacaaagacgataggttgatcccgcatctgtaaataatttccaaataaaaaaactggaaacgtag

SEQ ID NO: 26078 - DNA, 6194 bp, Zea Mays
ttcgattcgagcggcggcgcggctgtgaagtaagcgggcgagacgagacgagggatcaacctcgatggggaagcagaagggccgcgcgtccagcagcggcatggcggcgtcgctggtaccgcacgcccatggcgccgtccccaccgtcggtttcggcggctaccatggcgccgtccgtgttgagcccgctgcgccctccgacccagacgccccgattcgccttaccccagatgtggatggtgaagtactccagaacctaaagaggctgggaaggaaagatgcaacaacaaagatcaaggccttatctactctctctatactctttggacaaaaaccttgtgaggaagttgtgcagattgttccacaatgggcatttgagtacaagaggctgctacttgactataacagagaagttcgccgtgctactcatgaggccatgtctagcctcatcacagcagttaggaaaggtatagcaccgcacctgaagtctttaatgggtccttggtggttttctcaatttgatcctgctcctgaggttgctcaagctgcccgacgttcgttcgagcattcccacagtcagatagaagactggatgcattaatgttatgtgtgaaggaaacatttctttacctaaatgagaacttgaagctaacaccacaagctttgtctgacaaggctataccaatggatgaactggaagatatgcatcagagggtaatgtcatcatcactgttagctatggcaactcttatagaaattttactaggagtgaaattgcaaagttgtgatggtgagagtaccaatactgaaaacaaaaatatgtcaaaagttaggtcaactgtactttcttctgctgaagctgcattttgtatgcataaatgttttcttgacgtcctcaagtcaaaaagttctgttatacggtcagctacatactcactgcttacaagttacatcaaacatgttcctcatgtttttgacgaagaaaccatgaagaaactttccccaactctacttggtgcattccatgagaaggatgcgtcatgccactcttctatgtgggatacaattcttgttttctctagaaagtttccagaggcttggtcatattgtaatattcacaaagttgtcctcagtcgggtttggcatttcctacaaaatggatgttatgggtccaaacaagtttcatatcctcttctagttcagtttttggactctatgccacctaaagcagtcatgggacaacaatttgtttttgattttttgcataatctttgggctggaaggaaccagaggcagttatcagctgctgatagtttggctttctgtggtgcctttaaacagagttttttgtggcttctaaaaaatgcatcaagatattctactggagattcttcagatgatgtacccatcaagcttataactgatgtacttgccaaaatagtttggcgtgactaccttttattgtctggagacacaattggtggcggtgttctcttatctcgtaaaacttcagggttagctgcgaacatgcactacccaacatactatcttcaggatttgaagaaatgcatcactgaaatactggatgtgattgcagatacagaaaatcatttacttaatatttcttgtcagtcgctgttaagtgactgtttggacataattcaacaaggagagaagctttccaagtttcagaatcatgtagaacaacttgtgtcgttctttctatctttggatcaaattgttgtatgcaaaggtgaattatggccactggaaaggttagcaaaaccattggttgagcaatctttgccagctattaagttcatggacactccatgccttgttaaacttctttcagttttggttgaaatatttgggcccacccccttattttttaagacttgtaaggaaaatgatgaaaagttggatatcaagtcttatctggagtttttcaatgatgaattgctcccttggtgtttggatggaaaatatagcacctgtaactcaaagattgatttgttactttccttatttcaagatgaatccttctttgaccaatggtgttccatcatcaaatgtacgacaactgaacaaaagcagtccgttgatgataagacctcaaatattctgggacgatatgaattgcttacactgttacttcagaaaatcagagaaaagattgctggggggaagctaagaaatttgcaggaaaatggttatcttctgcaacatttgcgtcttgatatattagattctactgcagcttctgtcctctgtgatttgcctgcttcagattgccaagttagttttatatgtgctgcacttggtggcgcagatcaagaggaccaaatctgcttcctttctcctgagacagtttgtaaaattctcggatccattttaaagaatttggcattggtactcaaaacatcaacttttgaatgggcaaggttagcacattctttgttgcctgctgaacctgagcacttgatggttccagaagaaaattcctcaataattaacttcgagatggctcggattgcctttaaagttcttcagggtagcttgttttcactttggagacttgaggaaaattctgtatttccttctattctggctgctctttttgtcattgaatgggaatgtagcatgtctttagctcttgatgaagagaagtgtttggaaagtaatatagaagatacggaagttggtgtttctatgtgcagcagttcaaaaggttgtttggaggaggaaatgcatttgaaggttaaccttgcagaaagcatacatgttttttgccaaagcttaagtccatccttttgggataatcttcactcatgcacattgaatagattggcaactattctacctcagtgtgtcaggtatgctgtatttcagacaagagacttgcatgcggaaaggacatcaatcttatgttccgagtgggtggtggacatgttgaagctcacctgtctcgatcacagaaacttggaaagtttttttgatgttttattatctgagggggaacattggccgctctggttgatgccatctttacaaaatggacatttatctgtgaaggtccagctggatccagatattacagatgaaattgaactcaaacacgagcgatttgttgcctttgttgataggcttattctcaaacttggctttagtgaagtggttttaggtattccaggaaatatacagtctgccacatcacaatcaattgatatcacttcacctgtctcttccttgtccagagtatgggtggctggtgaggtcctttgcacttggacatggaaagggggctgtgcattgaaaacattcttacctttgctggttcagtacatgaaagacgagtcatatcttgagatcaacattgtgccattgttgcttgatacactgttaggtggcgcccttatgcatgatagtggtccgtgggtactgtttaatgcttggcatctttctgacaacgagatcgataaaattcaagatcgttttcttcgtgctcttgtggctttgttatttactattaatacaaatgattgtctctggagagaatctgatgcacttgtattttttgagcaactgctgagcaatctttttattggctcatcagttaatagaaaatgcctgaagattctaccctatgttatgacctccatcataaaacagttctcagccttgaacaacggagattcttcgtatgctgatttggtgcggaaaagcatacagagttggcttgatgcaaccatttcttgtctgtcatcaagctcaagggaggtacctgtgcaagatattgaggactggatgcaagtggtgttgtcttgcttcccattgaggataactggaggagcccgggaattggtagctgtggttgagcgagagatcagtgatacagaaagatcactgatgttgactctgtttcagaaataccagattttctatggtagtacagcttcatcattggtcactagtggaactgccgtatcaacgacagttgaattactgggagtgaaactgacagctgttttggttggttattgctggagcaaccttaaggagaatgattggcattttgtgttccgcatggtattcaaatgcattgaatcgtctgttttgcttgtggaagaaatgactgatggcataaatgatgccacaataaaccaggtatcaagtgaagatgccttggagaagcttaaattagtggttggcactacagataagttaacattaagccttgcagaatctgctttggttacaatgtgtcagctcaaccatctttgtaatatccaagaagcagaaaactcccagtgtgtacagcttattaaatcaggggactatgctgagagtaatgacaagatggtagagagtgtcctccgtttgttcttggcctctggtgtttcagaggcaatcacaaaatcttgcagtgaagaggcttcgtctgtcataggttctagtcgccatgcttatttgcacttttgggaacttgtggcatcattcataaaaaatgctccactgcaaagtagaaagtctgcacttgagtccatggaactgtggggactgaccaagggttcagtcagtggactatattcgattcttttctcctcacaaccaatatttcacttacaacttgcagctttctctctacttctctctgagcccttctgtcaactttcactggttaaaaattattcaatgggagaaagttgctcatctgctcagcaatctggcacaagccaaagtgctgagttgatgccagattcagacaagacagtgcatctaagagaggaactttcagacttaatcgagttcccaacatctgaacttctcaaaactgatctgacagctcgagatagggttgatgtattcattgcctggtcattgttgctgtcccacctgcaaacactaccagcatcttccagtatcaagggagatgtgcttcaatacatacaagaaaaggtcagtccgtgcatattggattgcattttccagcatatcccagtaaaggccgctgcaccgaatgggaagaaaaaggataccgagctagcgcctgaagcagaagctgctgccaaagcttcgaagaatgccatagctacttgttctttgcttccgtacttggagtctctttggcccatcgggactttgcagatggcctcacttgcaggctcactgtacgggatgatgattaggctgctgccttcttttgtgcgcacatggtttactaccttgagagaccgttcattgtcatactcaatcgagtccttcaccaaacaatggtgcagccctcctcttcttctagatgagttttctcaggttaaggagtccgtatacggcgatgagaatttctcggttagcgtcaacaggtcggctttcgagatcgttgctacatacaaaaaggaggagacaggaatcgaccttgtcatacgcctcccgagctgttaccctctgcgccacgttgatgtcgaatgcacgagaagtttgggtatcagtgaagtcaagtgcagaaaatggctgctttcgctcacgtcattcgtccgcagccagaatggcgcgatagcagaggcgatccgcacgtggaagagcaatttcgacaaggagtttgagggcgtggaggagtgcccaatctgttacagcattctccacaccagcaaccacaacctgccgcggctggcgtgcaagacgtgcaagcacaagttccacggcgcctgcctctacaagtggttctccacgtccaacaaatcgacttgcccgctgtgccagactccgttctagtcctagctctagacacatgcttgtttgttggcaccacaccgttcgatccttcgatgtaaatggcgtgtgtacgcagcgcagtgttcagcgttttggctgttaaatactctcgaaacaggacgggacctgcagagactgagttcagaggtcttataatctacaattaccgtggattcgctagattatttttaggttaattgaacatgaaaatgtctaaattcttaacacttaatggtcttatgaaaacaaacataaaaaactatataaaatcaactgaatctactagtgcacgtctattttcgtcaaagaccggagcatgttttttttggtggtggtggtgggccgtggggtaggagttacaaagacgataggttgatcccgcatctgtaaataatttccaaataaaaaaactggaaacgtag

SEQ ID NO: 26079 - DNA, 6276 bp, Zea Mays
ctgctgcttccgtcgtcgtcttcgattcgagcggcggcgcggctgtgaagtaagcgggcgagacgagacgagggatcaacctcgatggggaagcagaagggccgcgcgtccagcagcggcatggcggcgtcgctggtaccgcacgcccatggcgccgtccccaccgtcggtttcggcggctaccatggcgccgtccgtgttgagcccgctgcgccctccgacccagacgccccgattcgccttaccccagatgtggatggtgaagtactccagaacctaaagaggctgggaaggaaagatgcaacaacaaagatcaaggccttatctactctctctatactctttggacaaaaaccttgtgaggaagttgtgcagattgttccacaatgggcatttgagtacaagaggctgctacttgactataacagagaagttcgccgtgctactcatgaggccatgtctagcctcatcacagcagttaggaaaggtatagcaccgcacctgaagtctttaatgggtccttggtggttttctcaatttgatcctgctcctgaggttgctcaagctgcccgacgttcgttcgagagatgatgcatcaagcctaggacttttgactcagtggaaaaggtttttcaccactgcaccagcattcccacagtcagatagaagactggatgcattaatgttatgtgtgaaggaaacatttctttacctaaatgagaacttgaagctaacaccacaagctttgtctgacaaggctataccaatggatgaactggaagatatgcatcagagggtaatgtcatcatcactgttagctatggcaactcttatagaaattttactaggagtgaaattgcaaagttgtgatggtgagagtaccaatactgaaaacaaaaatatgtcaaaagttaggtcaactgtactttcttctgctgaagctgcattttgtatgcataaatgttttcttgacgtcctcaagtcaaaaagttctgttatacggtcagctacatactcactgcttacaagttacatcaaacatgttcctcatgtttttgacgaagaaaccatgaagaaactttccccaactctacttggtgcattccatgagaaggatgcgtcatgccactcttctatgtgggatacaattcttgttttctctagaaagtttccagaggcttggtcatattgtaatattcacaaagttgtcctcagtcgggtttggcatttcctacaaaatggatgttatgggtccaaacaagtttcatatcctcttctagttcagtttttggactctatgccacctaaagcagtcatgggacaacaatttgtttttgattttttgcataatctttgggctggaaggaaccagaggcagttatcagctgctgatagtttggctttctgtggtgcctttaaacagagttttttgtggcttctaaaaaatgcatcaagatattctactggagattcttcagatgatgtacccatcaagcttataactgatgtacttgccaaaatagtttggcgtgactaccttttattgtctggagacacaattggtggcggtgttctcttatctcgtaaaacttcagggttagctgcgaacatgcactacccaacatactatcttcaggatttgaagaaatgcatcactgaaatactggatgtgattgcagatacagaaaatcatttacttaatatttcttgtcagtcgctgttaagtgactgtttggacataattcaacaaggagagaagctttccaagtttcagaatcatgtagaacaacttgtgtcgttctttctatctttggatcaaattgttgtatgcaaaggtgaattatggccactggaaaggttagcaaaaccattggttgagcaatctttgccagctattaagttcatggacactccatgccttgttaaacttctttcagttttggttgaaatatttgggcccacccccttattttttaagacttgtaaggaaaatgatgaaaagttggatatcaagtcttatctggagtttttcaatgatgaattgctcccttggtgtttggatggaaaatatagcacctgtaactcaaagattgatttgttactttccttatttcaagatgaatccttctttgaccaatggtgttccatcatcaaatgtacgacaactgaacaaaagcagtccgttgatgataagacctcaaatattctgggacgatatgaattgcttacactgttacttcagaaaatcagagaaaagattgctggggggaagctaagaaatttgcaggaaaatggttatcttctgcaacatttgcgtcttgatatattagattctactgcagcttctgtcctctgtgatttgcctgcttcagattgccaagttagttttatatgtgctgcacttggtggcgcagatcaagaggaccaaatctgcttcctttctcctgagacagtttgtaaaattctcggatccattttaaagaatttggcattggtactcaaaacatcaacttttgaatgggcaaggttagcacattctttgttgcctgctgaacctgagcacttgatggttccagaagaaaattcctcaataattaacttcgagatggctcggattgcctttaaagttcttcagggtagcttgttttcactttggagacttgaggaaaattctgtatttccttctattctggctgctctttttgtcattgaatgggaatgtagcatgtctttagctcttgatgaagagaagtgtttggaaagtaatatagaagatacggaagttggtgtttctatgtgcagcagttcaaaaggttgtttggaggaggaaatgcatttgaaggttaaccttgcagaaagcatacatgttttttgccaaagcttaagtccatccttttgggataatcttcactcatgcacattgaatagattggcaactattctacctcagtgtgtcaggtatgctgtatttcagacaagagacttgcatgcggaaaggacatcaatcttatgttccgagtgggtggtggacatgttgaagctcacctgtctcgatcacagaaacttggaaagtttttttgatgttttattatctgagggggaacattggccgctctggttgatgccatctttacaaaatggacatttatctgtgaaggtccagctggatccagatattacagatgaaattgaactcaaacacgagcgatttgttgcctttgttgataggcttattctcaaacttggctttagtgaagtggttttaggtattccaggaaatatacagtctgccacatcacaatcaattgatatcacttcacctgtctcttccttgtccagagtatgggtggctggtgaggtcctttgcacttggacatggaaagggggctgtgcattgaaaacattcttacctttgctggttcagtacatgaaagacgagtcatatcttgagatcaacattgtgccattgttgcttgatacactgttaggtggcgcccttatgcatgatagtggtccgtgggtactgtttaatgcttggcatctttctgacaacgagatcgataaaattcaagatcgttttcttcgtgctcttgtggctttgttatttactattaatacaaatgattgtctctggagagaatctgatgcacttgtattttttgagcaactgctgagcaatctttttattggctcatcagttaatagaaaatgcctgaagattctaccctatgttatgacctccatcataaaacagttctcagccttgaacaacggagattcttcgtatgctgatttggtgcggaaaagcatacagagttggcttgatgcaaccatttcttgtctgtcatcaagctcaagggaggtacctgtgcaagatattgaggactggatgcaagtggtgttgtcttgcttcccattgaggataactggaggagcccgggaattggtagctgtggttgagcgagagatcagtgatacagaaagatcactgatgttgactctgtttcagaaataccagattttctatggtagtacagcttcatcattggtcactagtggaactgccgtatcaacgacagttgaattactgggagtgaaactgacagctgttttggttggttattgctggagcaaccttaaggagaatgattggcattttgtgttccgcatggtattcaaatgcattgaatcgtctgttttgcttgtggaagaaatgactgatggcataaatgatgccacaataaaccaggtatcaagtgaagatgccttggagaagcttaaattagtggttggcactacagataagttaacattaagccttgcagaatctgctttggttacaatgtgtcagctcaaccatctttgtaatatccaagaagcagaaaactcccagtgtgtacagcttattaaatcaggggactatgctgagagtaatgacaagatggtagagagtgtcctccgtttgttcttggcctctggtgtttcagaggcaatcacaaaatcttgcagtgaagaggcttcgtctgtcataggttctagtcgccatgcttatttgcacttttgggaacttgtggcatcattcataaaaaatgctccactgcaaagtagaaagtctgcacttgagtccatggaactgtggggactgaccaagggttcagtcagtggactatattcgattcttttctcctcacaaccaatatttcacttacaacttgcagctttctctctacttctctctgagcccttctgtcaactttcactggttaaaaattattcaatgggagaaagttgctcatctgctcagcaatctggcacaagccaaagtgctgagttgatgccagattcagacaagacagtgcatctaagagaggaactttcagacttaatcgagttcccaacatctgaacttctcaaaactgatctgacagctcgagatagggttgatgtattcattgcctggtcattgttgctgtcccacctgcaaacactaccagcatcttccagtatcaagggagatgtgcttcaatacatacaagaaaaggtcagtccgtgcatattggattgcattttccagcatatcccagtaaaggccgctgcaccgaatgggaagaaaaaggataccgagctagcgcctgaagcagaagctgctgccaaagcttcgaagaatgccatagctacttgttctttgcttccgtacttggagtctctttggcccatcgggactttgcagatggcctcacttgcaggctcactgtacgggatgatgattaggctgctgccttcttttgtgcgcacatggtttactaccttgagagaccgttcattgtcatactcaatcgagtccttcaccaaacaatggtgcagccctcctcttcttctagatgagttttctcaggttaaggagtccgtatacggcgatgagaatttctcggttagcgtcaacaggtcggctttcgagatcgttgctacatacaaaaaggaggagacaggaatcgaccttgtcatacgcctcccgagctgttaccctctgcgccacgttgatgtcgaatgcacgagaagtttgggtatcagtgaagtcaagtgcagaaaatggctgctttcgctcacgtcattcgtccgcagccagaatggcgcgatagcagaggcgatccgcacgtggaagagcaatttcgacaaggagtttgagggcgtggaggagtgcccaatctgttacagcattctccacaccagcaaccacaacctgccgcggctggcgtgcaagacgtgcaagcacaagttccacggcgcctgcctctacaagtggttctccacgtccaacaaatcgacttgcccgctgtgccagactccgttctagtcctagctctagacacatgcttgtttgttggcaccacaccgttcgatccttcgatgtaaatggcgtgtgtacgcagcgcagtgttcagcgttttggctgttaaatactctcgaaacaggacgggacctgcagagactgagttcagaggtcttataatctacaattaccgtggattcgctagattatttttaggttaattgaacatgaaaatgtctaaattcttaacacttaatggtcttatgaaaacaaacataaaaaactatataaaatcaactgaatctactagtgcacgtctattttcgtcaaagaccggagcatgttttttttggtggtggtggtgggccgtggggtaggagttacaaagacgataggttgatcccgcatctgtaaataatttccaaataaaaaaactggaaacgtag

SEQ ID NO: 26080 - DNA, 6141 bp, Zea Mays
aattcttcacctgctgcttccgtcgtcgtcttcgattcgagcggcggcgcggctgtgaagtaagcgggcgagacgagacgagggatcaacctcgatggggaagcagaagggccgcgcgtccagcagcggcatggcggcgtcgctggtaccgcacgcccatggcgccgtccccaccgtcggtttcggcggctaccatggcgccgtccgtgttgagcccgctgcgccctccgacccagacgccccgattcgccttaccccagatgtggatggtgaagtactccagaacctaaagaggctgggaaggaaagatgcaacaacaaagatcaaggccttatctactctctctatactctttggacaaaaaccttgtgaggaagttgtgcagattgttccacaatgggcatttgagtacaagaggctgctacttgactataacagagaagttcgccgtgctactcatgaggccatgtctagcctcatcacagcagttaggaaaggtatagcaccgcacctgaagtctttaatgggtccttggtggttttctcaatttgatcctgctcctgaggttgctcaagctgcccgacgttcgttcgaggcagcattcccacagtcagatagaagactggatgcattaatgttatgtgtgaaggaaacatttctttacctaaatgagaacttgaagctaacaccacaagctttgtctgacaaggctataccaatggatgaactggaagatatgcatcagagggtaatgtcatcatcactgttagctatggcaactcttatagaaattttactaggagtgaaattgcaaagttgtgatggtgagagtaccaatactgaaaacaaaaatatgtcaaaagttaggtcaactgtactttcttctgctgaagctgcattttgtatgcataaatgttttcttgacgtcctcaagtcaaaaagttctgttatacggtcagctacatactcactgcttacaagttacatcaaacatgttcctcatgtttttgacgaagaaaccatgaagaaactttccccaactctacttggtgcattccatgagaaggatgcgtcatgccactcttctatgtgggatacaattcttgttttctctagaaagtttccagaggcttggtcatattgtaatattcacaaagttgtcctcagtcgggtttggcatttcctacaaaatggatgttatgggtccaaacaagtttcatatcctcttctagttcagtttttggactctatgccacctaaagcagtcatgggacaacaatttgtttttgattttttgcataatctttgggctggaaggaaccagaggcagttatcagctgctgatagtttggctttctgtggtgcctttaaacagagttttttgtggcttctaaaaaatgcatcaagatattctactggagattcttcagatgatgtacccatcaagcttataactgatgtacttgccaaaatagtttggcgtgactaccttttattgtctggagacacaattggtggcggtgttctcttatctcgtaaaacttcagggttagctgcgaacatgcactacccaacatactatcttcaggatttgaagaaatgcatcactgaaatactggatgtgattgcagatacagaaaatcatttacttaatatttcttgtcagtcgctgttaagtgactgtttggacataattcaacaaggagagaagctttccaagtttcagaatcatgtagaacaacttgtgtcgttctttctatctttggatcaaattgttgtatgcaaaggtgaattatggccactggaaaggttagcaaaaccattggttgagcaatctttgccagctattaagttcatggacactccatgccttgttaaacttctttcagttttggttgaaatatttgggcccacccccttattttttaagacttgtaaggaaaatgatgaaaagttggatatcaagtcttatctggagtttttcaatgatgaattgctcccttggtgtttggatggaaaatatagcacctgtaactcaaagattgatttgttactttccttatttcaagatgaatccttctttgaccaatggtgttccatcatcaaatgtacgacaactgaacaaaagcagtccgttgatgataagacctcaaatattctgggacgatatgaattgcttacactgttacttcagaaaatcagagaaaagattgctggggggaagctaagaaatttgcaggaaaatggttatcttctgcaacatttgcgtcttgatatattagattctactgcagcttctgtcctctgtgatttgcctgcttcagattgccaagttagttttatatgtgctgcacttggtggcgcagatcaagaggaccaaatctgcttcctttctcctgagacagtttgtaaaattctcggatccattttaaagaatttggcattggtactcaaaacatcaacttttgaatgggcaaggttagcacattctttgttgcctgctgaacctgagcacttgatggttccagaagaaaattcctcaataattaacttcgagatggctcggattgcctttaaagttcttcagggtagcttgttttcactttggagacttgaggaaaattctgtatttccttctattctggctgctctttttgtcattgaatgggaatgtagcatgtctttagctcttgatgaagagaagtgtttggaaagtaatatagaagatacggaagttggtgtttctatgtgcagcagttcaaaaggttgtttggaggaggaaatgcatttgaaggttaaccttgcagaaagcatacatgttttttgccaaagcttaagtccatccttttgggataatcttcactcatgcacattgaatagattggcaactattctacctcagtgtgtcaggtatgctgtatttcagacaagagacttgcatgcggaaaggacatcaatcttatgttccgagtgggtggtggacatgttgaagctcacctgtctcgatcacagaaacttggaaagtttttttgatgttttattatctgagggggaacattggccgctctggttgatgccatctttacaaaatggacatttatctgtgaaggtccagctggatccagatattacagatgaaattgaactcaaacacgagcgatttgttgcctttgttgataggcttattctcaaacttggctttagtgaagtggttttaggtattccaggaaatatacagtctgccacatcacaatcaattgatatcacttcacctgtctcttccttgtccagagtatgggtggctggtgaggtcctttgcacttggacatggaaagggggctgtgcattgaaaacattcttacctttgctggttcagtacatgaaagacgagtcatatcttgagatcaacattgtgccattgttgcttgatacactgttaggtggcgcccttatgcatgatagtggtccgtgggtactgtttaatgcttggcatctttctgacaacgagatcgataaaattcaagatcgttttcttcgtgctcttgtggctttgttatttactattaatacaaatgattgtctctggagagaatctgatgcacttgtattttttgagcaactgctgagcaatctttttattggctcatcagttaatagaaaatgcctgaagattctaccctatgttatgacctccatcataaaacagttctcagccttgaacaacggagattcttcgtatgctgatttggtgcggaaaagcatacagagttggcttgatgcaaccatttcttgtctgtcatcaagctcaagggaggtacctgtgcaagatattgaggactggatgcaagtggtgttgtcttgcttcccattgaggataactggaggagcccgggaattggtagctgtggttgagcgagagatcagtgatacagaaagatcactgatgttgactctgtttcagaaataccagattttctatggtagtacagcttcatcattggtcactagtggaactgccgtatcaacgacagttgaattactgggagtgaaactgacagctgttttggttggttattgctggagcaaccttaaggagaatgattggcattttgtgttccgcatggtattcaaatgcattgaatcgtctgttttgcttgtggaagaaatgactgatggcataaatgatgccacaataaaccaggtatcaagtgaagatgccttggagaagcttaaattagtggttggcactacagataagttaacattaagccttgcagaatctgctttggttacaatgtgtcagctcaaccatctttgtaatatccaagaagcagaaaactcccagtgtgtacagcttattaaatcaggggactatgctgagagtaatgacaagatggtagagagtgtcctccgtttgttcttggcctctggtgtttcagaggcaatcacaaaatcttgcagtgaagaggcttcgtctgtcataggttctagtcgccatgcttatttgcacttttgggaacttgtggcatcattcataaaaaatgctccactgcaaagtagaaagtctgcacttgagtccatggaactgtggggactgaccaagggttcagtcagtggactatattcgattcttttctcctcacaaccaatatttcacttacaacttgcagctttctctctacttctctctgagcccttctgtcaactttcactggttaaaaattattcaatgggagaaagttgctcatctgctcagcaatctggcacaagccaaagtgctgagttgatgccagattcagacaagacagtgcatctaagagaggaactttcagacttaatcgagttcccaacatctgaacttctcaaaactgatctgacagctcgagatagggttgatgtattcattgcctggtcattgttgctgtcccacctgcaaacactaccagcatcttccagtatcaagggagatgtgcttcaatacatacaagaaaaggtcagtccgtgcatattggattgcattttccagcatatcccagtaaaggccgctgcaccgaatgggaagaaaaaggataccgagctagcgcctgaagcagaagctgctgccaaagcttcgaagaatgccatagctacttgttctttgcttccgtacttggagtctctttggcccatcgggactttgcagatggcctcacttgcaggctcactgtacgggatgatgattaggctgctgccttcttttgtgcgcacatggtttactaccttgagagaccgttcattgtcatactcaatcgagtccttcaccaaacaatggtcggctttcgagatcgttgctacatacaaaaaggaggagacaggaatcgaccttgtcatacgcctcccgagctgttaccctctgcgccacgttgatgtcgaatgcacgagaagtttgggtatcagtgaagtcaagtgcagaaaatggctgctttcgctcacgtcattcgtccgcagccagaatggcgcgatagcagaggcgatccgcacgtggaagagcaatttcgacaaggagtttgagggcgtggaggagtgcccaatctgttacagcattctccacaccagcaaccacaacctgccgcggctggcgtgcaagacgtgcaagcacaagttccacggcgcctgcctctacaagtggttctccacgtccaacaaatcgacttgcccgctgtgccagactccgttctagtcctagctctagacacatgcttgtttgttggcaccacaccgttcgatccttcgatgtaaatggcgtgtgtacgcagcgcagtgttcagcgttttggctgttaaatactctcgaaacaggacgggacctgcagagactgagttcagaggtcttataatctacaattaccgtggattcgctagattatttttaggttaattgaacatgaaaatgtctaaattcttaacacttaatggtcttatgaaaacaaacataaaaaactatataaaatcaactgaatctactagtgcacgtctattttcgtcaaagaccggagcatgttttttttggtggtggtggtgggccgtggggtaggagttacaaagacgataggttgatcccgcatctgtaaataatttccaaataaaaaaactggaaacgtag

SEQ ID NO: 26081 - DNA, 6107 bp, Zea Mays
aaaattcttcacctgctgcttccgtcgtcgtcttcgattcgagcggcggcgcggctgtgaagtaagcgggcgagacgagacgagggatcaacctcgatggggaagcagaagggccgcgcgtccagcagcggcatggcggcgtcgctggtaccgcacgcccatggcgccgtccccaccgtcggtttcggcggctaccatggcgccgtccgtgttgagcccgctgcgccctccgacccagacgccccgattcgccttaccccagatgtggatggtgaagtactccagaacctaaagaggctgggaaggaaagatgcaacaacaaagatcaaggccttatctactctctctatactctttggacaaaaaccttgtgaggaagttgtgcagattgttccacaatgggcatttgagtacaagaggctgctacttgactataacagagaagttcgccgtgctactcatgaggccatgtctagcctcatcacagcagttaggaaaggtatagcaccgcacctgaagtctttaatgggtccttggtggttttctcaatttgatcctgctcctgaggttgctcaagctgcccgacgttcgttcgagagatgatgcatcaagcctaggacttttgactcagtggaaaaggtttttcaccactgcaccaggcagcattcccacagtcagatagaagactggatgcattaatgttatgtgtgaaggaaacatttctttacctaaatgagaacttgaagctaacaccacaagctttgtctgacaaggctataccaatggatgaactggaagatatgcatcagagggtaatgtcatcatcactgttagctatggcaactcttatagaaattttactaggagtgaaattgcaaagttgtgatggtgagagtaccaatactgaaaacaaaaatatgtcaaaagttaggtcaactgtactttcttctgctgaagctgcattttgtatgcataaatgttttcttgacgtcctcaagtcaaaaagttctgttatacggtcagctacatactcactgcttacaagttacatcaaacatgttcctcatgtttttgacgaagaaaccatgaagaaactttccccaactctacttggtgcattccatgagaaggatgcgtcatgccactcttctatgtgggatacaattcttgttttctctagaaagtttccagaggcttggtcatattgtaatattcacaaagttgtcctcagtcgggtttggcatttcctacaaaatggatgttatgggtccaaacaagtttcatatcctcttctagttcagtttttggactctatgccacctaaagcagtcatgggacaacaatttgtttttgattttttgcataatctttgggctggaaggaaccagaggcagttatcagctgctgatagtttggctttctgtggtgcctttaaacagagttttttgtggcttctaaaaaatgcatcaagatattctactggagattcttcagatgatgtacccatcaagcttataactgatgtacttgccaaaatagtttggcgtgactaccttttattgtctggagacacaattggtggcggtgttctcttatctcgtaaaacttcaggatacagaaaatcatttacttaatatttcttgtcagtcgctgttaagtgactgtttggacataattcaacaaggagagaagctttccaagtttcagaatcatgtagaacaacttgtgtcgttctttctatctttggatcaaattgttgtatgcaaaggtgaattatggccactggaaaggttagcaaaaccattggttgagcaatctttgccagctattaagttcatggacactccatgccttgttaaacttctttcagttttggttgaaatatttgggcccacccccttattttttaagacttgtaaggaaaatgatgaaaagttggatatcaagtcttatctggagtttttcaatgatgaattgctcccttggtgtttggatggaaaatatagcacctgtaactcaaagattgatttgttactttccttatttcaagatgaatccttctttgaccaatggtgttccatcatcaaatgtacgacaactgaacaaaagcagtccgttgatgataagacctcaaatattctgggacgatatgaattgcttacactgttacttcagaaaatcagagaaaagattgctggggggaagctaagaaatttgcaggaaaatggttatcttctgcaacatttgcgtcttgatatattagattctactgcagcttctgtcctctgtgatttgcctgcttcagattgccaagttagttttatatgtgctgcacttggtggcgcagatcaagaggaccaaatctgcttcctttctcctgagacagtttgtaaaattctcggatccattttaaagaatttggcattggtactcaaaacatcaacttttgaatgggcaaggttagcacattctttgttgcctgctgaacctgagcacttgatggttccagaagaaaattcctcaataattaacttcgagatggctcggattgcctttaaagttcttcagggtagcttgttttcactttggagacttgaggaaaattctgtatttccttctattctggctgctctttttgtcattgaatgggaatgtagcatgtctttagctcttgatgaagagaagtgtttggaaagtaatatagaagatacggaagttggtgtttctatgtgcagcagttcaaaaggttgtttggaggaggaaatgcatttgaaggttaaccttgcagaaagcatacatgttttttgccaaagcttaagtccatccttttgggataatcttcactcatgcacattgaatagattggcaactattctacctcagtgtgtcagaaacttggaaagtttttttgatgttttattatctgagggggaacattggccgctctggttgatgccatctttacaaaatggacatttatctgtgaaggtccagctggatccagatattacagatgaaattgaactcaaacacgagcgatttgttgcctttgttgataggcttattctcaaacttggctttagtgaagtggttttaggtattccaggaaatatacagtctgccacatcacaatcaattgatatcacttcacctgtctcttccttgtccagagtatgggtggctggtgaggtcctttgcacttggacatggaaagggggctgtgcattgaaaacattcttacctttgctggttcagtacatgaaagacgagtcatatcttgagatcaacattgtgccattgttgcttgatacactgttaggtggcgcccttatgcatgatagtggtccgtgggtactgtttaatgcttggcatctttctgacaacgagatcgataaaattcaagatcgttttcttcgtgctcttgtggctttgttatttactattaatacaaatgattgtctctggagagaatctgatgcacttgtattttttgagcaactgctgagcaatctttttattggctcatcagttaatagaaaatgcctgaagattctaccctatgttatgacctccatcataaaacagttctcagccttgaacaacggagattcttcgtatgctgatttggtgcggaaaagcatacagagttggcttgatgcaaccatttcttgtctgtcatcaagctcaagggaggtacctgtgcaagatattgaggactggatgcaagtggtgttgtcttgcttcccattgaggataactggaggagcccgggaattggtagctgtggttgagcgagagatcagtgatacagaaagatcactgatgttgactctgtttcagaaataccagattttctatggtagtacagcttcatcattggtcactagtggaactgccgtatcaacgacagttgaattactgggagtgaaactgacagctgttttggttggttattgctggagcaaccttaaggagaatgattggcattttgtgttccgcatggtattcaaatgcattgaatcgtctgttttgcttgtggaagaaatgactgatggcataaatgatgccacaataaaccaggtatcaagtgaagatgccttggagaagcttaaattagtggttggcactacagataagttaacattaagccttgcagaatctgctttggttacaatgtgtcagctcaaccatctttgtaatatccaagaagcagaaaactcccagtgtgtacagcttattaaatcaggggactatgctgagagtaatgacaagatggtagagagtgtcctccgtttgttcttggcctctggtgtttcagaggcaatcacaaaatcttgcagtgaagaggcttcgtctgtcataggttctagtcgccatgcttatttgcacttttgggaacttgtggcatcattcataaaaaatgctccactgcaaagtagaaagtctgcacttgagtccatggaactgtggggactgaccaagggttcagtcagtggactatattcgattcttttctcctcacaaccaatatttcacttacaacttgcagctttctctctacttctctctgagcccttctgtcaactttcactggttaaaaattattcaatgggagaaagttgctcatctgctcagcaatctggcacaagccaaagtgctgagttgatgccagattcagacaagacagtgcatctaagagaggaactttcagacttaatcgagttcccaacatctgaacttctcaaaactgatctgacagctcgagatagggttgatgtattcattgcctggtcattgttgctgtcccacctgcaaacactaccagcatcttccagtatcaagggagatgtgcttcaatacatacaagaaaaggtcagtccgtgcatattggattgcattttccagcatatcccagtaaaggccgctgcaccgaatgggaagaaaaaggataccgagctagcgcctgaagcagaagctgctgccaaagcttcgaagaatgccatagctacttgttctttgcttccgtacttggagtctctttggcccatcgggactttgcagatggcctcacttgcaggctcactgtacgggatgatgattaggctgctgccttcttttgtgcgcacatggtttactaccttgagagaccgttcattgtcatactcaatcgagtccttcaccaaacaatggtgcagccctcctcttcttctagatgagttttctcaggttaaggagtccgtatacggcgatgagaatttctcggttagcgtcaacaggtcggctttcgagatcgttgctacatacaaaaaggaggagacaggaatcgaccttgtcatacgcctcccgagctgttaccctctgcgccacgttgatgtcgaatgcacgagaagtttgggtatcagtgaagtcaagtgcagaaaatggctgctttcgctcacgtcattcgtccgcagccagaatggcgcgatagcagaggcgatccgcacgtggaagagcaatttcgacaaggagtttgagggcgtggaggagtgcccaatctgttacagcattctccacaccagcaaccacaacctgccgcggctggcgtgcaagacgtgcaagcacaagttccacggcgcctgcctctacaagtggttctccacgtccaacaaatcgacttgcccgctgtgccagactccgttctagtcctagctctagacacatgcttgtttgttggcaccacaccgttcgatccttcgatgtaaatggcgtgtgtacgcagcgcagtgttcagcgttttggctgttaaatactctcgaaacaggacgggacctgcagagactgagttcagaggtcttataatctacaattaccgtggattcgctagattatttttaggttaattgaacatgaaaatgtctaaattcttaacacttaatggtcttatgaaaacaaacataaaaaactatataaaatcaactgaatctactagtgcacgtctattttcgtcaaagaccggagcatgttttttttggtggtggtggtgggccgtggggtaggagttacaaagacgataggttgatcccgcatctgtaaataatttccaaataaaaaaactggaaacgtag

SEQ ID NO: 26082 - DNA, 5918 bp, Zea Mays
aagcgaatgcccaacaaaattcttcacctgctgcttccgtcgtcgtcttcgattcgagcggcggcgcggctgtgaagtaagcgggcgagacgagacgagggatcaacctcgatggggaagcagaagggccgcgcgtccagcagcggcatggcggcgtcgctggtaccgcacgcccatggcgccgtccccaccgtcggtttcggcggctaccatggcgccgtccgtgttgagcccgctgcgccctccgacccagacgccccgattcgccttaccccagatgtggatggtgaagtactccagaacctaaagaggctgggaaggaaagatgcaacaacaaagatcaaggccttatctactctctctatactctttggacaaaaaccttgtgaggaagttgtgcagattgttccacaatgggcatttgagtacaagaggctgctacttgactataacagagaagttcgccgtgctactcatgaggccatgtctagcctcatcacagcagttaggaaaggtatagcaccgcacctgaagtctttaatgggtccttggtggttttctcaatttgatcctgctcctgaggttgctcaagctgcccgacgttcgttcgaggcagcattcccacagtcagatagaagactggatgcattaatgttatgtgtgaaggaaacatttctttacctaaatgagaacttgaagctaacaccacaagctttgtctgacaaggctataccaatggatgaactggaagatatgcatcagagggtaatgtcatcatcactgttagctatggcaactcttatagaaattttactaggagtgaaattgcaaagttgtgatggtgagagtaccaatactgaaaacaaaaatatgtcaaaagttaggtcaactgtactttcttctgctgaagctgcattttgtatgcataaatgttttcttgacgtcctcaagtcaaaaagttctgttatacggtcagctacatactcactgcttacaagttacatcaaacatgttcctcatgtttttgacgaagaaaccatgaagaaactttccccaactctacttggtgcattccatgagaaggatgcgtcatgccactcttctatgtgggatacaattcttgttttctctagaaagtttccagaggcttggtcatattgtaatattcacaaagttgtcctcagtcgggtttggcatttcctacaaaatggatgttatgggtccaaacaagtttcatatcctcttctagttcagtttttggactctatgccacctaaagcagtcatgggacaacaatttgtttttgattttttgcataatctttgggctggaaggaaccagaggcagttatcagctgctgatagtttggctttctgtggtgcctttaaacagagttttttgtggcttctaaaaaatgcatcaagatattctactggagattcttcagatgatgtacccatcaagcttataactgatgtacttgccaaaatagtttggcgtgactaccttttattgtctggagacacaattggtggcggtgttctcttatctcgtaaaacttcaggatacagaaaatcatttacttaatatttcttgtcagtcgctgttaagtgactgtttggacataattcaacaaggagagaagctttccaagtttcagaatcatgtagaacaacttgtgtcgttctttctatctttggatcaaattgttgtatgcaaaggtgaattatggccactggaaaggttagcaaaaccattggttgagcaatctttgccagctattaagttcatggacactccatgccttgttaaacttctttcagttttggttgaaatatttgggcccacccccttattttttaagacttgtaaggaaaatgatgaaaagttggatatcaagtcttatctggagtttttcaatgatgaattgctcccttggtgtttggatggaaaatatagcacctgtaactcaaagattgatttgttactttccttatttcaagatgaatccttctttgaccaatggtgttccatcatcaaatgtacgacaactgaacaaaagcagtccgttgatgataagacctcaaatattctgggacgatatgaattgcttacactgttacttcagaaaatcagagaaaagattgctggggggaagctaagaaatttgcaggaaaatggttatcttctgcaacatttgcgtcttgatatattagattctactgcagcttctgtcctctgtgatttgcctgcttcagattgccaagttagttttatatgtgctgcacttggtggcgcagatcaagaggaccaaatctgcttcctttctcctgagacagtttgtaaaattctcggatccattttaaagaatttggcattggtactcaaaacatcaacttttgaatgggcaagggtagcttgttttcactttggagacttgaggaaaattctgtatttccttctattctggctgctctttttgtcattgaatgggaatgtagcatgtctttagctcttgatgaagagaagtgtttggaaagtaatatagaagatacggaagttggtgtttctatgtgcagcagttcaaaaggttgtttggaggaggaaatgcatttgaaggttaaccttgcagaaagcatacatgttttttgccaaagcttaagtccatccttttgggataatcttcactcatgcacattgaatagattggcaactattctacctcagtgtgtcagaaacttggaaagtttttttgatgttttattatctgagggggaacattggccgctctggttgatgccatctttacaaaatggacatttatctgtgaaggtccagctggatccagatattacagatgaaattgaactcaaacacgagcgatttgttgcctttgttgataggcttattctcaaacttggctttagtgaagtggttttaggtattccaggaaatatacagtctgccacatcacaatcaattgatatcacttcacctgtctcttccttgtccagagtatgggtggctggtgaggtcctttgcacttggacatggaaagggggctgtgcattgaaaacattcttacctttgctggttcagtacatgaaagacgagtcatatcttgagatcaacattgtgccattgttgcttgatacactgttaggtggcgcccttatgcatgatagtggtccgtgggtactgtttaatgcttggcatctttctgacaacgagatcgataaaattcaagatcgttttcttcgtgctcttgtggctttgttatttactattaatacaaatgattgtctctggagagaatctgatgcacttgtattttttgagcaactgctgagcaatctttttattggctcatcagttaatagaaaatgcctgaagattctaccctatgttatgacctccatcataaaacagttctcagccttgaacaacggagattcttcgtatgctgatttggtgcggaaaagcatacagagttggcttgatgcaaccatttcttgtctgtcatcaagctcaagggaggtacctgtgcaagatattgaggactggatgcaagtggtgttgtcttgcttcccattgaggataactggaggagcccgggaattggtagctgtggttgagcgagagatcagtgatacagaaagatcactgatgttgactctgtttcagaaataccagattttctatggtagtacagcttcatcattggtcactagtggaactgccgtatcaacgacagttgaattactgggagtgaaactgacagctgttttggttggttattgctggagcaaccttaaggagaatgattggcattttgtgttccgcatggtattcaaatgcattgaatcgtctgttttgcttgtggaagaaatgactgatggcataaatgatgccacaataaaccaggtatcaagtgaagatgccttggagaagcttaaattagtggttggcactacagataagttaacattaagccttgcagaatctgctttggttacaatgtgtcagctcaaccatctttgtaatatccaagaagcagaaaactcccagtgtgtacagcttattaaatcaggggactatgctgagagtaatgacaagatggtagagagtgtcctccgtttgttcttggcctctggtgtttcagaggcaatcacaaaatcttgcagtgaagaggcttcgtctgtcataggttctagtcgccatgcttatttgcacttttgggaacttgtggcatcattcataaaaaatgctccactgcaaagtagaaagtctgcacttgagtccatggaactgtggggactgaccaagggttcagtcagtggactatattcgattcttttctcctcacaaccaatatttcacttacaacttgcagctttctctctacttctctctgagcccttctgtcaactttcactggttaaaaattattcaatgggagaaagttgctcatctgctcagcaatctggcacaagccaaagtgctgagttgatgccagattcagacaagacagtgcatctaagagaggaactttcagacttaatcgagttcccaacatctgaacttctcaaaactgatctgacagctcgagatagggttgatgtattcattgcctggtcattgttgctgtcccacctgcaaacactaccagcatcttccagtatcaagggagatgtgcttcaatacatacaagaaaagcatatcccagtaaaggccgctgcaccgaatgggaagaaaaaggataccgagctagcgcctgaagcagaagctgctgccaaagcttcgaagaatgccatagctacttgttctttgcttccgtacttggagtctctttggcccatcgggactttgcagatggcctcacttgcaggctcactgtacgggatgatgattaggctgctgccttcttttgtgcgcacatggtttactaccttgagagaccgttcattgtcatactcaatcgagtccttcaccaaacaatggtgcagccctcctcttcttctagatgagttttctcaggttaaggagtccgtatacggcgatgagaatttctcggttagcgtcaacaggtcggctttcgagatcgttgctacatacaaaaaggaggagacaggaatcgaccttgtcatacgcctcccgagctgttaccctctgcgccacgttgatgtcgaatgcacgagaagtttgggtatcagtgaagtcaagtgcagaaaatggctgctttcgctcacgtcattcgtccgcagccagaatggcgcgatagcagaggcgatccgcacgtggaagagcaatttcgacaaggagtttgagggcgtggaggagtgcccaatctgttacagcattctccacaccagcaaccacaacctgccgcggctggcgtgcaagacgtgcaagcacaagttccacggcgcctgcctctacaagtggttctccacgtccaacaaatcgacttgcccgctgtgccagactccgttctagtcctagctctagacacatgcttgtttgttggcaccacaccgttcgatccttcgatgtaaatggcgtgtgtacgcagcgcagtgttcagcgttttggctgttaaatactctcgaaacaggacgggacctgcagagactgagttcagaggtcttataatctacaattaccgtggattcgctagattatttttaggttaattgaacatgaaaatgtctaaattcttaacacttaatggtcttatgaaaacaaacataaaaaactatataaaatcaactgaatctactagtgcacgtctattttcgtcaaagaccggagcatgttttttttggtggtggtggtgggccgtggggtaggagttacaaagacgataggttgatcccgcatctgtaaataatttccaaataaaaaaactggaaacgtag

SEQ ID NO: 26083 - DNA, 2434 bp, Zea Mays
ccagataggacgagacgatggtaacttaagcctactttgctcgctgcggcgatgccacgatggcgccacgctcttccaccttcctctcccgcgtcgccgacgccgcgcgcccgctctctgtctccgctcgtccccgtctctcaccgtcctgtccctctcacaccgccgccgcgcccgccttcagcccgcccgccttccacacgcacctcgcatccgtcgcgtcgcacctcccctccctcctagccgctctctcccgcgcccgcgccgcgcggctcccgctcctcccggtcacccgcgcgcttgccgcctcagcgctcctccgccacggtcgtctacccgatgccctcgcacacttcagtctcctcccggattctgaccccaccgctcctttacccgtaccgctatgcaattcccttctctcagcgctagcgtcgtccactgggtctctcggccacgcgcgcaaggtgttcgatagaatgctggcaggagctgtcgagctgaacaccgttgggttcggggtgtttgttaatgccgcaggtaggaaagatgacggactggctgaggtcctgcgcctggtggatgtggtgggctgtcaagggagacgggttaacaggtcggttgtggtggcaatgcttgtggacggtatgtgtagggagggacgaattgaggatgcttggcgtgctatggatgagatgaggctacgtgggtggaaaccagatttcttggcatataggattgtggccgaggggtttagggtacaggggagggtggaagaggaaggaaggatcttgaagcagaagaggaagcttggtgttgcgcctagaaaggatgagtacagggaatgtgtgcttgtgttggtgtccaacaggctgtttagagaagcgaaggagattgccgaggcggttgtgttgggagatttcccaattgatgatgatgtgctgaacattttggttggttcagtgtctgagattgatgtcgatggtgctgccatgttctgcaagttcatgatggggaaggggaggtttccaagtactgagatgcttgcacacctttgcgagagtctttgcaaaagtgggaagggcgacgaaatgtgggagattttgagggtgcttttggacaaggggtattgtaggaatgcaaggggttaccatttggtggtgtcattcttagggaaggctggaaaggttagggaggcatatgatgtgctcaaggaggtgaaaaaaaagaggctagagcctgacatttcatcatataactcccttatggaagcgctgtgtagaaatgaccttcttaggccagccaagaagttgtgggatgagatgtttaccagtgggtgtagcccaaatctgcagacatacaatatactcataacaaaatttacagaaatgggtgaaagccaagaggtccaacaactctttgaccatatgttccagaaaggtgtggccccagatggtgcaacatacacgtccttcatcaatatgttgtgccaggaaaataaatatgaacgggccctggaggtctttaataaatcttggatgcaggatgctggagtggctagttttgtgctgagtagttttatacttgcactctgcaaacaagcatctaaccgatgttggggaagtggagatggccattgagcacctagaatggattaggagcaactgcagctctagttttgagaacataatgaatgagttcatggcttctctatccacatcagccagtcttcaacatgtgacaaagttgatacagtatttacactcacggagacttattgatgatgcacattgtaggttgggggaagaatgattgagactattatgtggtccgatcaggcagccacaacattattagggaaacaagatctatattgcagtgtttatgcctatcacaaaatgaccagatcacaaaggtacaggaaagtgtgtaatgtaaccacactattcttacaagaaagagtgcgactagggtgcgactgtgcgaggtgtgtgtggattgcgggcgcggcggcggcttgagaggaacaggacggtgggagacagagagggggtgtgtggtggcggtggcggtgccagcgacgacgcaggagaggaaggtggaggggcgtggtgtcatcgtggcatcgccgcagcgagcaagtaggcgcgaagttagatcagaacgggttcggatcaaattatattgatatgtgcctctctaatggatacatccgatcatttttttaattgagtcagatctttttagctttgggttagatttgattttagatttttaaaaaagttggtctgtgtccgatcgaccaatcgatccgtggtcaaaaatatggtttgtgtctgttcgtagaatttgatcggttggattgaatttttttcaagcgagttaattgaattggacggatatggcgagttaattaaaattgttttaagcgagttaa

SEQ ID NO: 26084 - DNA, 895 bp, Zea Mays
atgcagggtcagatgtggggcaactggctgttgtcccgggttcggtggcggacactttgcctatggcagcggttggagcgaagggtacttcgcaggacccatggtccaaggtctgcgccagcggtgagatttcgtcggccaccgccgctaaagacgtggcgggctctgtgtcccagcaactgaggcatgcgtccgagcagctgaagcatgcgactgccttcaccgaccatgttgcgtcgggcgccctgacttcggagttcactgccgagaggcaacgactcgagggcaggatcgagcgcctccaagcgcagcatgcggatgctgctcgagacaagtcagctgcggaaaacaggagccgcaggctgtcggagaggttggtggctgcggaggccgagaaggaggatctcatgcgccagttggcggaggagaggagggatgcaaatagagcctgtgctgaggcgcaggctgcacaagccaaggccaaacttgcgcgggcaaagggcagtctcgcccgccaacgcgtcgaggagatggagacgaggctcggcggcctgcgtgaccgcttagacaagatggaggcctcgacgcgcgtggaggtcgagcggacgcattcgcagcttgtggacgcgtactgggagctgggtgcacggaccgctcccttcgaagcgcctggtcaagatgtgggcctctgcttccttgggtggctacaggaggagctggaggtgctctcgacaattttgacgggcctcatgtccttcgcctccctcgtcacctgtgaggggggcgtgaatgccttgtcccgggagggatgcgggcacttcgaggtcttcgaccagtcggacaaaggcttcgagcgtgaaatcttccaggtcgaggacccggaattgaagcggct

SEQ ID NO: 26085 - DNA, 3384 bp, Zea Mays
gggaaatttctcagatttcgaatcgaatcaaactgtgtcgtaagtaccgtcgacctttttgttatcgctaaaaatctcaatccaaaaatatctacgattttctaaaaaaaaaagagaaaagaaattttaaaaaaaacttctcctaatccctatccctacgccgcccctgaggatatttttttgccactgctctgataaaaatcacgccgcatgcgcttcttctccgtgcgtctctatctcttcctccaacgctcagccgtttctccccttcttcacaccgcgcgcagctcgcgcccagcccctgcttccagctcgccatggcgctcggcgtctagctatctccgcgccggaccccctgctcggtgccctccccactgcttccctctccccgaccacgccctgcatcttccatgggcgagcatcctgccgaggtctctccatggccaagcacgcgcggacctgccccgagctcgccctgcgctcggattccgtctctctcgcgcgtcctccctgcttggcctggccgtcagccctccccacgctgctctctgtctctcttctggccgcgctcgcccagcccagcaacccctcctctctctccctcaagttctctgcccggtcgagctccctagtgccgcgccccctgctccctgattttcttgctcgtctccatggccgtcgtgccgggctcctccctgttcctgcgcggtttcccagcttccctgcgcgttcctgaagcttttccatggcgcgtccctggttcctgcttctgttctgtgcgcgcgccccatctcgccgcactcagcttcagctcgctcggccccttccccgcgctctcgcgcccagccgaagtttcctgcgcgtgctagtcggccggagctcctggctcgtatccttccagctcgcccatctgcgcgcagccgtgtcttcaagctcggtgctcctctctgctcggctccgccgcgtcgcgttccccttcccagccatggtggtcgatccctgctgcgcagctccttcggcgccctccctgccgcagcacacgcccgtcgtcctgcctgctcgccgcgcgcgctactccctgtgctcgccggtttttactccggcacgcttccagcgccgtggtctcgccaagatccctgtcgagctcgtccctgcgcgcgcgttttctgcgcgcatcttcctcaagtcgtcgtgtgcccagcttgccccaactcccgttcgtagtggtcgccagtcgtcgatcttgccggttgtcgtcgtcgtttgtcgtcgcgtctttcgccgtcgaccttgcttggtcctatatcaggagaagacgaacctagcagcgtgatattcaccaagtgctcgacaaaagcttgaacaagtcgtcgatcgtcaccctcgtctacgccaagctctgagaagattaggcgcagaggaaaataaatcagtacacggccagagaattctcgatgtggacacagaagaagcgtgattcgacgcagcactcgccctgttttcggtgaaatgctgagctgaaaggtgtcgtcgatttcgtggtttcaagtcggatattataaaggtaagttaattcgtattccagtgaactaggtctataaatagattaaatagaattattagtcgcgataattgttattaatttagtatacacatattgtgatgtttgatttagataaataggtaaatcaagtaattaaaatacatagtttcaagagttaataaaaagctaggaataaaaatagatattctagtgttattatgtcaatttgattaatggatgtagttgatgccctgctgtgatatccatgatgcttaatgcttggttttaagtgttttatcctttttagtgtagattatctatattatactcgttatacttgtgctcatacatgtgcatcgtgcatctgataaggtacgataaataatcgcgtgatgtggaagacgaaccaagtcgactccaagcgcgggctaatctgcaagatgaagctgatggacaaacctgaaggtggataatggagcgtgtaccagaataaaggttgatcgtgaagcagacatcgcctaacaaacactaacctagtgttatttaggcaagccccggtgcatttgccacctccttgatattttaaaaatctttatcaccttgttcgatgcattaggtgataggagttgtgtgctaaaccgttgatgcatttccttccttgaaaaattgattacccttccttgataccctttttgaaaagaattttatgatgcttagccttgctttagcaaacaaaaatgttttgttttcaaacaaagttgatgcttcagtgggtgggaatgatttcaaaaataaaacttgatggtgaatccatcatggtcgtgatgggttcaacatcggaaaagatgtacctctgtcaggtaccaaactttgggttgaaaataataaagctgagaccagacggttgacttgcacgagaagagagtctcggtgtagtgtctccgtctgagtcgattaaggaccgtgtcgatgtaggcctgctgaccgaggaccctttaactggtcacatgcctcatcatgggtaagctttgcctcgggtagactaataccagaataagataacacacaatgggagtggagagatggcgagagtagcgtgtaccctctgtggcaagaggctggacggtggtgtatctgtgctctcggttggcgtgaacttgatctggtcttaagaaccccggtggcgagttgacatatgcaagggttaagtgctacatatgtcgtgtgattggagatcctcagctgagtataatcgattcggatcgctgtaacttcgcggacatgaagacttggtcactgacttacacgtagcaattcagtgaactgatgggatgataaaagacggctagtgcaggtcaagtgattgaactagggtagaaagaactctagatgcaggtaattttatttaacctgacaagtaaaaatggatttttaaggatccacttttagtaagcatttatgcaaaacagagtctttgattcttgataaggcataccttgaatccctctagacagcatacccttgagagtcttttctttagtcgggtaagtcttgttgagtaattccgtactcagggttttattcccagttgttttcaggttatagttttgtgctgctgatgatggtgttaagtgtcggtgggctcggccttcttataagtctaagtaactcttctatacttcttattgaggatggtcagttgagctagcatatatttcaaacttatacttttgcaatcactccgataaaataatgacttgtaaaatttggtaataagatttccgctgcaaaaatattggtgtgtgtgatttgtgttacttaatctcgcgatcttggttgta

SEQ ID NO: 26086 - DNA, 512 bp, Zea Mays
ttctgtttctatgtatggtgctgatgcataaaaaagaaaaggtacgaagacataccagttttggggcagaggccagccgaagaatgatatactttggtcgccatttagctccggtttaaccgtttcattttcgcacaataataagctgtgtaaacttcttactctgctgctgagagctgcttcccattcattttactctgaacatgctgtgagggaatttcgtggtgcatggctgaaatctgttatatagagcatatgcaaatacgtctagaggattcctctctctgcccagttcgacattatccgtgcacgtatcctgccctttcaaaatgacaaaggtttctacggactaatttttagcctttctgttttagtccttaaattattaaatacagtgactaaaagagagattatctctattttagtccttatgtttggcaatttagagactaaggtgtcgtttgattcacatatttgtaatgtgatggataaccgataacgttatattatta

SEQ ID NO: 26087 - DNA, 284 bp, Zea Mays
ggtgggaactataaaaagaagacgtctccgaatccgtctccgcctttcctgtctcctctcgctcgctctccccgtctcccgcacgcccacccgccgccgccgttcgccatgggcctcctcgactcgctgtaccgcgtggtgatgcgccgcaacgccgtctacgttaccttcgtcgtcgccggtgcctttgcgggcgagcgggttgtagactacggagttcacaagatctgggagatgaacaacctcggggagcacctgcttaccattaccttttaatgagcaag

SEQ ID NO: 26088 - DNA, 819 bp, Zea Mays
agagagcgtcggcttctgttcgctcaccaactcgcagaatcgcgcgggtcgcaactcgctacatcccgcgggtgccgacgccgccgctcgcgttaggccactccgccgttcgcgacctgtcacttcctgtccgtccccctgccgcacgccaccggagctcactcaccgattagtccccacctcagaccctctccgcgcgcgcccagtccggcggccgccctgcccaacgctagggtttaggtggcggctgcagggtcacgccggcgccctccgccctccaccggccgccgacagaaggggtgacgtaggtcacctcgcttttccttggcgagccgtctgtctgttggtgtcggcccgacaaacgccgaggagggagacagcgagatgccgcaccgagcgcgcccgatgacggggctgctggtgttcatgggcgtcaacctcgcgctcttcaacaccatcagccccgtctacgacttcgtctgcttccacccctactgggaacgaaggagagaacgccgccgaagggaacttgaagctctgcgggcgaaaggatctctagagacaactaactaaattctcctaaagtcggcatcggagatgatgtctttgattttatcggcgtcatacaacccttgctccttcaaggcgtgctcaagctcttctttagtaatgtacctgtgagataaacgaattatatatgtgtcctgttatgatatgtgtcgtccagaattcagtttgttcatatgcactgttgcggtgacgaattcgtcgtagtcaattaacccgttgccgtcagcgtcagcctggaaatgtataaag

SEQ ID NO: 26089 - DNA, 2896 bp, Zea Mays
aatggaaccagtacctctattccattccaggctgcttcttcctgcgcgattcgacacggactcagaccctcacacgcctcctcaccggctcacgacgtcgccacctcagatccggcgaccgatcccctcctcctcggcgaggcgtagccaagtttgtcaagttacgtccgatgctccagacatagtagaaaaccatgggagaagttagtgatgacaattccaacctgtcctttctaaaaagaatcgcaacaagtgacgtaccgctgttgaaagagtatggtgtaaatggagttgtcgtcgctctgcttcttgctgtagttactcccgtcttgctttccatgatgtttggcaagaaaacaaagcagagggcggtgcgagctaatgtgggtggagaggaaggatttgccatgcgaaacagtaggttttcctccttagttgaagtcccatgggaaggcgccaccacgatgtcagctctgttcgagatggccagcaaaaaatactctcgacggaggtgtcttggcacgaggaagctaatcaagagggaatttgtggaatcttctgatggtaggaagtttgagaaactgcaccttggtgaatacgaatgggatacgtacgccgaggcatttaaccgcgcatgtaattttgcttctggacttgtcaagatgggccacgacctagatagtcatgctgctatcttctctgatacaagagctgagtggatcattgctgctcagggatgcttccgacaaaatttgacggttgtaacaatatatgcatctcttggtgaggatgcattggtgcattcactaaacgagacacaggtttcaactctgatatgtgattcgaagcaacttaagaaaatacctgcaatcagctctaaattgcagagtcttaggcatattatctatattgaggatgaacctgtcgaggctgagacactgaaccaagtgaagcatctgacaacattgtctttcactgaagtagaggagttaggcaagacatctagtgttgatgcaaggttaccttcaagctctgatactgcagttatcatgtatacaagcggaagtactggtcttcccaagggtgtaatgatcacacatggcaacatggtggccacaactgcagcagtcatgacaatagtcccaaaacttggcatgaatgatgtttatctggcttaccttccattggctcatgtctttgaactagcaggagagactgtcatgctagcttctggtactgccattggatatggttcaacattgactatgactgatacatcgaacaagattaagaaggggacaaaaggagatgtttctgtactgaatcctactcttataatttcagttcctgcaattttggatcgtatcagagatgcagtgtttaagaaagttggtgagaagggtggcctgacaaaaaagctgtttgattttgcatataagcggaatcttgcatcaattgaggggagttggtttggatcctgggcaccggagaggatgatatgggataccattatttataaaccaatacgggcaatgcttggaggacgtgtaagatttgttctttgtggtggtgcacctttatcaggtgacacacaaagattcatgaatatatgtctaggtgtcccagtgggtcaaggctatggtttgactgaaacctgtgctggagcagctttcactgaatgggatgacacaagtgtgggtcgtgttggtccaccacttccttgctgctatgtgaagcttgtttcatgggaagaaggtggttacaagatttctgattatccgatgccgagaggagaggtcgtggttggcggacacagtataacaaaaggctatttcagcaatgaagcaaagacgaatgaagtatacaaggttgacgagaggggtatacgctggttctacactggtgatattggccagttccatcctgacgggtgccttgagattattgacaggaaaaaagatatagtaaagcttcagcacggagaatatgtgtctcttggcaaggttgaatcggctctagcaacaagtagttatgtggagagcatcatggtctacgccgatccgttccataactactgtgttgccctggttgttccagtacgccaggccctggagaagtgggctcaaaattctgggataaactgtgaaggctttgaagagctttgccaaaatggccaggcggttaaggaggttcagcaatcactatcgaaggccgcgaaagcagcgaggctggagagattcgaggtgccggcgaagatcgagctgctgcctgagccgtggacgccggagtccgggctggtgacggcggcgcttaagctgaagagggagcagataaaggccaaattcaaagacgatctggacaagctctaccactgaagaaaagcggggcttgcacccacgcgttcaggagcttgcgctgccaaaacgctgcctggatgcggaatggaacctactgacctgcacgagaccacgagtggtgtgtgtgtgtgtgtggatgtgtgtcggcgtcggtacagcaggagctgcttcttgtgtgatgaaaaataagccaaagtgttggttggaacgatcttgatttgtatagcttcacttaacttgcatgaaccctagctcgaaatcagttgaatctggatggaccggtcgataagagttgccgctatcggttttgatgcctcacgatggttgaagccgggcagccggcaattgtcggggcgttctctgagatggccatagtcgtcgcaatttgacctgtggatttagatatttgttggatatctaatccaatagataccagagccgggtatggatacatgtttttaccacagttttgatgtttttaccacagttttgatctgtggtcagactttaataaaatggctccctgtgctctgattgat

SEQ ID NO: 26090 - DNA, 2979 bp, Zea Mays
aatggaaccagtacctctattccattccaggctgcttcttcctgcgcgattcgacacggactcagaccctcacacgcctcctcaccggctcacgacgtcgccacctcagatccggcgaccgatcccctcctcctcggcgaggcgtagagccgagccggacaacacagccacgaccacgaggcgtcgtcgcggagtagtcggagccgtttctgctgcccccctccttcccgccaagtttgtcaagttacgtccgatgctccagacatagtagaaaaccatgggagaagttagtgatgacaattccaacctgtcctttctaaaaagaatcgcaacaagtgacgtaccgctgttgaaagagtatggtgtaaatggagttgtcgtcgctctgcttcttgctgtagttactcccgtcttgctttccatgatgtttggcaagaaaacaaagcagagggcggtgcgagctaatgtgggtggagaggaaggatttgccatgcgaaacagtaggttttcctccttagttgaagtcccatgggaaggcgccaccacgatgtcagctctgttcgagatggccagcaaaaaatactctcgacggaggtgtcttggcacgaggaagctaatcaagagggaatttgtggaatcttctgatggtaggaagtttgagaaactgcaccttggtgaatacgaatgggatacgtacgccgaggcatttaaccgcgcatgtaattttgcttctggacttgtcaagatgggccacgacctagatagtcatgctgctatcttctctgatacaagagctgagtggatcattgctgctcagggatgcttccgacaaaatttgacggttgtaacaatatatgcatctcttggtgaggatgcattggtgcattcactaaacgagacacaggtttcaactctgatatgtgattcgaagcaacttaagaaaatacctgcaatcagctctaaattgcagagtcttaggcatattatctatattgaggatgaacctgtcgaggctgagacactgaaccaagtgaagcatctgacaacattgtctttcactgaagtagaggagttaggcaagacatctagtgttgatgcaaggttaccttcaagctctgatactgcagttatcatgtatacaagcggaagtactggtcttcccaagggtgtaatgatcacacatggcaacatggtggccacaactgcagcagtcatgacaatagtcccaaaacttggcatgaatgatgtttatctggcttaccttccattggctcatgtctttgaactagcaggagagactgtcatgctagcttctggtactgccattggatatggttcaacattgactatgactgatacatcgaacaagattaagaaggggacaaaaggagatgtttctgtactgaatcctactcttataatttcagttcctgcaattttggatcgtatcagagatgcagtgtttaagaaagttggtgagaagggtggcctgacaaaaaagctgtttgattttgcatataagcggaatcttgcatcaattgaggggagttggtttggatcctgggcaccggagaggatgatatgggataccattatttataaaccaatacgggcaatgcttggaggacgtgtaagatttgttctttgtggtggtgcacctttatcaggtgacacacaaagattcatgaatatatgtctaggtgtcccagtgggtcaaggctatggtttgactgaaacctgtgctggagcagctttcactgaatgggatgacacaagtgtgggtcgtgttggtccaccacttccttgctgctatgtgaagcttgtttcatgggaagaaggtggttacaagatttctgattatccgatgccgagaggagaggtcgtggttggcggacacagtataacaaaaggctatttcagcaatgaagcaaagacgaatgaagtatacaaggttgacgagaggggtatacgctggttctacactggtgatattggccagttccatcctgacgggtgccttgagattattgacaggaaaaaagatatagtaaagcttcagcacggagaatatgtgtctcttggcaaggttgaatcggctctagcaacaagtagttatgtggagagcatcatggtctacgccgatccgttccataactactgtgttgccctggttgttccagtacgccaggccctggagaagtgggctcaaaattctgggataaactgtgaaggctttgaagagctttgccaaaatggccaggcggttaaggaggttcagcaatcactatcgaaggccgcgaaagcagcgaggctggagagattcgaggtgccggcgaagatcgagctgctgcctgagccgtggacgccggagtccgggctggtgacggcggcgcttaagctgaagagggagcagataaaggccaaattcaaagacgatctggacaagctctaccactgaagaaaagcggggcttgcacccacgcgttcaggagcttgcgctgccaaaacgctgcctggatgcggaatggaacctactgacctgcacgagaccacgagtggtgtgtgtgtgtgtgtggatgtgtgtcggcgtcggtacagcaggagctgcttcttgtgtgatgaaaaataagccaaagtgttggttggaacgatcttgatttgtatagcttcacttaacttgcatgaaccctagctcgaaatcagttgaatctggatggaccggtcgataagagttgccgctatcggttttgatgcctcacgatggttgaagccgggcagccggcaattgtcggggcgttctctgagatggccatagtcgtcgcaatttgacctgtggatttagatatttgttggatatctaatccaatagataccagagccgggtatggatacatgtttttaccacagttttgatgtttttaccacagttttgatctgtggtcagactttaataaaatggctccctgtgctctgattgat

SEQ ID NO: 26091 - DNA, 2456 bp, Zea Mays
aatggaaccagtacctctattccattccaggctgcttcttcctgcgcgattcgacacggactcagaccctcacacgcctcctcaccggctcacgacgtcgccacctcagatccggcgaccgatcccctcctcctcggcgaggcgtagagccgagccggacaacacagccacgaccacgaggcgtcgtcgcggagtagtcggagccgtttctgctgcccccctccttcccgccaagtttgtcaagttacgtccgatgctccagacatagtagaaaaccatgggagaagttagtgatgacaattccaacctgtcctttctaaaaagaatcgcaacaagtgacgtaccgctgttgaaagagtatggtgtaaatggagttgtcgtcgctctgcttcttgctgtagttactcccgtcttgctttccatgatgtttggcaagaaaacaaagcagagggcggtgcgagctaatgtgggtggagaggaaggatttgccatgcgaaacagtaggttttcctccttagttgaagtcccatgggaaggcgccaccacgatgtcagctctgttcgagatggccagcaaaaaatactctcgacggaggtgtcttggcacgaggaagctaatcaagagggaatttgtggaatcttctgatggtaggaagtttgagaaactgcaccttggtgaatacgaatgggatacgtacgccgaggcatttaaccgcgcatgtaattttgcttctggacttgtcaagatgggccacgacctagatagtcatgctgctatcttctctgatacaagagctgagtggatcattgctgctcaggtaatcatatcatgtgtgccattgtatcagaacacctgttggaacttgtgaagctctctgactgtagtatcatcttttttcttctagggatgcttccgacaaaatttgacggttgtaacaatatatgcatctcttggtgaggatgcattggtgcattcactaaacgagacacaggtttcaactctgatatgtgattcgaagcaacttaagaaaatacctgcaatcagctctaaattgcagagtcttaggcatattatctatattgaggatgaacctgtcgaggctgagacactgaaccaagtgaagcatctgacaacattgtctttcactgaagtagaggagttaggcaagacatctagtgttgatgcaaggttaccttcaagctctgatactgcagttatcatgtatacaagcggaagtactggtcttcccaagggtgtaatgatcacacatggcaacatggtggccacaactgcagcagtcatgacaatagtcccaaaacttggcatgaatgatgtttatctggcttaccttccattggctcatgtctttgaactagcaggagagactgtcatgctagcttctggtactgccattggatatggttcaacattgactatgactgatacatcgaacaagattaagaaggggacaaaaggagatgtttctgtactgaatcctactcttataatttcagttcctgcaattttggatcgtatcagagatgcagtgtttaagaaagttggtgagaagggtggcctgacaaaaaagctgtttgattttgcatataagcggaatcttgcatcaattgaggggagttggtttggatcctgggcaccggagaggatgatatgggataccattatttataaaccaatacgggcaatgcttggaggacgtgtaagatttgttctttgtggtggtgcacctttatcaggtgacacacaaagattcatgaatatatgtctaggtgtcccagtgggtcaaggctatggtttgactgaaacctgtgctggagcagctttcactgaatgggatgacacaagtgtgggtcgtgttggtccaccacttccttgctgctatgtgaagcttgtttcatgggaagaaggtggttacaagatttctgattatccgatgccgagaggagaggtcgtggttggcggacacagtataacaaaaggctatttcagcaatgaagcaaagacgaatgaagtatacaaggttgacgagaggggtatacgctggttctacactggtgatattggccagttccatcctgacgggtgccttgagattattgacaggaaaaaagatatagtaaagcttcagcacggagaatatgtgtctcttggcaaggttgaatcggctctagcaacaagtagttatgtggagagcatcatggtctacgccgatccgttccataactactgtgttgccctggttgttccagtacgccaggccctggagaagtgggctcaaaattctgggataaactgtgaaggctttgaagagctttgccaaaatggccaggcggttaaggaggttcagcaatcactatcgaagaggcacaaaatctttctttcctagtaccagcagcaacaatcacccgcatttgaagccatctcaatttttcgtttac

SEQ ID NO: 26092 - DNA, 1753 bp, Zea Mays
aatggaaccagtacctctattccattccaggctgcttcttcctgcgcgattcgacacggactcagaccctcacacgcctcctcaccggctcacgacgtcgccacctcagatccggcgaccgatcccctcctcctcggcgaggcgtagagccgagccggacaacacagccacgaccacgaggcgtcgtcgcggagtagtcggagccgtttctgctgcccccctccttcccgccaagtttgtcaagttacgtccgatgctccagacatagtagaaaaccatgggagaagttagtgatgacaattccaacctgtcctttctaaaaagaatcgcaacaagtgacgtaccgctgttgaaagagtatggtgtaaatggagttgtcgtcgctctgcttcttgctgtagttactcccgtcttgctttccatgatgtttggcaagaaaacaaagcagagggcggtgcgagctaatgtgggtggagaggaaggatttgccatgcgaaacagtaggttttcctccttagttgaagtcccatgggaaggcgccaccacgatgtcagctctgttcgagatggccagcaaaaaatactctcgacggaggtgtcttggcacgaggaagctaatcaagagggaatttgtggaatcttctgatggtaggaagtttgagaaactgcaccttggtgaatacgaatgggatacgtacgccgaggcatttaaccgcgcatgtaattttgcttctggacttgtcaagatgggccacgacctagatagtcatgctgctatcttctctgatacaagagctgagtggatcattgctgctcagggatgcttccgacaaaatttgacggttgtaacaatatatgcatctcttggtgaggatgcattggtgcattcactaaacgagacacaggtttcaactctgatatgtgattcgaagcaacttaagaaaatacctgcaatcagctctaaattgcagagtcttaggcatattatctatattgaggatgaacctgtcgaggctgagacactgaaccaagtgaagcatctgacaacattgtctttcactgaagtagaggagttaggcaagacatctagtgttgatgcaaggttaccttcaagctctgatactgcagttatcatgtatacaagcggaagtactggtcttcccaagggtgtaatgatcacacatggcaacatggtggccacaactgcagcagtcatgacaatagtcccaaaacttggcatgaatgatgtttatctggcttaccttccattggctcatgtctttgaactagcaggagagactgtcatgctagcttctggtactgccattggatatggttcaacattgactatgactgatacatcgaacaagattaagaaggggacaaaaggagatgtttctgtactgaatcctactcttataatttcagttcctgcaattttggatcgtatcagagatgcagtgtttaagaaagttggtgagaagggtggcctgacaaaaaagctgtttgattttgcatataagcggaatcttgcatcaattgaggggagttggtttggatcctgggcaccggagaggatgatatgggataccattatttataaaccaatacgggcaatgcttggaggacgtgtaagatttgttctttgtggtggtgcacctttatcaggtgacacacaaagattcatgaatatatgtctagggtccatgttatcctgaatctcagtcattctcagttggattagttcatcctta

SEQ ID NO: 26093 - DNA, 1331 bp, Zea Mays
cactaggtttggtcgatttaaaaaacacggatttggatattataggaacaaacccgtacccatgaacccgtcgggtatagatttatgcccattaaccattaacaaactcatgtgtgtgaaaattggcccaaacacataccctaataggataaaaacccatcaggtttcgagtatccattaccatctctaccatcaacccaccaaaggacaccctggatctcaccagcctggccgactcaaatacagcatacaatcaggctgtcacagtactgcatgctacatagagaaagttcaggatcaagacaagggaatatggaaaatgtgtggagagttgcctgggcacgattgctggccttgtcgcttgcaatccaaaggggttgctgaattgatcctaggaattgcctccagtcccaggatgcatcaaatcatagcggaaaatacgtaatatatacgcatcataactagaacattttgaaaaactaaataaaactgtaccattttatgaactgaacaaagacgccgaactcggttctcggacaaggtgcacaaccttgagtacaagagaacacacaccatcaggaaaacatcattatgtaacaaacagccaacaaaacagaactaaattatgcgcacaaaagagtactccctagctctaatgagaagcggagtgcagccaaattctctcttctctccagtgaacaacgacttgtcactgcaagagaaaaacatggcagcacatctctaataatactactatgtgaagaaataaatggtgtcccctcaaacagagcataatccataaactaaaactagctattccaatcaaatatcatatgaaacgcatcacagccatgtctgccaagattatatcattctgactttatgtttacatgatctaaattaatagggttgattctgcattttttatctacaaaacatatggttttgcaaattgaaagttaagattctacggttgtgacagtacatgttttagaatcagtggttttaagaaccttgcatcaccaacctcgctaccaaaatgaacttccataatcaccaaagcaactaaactttggtaacaaaacagagagtatatgcaggttcataccataagacaggctgatcgatgaatagatgagcaatattgacttaccactcaattgtcacatttaacataaactcaagctagcaaatggagagtgaaaacattcaaaattgtactgtatacttgccttcacttagatttgtagagtttaaagacacatttcctatcaattccctagtggatcagagcaacaggtgcaagtcaagcaaaatcactttagaaggca

SEQ ID NO: 26094 - DNA, 1229 bp, Zea Mays
aactcggcttccttctcccacttcttaacgattcctccatctttcttgtgcccacaagcttcctcctccattttttttatctgctttttccccctcggctgttcctactcaggctgggcagcagagctagcagtggtccctggtgcttcaggcgaccggccatggtggagctggagcctagtgtgaagtcggagcatggtggaggagtcggcctggtcctgcctcctggcttcaggttccatcccacagacgaagaggtcatcaccagctacctcctgcacaagttcctgaaccctagcttcgcgccgcacgccatcggggaggtggacctcaacaagtgcgagccatgggatctcccaagcaaggcgaagatgggggagaattccaaggagtggtacttcttctgccacaaggacatgaaataccccacgggcacgcgcgcgaaccgcgccaccaaggagggctactggaaggccacaggcaaggacagggagatcttcaagccagctgcagggcgtgaccgtgaccgcgagctagtggggatgaggaagacgctggtgttctacatgggcagggctccgcgcggcaccaagaccaactgggtgatgcacgagttccgcctcgagggcaagtccaggcacacctgcaacgacctacgcttcaatcccaaggatgaatgggtcgtgtgcaaggtgcaccacaaaggggccgaagaggccagcgccgccaagaagtccgccggcgggggcggcgaggagcactactactccaccgcaacgcccaacgtcagctccgtcgaaggcggcgacgagttcctcgtcgactccctgctggattactccagctacttcaactgcttcgcaaccggtggcttgcctctgcccagcacgacggccaactcagccgcagcacctgcaacgaacgacgacgactcctcctggagcatgcttcgtcacgcgccggcagaccagcaagcaatggtggggagctacagcttgcaccaccaggcaatgaaggcgaaaactgtaggctattcacacttactgtacagttttaaaacaatgtcacatcaaattttgtttatggaaccgtgtacactgagtttcaactagatgcaactctctcatctctcatagaaatatctttatctatctccttattaaattcttattaccatatcatcctagttgattatgtgacagaaaatttaataaagatgaaactcaaat

SEQ ID NO: 26095 - DNA, 1382 bp, Zea Mays
aactcggcttccttctcccacttcttaacgattcctccatctttcttgtgcccacaagcttcctcctccattttttttatctgctttttccccctcggctgttcctactcaggctgggcagcagagctagcagtggtccctggtgcttcaggcgaccggccatggtggagctggagcctagtgtgaagtcggagcatggtggaggagtcggcctggtcctgcctcctggcttcaggttccatcccacagacgaagaggtcatcaccagctacctcctgcacaagttcctgaaccctagcttcgcgccgcacgccatcggggaggtggacctcaacaagtgcgagccatgggatctcccaagcgaagatgggggagaattccaaggagtggtacttcttctgccacaaggacatgaaataccccacgggcacgcgcgcgaaccgcgccaccaaggagggctactggaaggccacaggcaaggacagggagatcttcaagccagctgcagggcgtgaccgtgaccgcgagctagtggggatgaggaagacgctggtgttctacatgggcagggctccgcgcggcaccaagaccaactgggtgatgcacgagttccgcctcgagggcaagtccaggcacacctgcaacgacctacgcttcaatcccaaggatgaatgggtcgtgtgcaaggtgcaccacaaaggggccgaagaggccagcgccgccaagaagtccgccggcgggggcggcgaggagcactactactccaccgcaacgcccaacgtcagctccgtcgaaggcggcgacgagttcctcgtcgactccctgctggattactccagctacttcaactgcttcgcaaccggtggcttgcctctgcccagcacgacggccaactcagccgcagcacctgcaacgaacgacgacgactcctcctggagcatgcttcgtcacgcgccggcagaccagcaagcaatggtggggagctacagcttgcaccaccaggcaatgaaggcgaaaactgtaggcggcgtcacctccccgagtttctccgctggtttgccgagctcgccggtggcggactacgtgggaaacgatgcttctggctaccatacaaacaactattaattaacgatggatgatgagccgctgccgaaaatatagtgatccaataggtggtgttaggctattcacacttactgtacagttttaaaacaatgtcacatcaaattttgtttatggaaccgtgtacactgagtttcaactagatgcaactctctcatctctcatagaaatatctttatctatctccttattaaattcttattaccatatcatcctagttgattatgtgacagaaaatttaataaagatgaaactcaaat

SEQ ID NO: 26096 - DNA, 3695 bp, Zea Mays
cttgttcctgtctcggcggcgtcttcttctttactcccggtttccctccctcgtcgccgtccatctgctatctcaggcgctcagccaactgactccactgacccccaactccgctgccgactgccgagcccggactggctgactgggtgcgcgcggcgcggtggtgcatcagcagcccgcgcggcgccaaaacacacaaactgctccctccctccatcctatccccccacgctgggtcgcccgatctgcatgcgcacggcggcttcctcttggcgtttctagatgggctcctcctccgtcctcctcttcccctcgtcctcctccgccgcaccctccgccccccattcctttccccactctcatgccaccgccatcgcctcctcccactccttattgccgccgctgccctgctccaaccccccgcctcctctttcctcgcaagaccacgtcctcatccactacatccaccagctagacgagcaagaagccgccaccatggtccgcaagcgccccgcgcccgacatggacctcccgccgccgcgccgtcacgtcacgggcgacctctccgacgttacggccgcagccgccgccggtggtggtcctggcgcgccgtcctccgctagcgcgcagctacccgcgctgcccacccagctccaccagctgccccccgcgttccagcaccacgcggcggaggtggacgtgcccccgcaaccgcacccgccggcccattcgcaggcgggcggcgaggcgcccgcgtccacgaccgcgtgggtggacggcatcatccgcgacatcatcgggagcagcggcggcggcgctgtctccatcacgcagctcatccacaacgtccgcgagatcatccacccctgcaacccaggcctcgcgtccctcctcgagctccgcctccgttcccttctcgccgccgaccccgccccgctgccgcagcagcagcgcgctctcctgcacggcgctccggccgccgccgcggggctggcgctccctctcccgccaccgcttcctgacaagcgccgccacgagcctgcgccgcggtgccagcagcaacagcaggaggagccgcatccggcgccgcagtcgcccaaggtcccgaccgccgaggagaccgccgcggcctcggccgccgcggccaaggagcggaaggaggtgcagcggcggaagcagcgcgacgaggagggcctccacctgctgacgctgctgctgcagtgcgcggaggccgtgaacgcggacaacctcgacgacgcgcaccagacgctgctggagatcgcggagctggccacgccgttcggcacctcgacgcagcgcgtggccgcctacttcgccgaggccatgtcggcgcgcgtcgtcagctcctgcctaggcctgtacgcgccgctgccgccgggctcccccgccgcggcgcgcctccacggccgcgtggccgccgcgttccaggtgttcaacggcatcagccccttcgtcaagttctcgcacttcaccgccaaccaggccatccaggaggcgttcgagcgggaggagcgcgtgcacatcatcgacctcgacatcatgcagggcctgcagtggccgggcctcttccacatcctcgcctcccgccccggcggcccgcccagggtcaggctcaccggcctgggggcgtccatggaggcgctcgaggcgacggggaagcgcctctccgacttcgccgacacgctcggcctgcccttcgagttctgcgccgtcgccgtccactggctgcaccactcgctttacgacgtgaccggctccgactccaacacgctccggctcatccaaagctgctaacactcgtatgacattgggtaatgtgagccttacggcaagcatcaagtggtggtagtagatccagtacagctattctaaaatattcttcggacgtttcctgctcatagtaaaaaaatcgcgttttcaagctcaaaaagcgatttcttcagaggtttgctgttgagcgctattttggaaaccccattttctcaattaatttttagtttttaaagaaaaattagttcattttttctcttgtgaaatggagtcccaaactaaccctaatattaaaaaaaaaatcgcgttttggagctcaaaacgctcgttgttatgaccaaccagctttataggtttaaaaaggttgaatcttgacaatgcttttaaaaaggttgaatcttgacaattcttttgaaaaggttgaatcttgacaatgcttttgagatgatactgtagtgtagtctgtagtggagcatcctccatggtctttggtgatcccaccgaaccacaaaagatagatttcgcttgcatttggtgtgtggatcactaggagggagctgaaagtttatcatcatggccaactttccatgccaaaaggtttctggttccaagtgccaggacgaccatggttactgactgaatggaacaactgccatcttctactactaatcatcatttgttaacacgctacaactcgatcatcatcatgaccatcatcaggaagctacactcagaaaggcttgtcaaaggctagtcttttctccaatggctgacatgccagattgccagcagcacacatatgcatatctcatctgaagcatgagataaacatgtaccctgaactgcaatgcccttgatttgatgtatcattaaaaacgctagcattgtcgttctggtacagtggcattgccaccagcgattacagaaccgaatggttgtcacaaaacgcacatcctgactgactgacggctcccgctgttggggttggaccacggggactgttgatcgattccttccttccttccgtccgtccgtccacctgcaggctggcccccaaggtggtgacgatggtggagcaggacctgagccagtcggggtcgttcctggcgcgcttcgtggacgccatccactactactcggcgctgttcgactcgctggacgcgagctacggcgaggacagccccgagcggcacgtggtggagcagcagctgctggcgcgggagatccgcaacgtgctggccgtgggcgggccggcccgcgccggcgccggcggcgccaggttcggcagctggcgcgaagagctcgcgcggtctgggttccgcgccgcctcgctcgccggcggcgccgccgcgcaggcgtcgctgctgctcggcatgttcccctccgacgggtacacgctggtggaggagaagggcgcgctcaggctcgggtggaaggacctctgcctgctcaccgcgtcggcgtggcggcccgtccagacgccgccgtgccgttgagagctgaaatcgttgttggttacccagccagtggtagatcttcttcgtactatactcctgcttgagtttcttgtgccacttcttttgcatctgtagctagctagctggctgctcgatttggtcgtcagttccgagatgggaaaacgaaaacatctcttctcgtcactaatcgctagatccattcacagtgatagttactgatgtaagcctactaattagtttaatggcagatcaaccttgtttagcctaattagttacttggtactactgttctttatttggtggagttccaccatttcatatgtgggcatgagctgaggtcaaggctgtctacaacagctattctattttagctcgtatcatatcttctattttaatttaaacgctgcattctacagtataaaacaa

SEQ ID NO: 26097 - DNA, 1611 bp, Zea Mays
caaattcccttctccctcacgtctctttctctccccaagccgccgcctccctgccgttccgtggagcaccaggccagtgccgttccgatggtcattccaagccagtgccattctcctttggccgtccctgctccagccgtgagctcacccaggccacggcctcgtcgaaccgcacagcccctgcgctccttccccagccgcgcttagccctatcctccctgctcgatctccttcgagccgtaacggctccctggcgtgtccggctccctgcccctctccatggcgtcgcccagctctagctcgccccccctctgatctgtgcgcaggggtttcttccatggcgagctcccctgcaaacttcatctagccgccggccgagtttctttggtggtcgcttacccccagcatcggccagagcttgctgtcattccccaacaaacatgtggttgtaggtgagagatttcagaagtctgttggacgaagaaaagagaagtgaaatttgtgcagcgcccgtcaggtgttaggtttaatagatattgtgtctaccgtgtgagggaatcgtgccagcttcctttgggtttgggactgggagctccatcgctctatgatgggtcggcagttttagtgtctcacacgcagtggccacgggatttttcaagtcacttggtcgtggaagggcttcttattgcagtcatagtgttccagctctccaggaagagctacaaaccaccaaagaagccactcactgaaaaggagattgatgagctatgtgatgagtgggagccagagctgctatgccctccaatcaaggagggggccacaatagatgctccaacattggaaagtgccgttggaccacatacgattgttgattgttgatggtaaagaagttgtgaactttgcatcagcatgaggtctggagtctagacacagcattgcaaactgaggtttaatcatcttagcaactacggtacgtgaccctgagcgcgtgattgttgcgaaacaacgaccacctcggtctacaccttaaaggtttgcgcgacatggcttttcatagtgctcaattggatctatcccctgagcataggagaaaagtatcaatctgtacagtggatccaagtattctataaagcatgtatcctccaatttcccacaagcgagaatggcatgatatgatggatgaaatggctgttgcggtcaattgtctttcaaggatcaattgtctttcaagaaccacacttatgtattggtttgtgtgcagttcaagctctgcaaggtgaggtctgttcagtttggccagaaagtcatcccctacctgaacacctacgacgaccgcaccatccgctaccccgaccctctcatcaaggccaacgacaccatcaagatcgatctggagaccaacaagatcatggacttcatcaagttgtatttgccctttcatagacttcatcaagttatatacttagttaggctcaatgttagcacaaacagttgatgagcaagtttaaatttagagtacacttatgtatgagttattatttgacaatacttatttatgagatattgaatattatttatctatattatattaattatagtgttattaaatat

SEQ ID NO: 26098 - DNA, 1250 bp, Zea Mays
caaattcccttctccctcacgtctctttctctccccaagccgccgcctccctgccgttccgtggagcaccaggccagtgccgttccgatggtcattccaagccagtgccattctcctttggccgtccctgctccagccgtgagctcacccaggccacggcctcgtcgaaccgcacagcccctgcgctccttccccagccgcgcttagccctatcctccctgctcgatctccttcgagccgtaacggctccctggcgtgtccggctccctgcccctctccatggcgtcgcccagctctagctcgccccccctctgatctgtgcgcaggggtttcttccatggcgagctcccctgcaaacttcatctagccgccggccgagtttctttggtggtcgcttacccccagcatcggccagagcttgctgtcattccccaacaaacatgtggttgtaggtgagagatttcagaagtctgttggacgaagaaaagagaagtgaaatttgtgcagcgcccgtcaggtgttaggtttaatagatattgtgtctaccgtgtgagggaatcgtgccagcttcctttgggtttgggactgggagctccatcgctctatgcggcggtgctcgcccgtgtctcagctgccttcaatggcccccttgcccgcgcagtcgtctttggggtccatattgatggtagtccctctttctttgtgtgttcacaagatgggtcggcagttttagtgtctcacacgcagtggccacgggatttttcaagtcacttggtcgtggaagggcttcttattgcagtcatagtgttccagctctccaggaagagctacaaaccaccaaagaagccactcactgaaaaggagattgatgagctatgtgatgagtgggagccattgtggttgttgttgcatgagtaatcctacatatcatttcatatatggattaaccggatggtctcactcttgaaactgtgggagtgttggtgcaattcttatactagtttcacttaacttaatagtgccatgtgtggggacctattaatcttgaacatttactcgctagattatatgacatttaaaccatgtactcgtgattaaccagcaagggacaccttgaaccacatagaatatcatttacccttgctacccaaatgcttacatggctacatgcttcttggattgtattctctcttctctgatatcagtatgatcatcaaagcacctaaaatgtgctgctgtatgtatatagc

SEQ ID NO: 26099 - DNA, 1149 bp, Zea Mays
gatccaaaaaaaaacatcaccaattacatttccaaacattgtcagtttaccatcgcgcatcatgtggtcacacgattgttcttccctactataccaggatgccccaaacaagagaaaacttgccaagagactcgatacagactgattgattcctcagatacaacacaacacaacagcagcatatgccatatcagccatccaaccgctctcggttcagcctttcatttcatttctagggttaatcccgaacccgccagtttcagcagggctcgctcagtcgaaggatacataagaccacagtgaaaattagagggccttacaaaagcagcagcagcaatgcagcacgcagatcaaatttacacatcaaaacgcaggccaaaacccgagaagaaaccgaaaccccgccgccgccaagcacacacatgcacccacacacacaccactgcccacggccgcaatatacacaacggaacctaccccggcagctccaaccgaaacacagcacccatcaccgcactcggcaagccgtggccgggacggcaggggagcacttggggttcgggatggccctgaagtggacgctgttcccggttatcctgcggcgacccctatagtcaggaaggccagaaggctggccgcgtccatcgcctccaccgctgccctgcaacggttcgagggtctcgacgacgtcgctcatgagtggcctggccttggggttctggctcaggcagtagaacgcaaggctgcaggctttgtgggcggctctggccgagtactgcccctccagtctcgggtcgatgatctggagaagccgcctcttgtcgttcagcttggggagggcccagtcaaccaggctctgctccctgctgggccgcgacttgtcgattgacttgcgccctgtcaagagctccagaaggaccacaccgaagctgtagacatcacttctagcagtcaagtggcctgcacattaggtatcattaagtgtaggtgtgatggtatatgtgatatcagatcatgcattaagaataatacgtttttttcctggttataagacattgctacaaagttactatattcagataatgaaagacatagcataggaagtggcaaaatatgtgatctcagctcatggagtacaaacaatagttc

SEQ ID NO: 26100 - DNA, 1289 bp, Zea Mays
ctttctcttgctttttgctccatcctaagtatggctgagaccgccagacctgagaggaccaggcaagagaggcggcggggagtcaagggccccaagctttctctccccctcgggaacatacctgagatgaggaggattcaggggcagctggccggatctgaccaccaggaggaggagcagcagcagcggggacgcgacaacggtcgcttctcctccaaaaatctggggaacgtgtcttatctaatggaggaggccgtaaccctcagtcgcttgttgatgttgatggggaccatgggtctgcaacagctactcaagaaataggtgccccaaagagagccaagtggatccatgagaggaagttgttccttattcagctactaaaggatcacaatgtgccgggttttagaacacaaaatgcttggagtaaggaggcatggaacaacattgttcgtcgcttgaatgaaaaatttggtacatcgtatactattggccaagtcaaacagaaggagcaagatttgaagaaagattatcgcagtgttaaagaattggtggagcaaagtggttttggatggaatggtgagagaatgatggtggaagcaccagatagtgtttgggcatcttttgctgctcgcaagaataacaagtcagccctccattggagagacaagtcattcccatactatgatgatttatcaaagctgtatgatggtcgttatgctgaaggaagaactcgtcaaggtatggatcattatgcaaacaagacgaagaaagcatcagctcctggaggacaagcaacaactgtagcagaaacatatcagtcaccatctcctactttaaatggtgtagatgaattgggattgcaattttcttttgatgaagaaattgagggaaatttgggcttatcacaatacccatctgctcaggttcatgaaaaggaagtcccacctagttccacacaaataacttcagagcttcctgattctcgacgtggaaagaagaaaaaaaacaaatctgctagccctcctgatggatttcatgaaagatacctaaaactaaagaaagaagaaatagatcgatttgatgccattgaagagaagaaattggaagatccttacagcatcaacaagtgtattactgtgcttgaagatttggatggtctgcaagtgggagatctattgatggcatctgatatattcaagattaaggataacatggaagtattcttatcatttaaaaatgacgcattaagattagcttggattacaagcgagattgcatctctagagtaa

SEQ ID NO: 26101 - DNA, 4969 bp, Zea Mays
gtaagcttgaatccggctattccatacgtgaagagacaatcgcgcactgggagtggagagatggcgggagtatcatgtaccctcctggcacagcgcacgcctggtaggtaatgtgctctcgggtggcgcggacctgttcatgtagtggaggactccgtgggaacggttgacatatgcaagggttaagtgctacatatgtcgtgtggttagagatccccagctgggtataatcggttcgaatcgtcgttgctcctcggttatggagactcatcccggtgaccatcatcgtagttagcaagtgaaatatgagaatgaataaaatacagctagtataggctaagtgcttgaactagaccaggcaaatatagattcaggtaataacctaactagtgaaataaaacttggcttaaggatcaactggtagcaagcttttctgcaaaaaaaaggagctttgatcattgataaactttaccttgattcccaatcagttagcatacccttgagagtcctttctttagtcgggtaagtcttgctgagtaattgcgtactcagggttttatcccctgttgtttttgcaggagaagttttattcccttatcttttggttagttacttcatgtggaggccttgaagcttagaatgttatgtgtatctcttatggaaaggcttcacccttccaattgttataataagttatgcactttgggtactatcaggacttgtaataattaccattcttcttatgttgtaaaacttgagctttggaaatgtaaaatatgttttgagaagtattccgctctatctccgaagtgtgtgtgtatcgagtgtgattactgtaatatgcatgaatgtgggagatccttgggatgatgagttccagttggcgaactcgatagccttgttaagttacccggtacacgtgcacagccacccgaggccattaaggcaaggattggtgcacgtgggcccgataacttgggagagctgtcacaaccaaccccgtgcaacatcagcgcacgaagcatgtggagatcgacctgcacttcgtccgcgagcgtgtcgctgccggcgttttttccggttctcagcgtccccaccacgctgcagttcgccgacatcttcaccaaggggttaccgtcgagtgtatttttagactttcgatccagtctcaacatctgtacaggatatagttgtgactgcgggagggtgttagaatacccgtttagggcttgttcggttctaccccaatccatatggattaagggggattgagagggttccaatccctagtaagttaaaatctcccccaatccgtatcaatcccctccaatccatatggattgaaaataaccgaacaagcccttagggtttgggatcttccccgtgtaatgatcatctcactcctctgtaatgggcctggcccagtttactcagcctattaatacatcactgttagggttaggggtttactattccaatacattggacaacggccctattattttcttcatcagaaggctaatagttatactccaacattaatttctcagtaggcaccgcaccaccaccaaccaaatatatagcatggatatccatatcccactatccatgaccgtcgaaccaaacgcatgccactgtcagtcttcggtattcttcatgtgacagagagagggggggaaagctgaaatgaaaatgaactatatatgttagtgtcaatacaatgtttacagctcccatttctgagtcgtaattcaacatgcaggagtagtgaaagatttgaaacttaccagtataccgacaatatgatcaattttgaccaagagactaccaacattgtggtattaataattgtcactatactagatatgaacaaatttacaacaataatatgcaatatccatacaccataacaaaagaatatgacaaaactaaattgctgcaaatatttccaacttctctgagaaactgatgaaactatttgatgccaagatgccaacttgccttcagatcataggaagggcttctacagttcagatcataggaatggcttctactgacattgccgagagctcagttgacacttgacacagtgcgtcgggtgtacataaagacagccaatgaccacatggtgaagccggagcaccaggacgaggcggtgattcgactgtggctgccgagcaaggtggtggtaatggacacttgaccacagccctttctcctccacgccggagcgagctgatcctcaagtcattgtgatctgtaagcgatggtgtatcgtagtcccgttggaggttccacctgttctgttctttcagtggtgctatatgtaagccaatcaagttatcattcatctatcaatataaaaaaaaggaggaaaaaccatgaggtgagaaggctaaatatataccactctcagtcacacacaaggaaagaaaggaggaaaactagctggtccacacactatatcccgatcatctaccatattaggcaactctgcatgccagaaatgcaggctcctccagtcctgagaccctctatttacaataggaatcaccggaagccttgtcggtttgacataatttggattgtccacgaaaatgcagctcccctgcctcatgcccatcaaatcgttaaacttgttagatcggtaggcagagagaggccagactgatgggaatggcagcgaaggagcactttgtgcttgttcatggtgaagggcatggagcctggtgctggttcaagctccgctggctccttgagggtgctggctaccatgttacatgcattgacctagccggaggcggcgtcgatcctactgaccccaacacaatccggtcgttccagcagtacgacaagccactcatagacctcatttcaaccttgccggagggggagaaggtacgtgtattcttccttttttgccaacacatttaatataagtggtaattaggtaatatgttggcataatctataatatcattactacgggttgcaatgtaaatgaccagaagccaaatgtttcatgccattttgaataaaaggtgtattagattgcacaaaagtaggtgcaacctattttaaataaatcttaaaacatgtgcttaagtctgctagatgtatctatcttcttgtatttccccattgtataattggtttactgtatattttccctcctgtaccggtgtatatatatatcggccttagtgtctcataatgaatgcaaatgctattcataacaaagtcatgatccttgacattttatctaggataacacctgaaaaataccttatacctgtgttctacaagaaaaagttggaaattatgtgaccccagcaaacgtacataaggaagtcaaggatctatttaagaataatgttgaaaattgatgaccatgcatgctaacccatttcagtcctattctaggtgattctaatcggacatggtgctggagggctgagtgtgattcatgcaatgcacgaatttgttgacagaatcagccaagcattttttgtggcagctacaatgctaccatttggatttcaagctgatgaagataagaaagatgtaatgttttgaagagtttgtttgtcctctttataaagcatagatctcctggcaaatgataaaaaaaatataagccatagactacacatcaaacaaacatatacatacagtgcaaacattaaggtttttattatagaaaaggaaatgtaataactcatatgagcatgggtccacctagttgcagtagctactaaaatgtgtttgatcaaaagtagggtaatacggtggataatgtcaactaggaacctagttacctaaaagactgactcactgttagcatagtcaaatgcatagtagacaagaaagagaaagttgacggaattttagaagaactctgaaacgactatatgaacttaccttaggtcgtggtgaattcactgcaactaatcttctgttacaatacaatgtatgattattacatacttcttatattaacatgtaacaggggttaccaactttgcctgagaacgagattgagttgacacttggtgcgggagcagatgatcctccaacaaccatttccttgaggccagaattccagcgtgatcgactatcacaacaaagccctgaagagctatcagtacagcaagcttcgaaggagatgatgaaagattgaaccgaatcaaacgaattttcataaagatgcagcgtgaccacatgctggatcctcaacagcaagattccatgatcaagaagtggccacccagcgaggttttggccatagatacagatcacagtcccttcttctctgcaccagaacagctgtttaatttaatagtcaaatctctatgatgcataaatgcagaaagctacagactggggttgcccggattcttgtaacactacccacaaacaataatcaccacaagatttacgacctcagatttgtcaaacatgcttctcagtgattcttcaagtcatatctgcaaatgtggtttaatgatgcaagactgcaagtaaaacatcgcttagcgcaaacacttaccttcagttttttgaacaattcactaaagtcagagccttataatttccattccaaaagttcttacatgtctggataaaaatatgtaaaatatagatgctactttggaagcacttttaactgcaccggtgatggataagaatatgtagttttggccactcgttgttaatctaactgatacgtttaaagagttattatttttctcttttgagtaattcaagagttcttgttttcatcaaatataaaggaagcaaacttctgacaccctaaaagttctcagataatgaacaatagaattttcacttcaaatagtttcataatatacaatcgcctcatgacgtgtaaaggatcatacaccgtttatacgtgacaaagaaattattacttcatttgtataaggatattgttggaatgcaattcggt

SEQ ID NO: 26102 - DNA, 2452 bp, Zea Mays
agcttctcccgtgtgccgtcttgttttgcttcgcattgccggctttcttgcctccagcagcgaacgcactgccatccttgcttggcctcacatcctccgcagctgggcgtcaccaggacgctatgcacgctgctcccgcatctggagctcgcccaccctactcgctcatcgtctgaccatgcgcactcgctgtcggtcgcgctcggctgctcgtcgttgtcctgcctcctcgtccacgccgcagtcgtcatcgaccctctccaacctcgtctgcgttgcgacctccatcctgcctgctcgcgttttccccctctgctcaaacgtcggcgcccgtggtgaagaacacctagaagaagtggtgtttgaagaagaagcctgctccaagtactattgatccagtggtggactccatctaactgcctatcgtgatagaagatctcaggtctcctcctgtaataagatcataggaagggcttctacagttcagatcataggaatggcttctactgacattgccgagagctcagttgacacttgacacagtgcgtcgggtgtacataaagacagccaatgaccacatggtgaagccggagcaccaggacgaggcggtgattcgactgtggctgccgagcaaggtggtggtaatggacacttgaccacagccctttctcctccacgccggagcgagctgatcctcaagtcattgtgatctgtaagcgatggtgtatcgtagtcccgttggaggttccacctgttctgttctttcagtggtgctatatgtaagccaatcaagttatcattcatctatcaatataaaaaaaaggaggaaaaaccatgaggtgagaaggctaaatatataccactctcagtcacacacaaggaaagaaaggaggaaaactagctggtccacacactatatcccgatcatctaccatattaggcaactctgcatgccagaaatgcaggctcctccagtcctgagaccctctatttacaataggaatcaccggaagccttgtcggtttgacataatttggattgtccacgaaaatgcagctcccctgcctcatgcccatcaaatcgttaaacttgttagatcggtaggcagagagaggccagactgatgggaatggcagcgaaggagcactttgtgcttgttcatggtgaagggcatggagcctggtgctggttcaagctccgctggctccttgagggtgctggctaccatgttacatgcattgacctagccggaggcggcgtcgatcctactgaccccaacacaatccggtcgttccagcagtacgacaagccactcatagacctcatttcaaccttgccggagggggagaaggtgattctaatcggacatggtgctggagggctgagtgtgattcatgcaatgcacgaatttgttgacagaatcagccaagcattttttgtggcagctacaatgctaccatttggatttcaagctgatgaagataagaaagatgggttaccaactttgcctgagaacgagattgagttgacacttggtgcgggagcagatgatcctccaacaaccatttccttgaggccagaattccagcgtgatcgactatcacaacaaagccctgaagagctatcagtacagcaagcttcgaaggagatgatgaaagattgaaccgaatcaaacgaattttcataaagatgcagcgtgaccacatgctggatcctcaacagcaagattccatgatcaagaagtggccacccagcgaggttttggccatagatacagatcacagtcccttcttctctgcaccagaacagctgtttaatttaatagtcaaatctctatgatgcataaatgcagaaagctacagactggggttgcccggattcttgtaacactacccacaaacaataatcaccacaagatttacgacctcagatttgtcaaacatgcttctcagtgattcttcaagtcatatctgcaaatgtggtttaatgatgcaagactgcaagtaaaacatcgcttagcgcaaacacttaccttcagttttttgaacaattcactaaagtcagagccttataatttccattccaaaagttcttacatgtctggataaaaatatgtaaaatatagatgctactttggaagcacttttaactgcaccggtgatggataagaatatgtagttttggccactcgttgttaatctaactgatacgtttaaagagttattatttttctcttttgagtaattcaagagttcttgttttcatcaaatataaaggaagcaaacttctgacaccctaaaagttctcagataatgaacaatagaattttcacttcaaatagtttcataatatacaatcgcctcatgacgtgtaaaggatcatacaccgtttatacgtgacaaagaaattattacttcatttgtataaggatattgttggaatgcaattcggt

SEQ ID NO: 26103 - DNA, 3443 bp, Zea Mays
ggcaccacgctcagccccagcagcttctcccgtgtgccgtcttgttttgcttcgcattgccggctttcttgcctccagcagcgaacgcactgccatccttgcttggcctcacatcctccgcagctgggcgtcaccaggacgctatgcacgctgctcccgcatctggagctcgcccaccctactcgctcatcgtctgaccatgcgcactcgctgtcggtcgcgctcggctgctcgtcgttgtcctgcctcctcgtccacgccgcagtcgtcatcgaccctctccaacctcgtctgcgttgcgacctccatcctgcctgctcgcgttttccccctctgctcaaacgtcggcgcccgtggtgaagaacacctagaagaagtggtgtttgaagaagaagcctgctccaagtactattgatccagtggtggactccatctaactgcctatcgtgatagaagatctcaggtctcctcctgtaataagatcataggaagggcttctacagttcagatcataggaatggcttctactgacattgccgagagctcagttgacacttgacacagtgcgtcgggtgtacataaagacagccaatgaccacatggtgaagccggagcaccaggacgaggcggtgattcgactgtggctgccgagcaaggtggtggtaatggacacttgaccacagccctttctcctccacgccggagcgagctgatcctcaagtcattgtgatctgtaagcgatggtgtatcgtagtcccgttggaggttccacctgttctgttctttcagtggtgctatatgtaagccaatcaagttatcattcatctatcaatataaaaaaaaggaggaaaaaccatgaggtgagaaggctaaatatataccactctcagtcacacacaaggaaagaaaggaggaaaactagctggtccacacactatatcccgatcatctaccatattaggcaactctgcatgccagaaatgcaggctcctccagtcctgagaccctctatttacaataggaatcaccggaagccttgtcggtttgacataatttggattgtccacgaaaatgcagctcccctgcctcatgcccatcaaatcgttaaacttgttagatcggtaggcagagagaggccagactgatgggaatggcagcgaaggagcactttgtgcttgttcatggtgaagggcatggagcctggtgctggttcaagctccgctggctccttgagggtgctggctaccatgttacatgcattgacctagccggaggcggcgtcgatcctactgaccccaacacaatccggtcgttccagcagtacgacaagccactcatagacctcatttcaaccttgccggagggggagaaggtacgtgtattcttccttttttgccaacacatttaatataagtggtaattaggtaatatgttggcataatctataatatcattactacgggttgcaatgtaaatgaccagaagccaaatgtttcatgccattttgaataaaaggtgtattagattgcacaaaagtaggtgcaacctattttaaataaatcttaaaacatgtgcttaagtctgctagatgtatctatcttcttgtatttccccattgtataattggtttactgtatattttccctcctgtaccggtgtatatatatatcggccttagtgtctcataatgaatgcaaatgctattcataacaaagtcatgatccttgacattttatctaggataacacctgaaaaataccttatacctgtgttctacaagaaaaagttggaaattatgtgaccccagcaaacgtacataaggaagtcaaggatctatttaagaataatgttgaaaattgatgaccatgcatgctaacccatttcagtcctattctaggtgattctaatcggacatggtgctggagggctgagtgtgattcatgcaatgcacgaatttgttgacagaatcagccaagcattttttgtggcagctacaatgctaccatttggatttcaagctgatgaagataagaaagatgtaatgttttgaagagtttgtttgtcctctttataaagcatagatctcctggcaaatgataaaaaaaatataagccatagactacacatcaaacaaacatatacatacagtgcaaacattaaggtttttattatagaaaaggaaatgtaataactcatatgagcatgggtccacctagttgcagtagctactaaaatgtgtttgatcaaaagtagggtaatacggtggataatgtcaactaggaacctagttacctaaaagactgactcactgttagcatagtcaaatgcatagtagacaagaaagagaaagttgacggaattttagaagaactctgaaacgactatatgaacttaccttaggtcgtggtgaattcactgcaactaatcttctgttacaatacaatgtatgattattacatacttcttatattaacatgtaacaggggttaccaactttgcctgagaacgagattgagttgacacttggtgcgggagcagatgatcctccaacaaccatttccttgaggccagaattccagcgtgatcgactatcacaacaaagccctgaagagctatcagtacagcaagcttcgaaggagatgatgaaagattgaaccgaatcaaacgaattttcataaagatgcagcgtgaccacatgctggatcctcaacagcaagattccatgatcaagaagtggccacccagcgaggttttggccatagatacagatcacagtcccttcttctctgcaccagaacagctgtttaatttaatagtcaaatctctatgatgcataaatgcagaaagctacagactggggttgcccggattcttgtaacactacccacaaacaataatcaccacaagatttacgacctcagatttgtcaaacatgcttctcagtgattcttcaagtcatatctgcaaatgtggtttaatgatgcaagactgcaagtaaaacatcgcttagcgcaaacacttaccttcagttttttgaacaattcactaaagtcagagccttataatttccattccaaaagttcttacatgtctggataaaaatatgtaaaatatagatgctactttggaagcacttttaactgcaccggtgatggataagaatatgtagttttggccactcgttgttaatctaactgatacgtttaaagagttattatttttctcttttgagtaattcaagagttcttgttttcatcaaatataaaggaagcaaacttctgacaccctaaaagttctcagataatgaacaatagaattttcacttcaaatagtttcataatatacaatcgcctcatgacgtgtaaaggatcatacaccgtttatacgtgacaaagaaattattacttcatttgtataaggatattgttggaatgcaattcggt

SEQ ID NO: 26104 - DNA, 3016 bp, Zea Mays
ggcaccacgctcagccccagcagcttctcccgtgtgccgtcttgttttgcttcgcattgccggctttcttgcctccagcagcgaacgcactgccatccttgcttggcctcacatcctccgcagctgggcgtcaccaggacgctatgcacgctgctcccgcatctggagctcgcccaccctactcgctcatcgtctgaccatgcgcactcgctgtcggtcgcgctcggctgctcgtcgttgtcctgcctcctcgtccacgccgcagtcgtcatcgaccctctccaacctcgtctgcgttgcgacctccatcctgcctgctcgcgttttccccctctgctcaaacgtcggcgcccgtggtgaagaacacctagaagaagtggtgtttgaagaagaagcctgctccaagtactattgatccagtggtggactccatctaactgcctatcgtgatagaagatctcaggtctcctcctgtaataagatgccaacttgccttcagatcataggaagggcttctacagttcagatcataggaatggcttctactgacattgccgagagctcagttgacacttgacacagtgcgtcgggtgtacataaagacagccaatgaccacatggtgaagccggagcaccaggacgaggcggtgattcgactgtggctgccgagcaaggtggtggtaatggacacttgaccacagccctttctcctccacgccggagcgagctgatcctcaagtcattgtgatctgtaagcgatggtgtatcgtagtcccgttggaggttccacctgttctgttctttcagtggtgctatatgtaagccaatcaagttatcattcatctatcaatataaaaaaaaggaggaaaaaccatgaggtgagaaggctaaatatataccactctcagtcacacacaaggaaagaaaggaggaaaactagctggtccacacactatatcccgatcatctaccatattaggcaactctgcatgccagaaatgcaggctcctccagtcctgagaccctctatttacaataggaatcaccggaagccttgtcggtttgacataatttggattgtccacgaaaatgcagctcccctgcctcatgcccatcaaatcgttaaacttgttagatcggtaggcagagagaggccagactgatgggaatggcagcgaaggagcactttgtgcttgttcatggtgaagggcatggagcctggtgctggttcaagctccgctggctccttgagggtgctggctaccatgttacatgcattgacctagccggaggcggcgtcgatcctactgaccccaacacaatccggtcgttccagcagtacgacaagccactcatagacctcatttcaaccttgccggagggggagaaggtacgtgtattcttccttttttgccaacacatttaatataagtggtaattaggtaatatgttggcataatctataatatcattactacgggttgcaatgtaaatgaccagaagccaaatgtttcatgccattttgaataaaaggtgtattagattgcacaaaagtaggtgcaacctattttaaataaatcttaaaacatgtgcttaagtctgctagatgtatctatcttcttgtatttccccattgtataattggtttactgtatattttccctcctgtaccggtgtatatatatatcggccttagtgtctcataatgaatgcaaatgctattcataacaaagtcatgatccttgacattttatctaggataacacctgaaaaataccttatacctgtgttctacaagaaaaagttggaaattatgtgaccccagcaaacgtacataaggaagtcaaggatctatttaagaataatgttgaaaattgatgaccatgcatgctaacccatttcagtcctattctaggtgattctaatcggacatggtgctggagggctgagtgtgattcatgcaatgcacgaatttgttgacagaatcagccaagcattttttgtggcagctacaatgctaccatttggatttcaagctgatgaagataagaaagatgggttaccaactttgcctgagaacgagattgagttgacacttggtgcgggagcagatgatcctccaacaaccatttccttgaggccagaattccagcgtgatcgactatcacaacaaagccctgaagagctatcagtacagcaagcttcgaaggagatgatgaaagattgaaccgaatcaaacgaattttcataaagatgcagcgtgaccacatgctggatcctcaacagcaagattccatgatcaagaagtggccacccagcgaggttttggccatagatacagatcacagtcccttcttctctgcaccagaacagctgtttaatttaatagtcaaatctctatgatgcataaatgcagaaagctacagactggggttgcccggattcttgtaacactacccacaaacaataatcaccacaagatttacgacctcagatttgtcaaacatgcttctcagtgattcttcaagtcatatctgcaaatgtggtttaatgatgcaagactgcaagtaaaacatcgcttagcgcaaacacttaccttcagttttttgaacaattcactaaagtcagagccttataatttccattccaaaagttcttacatgtctggataaaaatatgtaaaatatagatgctactttggaagcacttttaactgcaccggtgatggataagaatatgtagttttggccactcgttgttaatctaactgatacgtttaaagagttattatttttctcttttgagtaattcaagagttcttgttttcatcaaatataaaggaagcaaacttctgacaccctaaaagttctcagataatgaacaatagaattttcacttcaaatagtttcataatatacaatcgcctcatgacgtgtaaaggatcatacaccgtttatacgtgacaaagaaattattacttcatttgtataaggatattgttggaatgcaattcggt

SEQ ID NO: 26105 - DNA, 4944 bp, Zea Mays
cgcggcaccacgctcagccccagcagcttctcccgtgtgccgtcttgttttgcttcgcattgccggctttcttgcctccagcagcgaacgcactgccatccttgcttggcctcacatcctccgcagctgggcgtcaccaggacgctatgcacgctgctcccgcatctggagctcgcccaccctactcgctcatcgtctgaccatgcgcactcgctgtcggtcgcgctcggctgctcgtcgttgtcctgcctcctcgtccacgccgcagtcgtcatcgaccctctccaacctcgtctgcgttgcgacctccatcctgcctgctcgcgttttccccctctgctcaaacgtcggcgcccgtggtgaagaacacctagaagaagtggtgtttgaagaagaagcctgctccaagtactattgatccagtggtggactccatctaactgcctatcgtgatagaagatctcaggtctcctcctgtaataaggcaagccccggtgcatttgccccttccttgtgttttaaatgctttttcaccttatctgatgcattaggtgataggagttgtgtgatgaaaaattgatgcattaccattccttggaaactccttaatccctgttttataaagagaactgatattgcttagccctgcttaaaaactgaaaaatcatttgttttcaaaaagaatgattgtggaacattggttatgggctttttgattcaaaaatcaaaggaaactaaggtgatgactccacttcggccggagtgggctcatcattggaaaagagtacccctgccgggtaccaaaaatggggaaatgattaataaatctagaccaggcgctgagcagacagagtcgcccgtctgtgtcgattaaggaccgtaccgttgactggcctgttgtggttgagactttgcaactagccacataccctggtatgggacagggtaagcttgaatccggctattccatacgtgaagagacaatcgcgcactgggagtggagagatggcgggagtatcatgtaccctcctggcacagcgcacgcctggtaggtaatgtgctctcgggtggcgcggacctgttcatgtagtggaggactccgtgggaacggttgacatatgcaagggttaagtgctacatatgtcgtgtggttagagatccccagctgggtataatcggttcgaatcgtcgttgctcctcggttatggagactcatcccggtgaccatcatcgtagttagcaagtgaaatatgagaatgaataaaatacagctagtataggctaagtgcttgaactagaccaggcaaatatagattcaggtaataacctaactagtgaaataaaacttggcttaaggatcaactggtagcaagcttttctgcaaaaaaaaggagctttgatcattgataaactttaccttgattcccaatcagttagcatacccttgagagtcctttctttagtcgggtaagtcttgctgagtaattgcgtactcagggttttatcccctgttgtttttgcaggagaagttttattcccttatcttttggttagttacttcatgtggaggccttgaagcttagaatgttatgtgtatctcttatggaaaggcttcacccttccaattgttataataagttatgcactttgggtactatcaggacttgtaataattaccattcttcttatgttgtaaaacttgagctttggaaatgtaaaatatgttttgagaagtattccgctctatctccgaagtgtgtgtgtatcgagtgtgattactgtaatatgcatgaatgtgggagatccttgggatgatgagttccagttggcgaactcgatagccttgttaagttacccggtacacgtgcacagccacccgaggccattaaggcaaggattggtgcacgtgggcccgataacttgggagagctgtcacaaccaaccccgtgcaacatcagcgcacgaagcatgtggagatcgacctgcacttcgtccgcgagcgtgtcgctgccggcgttttttccggttctcagcgtccccaccacgctgcagttcgccgacatcttcaccaaggggttaccgtcgagtgtatttttagactttcgatccagtctcaacatctgtacaggatatagttgtgactgcgggagggtgttagaatacccgtttagggcttgttcggttctaccccaatccatatggattaagggggattgagagggttccaatccctagtaagttaaaatctcccccaatccgtatcaatcccctccaatccatatggattgaaaataaccgaacaagcccttagggtttgggatcttccccgtgtaatgatcatctcactcctctgtaatgggcctggcccagtttactcagcctattaatacatcactgttagggttaggggtttactattccaatacattggacaacggccctattattttcttcatcagaaggctaatagttatactccaacattaatttctcagtaggcaccgcaccaccaccaaccaaatatatagcatggatatccatatcccactatccatgaccgtcgaaccaaacgcatgccactgtcagtcttcggtattcttcatgtgacagagagagggggggaaagctgaaatgaaaatgaactatatatgttagtgtcaatacaatgtttacagctcccatttctgagtcgtaattcaacatgcaggagtagtgaaagatttgaaacttaccagtataccgacaatatgatcaattttgaccaagagactaccaacattgtggtattaataattgtcactatactagatatgaacaaatttacaacaataatatgcaatatccatacaccataacaaaagaatatgacaaaactaaattgctgcaaatatttccaacttctctgagaaactgatgaaactatttgatgccaagatgccaacttgccttcagatcataggaagggcttctacagttcagatcataggaatggcttctactgacattgccgagagctcagttgacacttgacacagtgcgtcgggtgtacataaagacagccaatgaccacatggtgaagccggagcaccaggacgaggcggtgattcgactgtggctgccgagcaaggtggtggtaatggacacttgaccacagccctttctcctccacgccggagcgagctgatcctcaagtcattgtgatctgtaagcgatggtgtatcgtagtcccgttggaggttccacctgttctgttctttcagtggtgctatatgtaagccaatcaagttatcattcatctatcaatataaaaaaaaggaggaaaaaccatgaggtgagaaggctaaatatataccactctcagtcacacacaaggaaagaaaggaggaaaactagctggtccacacactatatcccgatcatctaccatattaggcaactctgcatgccagaaatgcaggctcctccagtcctgagaccctctatttacaataggaatcaccggaagccttgtcggtttgacataatttggattgtccacgaaaatgcagctcccctgcctcatgcccatcaaatcgttaaacttgttagatcggtaggcagagagaggccagactgatgggaatggcagcgaaggagcactttgtgcttgttcatggtgaagggcatggagcctggtgctggttcaagctccgctggctccttgagggtgctggctaccatgttacatgcattgacctagccggaggcggcgtcgatcctactgaccccaacacaatccggtcgttccagcagtacgacaagccactcatagacctcatttcaaccttgccggagggggagaaggtgattctaatcggacatggtgctggagggctgagtgtgattcatgcaatgcacgaatttgttgacagaatcagccaagcattttttgtggcagctacaatgctaccatttggatttcaagctgatgaagataagaaagatgggttaccaactttgcctgagaacgagattgagttgacacttggtgcgggagcagatgatcctccaacaaccatttccttgaggccagaattccagcgtgatcgactatcacaacaaagccctgaagagctatcagtacagcaagcttcgaaggagatgatgaaagattgaaccgaatcaaacgaattttcataaagatgcagcgtgaccacatgctggatcctcaacagcaagattccatgatcaagaagtggccacccagcgaggttttggccatagatacagatcacagtcccttcttctctgcaccagaacagctgtttaatttaatagtcaaatctctatgatgcataaatgcagaaagctacagactggggttgcccggattcttgtaacactacccacaaacaataatcaccacaagatttacgacctcagatttgtcaaacatgcttctcagtgattcttcaagtcatatctgcaaatgtggtttaatgatgcaagactgcaagtaaaacatcgcttagcgcaaacacttaccttcagttttttgaacaattcactaaagtcagagccttataatttccattccaaaagttcttacatgtctggataaaaatatgtaaaatatagatgctactttggaagcacttttaactgcaccggtgatggataagaatatgtagttttggccactcgttgttaatctaactgatacgtttaaagagttattatttttctcttttgagtaattcaagagttcttgttttcatcaaatataaaggaagcaaacttctgacaccctaaaagttctcagataatgaacaatagaattttcacttcaaatagtttcataatatacaatcgcctcatgacgtgtaaaggatcatacaccgtttatacgtgacaaagaaattattacttcatttgtataaggatattgttggaatgcaattcggt

SEQ ID NO: 26106 - DNA, 3001 bp, Zea Mays
cgcggcaccacgctcagccccagcagcttctcccgtgtgccgtcttgttttgcttcgcattgccggctttcttgcctccagcagcgaacgcactgccatccttgcttggcctcacatcctccgcagctgggcgtcaccaggacgctatgcacgctgctcccgcatctggagctcgcccaccctactcgctcatcgtctgaccatgcgcactcgctgtcggtcgcgctcggctgctcgtcgttgtcctgcctcctcgtccacgccgcagtcgtcatcgaccctctccaacctcgtctgcgttgcgacctccatcctgcctgctcgcgttttccccctctgctcaaacgtcggcgcccgtggtgaagaacacctagaagaagtggtgtttgaagaagaagcctgctccaagtactattgatccagtggtggactccatctaactgcctatcgtgatagaagatctcaggtctcctcctgtaataagatcataggaagggcttctacagttcagatcataggaatggcttctactgacattgccgagagctcagttgacacttgacacagtgcgtcgggtgtacataaagacagccaatgaccacatggtgaagccggagcaccaggacgaggcggtgattcgactgtggctgccgagcaaggtggtggtaatggacacttgaccacagccctttctcctccacgccggagcgagctgatcctcaagtcattgtgatctgtaagcgatggtgtatcgtagtcccgttggaggttccacctgttctgttctttcagtggtgctatatgtaagccaatcaagttatcattcatctatcaatataaaaaaaaggaggaaaaaccatgaggtgagaaggctaaatatataccactctcagtcacacacaaggaaagaaaggaggaaaactagctggtccacacactatatcccgatcatctaccatattaggcaactctgcatgccagaaatgcaggctcctccagtcctgagaccctctatttacaataggaatcaccggaagccttgtcggtttgacataatttggattgtccacgaaaatgcagctcccctgcctcatgcccatcaaatcgttaaacttgttagatcggtaggcagagagaggccagactgatgggaatggcagcgaaggagcactttgtgcttgttcatggtgaagggcatggagcctggtgctggttcaagctccgctggctccttgagggtgctggctaccatgttacatgcattgacctagccggaggcggcgtcgatcctactgaccccaacacaatccggtcgttccagcagtacgacaagccactcatagacctcatttcaaccttgccggagggggagaaggtacgtgtattcttccttttttgccaacacatttaatataagtggtaattaggtaatatgttggcataatctataatatcattactacgggttgcaatgtaaatgaccagaagccaaatgtttcatgccattttgaataaaaggtgtattagattgcacaaaagtaggtgcaacctattttaaataaatcttaaaacatgtgcttaagtctgctagatgtatctatcttcttgtatttccccattgtataattggtttactgtatattttccctcctgtaccggtgtatatatatatcggccttagtgtctcataatgaatgcaaatgctattcataacaaagtcatgatccttgacattttatctaggataacacctgaaaaataccttatacctgtgttctacaagaaaaagttggaaattatgtgaccccagcaaacgtacataaggaagtcaaggatctatttaagaataatgttgaaaattgatgaccatgcatgctaacccatttcagtcctattctaggtgattctaatcggacatggtgctggagggctgagtgtgattcatgcaatgcacgaatttgttgacagaatcagccaagcattttttgtggcagctacaatgctaccatttggatttcaagctgatgaagataagaaagatgggttaccaactttgcctgagaacgagattgagttgacacttggtgcgggagcagatgatcctccaacaaccatttccttgaggccagaattccagcgtgatcgactatcacaacaaagccctgaagagctatcagtacagcaagcttcgaaggagatgatgaaagattgaaccgaatcaaacgaattttcataaagatgcagcgtgaccacatgctggatcctcaacagcaagattccatgatcaagaagtggccacccagcgaggttttggccatagatacagatcacagtcccttcttctctgcaccagaacagctgtttaatttaatagtcaaatctctatgatgcataaatgcagaaagctacagactggggttgcccggattcttgtaacactacccacaaacaataatcaccacaagatttacgacctcagatttgtcaaacatgcttctcagtgattcttcaagtcatatctgcaaatgtggtttaatgatgcaagactgcaagtaaaacatcgcttagcgcaaacacttaccttcagttttttgaacaattcactaaagtcagagccttataatttccattccaaaagttcttacatgtctggataaaaatatgtaaaatatagatgctactttggaagcacttttaactgcaccggtgatggataagaatatgtagttttggccactcgttgttaatctaactgatacgtttaaagagttattatttttctcttttgagtaattcaagagttcttgttttcatcaaatataaaggaagcaaacttctgacaccctaaaagttctcagataatgaacaatagaattttcacttcaaatagtttcataatatacaatcgcctcatgacgtgtaaaggatcatacaccgtttatacgtgacaaagaaattattacttcatttgtataaggatattgttggaatgcaattcggt

SEQ ID NO: 26107 - DNA, 1585 bp, Zea Mays
cgcggcaccacgctcagccccagcagcttctcccgtgtgccgtcttgttttgcttcgcattgccggctttcttgcctccagcagcgaacgcactgccatccttgcttggcctcacatcctccgcagctgggcgtcaccaggacgctatgcacgctgctcccgcatctggagctcgcccaccctactcgctcatcgtctgaccatgcgcactcgctgtcggtcgcgctcggctgctcgtcgttgtcctgcctcctcgtccacgccgcagtcgtcatcgaccctctccaacctcgtctgcgttgcgacctccatcctgcctgctcgcgttttccccctctgctcaaacgtcggcgcccgtggtgaagaacacctagaagaagtggtgtttgaagaagaagcctgctccaagtactattgatccagtggtggactccatctaactgcctatcgtgatagaagatctcaggtctcctcctgtaataaggtgattctaatcggacatggtgctggagggctgagtgtgattcatgcaatgcacgaatttgttgacagaatcagccaagcattttttgtggcagctacaatgctaccatttggatttcaagctgatgaagataagaaagatgggttaccaactttgcctgagaacgagattgagttgacacttggtgcgggagcagatgatcctccaacaaccatttccttgaggccagaattccagcgtgatcgactatcacaacaaagccctgaagagctatcagtacagcaagcttcgaaggagatgatgaaagattgaaccgaatcaaacgaattttcataaagatgcagcgtgaccacatgctggatcctcaacagcaagattccatgatcaagaagtggccacccagcgaggttttggccatagatacagatcacagtcccttcttctctgcaccagaacagctgtttaatttaatagtcaaatctctatgatgcataaatgcagaaagctacagactggggttgcccggattcttgtaacactacccacaaacaataatcaccacaagatttacgacctcagatttgtcaaacatgcttctcagtgattcttcaagtcatatctgcaaatgtggtttaatgatgcaagactgcaagtaaaacatcgcttagcgcaaacacttaccttcagttttttgaacaattcactaaagtcagagccttataatttccattccaaaagttcttacatgtctggataaaaatatgtaaaatatagatgctactttggaagcacttttaactgcaccggtgatggataagaatatgtagttttggccactcgttgttaatctaactgatacgtttaaagagttattatttttctcttttgagtaattcaagagttcttgttttcatcaaatataaaggaagcaaacttctgacaccctaaaagttctcagataatgaacaatagaattttcacttcaaatagtttcataatatacaatcgcctcatgacgtgtaaaggatcatacaccgtttatacgtgacaaagaaattattacttcatttgtataaggatattgttggaatgcaattcggt

SEQ ID NO: 26108 - DNA, 1273 bp, Zea Mays
tttcgatctaagcaagctagcgcgcgtgcgcaggtccgtgattcgtcggtcaaaattcagatgcgtctatcggagctcagctccccagttaagctaaacataatagtagtatatatgtagctgctgcctgctagctagaactacgacgacgcagcgagcagctgcaaggctagacatggagagaacaaagagagccagcatggttagtcaggtggaggaggaagaagacggcgagcactgcacacacaagacggtgaggaaggggctatggtctcctgtcgaggacgcgaggctttccagccacatcacacgctacggcgtcggcacgtggtcctccgtcgccgaactagcagggctggagaggagcgggaagagctgcagactgagatggatgaactacctgcagccggacctcagccgggagcccatctccaggcaggaagaggaccgcatcgtgtccctgcagaaactcctagggaacaggtggtccgcgattgcggcgaggatgcccggcaggacggacaatgagatcaagaactactggaactcactcatcaagaagaagaagaagaagaagctcaagcagagcatggacaccggcggcggcggcggcgactaccaccaatcactgccgggcccggagccggaaccggaagtgcaccggacggcagcacatgagggatcgtccgctggtatgtacactactactggtactggtcatatcgatacgtcggaggttcgagtcgagcatggcggtaccacagcctcgcacaacaacgactcggcagatcacccaaggccgtcgccgctgcctcagcttccggttttcgcaggccaggtactactggaccctgatgctgccgttcggaatggcgagcagacagcagcaccagctcaggcctcctccctcagcctaataccgtttcccaagagccgtgagatgaactttgtggaagagtatgtccagttcctcgtgtctctctcggatgatctgctggaaatatgagcgtgcgctattggggagggcggccagggtgcaacacaagatgcatgcacaagcaaaatattgaaacagctggagatatgttcatctgcgcgcaaagcaaaatattcatttttttatgatgatgatgaactagcgaactgaaccatgcaattgtgtgactagtacgcatcaagaatccagtattgtatcattacgacttttttttgataaataatgtactttgccttaaaatgggtctgaattatctttgttgttgctatacctgag

SEQ ID NO: 26109 - DNA, 1918 bp, Zea Mays
ctcccctcaacctagcaccgccacttgcgcccaccacgccgccgcaccgccgctggtgaacgaatccgtccatcccgtacaccagccatgtcctgacacactgacacacacctggtggaggaggaggcgctacctccgtccgccggcggtgcaggggaggagccggccatcctcagggcggcgttgggctccggcaagctgcgcatcgaggggtcgctgagcttcaagcgggcgcagaccgcactgcaggtggagaccgagatctccatccggaccgctgccatgcccgcgccgggaccgggacccctacccaggggaacccccgagaggaacacacaacaacgtctcaccagtcagccaccaccgtgctccatttcctttctctctctcggctcctccgctctcttgcccgagtcgctagcttccctgccccgcctcctcccatccccgtggacagacaaccccccacctccgcttccatagcatccgagctaaggtcaactcctccatcggcggagcgagagcggggaagagacgggagggtcccgaatccgagccgagctgcgctccccgcgcgaccgacactcaggtcttgtcgtcccatgcagatctgctcttcctcctgaggccatccatgaatccgtggcacacaggaagttaagattaatctagacatgataatctacaggcttatgagggcttacataagttcatcttctctacggaaatctgcattgagggctcttgcaaaggcactgacgacagatcaactcttcaacctaagagagcagtttacattattcggtccaaacaagagtggccatatatcattgcaaaatatgaagacggccttgatgaaaaattcctcgggtgcaatgaatgattctaggattcttgactttgttaactcaatatgcaatatccaatatggcatgattgattttgaagagttctctgctacggccattagtgtatatcaaatggaaggcctggagacctgggaagaacatgctcaacaagcatatgaattgtttgacaaggagggcaaccgaccaattgtgattgaagaacttgcatcggaacttggacttggcccttcgatctcatttcatgttgttctcaaagattggatcagacattcagatggacacccaggaagttgagttgccccttgaccaggaggaatccacctaccgtctggacgaaaaacgatcccatccatggggcagcgccagtgccagtattgtggaacgaatttataaggttggaaaggggttgctgaaggacgagaatgctcagaagcttgcgttgcagcactggctggaagcgattgacccgcggcaccggtacggccacaaccttcactgctactacgactgctggctccactccgaaagcaagcaacctttcttctactggccgcacttgaagaaatcttatatcagtttgaggaaaaactccaagctgaaagagaggaagctgctaggaagcaggaagagttgcaagcacaactacaagctcaacaggccgcacttgaagaaaaccaaagtttgctgcgccaggcccaagaggaagtgaaggggatgcataccaagtttgaagagaccaatgcactgctacgagctgtcctgaaacttcagaaagattgaggtagggatgcataccaagtctggggatgatgcctttgcttaaggtttttctaccttgctagaacatatctgtggttagaactttgtcagaactacgtgcaatctgtttgaatgcttcaaacctttgtggtggaacctttgtatgtttgaacctctgttgtggaagaactagtgtgctggaattgtgtatgacttgtgatgagaatgttgtgtatgatggcttttctgtgtattatgattctgtgagctgtcatgagagctcagtgtgt

SEQ ID NO: 26110 - DNA, 2132 bp, Zea Mays
cgcagacaagtccagtcctctccctcccctcaacctagcaccgccacttgcgcccaccacgccgccgcaccgccgctggtgaacgaatccgtccatcccgtacaccagccatgtcctgacacactgacacacacctggtggaggaggaggcgctacctccgtccgccggcggtgcaggggaggagccggccatcctcagggcggcgttgggctccggcaagctgcgcatcgaggggtcgctgagcttcaagcgggcgcagaccgcactgcaggtggagaccgagatctccatccggaccgctgccatgcccgcgccgggaccgggacccctacccaggggaacccccgagaggaacacacaacaacgtctcaccagtcagccaccaccgtgctccatttcctttctctctctcggctcctccgctctcttgcccgagtcgctagcttccctgccccgcctcctcccatccccgtggacagacaaccccccacctccgcttccatagcatccgagctaaggtcaactcctccatcggcggagcgagagcggggaagagacgggagggtcccgaatccgagccgagctgcgctccccgcgcgaccgacactcaggtcttgtcgtcccatgcagatctgctcttcctcctgagataaagtgaccctgaccccttctttcttatacattggaaattacaggccatccatgaatccgtggcacacaggaagttaagattaatctagacatgataatctacaggcttatgagggcttacataagttcatcttctctacggaaatctgcattgagggctcttgcaaaggcactgacgacagatcaactcttcaacctaagagagcagtttacattattcggtccaaacaagagtggccatatatcattgcaaaatatgaagacggccttgatgaaaaattcctcgggtgcaatgaatgattctaggattcttgactttgttaactcaatatgcaatatccaatatggcatgattgattttgaagagttctctgctacggccattagtgtatatcaaatggaaggcctggagacctgggaagaacatgctcaacaagcatatgaattgtttgacaaggagggcaaccgaccaattgtgattgaagaacttgcatcggaacttggacttggcccttcgatctcatttcatgttgttctcaaagattggatcagacattcagatggacacccaggaagttgagttgccccttgaccaggaggaatccacctaccgtctggacgaaaaacgatcccatccatggggcagcgccaggtgtaccgaatctttggcacagcgatcagggatctatttcgcaaatgaacggaaagatagcacaattctttttctttttgtgctagtgccagtattgtggaacgaatttataaggtttgtgggttgggctgctaacatttatgttcgaatttggacgcctctctctctctcaggttggaaaggggttgctgaaggacgagaatgctcagaagcttgcgttgcagcactggctggaagcgattgacccgcggcaccggtacggccacaaccttcactgctactacgactgctggctccactccgaaagcaagcaacctttcttctactggccgcacttgaagaaatcttatatcagtttgaggaaaaactccaagctgaaagagaggaagctgctaggaagcaggaagagttgcaagcacaactacaagctcaacaggccgcacttgaagaaaaccaaagtttgctgcgccaggcccaagaggaagtgaaggggatgcataccaagtttgaagagaccaatgcactgctacgagctgtcctgaaacttcagaaagattgaggtagggatgcataccaagtctggggatgatgcctttgcttaaggtttttctaccttgctagaacatatctgtggttagaactttgtcagaactacgtgcaatctgtttgaatgcttcaaacctttgtggtggaacctttgtatgtttgaacctctgttgtggaagaactagtgtgctggaattgtgtatgacttgtgatgagaatgttgtgtatgatggcttttctgtgtattatgattctgtgagctgtcatgagagctcagtgtgt

SEQ ID NO: 26111 - DNA, 1938 bp, Zea Mays
cgcagacaagtccagtcctctccctcccctcaacctagcaccgccacttgcgcccaccacgccgccgcaccgccgctggtgaacgaatccgtccatcccgtacaccagccatgtcctgacacactgacacacacctggtggaggaggaggcgctacctccgtccgccggcggtgcaggggaggagccggccatcctcagggcggcgttgggctccggcaagctgcgcatcgaggggtcgctgagcttcaagcgggcgcagaccgcactgcaggtggagaccgagatctccatccggaccgctgccatgcccgcgccgggaccgggacccctacccaggggaacccccgagaggaacacacaacaacgtctcaccagtcagccaccaccgtgctccatttcctttctctctctcggctcctccgctctcttgcccgagtcgctagcttccctgccccgcctcctcccatccccgtggacagacaaccccccacctccgcttccatagcatccgagctaaggtcaactcctccatcggcggagcgagagcggggaagagacgggagggtcccgaatccgagccgagctgcgctccccgcgcgaccgacactcaggtcttgtcgtcccatgcagatctgctcttcctcctgaggccatccatgaatccgtggcacacaggaagttaagattaatctagacatgataatctacaggcttatgagggcttacataagttcatcttctctacggaaatctgcattgagggctcttgcaaaggcactgacgacagatcaactcttcaacctaagagagcagtttacattattcggtccaaacaagagtggccatatatcattgcaaaatatgaagacggccttgatgaaaaattcctcgggtgcaatgaatgattctaggattcttgactttgttaactcaatatgcaatatccaatatggcatgattgattttgaagagttctctgctacggccattagtgtatatcaaatggaaggcctggagacctgggaagaacatgctcaacaagcatatgaattgtttgacaaggagggcaaccgaccaattgtgattgaagaacttgcatcggaacttggacttggcccttcgatctcatttcatgttgttctcaaagattggatcagacattcagatggacacccaggaagttgagttgccccttgaccaggaggaatccacctaccgtctggacgaaaaacgatcccatccatggggcagcgccaggtgtaccgaatctttggcacagcgatcagggatctatttcgcaaatgaacggaaagatagcacaattctttttctttttgtgctagtgccagtattgtggaacgaatttataaggttggaaaggggttgctgaaggacgagaatgctcagaagcttgcgttgcagcactggctggaagcggccgcacttgaagaaatcttatatcagtttgaggaaaaactccaagctgaaagagaggaagctgctaggaagcaggaagagttgcaagcacaactacaagctcaacaggccgcacttgaagaaaaccaaagtttgctgcgccaggcccaagaggaagtgaaggggatgcataccaagtttgaagagaccaatgcactgctacgagctgtcctgaaacttcagaaagattgaggtagggatgcataccaagtctggggatgatgcctttgcttaaggtttttctaccttgctagaacatatctgtggttagaactttgtcagaactacgtgcaatctgtttgaatgcttcaaacctttgtggtggaacctttgtatgtttgaacctctgttgtggaagaactagtgtgctggaattgtgtatgacttgtgatgagaatgttgtgtatgatggcttttctgtgtattatgattctgtgagctgtcatgagagctcagtgtgt

SEQ ID NO: 26112 - DNA, 1021 bp, Zea Mays
gaccaaaattcccctccaaccttttcctctcggctgctcaccaccgcagacaagtccagtcctctccctcccctcaacctagcaccgccacttgcgcccaccacgccgccgcaccgccgctggtgaacgaatccgtccatcccgtacaccagccatgtcctgacacactgacacacacctggtggaggaggaggcgctacctccgtccgccggcggtgcaggggaggagccggccatcctcagggcggcgttgggctccggcaagctgcgcatcgaggggtcgctgagcttcaagcgggcgcagaccgcactgcaggtggagaccgagatctccatccggaccgctgccatgcccgcgccgggaccgggacccctacccaggggaacccccgagaggaacacacaacaacgtctcaccagtcagccaccaccgtgctccatttcctttctctctcgttggaaaggggttgctgaaggacgagaatgctcagaagcttgcgttgcagcactggctggaagcggccgcacttgaagaaatcttatatcagtttgaggaaaaactccaagctgaaagagaggaagctgctaggaagcaggaagagttgcaagcacaactacaagctcaacaggccgcacttgaagaaaaccaaagtttgctgcgccaggcccaagaggaagtgaaggggatgcataccaagtttgaagagaccaatgcactgctacgagctgtcctgaaacttcagaaagattgaggtagggatgcataccaagtctggggatgatgcctttgcttaaggtttttctaccttgctagaacatatctgtggttagaactttgtcagaactacgtgcaatctgtttgaatgcttcaaacctttgtggtggaacctttgtatgtttgaacctctgttgtggaagaactagtgtgctggaattgtgtatgacttgtgatgagaatgttgtgtatgatggcttttctgtgtattatgattctgtgagctgtcatgagagctcagtgtgt

SEQ ID NO: 26113 - DNA, 2773 bp, Zea Mays
gctcataaccaccccagttgcttgatgcgcctatctgtcgctggatcccgcggggcagacctcaaacttggggtataaatgcctcagtgtcgtgtctgctttgaacatcgccgctccactctgggttcccagccaccgtcatcgccgagagggataagtgcagccgtcggcatggtcttcttggctcgttggtgcaccggccttgaagcttggcctggagtgatcacaggagtctaccaaaactgattgtggcctacccaggcgatgtgatccaccgaagcgccaccgattcctcgatgtcgctcctccgtcgctgcgggtccgcgcgtcacagtggggagcatcgattgcgtctcgaacaccggtgagaaacccccacactattcgactttccctcctcttcgtgttaccctggttagccttggctttggagtgaaggatcatctgatggccctaccctagccatggcgccaccgcgcggctatgggcgccaccgactgttgcggctaggtggggaagaagagaggtagccgctgatccgtaaatcaacgatctagattagatcgagggaaccccttcgtttcattaaacaggatccgtcgatctctgaatggacagtccacattgcatcccggttcagattttttgtaatgatcatcgatcttaaatcaaatggctcagatttcacccaccttgatacaaccgacccactttctaaaaaaagtccctcttcttatatcaaatgaacccacagtttggccctagtcaaaactaattgcgcataggtcctgtttttcacccgattgaccctaagctcctaaggaatataacccgtagtacatgagaccagtttaattaaaataaagatctggaaattaaattatatgtataaaaataaacctacaaatttgcaaaaaatcatatcttcttcgtttcaactctgttttgctccgttctagttgcgttagcttcgtaataatattgcctacgtttttgtaacattattttgttaggtaacatgttctcaaaaatagatatttgtgtaacatatgccaatagatgtctagtcaaagttaatctatttataattataagatgcctagaatatgattgctaatcaagttatcacttagattataactgaattagttgtttctccataatatttttctcacgtgatttatattaattaatatatatttactatttaatcacctaaaaattcagaaaaccatttgttttaacagtaactctgattttagtagttctcaaacctgcgatctcgtagcggctcgtagaatattcttatgttgtttgttctcgtgtttggtgcaatgttatctttatgtattccttgtctatttgtatgtattgctaggagtagtagcaaggtcacgagaaactcgaagaccaacttggtgaagcacctgaagtctctagtataaggcaagttgtgcccttgatcactcctctttacctaataatgctcctattaatcactgtgacatgcttaggttaattttatgggacctaataggtttccctagtattgtttatcccacaccttgcaaacaaatgaactattgggtagatttgctattgctctacctggttttggaacattaatgttatatatgatcatgttccattaatactgttggtttaattattattcatgataagattattgtattaattggaacatggagaaccacccgggaaaacattgctaccacaagggtggaatgggacgcccttggccaagtaattaggaaagctagggagagattaccttacccaaaacgggcaagcggagaggcattgctgtagagtatagggaggtcctcgggttgaactgtctgtaaagcttttgggacaagggattcctatgcttccttcttcctgaatctgtagcgggttttctcgaactagtggaactttggaaaggcctcgtagtgctactctacctcgtctcctcattagagatgaatgggaagtcgtgatcccttggcaaatggctaacacgacttataggtaaagatgtgcaacctctgcaaagtgcaaaactggtatatcggctgtactcacgatcataagcggctcagacactcacatgattaacatatgtatttaaacttaatttgtcatttgcattgcattgtgggtttattattaattgtgatctcttatttgattgggttgctatctacttatacttagtaactgctaataaaattttgaccaactttaaaagcaatgctcagctttaaccatcttctttggtaagccttacacttcacatgaacccccaccataagtgagctcatgcacattattccccacaatttgttgagcgatgaacatatgtgagctcacccttgctgtactcaaattcctcctaggtcaaggacatgtaccacaagataaggaacatgaaggatgccgtgatgagttcgtgagaggtctaggccatcgtctcccagtaaactatggttgcggaggatcattgtcatcatatgatgtaattattatctatgttgtacagaactcctattatatagtaaagatgtgacatttgtttttgtaccacgagtcatcatatgtgtgagacttgatcctagcacatatttgaatcgcgcctgaatttgcccttaaattcgggtgtgacagatgttggcaatgtccatgttggaggagtcgaaggagctcacgtcaaagtcccattctttccatacatgtgcctcaccacccgtcttcttgtggaagaatttct

SEQ ID NO: 26114 - DNA, 1717 bp, Zea Mays
gctcataaccaccccagttgcttgatgcgcctatctgtcgctggatcccgcggggcagacctcaaacttggggtataaatgcctcagtgtcgtgtctgctttgaacatcgccgctccactctgggttcccagccaccgtcatcgccgagagggataagtgcagccgtcggcatggtcttcttggctcgttggtgcaccggccttgaagcttggcctggagtgatcacaggagtctaccaaaactgattgtggcctacccaggcgatgtgatccaccgaagcgccaccgattcctcgatgtcgctcctccgtcgctgcgggtccgcgcgtcacagtggggagcatcgattgcgtctcgaacaccggagtagtagcaaggtcacgagaaactcgaagaccaacttggtgaagcacctgaagtctctagtataaggcaagttgtgcccttgatcactcctctttacctaataatgctcctattaatcactgtgacatgcttaggttaattttatgggacctaataggtttccctagtattgtttatcccacaccttgcaaacaaatgaactattgggtagatttgctattgctctacctggttttggaacattaatgttatatatgatcatgttccattaatactgttggtttaattattattcatgataagattattgtattaattggaacatggagaaccacccgggaaaacattgctaccacaagggtggaatgggacgcccttggccaagtaattaggaaagctagggagagattaccttacccaaaacgggcaagcggagaggcattgctgtagagtatagggaggtcctcgggttgaactgtctgtaaagcttttgggacaagggattcctatgcttccttcttcctgaatctgtagcgggttttctcgaactagtggaactttggaaaggcctcgtagtgctactctacctcgtctcctcattagagatgaatgggaagtcgtgatcccttggcaaatggctaacacgacttataggtaaagatgtgcaacctctgcaaagtgcaaaactggtatatcggctgtactcacgatcataagcggctcagacactcacatgattaacatatgtatttaaacttaatttgtcatttgcattgcattgtgggtttattattaattgtgatctcttatttgattgggttgctatctacttatacttagtaactgctaataaaattttgaccaactttaaaagcaatgctcagctttaaccatcttctttggtaagccttacacttcacatgaacccccaccataagtgagctcatgcacattattccccacaatttgttgagcgatgaacatatgtgagctcacccttgctgtactcaaattcctcctaggtcaaggacatgtaccacaagataaggaacatgaaggatgccgtgatgagttcgtgagaggtctaggccatcgtctcccagtaaactatggttgcggaggatcattgtcatcatatgatgtaattattatctatgttgtacagaactcctattatatagtaaagatgtgacatttgtttttgtaccacgagtcatcatatgtgtgagacttgatcctagcacatatttgaatcgcgcctgaatttgcccttaaattcgggtgtgacagatgttggcaatgtccatgttggaggagtcgaaggagctcacgtcaaagtcccattctttcc

SEQ ID NO: 26115 - DNA, 1711 bp, Zea Mays
ctccttccggccgcgggccctcggactggctggtctctgttaggtcacccatgcgtggacttgctagcgagggagacctttgcatgctcctttggttgaagattgctactttgcaaagaaggcatggaatgcacagaaagcaggagcagcagcaatccttgtcgctgatgacaaagatgaacctctaattacaatggacaaccctgaggagagtggcaacacagattatctagagaacatcactattccttcggcattaataaccaagagttttggggacaagctcaagaaagtaattgacaacggtgacatggttagtgtgaatttggattggagagaggccctgccccatcctgatgagcgtgttgagtatgaattttggaccaacagcaacgatgaatgtggcctgaagtgcgatagccagattgattttgtcaagagcttcaaaggagcagcacaagtacttgagaagaagggctatacagagttcactcctcattacattacctggtattgcccagaggccttcattctgagcaagcagtgcaagtctcagtgcatcaatcatgggagatactgtgcacctgacccggaacaggattttagcaaaggatatgatggtaaagatgtggtggtccagaacttgcgccaagtttgtgtctttaaggttgctaaggagcacaagaagccttggttatggtgggactatgttactgattttgcgattcggtgtccaatgaaggaaaagaagtacacaaaggagtgtgctgatggtgttatcaagtctcttggccttgatcataaagcaatagataaatgtattggtgatccagatgctgatgaagaaaaccctgttctgaaagctgaacaggatgcacagattggcaagggctctcgtggtgatgttaccatcttaccaactctggtaattaacaatagacaatacagaggtaagcttgacaaaggagcagttcttaaagcactttgtgctggttttaaggaaactactgagccagccgtttgcttgagtgaagatatacaaacaaatgagtgcctagagaacaatggtggctgttggcaagataaggctgctaacatcactgcatgcaaggatactttccgtggaagagtttgcgagtgtccaattgtgaaaggagtaaaatttgttggtgatggctatagtcattgtgaagcttccggatctgggcgatgtgaaattaacaatggaggatgctggaaagataccaagaatggtcggacatactctgcctgtaatgatgatggctgcaaatgcccagatggattcaagggtgacggtaggcacaaatgtgaagatattgatgagtgtaaggaaaggactgtgtgtcaatgcaaagaatgcaaatgcaaaaacacatggggaagctatgagtgtggctgcagtggaggcttgctttacatgaaggagcatgatacatgcataagcaaaagtggagcatcagaagcaggttggggcttcttgtgggtcatcttctttggccttgttgcagcaggagttgcaggatatgctgtgtacaagtacaggatccggaggtacatggactcagagatccgtgccatcatggctcagtacatgcccctggacaaccaaggagacgttcagagccattctcatcacattgagatgtgaggacaggaggatgcagacttgacgaagggggggggggggggg

SEQ ID NO: 26116 - DNA, 1375 bp, Zea Mays
tgtggtctggttttggtcacgtgtttcttctgcttccggttttggttcacctcgaggcttctacaccgcgtccctctccctccgcttcttccgccatctcgtctagccccggaaaatctctcccactccaactggtccatccgagcattgtagaactctctccaactccaacgccctaccccggccgtcaaaattccatctttccgccgttttcggggccgcacggctgcaagatcgatcaatcttgcgccgatcgagccgcagacacaaccagttccgatccccagccggtgctcgcggaccgcaggcggagcccggacggagcatgggctcccgattcgccagcgcggcgctgcggctgctggtgtgcgcagcgctcctgctgggttgctgccacgggaggttcgtggtggagaagaacagcctcaaggtgacggcgcccgacgacctcaagggcacctacgagtgcgccattggtaacttcggggtgccccagtacggcggcaccatggtcggcttcgtcgcctaccccaaggccaacaggaaggcctgcaagagcttcgacgactttgacatctcctacaaggccaagccgggggcgttccccaccttcttgctcgtcgacaggggagcagttcttaaagcactttgtgctggttttaaggaaactactgagccagccgtttgcttgagtgaagatatacaaacaaatgagtgcctagagaacaatggtggctgttggcaagataaggctgctaacatcactgcatgcaaggatactttccgtggaagagtttgcgagtgtccaattgtgaaaggagtaaaatttgttggtgatggctatagtcattgtgaagcttccggatctgggcgatgtgaaattaacaatggaggatgctggaaagataccaagaatggtcggacatactctgcctgtaatgatgatggctgcaaatgcccagatggattcaagggtgacggtaggcacaaatgtgaagatattgatgagtgtaaggaaaggactgtgtgtcaatgcaaagaatgcaaatgcaaaaacacatggggaagctatgagtgtggctgcagtggaggcttgctttacatgaaggagcatgatacatgcataagcaaaagtggagcatcagaagcaggttggggcttcttgtgggtcatcttctttggccttgttgcagcaggagttgcaggatatgctgtgtacaagtacaggatccggaggtacatggactcagagatccgtgccatcatggctcagtacatgcccctggacaaccaaggagacgttcagagccattctcatcacattgagatgtgaggacaggaggatgcagacttgacgaagggggggggggggggg

SEQ ID NO: 26117 - DNA, 2169 bp, Zea Mays
cacatccatctacgtatgtatacaatattagaattttaagaatggcccgtcgccatacgcatgctgccctaccctaccgctaccggccctgtcattaaatgcctcccaccacgatacgaaccaaccaacgaaccaaacataaattcagcccaccgcttcgaggacaggacggagggagctcacgcgcgagcaaagcaaagcacaagcagcaatggggatctgctgcggcaaggccaaggcggcggcaggggagcccgacgacgacgagggcctgggcttcccatggatgcacgacgacctgttccacagccacctgtgggccagcgccggcgtctccgtgcacaccaagcagggatggaagggcgccaaccaggacgccatgaccgtctgccaggtgatggcctcaccctccctctactctctctctctcttcctgcattagttgcagagcctctgcctactagttcgcatctgtgcacatggcccatatgcaagctgttcaaggtgttgtcgtagcttgcattgcaatgcaggttgcaacttagcaactcaacagcttgagaaaagtgcaccggatccatcttgacttcgccggccagaaaggccacatcctctgcggagtgttcgatggccacggccctcgtggccgggaagtcgctcgccacgtccgcgacaccctcccggtggaactagccgccgctctgaagccgagaaccggggacgaagatccctccgcctcgagcgacgcttcgaagcctaaacctgacgaagatggctcaggcgagaatggagaagatggctcaggcaagaatggagatgcttcgagcaacgccgatttggattccttcgacaagtcaggaggtagcggctcgtccagcgacgttacgagcgacgagagccagcagcagcagctgctgctgtccacttggaagaacgtgttcgtgagggcttttgagcaggtggacgaggagctgaggcggctttcaggaatcgactgcatctgtagcggcacaactgcagtcgctgctgttaggcagggcgatcacttgatcgttgccaatctgggcgattcacgcgccgtcctctgcacccgggacagcaaggaccgtctgatccctgtccagctcaccactgacctgaagccggatctgccaagtgagctcgcgaggattctgagctgcaaggggagagtgttcgccatggacgacgagccggacgtgccccggatgtggctgccggaccaggacgcgccgggcctcgccatggcgagggcgttcggtgacttctgcctcaagagccatggccttatctgcgaacctcaagtctactgcaggaaactgtccgagaaagacgagttcttggtgcttgctactgacgggatttgggacgtgctgtcgaacaaggaggtggtgaagctcgtgtcatcggcgcctgacccgtccaaggcggcgaggcagctgatcgaccgggcggtccgagcgtggcggcgcaagtacccgacgtccatggtggacgactgcgccgtcgtgtgcctgtacctgaaccggcgggcctcacctgctcccgtcgagagcagcagcggcctgctcccagttcccgacgacgtgaggccggccgcgcctttcacaggcagcagcttccgcagggctctgacgagcaacggccaggcggtgtcggaggaggggacgacggcggtgtggagagcgctggagggggtggcgcgggccaactccgtgatcaggctgccgcgcgtgggccgcgtgctgagctggcggaggcggtcgacctcgctggacgaagacgacggcggcgagcgggattgatggactcgggcggggagggcatcggaggtcgtcgttttcatggccggtacacgtagacgtagctagattcgttcgtgcatgggccgatggacgcgaggtgtaggatttgattggcctgtcgcattctggtgtggctgttgcaatggatgatgcgacatggacaggagtagcatttctttatccctggctgatgaatcagtgagtgcttttcatcctgctcgtctatgtactgctactgcacttgctgtaactgaaatttgtgggtgagattagcatctgacaacataagaagtgaagaacgtgactgcagtacatgactgatccaatagtgctaatttcatctagg

SEQ ID NO: 26118 - DNA, 1184 bp, Zea Mays
cacatccatctacgtatgtatacaatattagaattttaagaatggcccgtcgccatacgcatgctgccctaccctaccgctaccggccctgtcattaaatgcctcccaccacgatacgaaccaaccaacgaaccaaacataaattcagcccaccgcttcgaggacaggacggagggagctcacgcgcgagcaaagcaaagcacaagcagcaatggggatctgctgcggcaaggccaaggcggcggcaggggagcccgacgacgacgagggcctgggcttcccatggatgcacgacgacctgttccacagccacctgtgggccagcgccggcgtctccgtgcacaccaagcagggatggaagggcgccaaccaggacgccatgaccgtctgccagatttgggacgtgctgtcgaacaaggaggtggtgaagctcgtgtcatcggcgcctgacccgtccaaggcggcgaggcagctgatcgaccgggcggtccgagcgtggcggcgcaagtacccgacgtccatggtggacgactgcgccgtcgtgtgcctgtacctgaaccggcgggcctcacctgctcccgtcgagagcagcagcggcctgctcccagttcccgacgacgtgaggccggccgcgcctttcacaggcagcagcttccgcagggctctgacgagcaacggccaggcggtgtcggaggaggggacgacggcggtgtggagagcgctggagggggtggcgcgggccaactccgtgatcaggctgccgcgcgtgggccgcgtgctgagctggcggaggcggtcgacctcgctggacgaagacgacggcggcgagcgggattgatggactcgggcggggagggcatcggaggtcgtcgttttcatggccggtacacgtagacgtagctagattcgttcgtgcatgggccgatggacgcgaggtgtaggatttgattggcctgtcgcattctggtgtggctgttgcaatggatgatgcgacatggacaggagtagcatttctttatccctggctgatgaatcagtgagtgcttttcatcctgctcgtctatgtactgctactgcacttgctgtaactgaaatttgtgggtgagattagcatctgacaacataagaagtgaagaacgtgactgcagtacatgactgatccaatagtgctaatttcatctagg

SEQ ID NO: 26119 - DNA, 2875 bp, Zea Mays
catcgtcgtctccccgcctcaccacatctcacctcgtctcctcctccggtccttcccccatctcttcgccggcttccatttcttgcctgccagtcactctcgtccgccgcagatcgagaagccgccaccaaaccccccctccaccaccgtatgaccatgacagcccagcagcaccggcaccccaagcgccgctgcgtcgccctctccctttctccgtccctcgcgcgcatccccggcgcccccacgccgccgctcgactcgctggccgacgagcttctcttccttgtcctggaccgcgtggcccaggccgacccgcgggcgctcaagtccttcgcgctggcctcccgcgcctgccacgccgcggagtccagccaccgccggacgctccgcccgctccgcgcggacctcctgcccgccgcgctggcgcggtacccgaccgcgacccgcctcgacctcaccctctgcgcgcgcgtccccgacgccgccctcgcctccgccgccgtctccgggtcctcctccgccctccgcgccgtcgacctctcctgctcccgcgggttcagcgccgcgggcgtctccgagctcgccgtcgcctgcccgggcctcgtcgacctcgacctctccaatggggtcgacctcggggacgccgcggcggccgaggtggcgcgggccagggcgctccggaggctctcgctggcccgctggaagccgctcaccgacatggctctcgctcaagtggtgccttgggctcacggatctggggatccagctcctcgccctcaagtgcaggaagctcaccagcctggatctctcctacaccatgatcacaaaggctagcttgcctcccatcatgaagctacccagtcttcaagagttgacactggtggggtgtattgcgatcgatgatgatgctcttggtagtcttgagagagaatgcagtaaatcactacaggtgcttcatatgtctcagtgtcagaatatcacaggtgtgggagtttcatccatcctgaagtcggtacccaatctattggaactggaactttcatactgctgtcctgtcactccttctatggtgagaagcttccagaagcttgctaaacttcagaccctgaagctggaaggctccaaattcatggccgatggactaaaagccattggaacctcttgtgcttctttaagggaactaagtctgagcaagtcatctggagtgaccgacacagaactctcttttgctgtgtcaaggctaaagaacctgctgaagctggacattacttgttgtcgcaatatcactgatgtttcactagcggccataactagttcatgctcttctctcatctctatgaggatggagtcttgtagccgtgtttccagtggagcactccaactgatcgggaagcactgttctcgcttggaagagttggaccttactgacagtgatttggatgacgaaggattgaaagctcttgccagatgcagcgaactttcgagtctaaaaattggtatttgcttgaagataagtgatgaaggtcttacccacatcggaaggtcttgcccaaaactccgcgagattgatttgtacaggtgtggaggccttagcgatgatggaattattcaaattgcgcagagttgtccgatgctagagtctatcaacctatcatactgcacagaaataacagaccgctcactgatttcactatcaaaatgctcaaagctgaatactctggagattcgtggctgccccagggtttcatccatcgggctctcagaaacagcgatggggtgcaggctgctttccaagcttgatattaagaaatgctttgggattaatgatgctggaatgctttacctttcccagttctctcatagcctccgtcagataaacttgtcatactgttcagtcaccgatattgggcttctttccctttcttgcatatccggcctgcagaacatgacgatcgtccatgtagcgggtataacgcctaatggcttggcagctactcttatggtttgtggtggtttgacgaaagtgaagcttcatgaagcattcagatccatgatgcttcctcacatgataaaaaatgttgaggcacgcggctgtgttttccaatggattgataaaccattcaaggtattctacggctcccctggttgccttacacacagcattagacccttgtgctcgccaactcgttcttgcctaatttgctactcgaaaacgctacacactatttgtttcagaaaagcttggttctattcagctgtgttttgtgctgccagatctaaatgcaatgctgtgttcttttctgtgctttcagtatattgtctatgattgaaacacacaacccatgattttgcttatggatggtgtttttttcccttcaaaaaaaggcttaaagaagagcatagcacagttgtcttgaatctattgagtgggtttgttcttacagagctattacaaggctgcaaaagtaaaacagtgtctgtctaataactggtgtggcattgtaggttgaggtggaaccttgtgatgtatggaagcaacagtcgcaagacgtgcttgtacgatgagaattgagttgaccctcgagcatgtggctatcgtggaaatcatggcatgcatcgttatggatggatgggttgttggctggcaatgtcatccgcgcaagtgattcctgtgtttgagcataggtcttgatgttgttgtatactggtataagcaagtgattcctgtgtcatccgcaagtgaagttgctgtatagaatactaccatgtaaagatgtcgatacggaagggatgagaaaatggttttgaaatttagtacgatatgccttttcctatgttcgtttagttttaatccgtactatcttctactgtttct

SEQ ID NO: 26120 - DNA, 2536 bp, Zea Mays
catcgtcgtctccccgcctcaccacatctcacctcgtctcctcctccggtccttcccccatctcttcgccggcttccatttcttgcctgccagtcactctcgtccgccgcagatcgagaagccgccaccaaaccccccctccaccaccgtatgaccatgacagcccagcagcaccggcaccccaagcgccgctgcgtcgccctctccctttctccgtccctcgcgcgcatccccggcgcccccacgccgccgctcgactcgctggccgacgagcttctcttccttgtcctggaccgcgtggcccaggccgacccgcgggcgctcaagtccttcgcgctggcctcccgcgcctgccacgccgcggagtccagccaccgccggacgctccgcccgctccgcgcggacctcctgcccgccgcgctggcgcggtacccgaccgcgacccgcctcgacctcaccctctgcgcgcgcgtccccgacgccgccctcgcctccgccgccgtctccgggtcctcctccgccctccgcgccgtcgacctctcctgctcccgcgggttcagcgccgcgggcgtctccgagctcgccgtcgcctgcccgggcctcgtcgacctcgacctctccaatggggtcgacctcggggacgccgcggcggccgaggtggcgcgggccagggcgctccggaggctctcgctggcccgctggaagccgctcaccgacatgggcctcggatgcgtcgccgtcgggtgcacggagctgagggagctctcgctcaagtggtgccttgggctcacggatctggggatccagctcctcgccctcaagtgcaggaagctcaccagcctggatctctcctacaccatgatcacaaaggctagcttgcctcccatcatgaagctacccagtcttcaagagttgacactggtggggtgtattgcgatcgatgatgatgctcttggtagtcttgagagagaatgcagtaaatcactacaggtgcttcatatgtctcagtgtcagaatatcacaggtgtgggagtttcatccatcctgaagtcggtacccaatctattggaactggaactttcatactgctgtcctgtcactccttctatggtgagaagcttccagaagcttgctaaacttcagaccctgaagctggaaggctccaaattcatggccgatggactaaaagccattggaacctcttgtgcttctttaagggaactaagtctgagcaagtcatctggagtgaccgacacagaactctcttttgctgtgtcaaggctaaagaacctgctgaagctggacattacttgttgtcgcaatatcactgatgtttcactagcggccataactagttcatgctcttctctcatctctatgaggatggagtcttgtagccgtgtttccagtggagcactccaactgatcgggaagcactgttctcgcttggaagagttggaccttactgacagtgatttggatgacgaaggattgaaagctcttgccagatgcagcgaactttcgagtctaaaaattggtatttgcttgaagataagtgatgaaggtcttacccacatcggaaggtcttgcccaaaactccgcgagattgatttgtacaggtgtggaggccttagcgatgatggaattattcaaattgcgcagagttgtccgatgctagagtctatcaacctatcatactgcacagaaataacagaccgctcactgatttcactatcaaaatgctcaaagctgaatactctggagattcgtggctgccccagggtttcatccatcgggctctcagaaacagcgatggggtgcaggctgctttccaagcttgatattaagaaatgctttgggattaatgatgctggaatgctttacctttcccagttctctcatagcctccgtcagataaacttgtcatactgttcagtcaccgatattgggcttctttccctttcttgcatatccggcctgcagaacatgacgatcgtccatgtagcgggtataacgcctaatggcttggcagctactcttatggtttgtggtggtttgacgaaagtgaagcttcatgaagcattcagatccatgatgcttcctcacatgataaaaaatgttgaggcacgcggctgtgttttccaatggattgataaaccattcaaggttgaggtggaaccttgtgatgtatggaagcaacagtcgcaagacgtgcttgtacgatgagaattgagttgaccctcgagcatgtggctatcgtggaaatcatggcatgcatcgttatggatggatgggttgttggctggcaatgtcatccgcgcaagtgattcctgtgtttgagcataggtcttgatgttgttgtatactggtataagcaagtgattcctgtgtcatccgcaagtgaagttgctgtatagaatactaccatgtaaagatgtcgatacggaagggatgagaaaatggttttgaaatttagtacgatatgccttttcctatgttcgtttagttttaatccgtactatcttctactgtttct

SEQ ID NO: 26121 - DNA, 2882 bp, Zea Mays
catcgtcgtctccccgcctcaccacatctcacctcgtctcctcctccggtccttcccccatctcttcgccggcttccatttcttgcctgccagtcactctcgtccgccgcagatcgagaagccgccaccaaaccccccctccaccaccgtatgaccatgacagcccagcagcaccggcaccccaagcgccgctgcgtcgccctctccctttctccgtccctcgcgcgcatccccggcgcccccacgccgccgctcgactcgctggccgacgagcttctcttccttgtcctggaccgcgtggcccaggccgacccgcgggcgctcaagtccttcgcgctggcctcccgcgcctgccacgccgcggagtccagccaccgccggacgctccgcccgctccgcgcggacctcctgcccgccgcgctggcgcggtacccgaccgcgacccgcctcgacctcaccctctgcgcgcgcgtccccgacgccgccctcgcctccgccgccgtctccgggtcctcctccgccctccgcgccgtcgacctctcctgctcccgcgggttcagcgccgcgggcgtctccgagctcgccgtcgcctgcccgggcctcgtcgacctcgacctctccaatggggtcgacctcggggacgccgcggcggccgaggtggcgcgggccagggcgctccggaggctctcgctggcccgctggaagccgctcaccgacatgggcctcggatgcgtcgccgtcgggtgcacggagctgagggagctctcgctcaagtggtgccttgggctcacggatctggggatccagctcctcgccctcaagtgcaggaagctcaccagcctggatctctcctacaccatgatcacaaaggctagcttgcctcccatcatgaagctacccagtcttcaagagttgacactggtggggtgtattgcgatcgatgatgatgctcttggtagtcttgagagagaatgcagtaaatcactacaggtgtgggagtttcatccatcctgaagtcggtacccaatctattggaactggaactttcatactgctgtcctgtcactccttctatggtgagaagcttccagaagcttgctaaacttcagaccctgaagctggaaggctccaaattcatggccgatggactaaaagccattggaacctcttgtgcttctttaagggaactaagtctgagcaagtcatctggagtgaccgacacagaactctcttttgctgtgtcaaggctaaagaacctgctgaagctggacattacttgttgtcgcaatatcactgatgtttcactagcggccataactagttcatgctcttctctcatctctatgaggatggagtcttgtagccgtgtttccagtggagcactccaactgatcgggaagcactgttctcgcttggaagagttggaccttactgacagtgatttggatgacgaaggattgaaagctcttgccagatgcagcgaactttcgagtctaaaaattggtatttgcttgaagataagtgatgaaggtcttacccacatcggaaggtcttgcccaaaactccgcgagattgatttgtacaggtgtggaggccttagcgatgatggaattattcaaattgcgcagagttgtccgatgctagagtctatcaacctatcatactgcacagaaataacagaccgctcactgatttcactatcaaaatgctcaaagctgaatactctggagattcgtggctgccccagggtttcatccatcgggctctcagaaacagcgatggggtgcaggctgctttccaagcttgatattaagaaatgctttgggattaatgatgctggaatgctttacctttcccagttctctcatagcctccgtcagataaacttgtcatactgttcagtcaccgatattgggcttctttccctttcttgcatatccggcctgcagaacatgacgatcgtccatgtagcgggtataacgcctaatggcttggcagctactcttatggtttgtggtggtttgacgaaagtgaagcttcatgaagcattcagatccatgatgcttcctcacatgataaaaaatgttgaggcacgcggctgtgttttccaatggattgataaaccattcaaggtattctacggctcccctggttgccttacacacagcattagacccttgtgctcgccaactcgttcttgcctaatttgctactcgaaaacgctacacactatttgtttcagaaaagcttggttctattcagctgtgttttgtgctgccagatctaaatgcaatgctgtgttcttttctgtgctttcagtatattgtctatgattgaaacacacaacccatgattttgcttatggatggtgtttttttcccttcaaaaaaaggcttaaagaagagcatagcacagttgtcttgaatctattgagtgggtttgttcttacagagctattacaaggctgcaaaagtaaaacagtgtctgtctaataactggtgtggcattgtaggttgaggtggaaccttgtgatgtatggaagcaacagtcgcaagacgtgcttgtacgatgagaattgagttgaccctcgagcatgtggctatcgtggaaatcatggcatgcatcgttatggatggatgggttgttggctggcaatgtcatccgcgcaagtgattcctgtgtttgagcataggtcttgatgttgttgtatactggtataagcaagtgattcctgtgtcatccgcaagtgaagttgctgtatagaatactaccatgtaaagatgtcgatacggaagggatgagaaaatggttttgaaatttagtacgatatgccttttcctatgttcgtttagttttaatccgtactatcttctactgtttct

SEQ ID NO: 26122 - DNA, 2409 bp, Zea Mays
cccgctatgccgcgcggtttctctgtctctctctgctcgtccggtcggtgcccatggtcggtctgtgttcgcaccctggccgagctccatgccatggcatctctctgctcgctccttcaacttcgccgattcaccaagctctcacggcgcccagcctctgtgccgaggcctatcaactctctcaccctcggccggcgctctgcccaatccccacttcggtcacttctccctgctgcgtgtgtcgagctcctctgttgcacgcacgaagctctctgctcgccgaggccggttccttgctcgcgccgcggttctctcccaactccctgccgcgtgctcctcgtccggatcggccgcgacctcgccgtcgttcctcagctcgctgcgcgcactgctccactgtgtcgatccgcatatctccttgagttcgtgcgtgtgcgcagcttcctcaagtcgtcgtgtgcccagctcgccggtcgagcttctccctcgcgcttggatccggccgttaacgcctagccatatgttctttttcccccagctcgtggatgtcgttgttccgtgtgcttggccttcagagttcgtcggccatcacgacatccccgacatccccgtctatcgcgccatgctttggttgttgatctgcgcagttcctattcgacaatcggttccgtctccgtcgaactcatattcgtcatcccgccaaactccttcaacactgccccaccccgtcgtcgttgttccgtcgcctcgcttcgacgccagtccctacgtgctgtctccgacttgtgttcgcgtcgacaaaagaatcccaagaaaatatagagaagcaagctcctggtcgatgcccaagtgctcggtgaaaggccagaaccagaatcatcgtcgtttatgcggagttctacttaatatagagagattccaagagttgtggatggaaaagaaagtgaagctccattccatactcgtcagttgtttgatcgaagacttcaatcgaagactgtcatcgttcccgcaaacactgaatcaagttgataacggtgagctaaatcactatttttactatagattttatgatcgtgaaataagacgcgtagtttgtgtatgaagtttaagttagaaataccagtgatgcgaggtgtgcttcgttgtatttagttatcaagtatatttgaactagttctattttgcagagtgtagtatttcggtgatgtgtaggttaactttagtattttatgcaattatcgataaaacagtcgatgctagttgtgttcagtgcgcgtaagatgaaatcgatgtcctgcgctagtagttagtgtcatctatgtttgtgatcgataatgttggagtaggatatgatcgatgattttcttatctagtgattggtgtgatggtatattgtataaaatatgctgactaggtaaaaatatatgtagtaatatgaatctgtaaataaatcataaaagaaagtagagcatgtgtatattttattgtattgcgatgtatgcactacatccgaataggctagaaaagcgtaattattataattagtcgtacattgctagctagtatttgattaatgttttgttataagtgtttcattctcttcggtgtagatatctatcttatactctttatactcatgctcatacatgtgcatcgtgcatctcatgaggtacgataaataatcgcgtgatgcggaagacgaaccaagtcgaccccaagcgcgggctaatccgcatggtgatgctgatggacgaacctacctgatcaagtgctaggacaaagatgatcgtcaagtggacatcgtctaacaacactaacctagtgttattcaggcaagccccggtgcatttgccacctccttgtgttttaacatctttatcaccttgtttgatgcattaggtgataggagttgtgtgctaaaccgctgatgcatttccttccttgaaaattgattacccttccttgataccctttttgaaaagaattttatgatgcttagccttgctttagcaaacaaaaatgttttgttttaaaacaaaagtgatgcttcaatgggtgggaatgttttcaaaaagaaaaacttgtgatggtggatccatcaaggccttgatgggttcaacatcgaaaaagatgtacctctgccaggtaccaaactttgggttgaaaataataaagctaagaccgggcggttgacttgcatgagaagggagtctcggtgtagtgtctccgtctgagtcgattaaggaccgtctcgatgtaggcttgctgatcgaggaccttttaactggtcacatgcctcatcatgggtaagctttgcctcgggcagactaataccagaataagataacacgcaatgggagtggagagatggcgagagtagcgtgtaccctccatggcaagaggctg

SEQ ID NO: 26123 - DNA, 2360 bp, Zea Mays
aggcaggcccgcatcgcgttcgatttccaaccaatcacactccgaccactgtgaccacacgctcgcgcgcccatggcggcgacctcgccgacgccgacgctggcgaagcctgcagccgccgcgcacgcccgagccccgtccgcgggtcccagacgtgtctccttgacctcctgccgctgccaccgccgccgctctactccgtctcggtggaggagtctcccacgatgcagtcgccgtggtgggaagccggtcgtcacagaggtcatcgacgcggcggcaccggataaggggccagagactgggagcaagggagaggaagagaaggaggccgtagcggggcgcggggcgccggggtggctcaggcttgacggggttgcagcggacatcctcgccatcgccgcgcctgccgtgctcgcgctcgccgcggaccccatcacggcgctcgtcgacactgccttcgtcgggcatatcggttcagctcaacttgcggctgttggtgcatctacttccatattcaatttggtatccaagctgtttaatgtgccgctacttaatgtcacaacatcctttgttgctgagcagcaggcaaaggatggcaattcgaacactggaggtgaaattctcacctaggagatgaatttttgacgccactagagaaggcaaggcaaccaaagaaggttcttccggcagtgtcaacatccttggctctagctgctggcattggattactggaaatggtagctctgattgttggatctgggaccctgatgaacatcattggtattcctgttgattcaccaatgcgagcaccagcagaacagtttcttacactgagggcacttggtgctccaccgatcatagtggcacttgcagctcagggtgcatttcgtggatttctggatacgaggacaccattgtatgctgtgggtgctggcaacctattaaatgcattacttgatgtggtacttatttttccacttggtctaggagtaagtggtgctgcactggccaccgtgacctctgagtacttgacagcaatcatcctcctttggaagttgaatgatgaagtagatctattgtcatggaatataattgaggatggagtcatccgctacctgaaatctggacaattgcagtattcttgacactgacactagctacatccctggctgcaagggaagggcctgttccaatggcgggctatgagatatgcttgcaagtgtggttaacaatttctctgctcaatgatgctctagcccttgctggccaggctctacttgccagcgaatatgcaaaagggaattacaagcaagcccgcacggttttatacagagtcctgcaggttggtggtgtgactggttttgtccttgctgcttccttatttgttggatttggatctttgtccttgctgtttacagatgatccagcagttttagatgttgcacggtctggagtgtggtttgtcaccatttctcagccggtgaatgctattgcattcgtggctgatgggctctactatggtgtttctgactttgcctatgctgcatattccacgttttttgcgggagcggtctcatcaatattcctactattagctgctcctaattatggtctcggtggcatatgggctggtcttactctatttatgagtttgcgtgcagttgctgggttctggaggttagggagcaaaggtggaccttggaatgttatcttatctggtcagatagtaagtaaaacaaagatatgaccagattcgattgttcaattgatctcccaccgctagcaggtcggtagcaagaaatgtgcatcctgctgcaggtcatatatagctgacaagcaatatatagcaaaaaatgtgcatcctgcgtgacagggagctgatgcatctctgtggaagatatacgcttgtagttggtgttggatagctgggctatcttgtggctgttgtaggggctcacagctttcaactgtgttgtaccatatactgtataagaaagatctgttcagttataacgaaagaaagaaaactggcttcaaatagaatacaaaaggctgtgtaacgaaagaaagaaagccgagttcaaatagaaaatcccttcatgtaaatttcgttctggaaatcctccttttgaatgaagctttatccaacattctaggattggtaaatccggtaatcatttgtggcattatgtaactcaatgatggtcagaaatataataatctgagttggtttttccgatatgcatcataatcggacattgtatatttgctacgaatttgggtgaacccccagcttcagacaaaagtaatgtgataaaagaaaaggaaagaaatacagaaaaagattaaagggggacaac

SEQ ID NO: 26124 - DNA, 2374 bp, Zea Mays
aggcaggcccgcatcgcgttcgatttccaaccaatcacactccgaccactgtgaccacacgctcgcgcgcccatggcggcgacctcgccgacgccgacgctggcgaagcctgcagccgccgcgcacgcccgagccccgtccgcgggtcccagacgtgtctccttgacctcctgccgctgccaccgccgccgctctactccgtctcggtggaggagtctcccacgatgcagtcgccgtggtgggaagccggtcgtcacagaggtcatcgacgcggcggcaccggataaggggccagagactgggagcaagggagaggaagagaaggaggccgtagcggggcgcggggcgccggggtggctcaggcttgacggggttgcagcggacatcctcgccatcgccgcgcctgccgtgctcgcgctcgccgcggaccccatcacggcgctcgtcgacactgccttcgtcgggcatatcggttcagctcaacttgcggctgttggtgcatctacttccatattcaatttggtatccaagctgtttaatgtgccgctacttaatgtcacaacatcctttgttgctgagcagcaggcaaaggatggcaattcgaacactggaggtgaaagagatgaatttttgacgccactagagaaggcaaggcaaccaaagaaggttcttccggcagtgtcaacatccttggctctagctgctggcattggattactggaaatggtagctctgattgttggatctgggaccctgatgaacatcattggattcaccaatgcgagcaccagcagaacagtttcttacactgagggcacttggtgctccaccgatcatagtggcacttgcagctcagggtgcatttcgtggatttctggatacgaggacaccattgtatgctgtgggtgctggcaacctattaaatgcattacttgatgtggtacttatttttccacttggtctaggagtaagtggtgctgcactggccaccgtgacctctgagtacttgacagcaatcatcctcctttggaagttgaatgatgaagtagatctattgtcatggaatataattgaggatggagtcatccgctacctgaaatctggtggtctactaattggcaggacaattgcagtattcttgacactgacactagctacatccctggctgcaagggaagggcctgttccaatggcgggctatgagatatgcttgcaagtgtggttaacaatttctctgctcaatgatgctctagcccttgctggccaggctctacttgccagcgaatatgcaaaagggaattacaagcaagcccgcacggttttatacagagtcctgcaggttggtggtgtgactggttttgtccttgctgcttccttatttgttggatttggatctttgtccttgctgtttacagatgatccagcagttttagatgttgcacggtctggagtgtggttgttggacttttgcagtttgtcaccatttctcagccggtgaatgctattgcattcgtggctgatgggctctactatggtgtttctgactttgcctatgctgcatattccacgttttttgcgggagcggtctcatcaatattcctactattagctgctcctaattatggtctcggtggcatatgggctggtcttactctatttatgagtttgcgtgcagttgctgggttctggaggttagggagcaaaggtggaccttggaatgttatcttatctggtcagatagtaagtaaaacaaagatatgaccagattcgattgttcaattgatctcccaccgctagcaggtcggtagcaagaaatgtgcatcctgctgcaggtcatatatagctgacaagcaatatatagcaaaaaatgtgcatcctgcgtgacagggagctgatgcatctctgtggaagatatacgcttgtagttggtgttggatagctgggctatcttgtggctgttgtaggggctcacagctttcaactgtgttgtaccatatactgtataagaaagatctgttcagttataacgaaagaaagaaaactggcttcaaatagaatacaaaaggctgtgtaacgaaagaaagaaagccgagttcaaatagaaaatcccttcatgtaaatttcgttctggaaatcctccttttgaatgaagctttatccaacattctaggattggtaaatccggtaatcatttgtggcattatgtaactcaatgatggtcagaaatataataatctgagttggtttttccgatatgcatcataatcggacattgtatatttgctacgaatttgggtgaacccccagcttcagacaaaagtaatgtgataaaagaaaaggaaagaaatacagaaaaagattaaagggggacaac

SEQ ID NO: 26125 - DNA, 2266 bp, Zea Mays
aggcaggcccgcatcgcgttcgatttccaaccaatcacactccgaccactgtgaccacacgctcgcgcgcccatggcggcgacctcgccgacgccgacgctggcgaagcctgcagccgccgcgcacgcccgagccccgtccgcgggtcccagacgtgtctccttgacctcctgccgctgccaccgccgccgctctactccgtctcggtggaggagtctcccacgatgcagtcgccgtggtgggaagccggtcgtcacagaggtcatcgacgcggcggcaccggataaggggccagagactgggagcaagggagaggaagagaaggaggccgtagcggggcgcggggcgccggggtggctcaggcttgacggggttgcagcggacatcctcgccatcgccgcgcctgccgtgctcgcgctcgccgcggaccccatcacggcgctcgtcgacactgccttcgtcgggcatatcggcaaaggatggcaattcgaacactggaggtgaaattctcacctaggagatgaatttttgacgccactagagaaggcaaggcaaccaaagaaggttcttccggcagtgtcaacatccttggctctagctgctggcattggattactggaaatggtagctctgattgttggatctgggaccctgatgaacatcattggtattcctgttgattcaccaatgcgagcaccagcagaacagtttcttacactgagggcacttggtgctccaccgatcatagtggcacttgcagctcagggtgcatttcgtggatttctggatacgaggacaccattgtatgctgtgggtgctggcaacctattaaatgcattacttgatgtggtacttatttttccacttggtctaggagtaagtggtgctgcactggccaccgtgacctctgagtacttgacagcaatcatcctcctttggaagttgaatgatgaagtagatctattgtcatggaatataattgaggatggagtcatccgctacctgaaatctggtggtctactaattggcaggacaattgcagtattcttgacactgacactagctacatccctggctgcaagggaagggcctgttccaatggcgggctatgagatatgcttgcaagtgtggttaacaatttctctgctcaatgatgctctagcccttgctggccaggctctacttgccagcgaatatgcaaaagggaattacaagcaagcccgcacggttttatacagagtcctgcaggttggtggtgtgactggttttgtccttgctgcttccttatttgttggatttggatctttgtccttgctgtttacagatgatccagcagttttagatgttgcacggtctggagtgtggtttgtcaccatttctcagccggtgaatgctattgcattcgtggctgatgggctctactatggtgtttctgactttgcctatgctgcatattccacgttttttgcgggagcggtctcatcaatattcctactattagctgctcctaattatggtctcggtggcatatgggctggtcttactctatttatgagtttgcgtgcagttgctgggttctggaggttagggagcaaaggtggaccttggaatgttatcttatctggtcagatagtaagtaaaacaaagatatgaccagattcgattgttcaattgatctcccaccgctagcaggtcggtagcaagaaatgtgcatcctgctgcaggtcatatatagctgacaagcaatatatagcaaaaaatgtgcatcctgcgtgacagggagctgatgcatctctgtggaagatatacgcttgtagttggtgttggatagctgggctatcttgtggctgttgtaggggctcacagctttcaactgtgttgtaccatatactgtataagaaagatctgttcagttataacgaaagaaagaaaactggcttcaaatagaatacaaaaggctgtgtaacgaaagaaagaaagccgagttcaaatagaaaatcccttcatgtaaatttcgttctggaaatcctccttttgaatgaagctttatccaacattctaggattggtaaatccggtaatcatttgtggcattatgtaactcaatgatggtcagaaatataataatctgagttggtttttccgatatgcatcataatcggacattgtatatttgctacgaatttgggtgaacccccagcttcagacaaaagtaatgtgataaaagaaaaggaaagaaatacagaaaaagattaaagggggacaac

SEQ ID NO: 26126 - DNA, 2332 bp, Zea Mays
aggcaggcccgcatcgcgttcgatttccaaccaatcacactccgaccactgtgaccacacgctcgcgcgcccatggcggcgacctcgccgacgccgacgctggcgaagcctgcagccgccgcgcacgcccgagccccgtccgcgggtcccagacgtgtctccttgacctcctgccgctgccaccgccgccgctctactccgtctcggtggaggagtctcccacgatgcagtcgccgtggtgggaagccggtcgtcacagaggtcatcgacgcggcggcaccggataaggggccagagactgggagcaagggagaggaagagaaggaggccgtagcggggcgcggggcgccggggtggctcaggcttgacggggttgcagcggacatcctcgccatcgccgcgcctgccgtgctcgcgctcgccgcggaccccatcacggcgctcgtcgacactgccttcgtcgggcatatcggttcagctcaacttgcggctgttggtgcatctacttccatattcaatttggtatccaagctgtttaatgtgccgctacttaatgtcacaacatcctttgttgctgagcagcaggcaaaggatggcaattcgaacactggaggtgaaagagatgaatttttgacgccactagagaaggcaaggcaaccaaagaaggttcttccggcagtgtcaacatccttggctctagctgctggcattggattactggaaatggtagctctgattgttggatctgggaccctgatgaacatcattggtattcctgttgattcaccaatgcgagcaccagcagaacagtttcttacactgagggcacttggtgctccaccgatcatagtggcacttgcagctcagggtgcatttcgtggatttctggatacgaggacaccattgtatgctgtgggctaatctatgtaattgattcaaaatgatcaagtaaggatctgatagtctgatgcttacaggtacttgacagcaatcatcctcctttggaagttgaatgatgaagtagatctattgtcatggaatataattgaggatggagtcatccgctacctgaaatctggtggtctactaattggcaggacaattgcagtattcttgacactgacactagctacatccctggctgcaagggaagggcctgttccaatggcgggctatgagatatgcttgcaagtgtggttaacaatttctctgctcaatgatgctctagcccttgctggccaggctctacttgccagcgaatatgcaaaagggaattacaagcaagcccgcacggttttatacagagtcctgcaggttggtggtgtgactggttttgtccttgctgcttccttatttgttggatttggatctttgtccttgctgtttacagatgatccagcagttttagatgttgcacggtctggagtgtggtttgtcaccatttctcagccggtgaatgctattgcattcgtggctgatgggctctactatggtgtttctgactttgcctatgctgcatattccacgttttttgcgggagcggtctcatcaatattcctactattagctgctcctaattatggtctcggtggcatatgggctggtcttactctatttatgagtttgcgtgcagttgctgggttctggaggttagggagcaaaggtggaccttggaatgttatcttatctggtcagatagtaagtaaaacaaagatatgaccagattcgattgttcaattgatctcccaccgctagcaggtcggtagcaagaaatgtgcatcctgctgcaggtcatatatagctgacaagcaatatatagcaaaaaatgtgcatcctgcgtgacagggagctgatgcatctctgtggaagatatacgcttgtagttggtgttggatagctgggctatcttgtggctgttgtaggggctcacagctttcaactgtgttgtaccatatactgtataagaaagatctgttcagttataacgaaagaaagaaaactggcttcaaatagaatacaaaaggctgtgtaacgaaagaaagaaagccgagttcaaatagaaaatcccttcatgtaaatttcgttctggaaatcctccttttgaatgaagctttatccaacattctaggattggtaaatccggtaatcatttgtggcattatgtaactcaatgatggtcagaaatataataatctgagttggtttttccgatatgcatcataatcggacattgtatatttgctacgaatttgggtgaacccccagcttcagacaaaagtaatgtgataaaagaaaaggaaagaaatacagaaaaagattaaagggggacaac

SEQ ID NO: 26127 - DNA, 2393 bp, Zea Mays
aggcaggcccgcatcgcgttcgatttccaaccaatcacactccgaccactgtgaccacacgctcgcgcgcccatggcggcgacctcgccgacgccgacgctggcgaagcctgcagccgccgcgcacgcccgagccccgtccgcgggtcccagacgtgtctccttgacctcctgccgctgccaccgccgccgctctactccgtctcggtggaggagtctcccacgatgcagtcgccgtggtgggaagccggtcgtcacagaggtcatcgacgcggcggcaccggataaggggccagagactgggagcaagggagaggaagagaaggaggccgtagcggggcgcggggcgccggggtggctcaggcttgacggggttgcagcggacatcctcgccatcgccgcgcctgccgtgctcgcgctcgccgcggaccccatcacggcgctcgtcgacactgccttcgtcgggcatatcggttcagctcaacttgcggctgttggtgcatctacttccatattcaatttggtatccaagctgtttaatgtgccgctacttaatgtcacaacatcctttgttgctgagcagcaggcaaaggatggcaattcgaacactggaggtgaaagagatgaatttttgacgccactagagaaggcaaggcaaccaaagaaggttcttccggcagtgtcaacatccttggctctagctgctggcattggattactggaaatggtagctctgattgttggatctgggaccctgatgaacatcattggtattcctgttgattcaccaatgcgagcaccagcagaacagtttcttacactgagggcacttggtgctccaccgatcatagtggcacttgcagctcagggtgcatttcgtggatttctggatacgaggacaccattgtatgctgtgggtgctggcaacctattaaatgcattacttgatgtggtacttatttttccacttggtctaggagtaagtggtgctgcactggccaccgtgacctctgagtacttgacagcaatcatcctcctttggaagttgaatgatgaagtagatctattgtcatggaatataattgaggatggagtcatccgctacctgaaatctgccacttgaatttgaacgattttcaggtggtctactaattggcaggacaattgcagtattcttgacactgacactagctacatccctggctgcaagggaagggcctgttccaatggcgggctatgagatatgcttgcaagtgtggttaacaatttctctgctcaatgatgctctagcccttgctggccaggctctacttgccagcgaatatgcaaaagggaattacaagcaagcccgcacggttttatacagagtcctgcaggttggtggtgtgactggttttgtccttgctgcttccttatttgttggatttggatctttgtccttgctgtttacagatgatccagcagttttagatgttgcacggtctggagtgtggtttgtcaccatttctcagccggtgaatgctattgcattcgtggctgatgggctctactatggtgtttctgactttgcctatgctgcatattccacgttttttgcgggagcggtctcatcaatattcctactattagctgctcctaattatggtctcggtggcatatgggctggtcttactctatttatgagtttgcgtgcagttgctgggttctggaggttagggagcaaaggtggaccttggaatgttatcttatctggtcagatagtaagtaaaacaaagatatgaccagattcgattgttcaattgatctcccaccgctagcaggtcggtagcaagaaatgtgcatcctgctgcaggtcatatatagctgacaagcaatatatagcaaaaaatgtgcatcctgcgtgacagggagctgatgcatctctgtggaagatatacgcttgtagttggtgttggatagctgggctatcttgtggctgttgtaggggctcacagctttcaactgtgttgtaccatatactgtataagaaagatctgttcagttataacgaaagaaagaaaactggcttcaaatagaatacaaaaggctgtgtaacgaaagaaagaaagccgagttcaaatagaaaatcccttcatgtaaatttcgttctggaaatcctccttttgaatgaagctttatccaacattctaggattggtaaatccggtaatcatttgtggcattatgtaactcaatgatggtcagaaatataataatctgagttggtttttccgatatgcatcataatcggacattgtatatttgctacgaatttgggtgaacccccagcttcagacaaaagtaatgtgataaaagaaaaggaaagaaatacagaaaaagattaaagggggacaac

SEQ ID NO: 26128 - DNA, 2287 bp, Zea Mays
ccaaaaggcaggcccgcatcgcgttcgatttccaaccaatcacactccgaccactgtgaccacacgctcgcgcgcccatggcggcgacctcgccgacgccgacgctggcgaagcctgcagccgccgcgcacgcccgagccccgtccgcgggtcccagacgtgtctccttgacctcctgccgctgccaccgccgccgctctactccgtctcggtggaggagtctcccacgatgcagtcgccgtggtgggaagccggtcgtcacagaggtcatcgacgcggcggcaccggataaggggccagagactgggagcaagggagaggaagagaaggaggccgtagcggggcgcggggcgccggggtggctcaggcttgacggggttgcagcggacatcctcgccatcgccgcgcctgccgtgctcgcgctcgccgcggaccccatcacggcgctcgtcgacactgccttcgtcgggcatatcggttcagctcaacttgcggctgttggtgcatctacttccatattcaatttggtatccaagctgtttaatgtgccgctacttaatgtcacaacatcctttgttgctgagcagcaggcaaaggatggcaattcgaacactggaggtgaaattctcacctaggagatgaatttttgacgccactagagaaggcaaggcaaccaaagaaggttcttccggcagtgtcaacatccttggctctagctgctggcattggattactggaaatggtagctctgattgttggatctgggaccctgatgaacatcattggtattcctgttgattcaccaatgcgagcaccagcagaacagtttcttacactgagggcacttggtgctccaccgatcatagtggcacttgcagctcagggtgcatttcgtggatttctggatacgaggacaccattgtatgctgtgggtacttgacagcaatcatcctcctttggaagttgaatgatgaagtagatctattgtcatggaatataattgaggatggagtcatccgctacctgaaatctggtggtctactaattggcaggacaattgcagtattcttgacactgacactagctacatccctggctgcaagggaagggcctgttccaatggcgggctatgagatatgcttgcaagtgtggttaacaatttctctgctcaatgatgctctagcccttgctggccaggctctacttgccagcgaatatgcaaaagggaattacaagcaagcccgcacggttttatacagagtcctgcaggttggtggtgtgactggttttgtccttgctgcttccttatttgttggatttggatctttgtccttgctgtttacagatgatccagcagttttagatgttgcacggtctggagtgtggtttgtcaccatttctcagccggtgaatgctattgcattcgtggctgatgggctctactatggtgtttctgactttgcctatgctgcatattccacgttttttgcgggagcggtctcatcaatattcctactattagctgctcctaattatggtctcggtggcatatgggctggtcttactctatttatgagtttgcgtgcagttgctgggttctggaggttagggagcaaaggtggaccttggaatgttatcttatctggtcagatagtaagtaaaacaaagatatgaccagattcgattgttcaattgatctcccaccgctagcaggtcggtagcaagaaatgtgcatcctgctgcaggtcatatatagctgacaagcaatatatagcaaaaaatgtgcatcctgcgtgacagggagctgatgcatctctgtggaagatatacgcttgtagttggtgttggatagctgggctatcttgtggctgttgtaggggctcacagctttcaactgtgttgtaccatatactgtataagaaagatctgttcagttataacgaaagaaagaaaactggcttcaaatagaatacaaaaggctgtgtaacgaaagaaagaaagccgagttcaaatagaaaatcccttcatgtaaatttcgttctggaaatcctccttttgaatgaagctttatccaacattctaggattggtaaatccggtaatcatttgtggcattatgtaactcaatgatggtcagaaatataataatctgagttggtttttccgatatgcatcataatcggacattgtatatttgctacgaatttgggtgaacccccagcttcagacaaaagtaatgtgataaaagaaaaggaaagaaatacagaaaaagattaaagggggacaac

SEQ ID NO: 26129 - DNA, 3679 bp, Zea Mays
atgggcggccgaggtggcggggaggaggagggggtggcggacggcggccggcatgggcggaggacgaacgtcggcggcggcggaggggaggacagcagggacgaggggtggcggcggtggtcggtgctggtggcgacggtgtggatccaggcgctgacggggaccaacttcgacttctcggcctactcgtcggcgctcaagtcgtcgctgggtgtctcgcaggaggcgctcaactgcctggccacggcgtcggacctgggcaaggcgctggggtggtcgtcgggcctggcgctgctccacatgccgctccatgccgttctcatggtctccgccgcgatggggctcgccgcctacgccgtgcagtactactgcctggcgttcgccggcggccctgctgcgggagcgggagcgtcgtcgtccgtggccgtcccctaccctctggtgttcttggtctgcttgatagcagggtgcagcatctgctggttcaacacggtctgcttcgttctctgcatccgcagcttctctgcgagcaaccgctccctagccctctccctctcaataagcttcaacggactcagcgctgccttctacactctctttgcgaatgccctctcccctttctccccagctgtctacctcctcctcaatgcaatcctccctcttggtgtctctgttcttgcactcccagcgatcctcctctgccaccaaaatgacggccatgtccaaagtgcgcccaggcatgacgggcgtgtcttcctcggtctctacatcctcgcattcatcaccggcatatatctggtggtctttggatctttcaccgcgaccagctctactgcatgggtcatcctcacaggtgccatggtcctcctcgcccttcctttcatcatccctgcctgctccagttgctcatatgtggatacagatggccctgaccctgcatcgccactaaaccatgatgacccacataagccactcctaataagtaacaatcatcagatggagtccaatgccatgatgcaaaatccaaaggagaaccagatgcagggcaattgttgtggaacagtgatgggcaagggccgcctggcgacactcggtgaagaacacagtgcaaaaaagctcattcggtgtgtggacttttggctctactacacagcctacttctgtggagccactgttggcctggtatacagcaacaacttggggcagattgcgcagtcattgaaccagcagtcacagctcaccatgctccttgctgtctactcatcctgctccttcttcggtcgtcttctctctgcactacctgaccttcacaggaagatgtcacttgctcgcacagggtggcttgctgctgcattggtccccatgccaatggcctttttccttatgtggaagcaacaagatggaagcaccctggtagcaggaacagcactaattggtctaagctcagggttcatctttgctgcagcagtgtcagtgacctccgagctctttggacccaatagtgttggggtgaatcacaacattcttattaccaatatcccgcttggctcactcctctatgggcagattgctgccatggtatacgatgcaaatggccaaaagatgacagtagtggataaccgcactggcattgttgacaccatgactgtgtgcatgggggtgaagtgctactcaaccactttcttcgtgtgggcttgcatcacatttctggggttagcatcaagcatagttctattcatacgaacaaagtcagcttatgacactgctgctagtcggtcaagttgttcagctcaacttgcggctgttggtgcatctacttccatattcaatttggtatccaagctgtttaatgtgccgctacttaatgtcacaacatcctttgttgctgagcagcaggcaaaggatggcaattcgaacactggaggtgaaagagatgaatttttgacgccactagagaaggcaaggcaaccaaagaaggttcttccggcagtgtcaacatccttggctctagctgctggcattggattactggaaatggtagctctgattgttggatctgggaccctgatgaacatcattggtattcctgttgattcaccaatgcgagcaccagcagaacagtttcttacactgagggcacttggtgctccaccgatcatagtggcacttgcagctcagggtgcatttcgtggatttctggatacgaggacaccattgtatgctgtgggtgctggcaacctattaaatgcattacttgatgtggtacttatttttccacttggtctaggagtaagtggtgctgcactggccaccgtgacctctgagtacttgacagcaatcatcctcctttggaagttgaatgatgaagtagatctattgtcatggaatataattgaggatggagtcatccgctacctgaaatctggtggtctactaattggcaggacaattgcagtattcttgacactgacactagctacatccctggctgcaagggaagggcctgttccaatggcgggctatgagatatgcttgcaagtgtggttaacaatttctctgctcaatgatgctctagcccttgctggccaggctctacttgccagcgaatatgcaaaagggaattacaagcaagcccgcacggttttatacagagtcctgcaggttggtggtgtgactggttttgtccttgctgcttccttatttgttggatttggatctttgtccttgctgtttacagatgatccagcagttttagatgttgcacggtctggagtgtggtttgtcaccatttctcagccggtgaatgctattgcattcgtggctgatgggctctactatggtgtttctgactttgcctatgctgcatattccacgttttttgcgggagcggtctcatcaatattcctactattagctgctcctaattatggtctcggtggcatatgggctggtcttactctatttatgagtttgcgtgcagttgctgggttctggaggttagggagcaaaggtggaccttggaatgttatcttatctggtcagatagtaagtaaaacaaagatatgaccagattcgattgttcaattgatctcccaccgctagcaggtcggtagcaagaaatgtgcatcctgctgcaggtcatatatagctgacaagcaatatatagcaaaaaatgtgcatcctgcgtgacagggagctgatgcatctctgtggaagatatacgcttgtagttggtgttggatagctgggctatcttgtggctgttgtaggggctcacagctttcaactgtgttgtaccatatactgtataagaaagatctgttcagttataacgaaagaaagaaaactggcttcaaatagaatacaaaaggctgtgtaacgaaagaaagaaagccgagttcaaatagaaaatcccttcatgtaaatttcgttctggaaatcctccttttgaatgaagctttatccaacattctaggattggtaaatccggtaatcatttgtggcattatgtaactcaatgatggtcagaaatataataatctgagttggtttttccgatatgcatcataatcggacattgtatatttgctacgaatttgggtgaacccccagcttcagacaaaagtaatgtgataaaagaaaaggaaagaaatacagaaaaagattaaagggggacaac

SEQ ID NO: 26130 - DNA, 2102 bp, Zea Mays
cagcattccaaaacacgctcaaatgtacctacgaaaatccaactcgtagccctcttcattagaataataatggagatacccagcagaagaggagacgacagattgcagaaaacccaaaccttctcccattttgctcaagattttatctgcaaagctaaaagcattctgtcaataaacataaccatatatcgaactaaatctaagtccaaaaggatactgggaactatacgaaccgcatactgcataaagtttgttacttttttgcgaaaaaggttattgctattaaaatcacaaaaaactaaagatcagaatgggaaccctgcttcacacattattagcttgatacgacaaaggaaaacctaaaggtgtactaactgccagtttgcaatcgagatcttataacaataaaaatcagataaaaccaaaataacaaaaagatgttgccactaattacaaattattagacacaactaaacgatatatccatgcacaagggctcgaggaactgcaagtgttgccacatttacatagatcaccacagattaagtaacagctatcacaaagaacctcatgtgagatattggagagttaccccaaaaatccaaagacagctaaatggatcatgtaagcagcataatcgagtctgagagaaagcttatatggttcaacctataggcagatcaaagcatggccatttcagcacatgtaccgtaaaaaacaacctttcaacaatataccaacggagcaaccacgcgtatgagaatattatatttatgtatatataaaattatacatatattgttgaatattcaacatataaaaaaacttttattcaatgcttatcacactgccagtataaaaggttggtaatttcagatgtgatactaaaatgaaaaggcattcatatggagcagacatatataataactccaataacttgttgaaagagtggagacaattatctacttgggtgaacaacttaattgaactcccactgttgtagtcaaaagtgttgttgttgcttccatcatccatagacaaatgcataaggatctcttctctttttgtttccaaattgttcaactgataaagacgctgagtttaacaattgtgccccttcattctatctgatgatctcaagttccttcaccacatcattcattgttgggcgcctgggcagaccgtatacatagccaattgtataaatatcccttcaagccatagtattcttcattatatattgtaatgattagccaagaaaatagttgataataggatttgccacagattaatcacttaatgccactaatatcacctacgtggtgatagtctaaccatttcaatgactaaagttaatggattttcacaataatagtgcaagctggtagctaatgaccaaagattaagatttaataagatatgtagctaaataatgagttgaggagaacacaaaaaggtcattacccgatccatacatgaaatctgcttctattggcattctccttgctttctgcagtagtagacttgtactctttctttctgcttcagtgagttcagtccgggttgtgaaagataaaatcatttgagaaaaataccatggtgcaaagaattacagaaaccatggtttgaaaaatagggcataaatagtgcgatcaattcatgatgcagatgaggaatccacagtatacaactcacagaaatattgccctactgagacacataactaaatcttgatagaggtcaatctccattgggcatcgatggataggtggatatgtcagtatatttcttttcactaaacctacaacattatcagggcaaataactttgccaagcacaaggttactattgatgcataggagaatcatcccaaaacactgacctacccaaaaattggtgcttaacggtgaaacaattttctgagatcaacaaaccaatcggtcaatcacaaaacagagaaccgacaaattcagtgttggttttctacttacctgaagtccccaggtgcttgcactttgcctccgtcgcaccctccctgcgccacctatcgcggcctccctgcttcactgtcacgcggctgcgctgcacgtgcaggagccgat

SEQ ID NO: 26131 - DNA, 1403 bp, Zea Mays
tccgtaggatgttaaatattatgtaggatacaaaggctttatatatcacaagaggaagttcaacatttcatgttctaccaggaaaggacaattacacggtatattgtgccactgcgtttattgtgatcgacgatcacaagaaagcaaatcaaatttttattgtgagtgtcatttccatccctctcaacttctcaagcatcagcgtgaaacaagttgccatggatttgcttaggaactaactgcattagtaaaactgacataaaaataaaactgcacatccgcttcaaattcaacgagttaatggcttccaagattgtttgctacaaatggacttaaaatcaggttgcaggactcttctgttgtgtatgcatagtattctttgccgttgtccacattatatctcagagataccactgcccagtcatgttgcaggtggcaaatttcttaaaatcaggttgcatgttgcaggtttcttgatgctgttgtccatgaacagccgcatctgctcattctccggtttcaccttctcctacaggttgttaataatgacaaagcactaatgaaagaaaatttatttcggaaaacccactaaggtcatgcctttcaaaccacaattaacaattctatatttgcacagttgacaacaatcgatgttgtagtcacatgcataagtatattgtagaaaaccatactccatacagtaaagcaccaaccaatttcttccatattgtaccaaattcatgtccaaaaatagtatgaattaacaatagatatgaaacaacaaatattaatatgatatgtaaaatccatgtgagaaaatatcatcgtagtactaatattatattgacgatataaatatgtaataatattataaatacgtcgtaccaaatagattgaactggtgctgagcaaacattatcaatacgcacagattatttctaaaaagtcaatatacaatttttagtgataggtaaatatgtttatactaatctaatcctttttatcgatattgataagtctatgtggtatgtcttcacttagaacctagcttagggaaagaaaaaaagaactatgagtcatacatatggggtcttactgttacatgacattaaaaagatgcaaattacacatcacatatcagctacgctcttatcgcagcacaacatggttgtttcccctactcaagtgtttagataagggaatcgtttggggattttagttctgaaatatccaaacagaaaacatggtcctaattcggtaaccaaatacatgtaacacaaaagcatctatgttagttagaagcaaaagaaggggctaaaattccaagcacactgatgaagcacatgacagatgaagacataagcttccatttttttgagcagattgtgtttgcaaaatgtaaa

SEQ ID NO: 26132 - DNA, 1675 bp, Zea Mays
gaaatatgtggtctgctttgcttgtgttgacgccgaggagttccgtcttgcacaaatttgtggtctcaatattattattcaggttgatgacttggaagaagtcagtgagtactaccagaatagaggatgcttcagtgaacttattgctctcatggagagtggtcttggacttgaacgtgcacacatgggcatcttcacagaattgggagttctgtatgctagataccgctctgagaagcttatggagcacatcaaacttttctccacccgtctcaatattcctaagcttattcgagcctgtgatgaacagcagcactggaaagaacttacctacctgtacatacagtatgatgaatttgacaatgcagtcaccactattatgaaccactctcctgatgcatgggatcatatgcagttcaaggatgtttgcgttaaagttgcaaacgttgagctatattacaaggcagttcacttctatttgcaagagcatcctgatctcatcaatgatatgctgaatgtgcttgcacttcgtttagatcataccagagttgtagacataatgcgcaaggctggtcaattgcatcttgtgaaaccatatatggttgcagttcagagtaataatgtctctgctgtgaatgaagccttgaatgagctttatgttgaagaggaagactatgagagactccgtgaatcagttgacatgcatgacaactttgaccaaataggtcttgcccagaagctggagaagcatgaattgcttgagatgaggaggattgctgcctacatttacaagaaggctggcaggtggaagcaatccattgctctatcaaagaaagataacatgtacaaggattgtatggagacatgctcacaatctggtgaccgtgaactgtcagaggacttgcttgtgtattttatcgagcagggtaagaaagaatgctttgcttcttgcctcttcatttgctacgacctgatccggccggatgtcgctcttgagcttgcgtggatgaacaacatgttggactttgccttcccatacctgttgcagttcatccgtgaatacactagcaaggtggatgatttagtgaaggacagaattgagtcacagaatgaagaaagagtcaaagagaaggaggagaaagatcttgttgctcagcagaacatgtatgcgcaattgcttcctcttgctttgcctgctccgccaatgcctggcatgggtggccctccacctccgatgggtgggatgggcatgcctccaatgggtggaatgggtatgccgccgatgggccctggtccgatgccagcattcgggatgccagcaatgggaagctactgagatgtttttgcagagagcttagacgatgatttgaatcgtccctgtgtaagcgaaggtggaaacttcattggagttgtagatggttacagtttggaattaatattctttatggtaccagaatttttttggcaagtgaaaccttagccagagtctgagaattgcaacctgttataccgtaggatcggataggatgagggtgattaggttggttgagcgagctgttgaaagctggtatcatttgtatagtgtgatgaaaactttgtagacattttgcttgtataatactcctacttgttggcacagtgaaggacaaacaaatgtatgctgacttgttatgtc

SEQ ID NO: 26133 - DNA, 1808 bp, Zea Mays
agatcttgtcaagactgtggacaatgatcttgcactgaaaatttacataaaggctagggcaacccctaaagttgttgctgcttttgctgaaaggagggagtttgacaagatactgatatactcaaagcaggttgggtacactccagattatctcttcctcctccagaccatcttgcgtacagatccacagggagctgtgaactttgctcttatgatgtcacaaatggagggaggctgcccagtagattataatacaataactgatcttttccttcagagaaatatgataagggaggcaacagcttttctgttggatgttctgaaaccaaacttgccagagcatgcttttcttcaaaccaaggttttggagataaacttagtgacttacccaaatgttgctgatgccattcttgctaatggtatgttcagtcattacgatcgccctcgtattgctcagctgtgtgaaaaggctggtttgtacttgcgagccctccagcattacgcagagttgcctgatatcaagcgtgccattgtaaatacccatgccattgaaccacaggcacttgttgagttttttggcaccttgtcaagagagtgggctttggaatgcatgaaagaccttctacttgttaatctgaggggaaatcttcagattgttgtgcaggctgcgaaagagtactctgaacagctaggggttgatgcttgtatcaaattatttgagcaattcaaatcttatgagggcctttactttttcttggggtcttatctgagctccagtgaggacccagagatccatttcaagtacatagaagcagcagcaaggactggacaaatcaaagaagttgaacgtgtaaccagggagtcaaacttctatgatgctgagaagacaaagaactttttgatggaagcaaaactacctgatgcccgtccactgattaatgtttgtgaccgctttggttttgtgccagatctcactcactatctgtacacaaacaacatgcttcgatatatcgaaggctatgttcaaaaggtgaatcccgggaacgctcctttggtagtgggccagttacttgatgatgaatgccctgaagattttatcaagggcttgatcctctctgttcgttctctccttcctgttgaaccactggttgatgaatgtgagaagaggaatcgcctacgtttgctcactcaattcctggagcacttagtgagtgaaggtagccaagatgtgcatgtccataatgctcttggtaaaatcatcattgacagcaacaacaatcctgagcatttccttactaccaacccattttacgactctcgtgttgtgggtaaatattgtgaaaagcgggatcctacacttgctgttgttgcttacagacgtggacagtgtgatgatgaacttattattgtcaccaacaaaaactcattattcaagctgcaagctaggtatgtggttgagagaatggatggtgatctgtgggataaagttcttcagcctgagaatgaatatagaaggcaactcattgaccaagtggtttccactgcattacctgagagcaagagccctgagcaagtgtctgctgctgttaaggctttcatgactgctgacctgccacatgaactgattgagcttcttgaaaaaattgttcttcaaaattctgctttcagtggaaatttcaatctgcaaaacctgctcatcttgactgctatcaaggcagatccatccagagtcatggattatgtcaacagacttgataactttgatgggcctgctgttggagaagttgctgttgaagcacaactgtatg

SEQ ID NO: 26134 - DNA, 314 bp, Zea Mays
gtttgacaagatactgatatactcaaagcaggttgggtacactccagattatctcttcctcctccagaccatcttgcgtacagatccacagggagctgtgaactttgctcttatgatgtcacaaatggagggaggctgcccagtagattataatacaataactgatcttttccttcagagaaatatgataagggaggcaacagcttttctgttggatgttctgaaaccaaacttgccagagcatgcttttcttcaaaccaagtcattacgatcgccctcgtattgctcagctgtgtgaaaaggctggtttgtac

SEQ ID NO: 26135 - DNA, 1855 bp, Zea Mays
ccagcgtctcctctcctctcctctccttccccggcaccgtgctctgttgtgctgtttggttccgtcgcgtcgcgtcccgtgctcagatcagatctctcctctcccccgaccccgagtggagtgcctccctccccccctcccgctccagactagcggagagagatctcggcaccgccgttcgtcgccatggcggcggccaacgctcccatcgccatgcgcgaggcgctcacgctcaccagcctgggcatcgcgccgcagttcgtcaccttcacccacgtcaccatggagtcggagaagtacatctgcgtccgcgagacctccccgcaaaacagtgtcgtcatcatcgacatggccatgcccatgcagccgctccgacggcccatcaccgccgactccgccctcatgaaccccaacaccaggatcctcgccctgaaagcccaaatacctggaacaacacaggatcaccttcaaatatttaacattgaggctaagactaagatcaagtctcaccagatgccggagcaggtcgtattctggaaatggatcactcccaaactgttgggtttggtgacacaaacatcagtttaccactggtcgattgaaggtgattctgagcccaccaagatgtttgataggacggctaatctggcaaacaatcagatcatcaactatcgatgtgacccagcggagaagtggcttgtacttattggaattgcacctggagccccagaggtattctcttaccgaaatttacttctatttacatcattacagcagagcacatgtcaaatgagtgttgaaaacgaatattactgttgcccccgttcctgctgattttgttcgaaattccaatcctcttacgataaaaaacaatgtctctgtaaaactcggtcatttgtacttgaacaaaaagtagtttcgtagtacttggttggacgttcttatcatattgtcgacttgtcgtgccctcattttcgtgcaaccagaggccacaactggtgaagggaaatatgcaacttttctctgttgatcaacaacgtagccaggcacttgaagcccatgcagcgtcttttgcaacatttaaggttgttggtaatgagaatccatcaacccttatttgtttcgcctcaaagacaactaatgctggacagatcacttcaaagttgcatgttattgaactgggtgcacagccagggaaacctggtttttctaagaaacaagccgacctcttcttccccccagatttccaggatgattttcctgtagctatgcaggtttcacaaaagtatgggcttatctatgtaattactaagcttggccttttgtttgtatatgacttggaaactgctgcggcagtttacagaaatagaatcagtccagaccctatattcttgacggcagaatcttcctctactggtggattttatgccatcaacagaagggggcaggttttacatgccacagttaatgatgcaactgttgtaccttttgtcagtggccaagtatgttcttctacactttctggtcttcctttcctgatctatacattaggtatttattttaacacaactttgatatgcagttaaacaaccttgagcttgctgtgaatctggccaagagagctaacctccctggtgctgagaacttggttgtgcaaagattccaggaattgtttgcacagacaaaatacaaggaagcagctgagcttgctgcagaatctccccagggtctcctgaggacgcctgagaccgtggcaaaatttcagagtgttcctgtgcaagctgggcaaacacccccactcttgcagtactttggcacattgctaactcgagggaagctcaatgcctttgagtcg

SEQ ID NO: 26136 - DNA, 1569 bp, Zea Mays
gacaccatctttcccagattgaatcgtggacgcccataaacaaattccccagcgtctcctctcctctcctctccttccccggcaccgtgctctgttgtgctgtttggttccgtcgcgtcgcgtcccgtgctcagatcagatctctcctctcccccgaccccgagtggagtgcctccctccccccctcccgctccagactagcggagagagatctcggcaccgccgttcgtcgccatggcggcggccaacgctcccatcgccatgcgcgaggcgctcacgctcaccagcctgggcatcgcgccgcagttcgtcaccttcacccacgtcaccatggagtcggagaagtacatctgcgtccgcgagacctccccgcaaaacagtgtcgtcatcatcgacatggccatgcccatgcagccgctccgacggcccatcaccgccgactccgccctcatgaaccccaacaccaggatcctcgccctgaaagcccaaatacctggaacaacacaggatcaccttcaaatatttaacattgaggctaagactaagatcaagtctcaccagatgccggagcaggtcgtattctggaaatggatcactcccaaactgttgggtttggtgacacaaacatcagtttaccactggtcgattgaaggtgattctgagcccaccaagatgtttgataggacggctaatctggcaaacaatcagatcatcaactatcgatgtgacccagcggagaagtggcttgtacttattggaattgcacctggagccccagagaggccacaactggtgaagggaaatatgcaacttttctctgttgatcaacaacgtagccaggcacttgaagcccatgcagcgtcttttgcaacatttaaggttgttggtaatgagaatccatcaacccttatttgtttcgcctcaaagacaactaatgctggacagatcacttcaaagttgcatgttattgaactgggtgcacagccagggaaacctggtttttctaagaaacaagccgacctcttcttccccccagatttccaggatgattttcctgtagctatgcaggtttcacaaaagtatgggcttatctatgtaattactaagcttggccttttgtttgtatatgacttggaaactgctgcggcagtttacagaaatagaatcagtccagaccctatattcttgacggcagaatcttcctctactggtggattttatgccatcaacagaagggggcaggttttacatgccacagttaatgatgcaactgttgtaccttttgtcagtggccaattaaacaaccttgagcttgctgtgaatctggccaagagagctaacctccctggtgctgagaacttggttgtgcaaagattccaggaattgtttgcacagacaaaatacaaggaagcagctgagcttgctgcagaatctccccagggtctcctgaggacgcctgagaccgtggcaaaatttcagagtgttcctgtgcaagctgggcaaacacccccactcttgcagtactttggcacattgctaactcgagggaagctcaatgcctttgagtcg

SEQ ID NO: 26137 - DNA, 1159 bp, Zea Mays
ctctgttgtgctgtttggttccgtcgcgtcgcgtcccgtgctcagatcagatctctcctctcccccgaccccgagtggagtgcctccctccccccctcccgctccagactagcggagagagatctcggcaccgccgttcgtcgccatggcggcggccaacgctcccatcgccatgcgcgaggcgctcacgttcgtcaccttcacccacgtcaccatggagtcggagaagtacatctgcgtccgcgagacctccccgcaaaacagtgtcgtcatcatcgacatggccatgcccatgcagccgctccgacggcccatcaccgccgactccgccctcatgaaccccaacaccaggatcctcgccctgaaagcccaaatacctggaacaacacaggatcaccttcaaatatttaacattgaggctaagactaagatcaagtctcaccagatgccggagcaggtcgtattctggaaatggatcactcccaaactgttgggtttggtgacacaaacatcagtttaccactggtcgattgaaggtgattctgagcccaccaagatgtttgataggacggctaatctggcaaacaatcagatcatcaactatcgatgtgacccagcggagaagtggcttgtacttattggaattgcacctggagccccagagaggccacaactggtgaagggaaatatgcaacttttctctgttgatcaacaacgtagccaggcacttgaagcccatgcagcgtcttttgcaacatttaaggttgttggtaatgagaatccatcaacccttatttgtttcgcctcaaagacaactaatgctggacagatcacttcaaagttgcatgttattgaactgggtgcacagccagggaaacctggtttttctaagaaacaagccgacctcttcttccccccagatttccaggatgattttcctgtagctatgcaggtttcacaaaagtatgggcttatctatgtaattactaagcttggccttttgtttgtatatgacttggaaactgctgcggcagtttacagaaatagaatcagtccagaccctatattcttgacggcagaatcttcctctactggtggattttatgccatcaacagaagggggcaggttttacatgccacagttaatgatgcaactgtt

SEQ ID NO: 26138 - DNA, 1984 bp, Zea Mays
agtttgacgacccacccactcacacgccgaaccgacgccgacagctgccgcctgccggacccaacaacaatcaacaaagcctacaaaatcacaactccacgttcgtcgccgcgggaggatcgggctgggctggcctcgcctcggttggcttcagctgccacctgccgcgcggccactatccagcctccttcggtccttccccttccccagcagcaggctccggccgcagccatgcccaagccaccgccgcccacctccgacccctcgctccccaccaccaccaccacctcgacccccaagtcgtcgtcccgccctgcccccgcggggctcctcgatccgctcgccgcctccgggcgctccctcctcgcctcggcgcggcgctccccggtcaccacgctcgccggcgccttcttcctcctcgcgctcgtcatgtacggagaggacgcccgcaccatcgccgagctctccatcgacgactacctctacccggacgccgatctctacaacgtctccggcctgccgccccttgcgttgcccccgcctacctgcgacctctccagtggccgctgggtcttcgacaacgcctccgtcccggcgtacagggagaaagactgcaccttcctcaccaagcaggtcacctgcctcgccaacggccgccccgacgatatgtggcagtactggagatggcagcccagtgactgctccctccccacgttcgacgcccggagattcatggaggcgatgcgcgggaagcggctcatgttcgtgggggactcgctgaaccgcaaccagtgggagtcgctggtgtgcctggtgcagcccatcctgtccaagggcaggaagaagatcgtcaagcggggctccctcaacaccttctacgccaaggagtaccgggccacgctcgagttctactgggcgcccttcctcgtcgagtccaactctgacaaccccaacttccacagcatcaaggaacggatcatcagtcccgagaggatcgaggcgcacgccaggaactggaaggacgttgattacctcatcttcaacacctacatctggtggatgaacaccgccgacatcaaagagaccgaactcgaggtattggtctgagaacgacgaggttcccaggattgaggcgtatggtcgggtgttcaagacgtggtctgattggctcaataacaacatcgatcctgcccgcacgtccgtcttcttcatgacgatttctccaattcacatcagcccgcagaattggggaaacccgggagggatcagatgcgtgaaggagacgcttccttatcagaactacagccaacccctggatctttaccatgatatgcggttgtatgacctagtgatcaaggttgccagctccatggagaaggtcccggtgtcagtgatcaatatcacaaagatgtcagattaccggaaggacgcccacgcgtccgtgtacaccatccggcaagggaaactgctgacgccaaagcagaaggcagacccagagaaattcgcggactgcatccattggtgccttcccggcgtgccggacgtgtggaaccaaatactctacacgaggattctttcaaaatcaccatggcgttctaattttagtccccctccgtcccagtccacacctcttcctccccaatgattggagaatgtaggattatcctttttgttttactttttaggttagattgagtataggttagcggagaaaggaaaatggatgtgctgattactgatggtatgtaagaaggttcagctgaagtgtaagttagttgtgagtcagccaattcaggaaacaacagcgatctagtacaaggtgcaccatggatatgatactatactatacaccaagtatatgccactgcgttgctatggaatcattatatctatatgttcctacgactatcctgtgttcatatagaaacatagttgtttcgtagattaaattattcgaaaaggaatcaaagttatatgatatgct

SEQ ID NO: 26139 - DNA, 1439 bp, Zea Mays
agaagcttgtagtgtaagatgagtgtgagcactgcaccattgattttgtcatgattgtcaagttctccaccgtttttgttgtatgtgaacagaagagaagacttgcaagtcatctaggaggcatctctcacatcatcatcatatctctttaccccttcttcccagcgacaagagaaaggattagaaaaaggaaagatccatggacatgatctccggcagcactgcagcaacatcaacaccccacaacaaccaacaggcggtgatgttgtcatcccccattataaaggaggaagctagggacccaaagcagacacgagccatgccccaaataggtggcagtggggagcgtaagccgaggccgcaactacctgaggcgctcaagtgcccacgctgcgactccaacaacaccaagttttgctactacaacaattatagcatgtcacaaccacgctacttttgcaaggcttgccgccgctattggacacatggtggtaccctccgcaatgtccccattggtggtgggtgtcgcaagaacaaacatgcctctagatttgtcttgggctctcacacctcatcgtcctcatctgctacctatgcaccattatcccctagcaccaacgctagctctagcaatatgagcatcaacaaacatatgatgatggtgcctaacatgacgatgcctaccccaacgacaatgggcttattccctaatgtgctcccaacacttatgccgacaggtggaggcgggggctttgacttcactatggacaaccaacatagatcattgtccttcacaccaatgtctctacctagccaggggccagtgcctatgctggctgcaggagggagtgaggcaacaccgtctttcctagagatgctgagaggagggatttttcatggtagtagtagctataacacaagtctcacgatgagtggtggcaacaatggaatggacaagccattttcgctgccatcatatggtgcaatgtgcacaaatgggttgagtggctcaaccactaatgatgccagacaactggtggggcctcagcaggataacaaggccatcatgaagagcagtaataacaacaatggtgtatcattgttgaacctctactggaacaagcacaacaacaacaacaacaacaacaacaacaacaacaacaacaagggacaataaggttagtgtgccagaccgtggaagcgttgctgctataaataatgcaattgggtagtagtacccagtgaaatcaggagagactagtagcctagggtgcattttgatttatttagttttggtcaagatgacaagtcatcatgaatcaccctttttattcatttgcatgttttgatgagagttcatttgcagtaagctatatatcattggataattaatcatttggttggatcatcagttcctatgggcattttcttcatttttt

SEQ ID NO: 26140 - DNA, 1862 bp, Zea Mays
caggcgagcgttcgatgattctactgtcaaaactggctaagttggtttctaaatctgacttagctagaattcatagaggagccacaaaggaaaggggaaacatatgtgcaagatgagaagcttgtagtgtaagatgagtgtgagcactgcaccattgattttgtcatgattgtcaagttctccaccgtttttgttgtatgtgaacagaagagaagacttgcaagtcatctaggtgggcacaacatccataagaccatgactccatgtgtgccatgcatgtgtcatcaactaacagacgcgcactgcatgtttgcttgcaaagaaatctggcaccgtttccaccacaccatctactagctggctctccatctgtctagtctctagcccactttttgtacattagtccctcacaccatacatccatcttgctcactcctttttctctctataaacaactaaaggaggcatctctcacatcatcatcatatctctttaccccttcttcccagcgacaagagaaagaatcgatcgatcctttacatgataggcgggtgtatatatgtaagtgcttgttcatggatctatgctatatttgctataggattagaaaaaggaaagatccatggacatgatctccggcagcactgcagcaacatcaacaccccacaacaaccaacaggcggtgatgttgtcatcccccattataaaggaggaagctagggacccaaagcagacacgagccatgccccaaataggtggcagtggggagcgtaagccgaggccgcaactacctgaggcgctcaagtgcccacgctgcgactccaacaacaccaagttttgctactacaacaattatagcatgtcacaaccacgctacttttgcaaggcttgccgccgctattggacacatggtggtaccctccgcaatgtccccattggtggtgggtgtcgcaagaacaaacatgcctctagatttgtcttgggctctcacacctcatcgtcctcatctgctacctatgcaccattatcccctagcaccaacgctagctctagcaatatgagcatcaacaaacatatgatgatggtgcctaacatgacgatgcctaccccaacgacaatgggcttattccctaatgtgctcccaacacttatgccgacaggtggaggcgggggctttgacttcactatggacaaccaacatagatcattgtccttcacaccaatgtctctacctagccaggggccagtgcctatgctggctgcaggagggagtgaggcaacaccgtctttcctagagatgctgagaggagggatttttcatggtagtagtagctataacacaagtctcacgatgagtggtggcaacaatggaatggacaagccattttcgctgccatcatatggtgcaatgtgcacaaatgggttgagtggctcaaccactaatgatgccagacaactggtggggcctcagcaggataacaaggccatcatgaagagcagtaataacaacaatggtgtatcattgttgaacctctactggaacaagcacaacaacaacaacaacaacaacaacaacaacaacaacaacaagggacaataaggttagtgtgccagaccgtggaagcgttgctgctataaataatgcaattgggtagtagtacccagtgaaatcaggagagactagtagcctagggtgcattttgatttatttagttttggtcaagatgacaagtcatcatgaatcaccctttttattcatttgcatgttttgatgagagttcatttgcagtaagctatatatcattggataattaatcatttggttggatcatcagttcctatgggcattttcttcatttttt

SEQ ID NO: 26141 - DNA, 1723 bp, Zea Mays
ctcaaagtgggacccctctcaggcgagcgttcgatgattctactgtcaaaactggctaagttggtttctaaatctgacttagctagaattcatagaggagccacaaaggaaaggggaaacatatgtgcaagatgagaagcttgtagtaagagaagacttgcaagtcatctaggtgggcacaacatccataagaccatgactccatgtgtgccatgcatgtgtcatcaactaacagacgcgcactgcatgtttgcttgcaaagaaatctggcaccgtttccaccacaccatctactagctggctctccatctgtctagtctctagcccactttttgtacattagtccctcacaccatacatccatcttgctcactcctttttctctctataaacaactaaaggaggcatctctcacatcatcatcatatctctttaccccttcttcccagcgacaagagaaaggattagaaaaaggaaagatccatggacatgatctccggcagcactgcagcaacatcaacaccccacaacaaccaacaggcggtgatgttgtcatcccccattataaaggaggaagctagggacccaaagcagacacgagccatgccccaaataggtggcagtggggagcgtaagccgaggccgcaactacctgaggcgctcaagtgcccacgctgcgactccaacaacaccaagttttgctactacaacaattatagcatgtcacaaccacgctacttttgcaaggcttgccgccgctattggacacatggtggtaccctccgcaatgtccccattggtggtgggtgtcgcaagaacaaacatgcctctagatttgtcttgggctctcacacctcatcgtcctcatctgctacctatgcaccattatcccctagcaccaacgctagctctagcaatatgagcatcaacaaacatatgatgatggtgcctaacatgacgatgcctaccccaacgacaatgggcttattccctaatgtgctcccaacacttatgccgacaggtggaggcgggggctttgacttcactatggacaaccaacatagatcattgtccttcacaccaatgtctctacctagccaggggccagtgcctatgctggctgcaggagggagtgaggcaacaccgtctttcctagagatgctgagaggagggatttttcatggtagtagtagctataacacaagtctcacgatgagtggtggcaacaatggaatggacaagccattttcgctgccatcatatggtgcaatgtgcacaaatgggttgagtggctcaaccactaatgatgccagacaactggtggggcctcagcaggataacaaggccatcatgaagagcagtaataacaacaatggtgtatcattgttgaacctctactggaacaagcacaacaacaacaacaacaacaacaacaacaacaacaacaacaagggacaataaggttagtgtgccagaccgtggaagcgttgctgctataaataatgcaattgggtagtagtacccagtgaaatcaggagagactagtagcctagggtgcattttgatttatttagttttggtcaagatgacaagtcatcatgaatcaccctttttattcatttgcatgttttgatgagagttcatttgcagtaagctatatatcattggataattaatcatttggttggatcatcagttcctatgggcattttcttcatttttt

SEQ ID NO: 26142 - DNA, 3930 bp, Zea Mays
gttctcctgggatgtattttttagtttctgggtgatttctcttggaaatttcaagagtgtctcgatgtattacgaaactgtcttatgccagaaacttgcattgttttttttaaccagaattgagttagggttatcattaagacattaaccaaaatggagttagggtgcctatttttttttctagtgtagacctgatgtgtatattgaaatgtgcaattgtgcatgctcgcaacgtgtctaatatggattatggattgtatttgagtggttcctttgttaaagaacatgtgaaattagagttctagtcttctagaacacactctgttcctcatctttattttctatacacaattcttccatgtgtttatatgttgctgtggttccttggtttagctatccttgtaaatacctgctgttacataaaccaatttgttttccctgaagagattatgctacatactgatttgttaaggatctagtaaccatgatcctaaactgtttaaggaccattggcgttatttgcatgttgttgcacaagttattccttcgagtcacaggtatattacttatgcgaaagaagaggaggccatccggtgtattcaggctgtacacaattttgtcttggaagggaaagtgttaagggcatgtttcggtactacgaagtattgccatgcatggctgcgaaacatggcatgtgggaatccagattgtctctatttgcatgatgtaggcagtcaggaggatagttttactaaagatgagatcatctcagcatatacaaggactagagtcccccagatggcatctagtgtttcgcaaagacgtacaggcactgtgttacctcctccaggagatgatttctctcacagtgcggtggtttcagccaagcatacattcaagaatggaacacttaataccaccagtcagcccagactttcacctccaaacagtagttctgggaggtccacgcttccaccagctgcatcatgggggcagcgtgatttgaatgccaggataacagctactggagcgacatcatcacaatctcatacaaaaccaaaatcagaatcacagagtaatccattttcaagttcttcagcaatttccagtacaaaaacaccctcttcatggaatgatgatacaagtacagcagcaaaaatgcctgaaggacagcaagtgtcagaaaaagagtctaaaaccttgcagccgtataagcctggtatttcaaaggaaacacaagctctatcgtcactggagtcatcactggacatagacttctcaacaataccttcagcttggaatgatgatgacattgtagtatcagatgggatgccaaaaggaagcgatgaaaatcaagttccaaataaaaatgaatgccaatcttgtcatgctgctggggagaaaatgttggaggatattggatccaaggacatcgacatggagaagatatcttctcagatatcttcagtaacattaggtggcaacgataagattcagagtatggcaggaaatcagcaaccagatgtaatgccatgcacatctattgatgtgcccatggatcagaattttggcagagaccgatctcatctcaatcttaacgagcttttattgccttcagaaaataaggatagtagtctttcttgtcaatatagttctgataagcgtcttgcttggagtttgaagatgcaaaattgtagcgttactcctttaaatgatacaatagactctgcaatgctcactgacaaaccttatagtatactgctggaaggttcagagaaaccatcatatccaccatttgttgaatttcctagtacatgggatacctcattgtggaatgatacaaaaaataacgctgcatcgacgattgacactataacttcttcacagatgcagacagggttttcttcaatcgataacacttatgccttgctaaatggaggtcaagatgggctaggtactgtatatacacatgataatgtttctgtatatacacgtggacgtggtaatgtttctggacatcctggaatgggaagtcatcagcatagagcaatgggttcagtaagaactgatagtataggaagttttgacaagaccataagcgtaaataaggatgagagcagaataatttctgatacgttgtcagagtttaatccatgggatgattcatattcgactgctaacaattttgttaggatgcttagggaatctgaaaataatgatgttcagtgcactgcgccttcatggaaatcaggaaccgggagcaaacagtccagattttcatttgctagacaggataaccaaggaaacttgttggattcatctctcagaaactgtggtattggtactgagcagaatttcagtttgctaccccagaattctcgaagaaatatttaccagaatggtcttgcattccaatctctagagaatgaattttcaaatagtaactttcctggtctattagatatggcaactactggtacatcaatgtctaaaatatctgctcccccaggattttcagcaccaacaagagtaccccctcctggattttctactgcatttccatcccaggatagtttgaaccccactcctgggtttccttctgggattttgtctcatgatgggtctatccccctttctagattcccttcattttcttctggagtttcagctcaggaagtgtctaagctccctactagactgccttctccattttcttctagattttcatcacaggatggtcctgatcccccttctagattccctttttcttctgggttcacatcacaggatgggtctaatcagttgtatggctcaacaaacccagaaaatcttctcgggggtactgttctgggtgtcgacggtaatcattatcaatctcagtttggaaggcactcaagtgacatggagtttgatgatcctgctatattagctgtgggcaaagggctgatgcctggaattggcgattcagggctggagatgaaaaatactcgtgcttcacagttgcaaccagcaagtagtgatccaagatttcagctacatgtacagccaaatgtgcagtctcatcaaaacatgagattcacagaccctgtgcaagatggtttgaaccatatgaatgataattacctggcatccagatttttagctcagaaccatggtcctctatctccttatgtgcagattccgcaacaacccagaaactcgcaggttacaaatggtcactgggacgggtggagtgaatcgagacaagggaataacattcctatgtcagacatgtccaggatattatatccaagtgaagtgaacaagttgcacatgctgggttcaaacgatatccataacagagcctttggaatgtgattgtctcctgggataatgtgtgactttgagctgacatattcgcttggggcgttttgtggaagtaactggttgcacaaaacatagtatacctgaggtggttaatggtgttgtgcttatgagctggcacacaatatttattgctattggagttgaccaaaatgaaccttagttttggtccagccagttgaaattaccaggttcattctcgtctatgatttgtgacgcttgaatgaaaagaacgagaagaacaaggcagctgaagttgaaatagatatagagatatgtctatcatgggatttggggcgacctgtgagtgaaagaagcttaggtgtggcagtttgtttttcttgtgtctgtacatgatgatattggtcggtggttgtagtataatttggtgatcggcggtggctgtattaacttgtagtggttgctcttgctccctcttgcttgtttatgttaattaagggaattgaggtgaaggtctagtgttacccatagcataataatatacgatacataactggtttctttgctagcattacttcatttgtttcaacaacagcaaaaaagaaa

SEQ ID NO: 26143 - DNA, 4306 bp, Zea Mays
caggcgcaggcacagcgcattgcccccctccttgtccagcgcccccaaccacaaggagtcaaggaacaggtcggggtccagccatccgaccccttgaatccgcttgccctcctgcttgatcccgccgccaccatctcaaccgcccactccttcctctccctatagggttccctgccgctcctgcgaatcgagcaatcggagacccccgggccgccctccaatgcgagacgaccatgagcgacgatggcgaccgaacctgcccgctctgtgccgaggagatggacactactgaccagcagctcaagccatgcaaatgcggctatgatatttgtgtttggtgctggcaccacatcatagacatggctgagaaggaggaaacagtgggccgctgccctgcatgccgcacatgctatgacaaggacaggatcgtcaagatggctgccacttgtgacaggacggtggcagataaaaatgtagagaagaagcacaagacccaaaaggttaagccaaaggcagcacccacagcagcagcaacatcaaccgtagaatcaaagaagcatctggctagtgtcagggttatccagagaaatctggtgtatataattgggctacctgcacatttatgcaacgagagtgtgcttgagtgtagggagtactttggtcaatatgggaaagttttgaaggtttcagtttcccgtccgactgggcctccctctcagcaggcatcagcaaccagcaatattagtatattacttatgcgaaagaagaggaggccatccggtgtattcaggctgtacacaattttgtcttggaagggaaagtgttaagggcatgtttcggtactacgaagtattgccatgcatggctgcgaaacatggcatgtgggaatccagattgtctctatttgcatgatgtaggcagtcaggaggatagttttactaaagatgagatcatctcagcatatacaaggactagagtcccccagatggcatctagtgtttcgcaaagacgtacaggcactgtgttacctcctccaggagatgatttctctcacagtgcggtggtttcagccaagcatacattcaagaatggaacacttaataccaccagtcagcccagactttcacctccaaacagtagttctgggaggtccacgcttccaccagctgcatcatgggggcagcgtgatttgaatgccaggataacagctactggagcgacatcatcacaatctcatacaaaaccaaaatcagaatcacagagtaatccattttcaagttcttcagcaatttccagtacaaaaacaccctcttcatggaatgatgatacaagtacagcagcaaaaatgcctgaaggacagcaagtgtcagaaaaagagtctaaaaccttgcagccgtataagcctggtatttcaaaggaaacacaagctctatcgtcactggagtcatcactggacatagacttctcaacaataccttcagcttggaatgatgatgacattgtagtatcagatgggatgccaaaaggaagcgatgaaaatcaagttccaaataaaaatggtgagctaacccatccagcatctaagtcactggttttatctaagaaagacatagaaatgaacattaccagcaaaaatccttcagattttttatcaagtctagcaatatctaaattagatgtaagtactagtgatggtgaccactcagataccaatattactcctaaaagccttacttcaaatgctgtagaatgccaatcttgtcatgctgctggggagaaaatgttggaggatattggatccaaggacatcgacatggagaagatatcttctcagatatcttcagtaacattaggtggcaacgataagattcagagtatggcaggaaatcagcaaccagatgtaatgccatgcacatctattgatgtgcccatggatcagaattttggcagagaccgatctcatctcaatcttaacgagcttttattgccttcagaaaataaggatagtagtctttcttgtcaatatagttctgataagcgtcttgcttggagtttgaagatgcaaaattgtagcgttactcctttaaatgatacaatagactctgcaatgctcactgacaaaccttatagtatactgctggaaggttcagagaaaccatcatatccaccatttgttgaatttcctagtacatgggatacctcattgtggaatgatacaaaaaataacgctgcatcgacgattgacactataacttcttcacagatgcagacagggttttcttcaatcgataacacttatgccttgctaaatggaggtcaagatgggctaggtactgtatatacacatgataatgtttctgtatatacacgtggacgtggtaatgtttctggacatcctggaatgggaagtcatcagcatagagcaatgggttcagtaagaactgatagtataggaagttttgacaagaccataagcgtaaataaggatgagagcagaataatttctgatacgttgtcagagtttaatccatgggatgattcatattcgactgctaacaattttgttaggatgcttagggaatctgaaaataatgatgttcagtgcactgcgccttcatggaaatcaggaaccgggagcaaacagtccagattttcatttgctagacaggataaccaaggaaacttgttggattcatctctcagaaactgtggtattggtactgagcagaatttcagtttgctaccccagaattctcgaagaaatatttaccagaatggtcttgcattccaatctctagagaatgaattttcaaatagtaactttcctggtctattagatatggcaactactggtacatcaatgtctaaaatatctgctcccccaggattttcagcaccaacaagagtaccccctcctggattttctactgcatttccatcccaggatagtttgaaccccactcctgggtttccttctgggattttgtctcatgatgggtctatccccctttctagattcccttcattttcttctggagtttcagctcaggaagtgtctaagctccctactagactgccttctccattttcttctagattttcatcacaggatggtcctgatcccccttctagattccctttttcttctgggttcacatcacaggatgggtctaatcagttgtatggctcaacaaacccagaaaatcttctcgggggtactgttctgggtgtcgacggtaatcattatcaatctcagtttggaaggcactcaagtgacatggagtttgatgatcctgctatattagctgtgggcaaagggctgatgcctggaattggcgattcagggctggagatgaaaaatactcgtgcttcacagttgcaaccagcaagtagtgatccaagatttcagctacatgtacagccaaatgtgcagtctcatcaaaacatgagattcacagaccctgtgcaagatggtttgaaccatatgaatgataattacctggcatccagatttttagctcagaaccatggtcctctatctccttatgtgcagattccgcaacaacccagaaactcgcaggttacaaatggtcactgggacgggtggagtgaatcgagacaagggaataacattcctatgtcagacatgtccaggatattatatccaagtgaagtgaacaagttgcacatgctgggttcaaacgatatccataacagagcctttggaatgtgattgtctcctgggataatgtgtgactttgagctgacatattcgcttggggcgttttgtggaagtaactggttgcacaaaacatagtatacctgaggtggttaatggtgttgtgcttatgagctggcacacaatatttattgctattggagttgaccaaaatgaaccttagttttggtccagccagttgaaattaccaggttcattctcgtctatgatttgtgacgcttgaatgaaaagaacgagaagaacaaggcagctgaagttgaaatagatatagagatatgtctatcatgggatttggggcgacctgtgagtgaaagaagcttaggtgtggcagtttgtttttcttgtgtctgtacatgatgatattggtcggtggttgtagtataatttggtgatcggcggtggctgtattaacttgtagtggttgctcttgctccctcttgcttgtttatgttaattaagggaattgaggtgaaggtctagtgttacccatagcataataatatacgatacataactggtttctttgctagcattacttcatttgtttcaacaacagcaaaaaagaaa

SEQ ID NO: 26144 - DNA, 4386 bp, Zea Mays
caggcgcaggcacagcgcattgcccccctccttgtccagcgcccccaaccacaaggagtcaaggaacaggtcggggtccagccatccgaccccttgaatccgcttgccctcctgcttgatcccgccgccaccatctcaaccgcccactccttcctctccctatagggttccctgccgctcctgcgaatcgagcaatcggagacccccgggccgccctccaatgacgaccatgagcgacgatggcgaccgaacctgcccgctctgtgccgaggagatggacactactgaccagcagctcaagccatgcaaatgcggctatgatatttgtgtttggtgctggcaccacatcatagacatggctgagaaggaggaaacagtgggccgctgccctgcatgccgcacatgctatgacaaggacaggatcgtcaagatggctgccacttgtgacaggacggtggcagataaaaatgtagagaagaagcacaagacccaaaaggttaagccaaaggcagcacccacagcagcagcaacatcaaccgtagaatcaaagaagcatctggctagtgtcagggttatccagagaaatctggtgtatataattgggctacctgcacatttatgcaacgagagtgtgagttcacatccagatttgatcaagtcgtgtgatgtgttcattgttttcaagtcgggcgacttgctggtcgttctggctgaccgacttgggtgattaatcgcgattaatcacgattaatcagacaacttgggggactaatcgcgattggtccaaaccgacttggacgattaattgcgactaatcgtgattattcggagacttgaaaacagtggatgtgtttttaaattttacttctcacaccaactctactgttattacttgtttaggtgcttgagtgtagggagtactttggtcaatatgggaaagttttgaaggtttcagtttcccgtccgactgggcctccctctcagcaggcatcagcaaccagcaatattagtgtgtatattacttatgcgaaagaagaggaggccatccggtgtattcaggctgtacacaattttgtcttggaagggaaagtgttaagggcatgtttcggtactacgaagtattgccatgcatggctgcgaaacatggcatgtgggaatccagattgtctctatttgcatgatgtaggcagtcaggaggatagttttactaaagatgagatcatctcagcatatacaaggactagagtcccccagatggcatctagtgtttcgcaaagacgtacaggcactgtgttacctcctccaggagatgatttctctcacagtgcggtggtttcagccaagcatacattcaagaatggaacacttaataccaccagtcagcccagactttcacctccaaacagtagttctgggaggtccacgcttccaccagctgcatcatgggggcagcgtgatttgaatgccaggataacagctactggagcgacatcatcacaatctcatacaaaaccaaaatcagaatcacagagtaatccattttcaagttcttcagcaatttccagtacaaaaacaccctcttcatggaatgatgatacaagtacagcagcaaaaatgcctgaaggacagcaagtgtcagaaaaagagtctaaaaccttgcagccgtataagcctggtatttcaaaggaaacacaagctctatcgtcactggagtcatcactggacatagacttctcaacaataccttcagcttggaatgatgatgacattgtagtatcagatgggatgccaaaaggaagcgatgaaaatcaagttccaaataaaaatgaatgccaatcttgtcatgctgctggggagaaaatgttggaggatattggatccaaggacatcgacatggagaagatatcttctcagatatcttcagtaacattaggtggcaacgataagattcagagtatggcaggaaatcagcaaccagatgtaatgccatgcacatctattgatgtgcccatggatcagaattttggcagagaccgatctcatctcaatcttaacgagcttttattgccttcagaaaataaggatagtagtctttcttgtcaatatagttctgataagcgtcttgcttggagtttgaagatgcaaaattgtagcgttactcctttaaatgatacaatagactctgcaatgctcactgacaaaccttatagtatactgctggaaggttcagagaaaccatcatatccaccatttgttgaatttcctagtacatgggatacctcattgtggaatgatacaaaaaataacgctgcatcgacgattgacactataacttcttcacagatgcagacagggttttcttcaatcgataacacttatgccttgctaaatggaggtcaagatgggctaggtactgtatatacacatgataatgtttctgtatatacacgtggacgtggtaatgtttctggacatcctggaatgggaagtcatcagcatagagcaatgggttcagtaagaactgatagtataggaagttttgacaagaccataagcgtaaataaggatgagagcagaataatttctgatacgttgtcagagtttaatccatgggatgattcatattcgactgctaacaattttgttaggatgcttagggaatctgaaaataatgatgttcagtgcactgcgccttcatggaaatcaggaaccgggagcaaacagtccagattttcatttgctagacaggataaccaaggaaacttgttggattcatctctcagaaactgtggtattggtactgagcagaatttcagtttgctaccccagaattctcgaagaaatatttaccagaatggtcttgcattccaatctctagagaatgaattttcaaatagtaactttcctggtctattagatatggcaactactggtacatcaatgtctaaaatatctgctcccccaggattttcagcaccaacaagagtaccccctcctggattttctactgcatttccatcccaggatagtttgaaccccactcctgggtttccttctgggattttgtctcatgatgggtctatccccctttctagattcccttcattttcttctggagtttcagctcaggaagtgtctaagctccctactagactgccttctccattttcttctagattttcatcacaggatggtcctgatcccccttctagattccctttttcttctgggttcacatcacaggatgggtctaatcagttgtatggctcaacaaacccagaaaatcttctcgggggtactgttctgggtgtcgacggtaatcattatcaatctcagtttggaaggcactcaagtgacatggagtttgatgatcctgctatattagctgtgggcaaagggctgatgcctggaattggcgattcagggctggagatgaaaaatactcgtgcttcacagttgcaaccagcaagtagtgatccaagatttcagctacatgtacagccaaatgtgcagtctcatcaaaacatgagattcacagaccctgtgcaagatggtttgaaccatatgaatgataattacctggcatccagatttttagctcagaaccatggtcctctatctccttatgtgcagattccgcaacaacccagaaactcgcaggttacaaatggtcactgggacgggtggagtgaatcgagacaagggaataacattcctatgtcagacatgtccaggatattatatccaagtgaagtgaacaagttgcacatgctgggttcaaacgatatccataacagagcctttggaatgtgattgtctcctgggataatgtgtgactttgagctgacatattcgcttggggcgttttgtggaagtaactggttgcacaaaacatagtatacctgaggtggttaatggtgttgtgcttatgagctggcacacaatatttattgctattggagttgaccaaaatgaaccttagttttggtccagccagttgaaattaccaggttcattctcgtctatgatttgtgacgcttgaatgaaaagaacgagaagaacaaggcagctgaagttgaaatagatatagagatatgtctatcatgggatttggggcgacctgtgagtgaaagaagcttaggtgtggcagtttgtttttcttgtgtctgtacatgatgatattggtcggtggttgtagtataatttggtgatcggcggtggctgtattaacttgtagtggttgctcttgctccctcttgcttgtttatgttaattaagggaattgaggtgaaggtctagtgttacccatagcataataatatacgatacataactggtttctttgctagcattacttcatttgtttcaacaacagcaaaaaagaaa

SEQ ID NO: 26145 - DNA, 4295 bp, Zea Mays
caggcgcaggcacagcgcattgcccccctccttgtccagcgcccccaaccacaaggagtcaaggaacaggtcggggtccagccatccgaccccttgaatccgcttgccctcctgcttgatcccgccgccaccatctcaaccgcccactccttcctctccctatagggttccctgccgctcctgcgaatcgagcaatcggagacccccgggccgccctccaatgacgaccatgagcgacgatggcgaccgaacctgcccgctctgtgccgaggagatggacactactgaccagcagctcaagccatgcaaatgcggctatgatatttgtgtttggtgctggcaccacatcatagacatggctgagaaggaggaaacagtgggccgctgccctgcatgccgcacatgctatgacaaggacaggatcgtcaagatggctgccacttgtgacaggacggtggcagataaaaatgtagagaagaagcacaagacccaaaaggttaagccaaaggcagcacccacagcagcagcaacatcaaccgtagaatcaaagaagcatctggctagtgtcagggttatccagagaaatctggtgtatataattgggctacctgcacatttatgcaacgagagtgtgcttgagtgtagggagtactttggtcaatatgggaaagttttgaaggtttcagtttcccgtccgactgggcctccctctcagcaggcatcagcaaccagcaatattagtgtgtatattacttatgcgaaagaagaggaggccatccggtgtattcaggctgtacacaattttgtcttggaagggaaagtgttaagggcatgtttcggtactacgaagtattgccatgcatggctgcgaaacatggcatgtgggaatccagattgtctctatttgcatgatgtaggcagtcaggaggatagttttactaaagatgagatcatctcagcatatacaaggactagagtcccccagatggcatctagtgtttcgcaaagacgtacaggcactgtgttacctcctccaggagatgatttctctcacagtgcggtggtttcagccaagcatacattcaagaatggaacactttcagcccagactttcacctccaaacagtagttctgggaggtccacgcttccaccagctgcatcatgggggcagcgtgatttgaatgccaggataacagctactggagcgacatcatcacaatctcatacaaaaccaaaatcagaatcacagagtaatccattttcaagttcttcagcaatttccagtacaaaaacaccctcttcatggaatgatgatacaagtacagcagcaaaaatgcctgaaggacagcaagtgtcagaaaaagagtctaaaaccttgcagccgtataagcctggtatttcaaaggaaacacaagctctatcgtcactggagtcatcactggacatagacttctcaacaataccttcagcttggaatgatgatgacattgtagtatcagatgggatgccaaaaggaagcgatgaaaatcaagttccaaataaaaatggtgagctaacccatccagcatctaagtcactggttttatctaagaaagacatagaaatgaacattaccagcaaaaatccttcagattttttatcaagtctagcaatatctaaattagatgtaagtactagtgatggtgaccactcagataccaatattactcctaaaagccttacttcaaatgctgtagaatgccaatcttgtcatgctgctggggagaaaatgttggaggatattggatccaaggacatcgacatggagaagatatcttctcagatatcttcagtaacattaggtggcaacgataagattcagagtatggcaggaaatcagcaaccagatgtaatgccatgcacatctattgatgtgcccatggatcagaattttggcagagaccgatctcatctcaatcttaacgagcttttattgccttcagaaaataaggatagtagtctttcttgtcaatatagttctgataagcgtcttgcttggagtttgaagatgcaaaattgtagcgttactcctttaaatgatacaatagactctgcaatgctcactgacaaaccttatagtatactgctggaaggttcagagaaaccatcatatccaccatttgttgaatttcctagtacatgggatacctcattgtggaatgatacaaaaaataacgctgcatcgacgattgacactataacttcttcacagatgcagacagggttttcttcaatcgataacacttatgccttgctaaatggaggtcaagatgggctaggtactgtatatacacatgataatgtttctgtatatacacgtggacgtggtaatgtttctggacatcctggaatgggaagtcatcagcatagagcaatgggttcagtaagaactgatagtataggaagttttgacaagaccataagcgtaaataaggatgagagcagaataatttctgatacgttgtcagagtttaatccatgggatgattcatattcgactgctaacaattttgttaggatgcttagggaatctgaaaataatgatgttcagtgcactgcgccttcatggaaatcaggaaccgggagcaaacagtccagattttcatttgctagacaggataaccaaggaaacttgttggattcatctctcagaaactgtggtattggtactgagcagaatttcagtttgctaccccagaattctcgaagaaatatttaccagaatggtcttgcattccaatctctagagaatgaattttcaaatagtaactttcctggtctattagatatggcaactactggtacatcaatgtctaaaatatctgctcccccaggattttcagcaccaacaagagtaccccctcctggattttctactgcatttccatcccaggatagtttgaaccccactcctgggtttccttctgggattttgtctcatgatgggtctatccccctttctagattcccttcattttcttctggagtttcagctcaggaagtgtctaagctccctactagactgccttctccattttcttctagattttcatcacaggatggtcctgatcccccttctagattccctttttcttctgggttcacatcacaggatgggtctaatcagttgtatggctcaacaaacccagaaaatcttctcgggggtactgttctgggtgtcgacggtaatcattatcaatctcagtttggaaggcactcaagtgacatggagtttgatgatcctgctatattagctgtgggcaaagggctgatgcctggaattggcgattcagggctggagatgaaaaatactcgtgcttcacagttgcaaccagcaagtagtgatccaagatttcagctacatgtacagccaaatgtgcagtctcatcaaaacatgagattcacagaccctgtgcaagatggtttgaaccatatgaatgataattacctggcatccagatttttagctcagaaccatggtcctctatctccttatgtgcagattccgcaacaacccagaaactcgcaggttacaaatggtcactgggacgggtggagtgaatcgagacaagggaataacattcctatgtcagacatgtccaggatattatatccaagtgaagtgaacaagttgcacatgctgggttcaaacgatatccataacagagcctttggaatgtgattgtctcctgggataatgtgtgactttgagctgacatattcgcttggggcgttttgtggaagtaactggttgcacaaaacatagtatacctgaggtggttaatggtgttgtgcttatgagctggcacacaatatttattgctattggagttgaccaaaatgaaccttagttttggtccagccagttgaaattaccaggttcattctcgtctatgatttgtgacgcttgaatgaaaagaacgagaagaacaaggcagctgaagttgaaatagatatagagatatgtctatcatgggatttggggcgacctgtgagtgaaagaagcttaggtgtggcagtttgtttttcttgtgtctgtacatgatgatattggtcggtggttgtagtataatttggtgatcggcggtggctgtattaacttgtagtggttgctcttgctccctcttgcttgtttatgttaattaagggaattgaggtgaaggtctagtgttacccatagcataataatatacgatacataactggtttctttgctagcattacttcatttgtttcaacaacagcaaaaaagaaa

SEQ ID NO: 26146 - DNA, 3964 bp, Zea Mays
caggcgcaggcacagcgcattgcccccctccttgtccagcgcccccaaccacaaggagtcaaggaacaggacgaccatgagcgacgatggcgaccgaacctgcccgctctgtgccgaggagatggacactactgaccagcagctcaagccatgcaaatgcggctatgatatttgtgtttggtgctggcaccacatcatagacatggctgagaaggaggaaacagtgggccgctgccctgcatgccgcacatgctatgacaaggacaggatcgtcaagatggctgccacttgtgacaggacggtggcagataaaaatgtagagaagaagcacaagacccaaaaggttaagccaaaggcagcacccacagcagcagcaacatcaaccgtagaatcaaagaagcatctggctagtgtcagggttatccagagaaatctggtgtatataattgggctacctgcacatttatgcaacgagagtgtgcttgagtgtagggagtactttggtcaatatgggaaagttttgaaggtttcagtttcccgtccgactgggcctccctctcagcaggcatcagcaaccagcaatattagtgtgtatattacttatgcgaaagaagaggaggccatccggtgtattcaggctgtacacaattttgtcttggaagggaaagtgttaagggcatgtttcggtactacgaagtattgccatgcatggctgcgaaacatggcatgtgggaatccagattgtctctatttgcatgatgtaggcagtcaggaggatagttttactaaagatgagatcatctcagcatatacaaggactagagtcccccagatggcatctagtgtttcgcaaagacgtacaggcactgtgttacctcctccaggagatgatttctctcacagtgcggtggtttcagccaagcatacattcaagaatggaacacttaataccaccagtcagcccagactttcacctccaaacagtagttctgggaggtccacgcttccaccagctgcatcatgggggcagcgtgatttgaatgccaggataacagctactggagcgacatcatcacaatctcatacaaaaccaaaatcagaatcacagagtaatccattttcaagttcttcagcaatttccagtacaaaaacaccctcttcatggaatgatgatacaagtacagcagcaaaaatgcctgaaggacagcaagtgtcagaaaaagagtctaaaaccttgcagccgtataagcctggtatttcaaaggaaacacaagctctatcgtcactggagtcatcactggacatagacttctcaacaataccttcagcttggaatgatgatgacattgtagtatcagatgggatgccaaaaggaagcgatgaaaatcaagttccaaataaaaatgaatgccaatcttgtcatgctgctggggagaaaatgttggaggatattggatccaaggacatcgacatggagaagatatcttctcagatatcttcagtaacattaggtggcaacgataagattcagagtatggcaggaaatcagcaaccagatgtaatgccatgcacatctattgatgtgcccatggatcagaattttggcagagaccgatctcatctcaatcttaacgagcttttattgccttcagaaaataaggatagtagtctttcttgtcaatatagttctgataagcgtcttgcttggagtttgaagatgcaaaattgtagcgttactcctttaaatgatacaatagactctgcaatgctcactgacaaaccttatagtatactgctggaaggttcagagaaaccatcatatccaccatttgttgaatttcctagtacatgggatacctcattgtggaatgatacaaaaaataacgctgcatcgacgattgacactataacttcttcacagatgcagacagggttttcttcaatcgataacacttatgccttgctaaatggaggtcaagatgggctaggtactgtatatacacatgataatgtttctgtatatacacgtggacgtggtaatgtttctggacatcctggaatgggaagtcatcagcatagagcaatgggttcagtaagaactgatagtataggaagttttgacaagaccataagcgtaaataaggatgagagcagaataatttctgatacgttgtcagagtttaatccatgggatgattcatattcgactgctaacaattttgttaggatgcttagggaatctgaaaataatgatgttcagtgcactgcgccttcatggaaatcaggaaccgggagcaaacagtccagattttcatttgctagacaggataaccaaggaaacttgttggattcatctctcagaaactgtggtattggtactgagcagaatttcagtttgctaccccagaattctcgaagaaatatttaccagaatggtcttgcattccaatctctagagaatgaattttcaaatagtaactttcctggtctattagatatggcaactactggtacatcaatgtctaaaatatctgctcccccaggattttcagcaccaacaagagtaccccctcctggattttctactgcatttccatcccaggatagtttgaaccccactcctgggtttccttctgggattttgtctcatgatgggtctatccccctttctagattcccttcattttcttctggagtttcagctcaggaagtgtctaagctccctactagactgccttctccattttcttctagattttcatcacaggatggtcctgatcccccttctagattccctttttcttctgggttcacatcacaggatgggtctaatcagttgtatggctcaacaaacccagaaaatcttctcgggggtactgttctgggtgtcgacggtaatcattatcaatctcagtttggaaggcactcaagtgacatggagtttgatgatcctgctatattagctgtgggcaaagggctgatgcctggaattggcgattcagggctggagatgaaaaatactcgtgcttcacagttgcaaccagcaagtagtgatccaagatttcagctacatgtacagccaaatgtgcagtctcatcaaaacatgagattcacagaccctgtgcaagatggtttgaaccatatgaatgataattacctggcatccagatttttagctcagaaccatggtcctctatctccttatgtgcagattccgcaacaacccagaaactcgcaggttacaaatggtcactgggacgggtggagtgaatcgagacaagggaataacattcctatgtcagacatgtccaggatattatatccaagtgaagtgaacaagttgcacatgctgggttcaaacgatatccataacagagcctttggaatgtgattgtctcctgggataatgtgtgactttgagctgacatattcgcttggggcgttttgtggaagtaactggttgcacaaaacatagtatacctgaggtggttaatggtgttgtgcttatgagctggcacacaatatttattgctattggagttgaccaaaatgaaccttagttttggtccagccagttgaaattaccaggttcattctcgtctatgatttgtgacgcttgaatgaaaagaacgagaagaacaaggcagctgaagttgaaatagatatagagatatgtctatcatgggatttggggcgacctgtgagtgaaagaagcttaggtgtggcagtttgtttttcttgtgtctgtacatgatgatattggtcggtggttgtagtataatttggtgatcggcggtggctgtattaacttgtagtggttgctcttgctccctcttgcttgtttatgttaattaagggaattgaggtgaaggtctagtgttacccatagcataataatatacgatacataactggtttctttgctagcattacttcatttgtttcaacaacagcaaaaaagaaa

SEQ ID NO: 26147 - DNA, 4363 bp, Zea Mays
caggcgcaggcacagcgcattgcccccctccttgtccagcgcccccaaccacaaggagtcaaggaacaggtcggggtccagccatccgaccccttgaatccgcttgccctcctgcttgatcccgccgccaccatctcaaccgcccactccttcctctccctatagggttccctgccgctcctgcgaatcgagcaatcggagacccccgggccgccctccaatgcgagttcctctccttccccctactcaactttccccttttcggctcgattcactacaatctcatgggaattttgccgcaccgccctctcccttcctctccaatgttgttaataatattggacccgtgcgtgcgtgcgtgtatccccgtaggccgtagcagagcacaatccggtggtatttaggactgatatagatttctgccgatagatttaaagttggatggttgatttgttagaatcgggcaaggacgaccatgagcgacgatggcgaccgaacctgcccgctctgtgccgaggagatggacactactgaccagcagctcaagccatgcaaatgcggctatgatatttgtgtttggtgctggcaccacatcatagacatggctgagaaggaggaaacagtgggccgctgccctgcatgccgcacatgctatgacaaggacaggatcgtcaagatggctgccacttgtgacaggacggtggcagataaaaatgtagagaagaagcacaagacccaaaaggttaagccaaaggcagcacccacagcagcagcaacatcaaccgtagaatcaaagaagcatctggctagtgtcagggttatccagagaaatctggtgtatataattgggctacctgcacatttatgcaacgagagtgtgcttgagtgtagggagtactttggtcaatatgggaaagttttgaaggtttcagtttcccgtccgactgggcctccctctcagcaggcatcagcaaccagcaatattagtgtgtatattacttatgcgaaagaagaggaggccatccggtgtattcaggctgtacacaattttgtcttggaagggaaagtgttaagggcatgtttcggtactacgaagtattgccatgcatggctgcgaaacatggcatgtgggaatccagattgtctctatttgcatgatgtaggcagtcaggaggatagttttactaaagatgagatcatctcagcatatacaaggactagagtcccccagatggcatctagtgtttcgcaaagacgtacaggcactgtgttacctcctccaggagatgatttctctcacagtgcggtggtttcagccaagcatacattcaagaatggaacacttaataccaccagtcagcccagactttcacctccaaacagtagttctgggaggtccacgcttccaccagctgcatcatgggggcagcgtgatttgaatgccaggataacagctactggagcgacatcatcacaatctcatacaaaaccaaaatcagaatcacagagtaatccattttcaagttcttcagcaatttccagtacaaaaacaccctcttcatggaatgatgatacaagtacagcagcaaaaatgcctgaaggacagcaagtgtcagaaaaagagtctaaaaccttgcagccgtataagcctggtatttcaaaggaaacacaagctctatcgtcactggagtcatcactggacatagacttctcaacaataccttcagcttggaatgatgatgacattgtagtatcagatgggatgccaaaaggaagcgatgaaaatcaagttccaaataaaaatgaatgccaatcttgtcatgctgctggggagaaaatgttggaggatattggatccaaggacatcgacatggagaagatatcttctcagatatcttcagtaacattaggtggcaacgataagattcagagtatggcaggaaatcagcaaccagatgtaatgccatgcacatctattgatgtgcccatggatcagaattttggcagagaccgatctcatctcaatcttaacgagcttttattgccttcagaaaataaggatagtagtctttcttgtcaatatagttctgataagcgtcttgcttggagtttgaagatgcaaaattgtagcgttactcctttaaatgatacaatagactctgcaatgctcactgacaaaccttatagtatactgctggaaggttcagagaaaccatcatatccaccatttgttgaatttcctagtacatgggatacctcattgtggaatgatacaaaaaataacgctgcatcgacgattgacactataacttcttcacagatgcagacagggttttcttcaatcgataacacttatgccttgctaaatggaggtcaagatgggctaggtactgtatatacacatgataatgtttctgtatatacacgtggacgtggtaatgtttctggacatcctggaatgggaagtcatcagcatagagcaatgggttcagtaagaactgatagtataggaagttttgacaagaccataagcgtaaataaggatgagagcagaataatttctgatacgttgtcagagtttaatccatgggatgattcatattcgactgctaacaattttgttaggatgcttagggaatctgaaaataatgatgttcagtgcactgcgccttcatggaaatcaggaaccgggagcaaacagtccagattttcatttgctagacaggataaccaaggaaacttgttggattcatctctcagaaactgtggtattggtactgagcagaatttcagtttgctaccccagaattctcgaagaaatatttaccagaatggtcttgcattccaatctctagagaatgaattttcaaatagtaactttcctggtctattagatatggcaactactggtacatcaatgtctaaaatatctgctcccccaggattttcagcaccaacaagagtaccccctcctggattttctactgcatttccatcccaggatagtttgaaccccactcctgggtttccttctgggattttgtctcatgatgggtctatccccctttctagattcccttcattttcttctggagtttcagctcaggaagtgtctaagctccctactagactgccttctccattttcttctagattttcatcacaggatggtcctgatcccccttctagattccctttttcttctgggttcacatcacaggatgggtctaatcagttgtatggctcaacaaacccagaaaatcttctcgggggtactgttctgggtgtcgacggtaatcattatcaatctcagtttggaaggcactcaagtgacatggagtttgatgatcctgctatattagctgtgggcaaagggctgatgcctggaattggcgattcagggctggagatgaaaaatactcgtgcttcacagttgcaaccagcaagtagtgatccaagatttcagctacatgtacagccaaatgtgcagtctcatcaaaacatgagattcacagaccctgtgcaagatggtttgaaccatatgaatgataattacctggcatccagatttttagctcagaaccatggtcctctatctccttatgtgcagattccgcaacaacccagaaactcgcaggttacaaatggtcactgggacgggtggagtgaatcgagacaagggaataacattcctatgtcagacatgtccaggatattatatccaagtgaagtgaacaagttgcacatgctgggttcaaacgatatccataacagagcctttggaatgtgattgtctcctgggataatgtgtgactttgagctgacatattcgcttggggcgttttgtggaagtaactggttgcacaaaacatagtatacctgaggtggttaatggtgttgtgcttatgagctggcacacaatatttattgctattggagttgaccaaaatgaaccttagttttggtccagccagttgaaattaccaggttcattctcgtctatgatttgtgacgcttgaatgaaaagaacgagaagaacaaggcagctgaagttgaaatagatatagagatatgtctatcatgggatttggggcgacctgtgagtgaaagaagcttaggtgtggcagtttgtttttcttgtgtctgtacatgatgatattggtcggtggttgtagtataatttggtgatcggcggtggctgtattaacttgtagtggttgctcttgctccctcttgcttgtttatgttaattaagggaattgaggtgaaggtctagtgttacccatagcataataatatacgatacataactggtttctttgctagcattacttcatttgtttcaacaacagcaaaaaagaaa

SEQ ID NO: 26148 - DNA, 4117 bp, Zea Mays
caggcgcaggcacagcgcattgcccccctccttgtccagcgcccccaaccacaaggagtcaaggaacaggtcggggtccagccatccgaccccttgaatccgcttgccctcctgcttgatcccgccgccaccatctcaaccgcccactccttcctctccctatagggttccctgccgctcctgcgaatcgagcaatcggagacccccgggccgccctccaatgacgaccatgagcgacgatggcgaccgaacctgcccgctctgtgccgaggagatggacactactgaccagcagctcaagccatgcaaatgcggctatgatatttgtgtttggtgctggcaccacatcatagacatggctgagaaggaggaaacagtgggccgctgccctgcatgccgcacatgctatgacaaggacaggatcgtcaagatggctgccacttgtgacaggacggtggcagataaaaatgtagagaagaagcacaagacccaaaaggttaagccaaaggcagcacccacagcagcagcaacatcaaccgtagaatcaaagaagcatctggctagtgtcagggttatccagagaaatctggtgtatataattgggctacctgcacatttatgcaacgagagtgtgcttgagtgtagggagtactttggtcaatatgggaaagttttgaaggtttcagtttcccgtccgactgggcctccctctcagcaggcatcagcaaccagcaatattagtgtgtatattacttatgcgaaagaagaggaggccatccggtgtattcaggctgtacacaattttgtcttggaagggaaagtgttaagggcatgtttcggtactacgaagtattgccatgcatggctgcgaaacatggcatgtgggaatccagattgtctctatttgcatgatgtaggcagtcaggaggatagttttactaaagatgagatcatctcagcatatacaaggactagagtcccccagatggcatctagtgtttcgcaaagacgtacaggcactgtgttacctcctccaggagatgatttctctcacagtgcggtggtttcagccaagcatacattcaagaatggaacacttaataccaccagtcagcccagactttcacctccaaacagtagttctgggaggtccacgcttccaccagctgcatcatgggggcagcgtgatttgaatgccaggataacagctactggagcgacatcatcacaatctcatacaaaaccaaaatcagaatcacagagtaatccattttcaagttcttcagcaatttccagtacaaaaacaccctcttcatggaatgatgatacaagtacagcagcaaaaatgcctgaaggacagcaagtgtcagaaaaagagtctaaaaccttgcagccgtataagcctggtatttcaaaggaaacacaagctctatcgtcactggagtcatcactggacatagacttctcaacaataccttcagcttggaatgatgatgacattgtagtatcagatgggatgccaaaaggaagcgatgaaaatcaagttccaaataaaaatgaatgccaatcttgtcatgctgctggggagaaaatgttggaggatattggatccaaggacatcgacatggagaagatatcttctcagatatcttcagtaacattaggtggcaacgataagattcagagtatggcaggaaatcagcaaccagatgtaatgccatgcacatctattgatgtgcccatggatcagaattttggcagagaccgatctcatctcaatcttaacgagcttttattgccttcagaaaataaggatagtagtctttcttgtcaatatagttctgataagcgtcttgcttggagtttgaagatgcaaaattgtagcgttactcctttaaatgatacaatagactctgcaatgctcactgacaaaccttatagtatactgctggaaggttcagagaaaccatcatatccaccatttgttgaatttcctagtacatgggatacctcattgtggaatgatacaaaaaataacgctgcatcgacgattgacactataacttcttcacagatgcagacagggttttcttcaatcgataacacttatgccttgctaaatggaggtcaagatgggctaggtactgtatatacacatgataatgtttctgtatatacacgtggacgtggtaatgtttctggacatcctggaatgggaagtcatcagcatagagcaatgggttcagtaagaactgatagtataggaagttttgacaagaccataagcgtaaataaggatgagagcagaataatttctgatacgttgtcagagtttaatccatgggatgattcatattcgactgctaacaattttgttaggatgcttagggaatctgaaaataatgatgttcagtgcactgcgccttcatggaaatcaggaaccgggagcaaacagtccagattttcatttgctagacaggataaccaaggaaacttgttggattcatctctcagaaactgtggtattggtactgagcagaatttcagtttgctaccccagaattctcgaagaaatatttaccagaatggtcttgcattccaatctctagagaatgaattttcaaatagtaactttcctggtctattagatatggcaactactggtacatcaatgtctaaaatatctgctcccccaggattttcagcaccaacaagagtaccccctcctggattttctactgcatttccatcccaggatagtttgaaccccactcctgggtttccttctgggattttgtctcatgatgggtctatccccctttctagattcccttcattttcttctggagtttcagctcaggaagtgtctaagctccctactagactgccttctccattttcttctagattttcatcacaggatggtcctgatcccccttctagattccctttttcttctgggttcacatcacaggatgggtctaatcagttgtatggctcaacaaacccagaaaatcttctcgggggtactgttctgggtgtcgacggtaatcattatcaatctcagtttggaaggcactcaagtgacatggagtttgatgatcctgctatattagctgtgggcaaagggctgatgcctggaattggcgattcagggctggagatgaaaaatactcgtgcttcacagttgcaaccagcaagtagtgatccaagatttcagctacatgtacagccaaatgtgcagtctcatcaaaacatgagattcacagaccctgtgcaagatggtttgaaccatatgaatgataattacctggcatccagatttttagctcagaaccatggtcctctatctccttatgtgcagattccgcaacaacccagaaactcgcaggttacaaatggtcactgggacgggtggagtgaatcgagacaagggaataacattcctatgtcagacatgtccaggatattatatccaagtgaagtgaacaagttgcacatgctgggttcaaacgatatccataacagagcctttggaatgtgattgtctcctgggataatgtgtgactttgagctgacatattcgcttggggcgttttgtggaagtaactggttgcacaaaacatagtatacctgaggtggttaatggtgttgtgcttatgagctggcacacaatatttattgctattggagttgaccaaaatgaaccttagttttggtccagccagttgaaattaccaggttcattctcgtctatgatttgtgacgcttgaatgaaaagaacgagaagaacaaggcagctgaagttgaaatagatatagagatatgtctatcatgggatttggggcgacctgtgagtgaaagaagcttaggtgtggcagtttgtttttcttgtgtctgtacatgatgatattggtcggtggttgtagtataatttggtgatcggcggtggctgtattaacttgtagtggttgctcttgctccctcttgcttgtttatgttaattaagggaattgaggtgaaggtctagtgttacccatagcataataatatacgatacataactggtttctttgctagcattacttcatttgtttcaacaacagcaaaaaagaaa

SEQ ID NO: 26149 - DNA, 1905 bp, Zea Mays
gtgtccatcttcgaattcgagctcctccatcttccttcaccctcctctctctcgctgtttgaggagaactacctgctcctgctccctcttccgctcctccgcgctcccgctcgccatccccaggcttcatttcggacggggatggacgactacgcccgggagatgatggagctgaagacgctcgtcacccgcaccctcgagaagaagggcgttctcgccaagattagggctgagctaagagcaagcgtgtttgaagccattgaagaggaggatcgggtgatggagaatgatgatggcggtaatcctgctttgcttggtagctgtaatgaccgggctaagcaactgcatgcttcaccttcaggtaggttactaactgcacttgtttgcgaatacttggagtgggcgcaattaagtcacacaatgaaagtttacttgccagagtgtaacctgcccaaggacttctggaagaatgaactgaaagacttctctaacaaaagtggagctgaagggagcaggagtgctgaaagtggtccactgcttttagatgttctcgaagaaaaggtagtatattgagttggagcaataatccttcatattattggcgtcttgcttaatcgatctgtccaaaaaattggattgtttgccacaactacaatacgcatcaaggtattgccttagaacaaaaagtaggtgttattattctggaagcttagggagataggtttatcaagatcaagcacatcttcacaatttgtaaattttctagaagctgaaatattttgagaatgtagatcaatgattcttggaataaaccagaatggatacaaattgatgtactgttctctgagtttggtcggttgttttacactgcatgcatgagatttatatttacagtgcatcatcattatcattgtactgagatccgcttatatgtgatttttttcaatctcaacttattgatgaaaggcctgtactcaaggtctccttttgatggtatgtggtgcatttatgctgctttcttcctatgacctttagttcactgcacacacaaaacttgattcttttttccagcttgactttcactgtccttgagcaagtaaagttgatttgcctattatacttcattaatttacattttttatattattaacctccaaatacagtcagtatgctctagtttaagttttggttttctacagcatgctgtggtcatttaatcatattgttttggtcagaatttgtctcaagcaaggatgggcggcaggaggatgatgagttcagaatctgatccatcactaaatgctgaacatcggagcatgaggagggcaccatcagcatcagttgggaatctgcctcctatggggagacctatctcttcttcgcagcaggcatcagatcgcagaggggggtcttcagtttccaacacaaggaaagatgagtacaactggagatacgataccaccgatgatatatctgaagaggtgctgcgggcatcgactgccctagaaagtgttcagctagaccgcaaatctcggaatctgccgacatcttggaggcattcaggggatggcgccgagtaacaagaaggctttggagctggttgcttgacttgaccgaccctgtatcatgtaatttgtatgccactcatttgtggtgcttggattgctgctatcttagaaaaagaagtggtaaactggttatgtatggttgtcttgtaacgaacaaaacaaatcaaagagttaggtgccgtttgttttacatatttgtaacgtgatgggtaactgtgatgggtaactgataacgttaaaccatgtttgtttaagtccaaccgtaatcagataccacattaaaaattaatactagtttattcaaacttattatcgctcacactcaagtgtgaattat

SEQ ID NO: 26150 - DNA, 1717 bp, Zea Mays
gtcaacctctagcctgtaacccgttccccaacctctcgcgttcgtgtccatcttcgaattcgagctcctccatcttccttcaccctcctctctctcgctgtttgaggagaactacctgctcctgctccctcttccgctcctccgcgctcccgctcgccatccccaggcttcatttcggacggggatggacgactacgcccgggagatgatggagctgaagacgctcgtcacccgcaccctcgagaagaagggcgttctcgccaagattagggctgagctaagagcaagcgtgtttgaagccattgaagaggaggatcgggtgatggagaatgatgatggcggtaatcctgctttgcttggtagctgtaatgaccgggctaagcaactgcatgcttcaccttcaggtaggttactaactgcacttgtttgcgaatacttggagtgggcgcaattaagtcacacaatgaaagtttacttgccagagtgtaacctgcccaaggacttctggaagaatgaactgaaagacttctctaacaaaagtggagctgaagggagcaggagtgctgaaagtggtccactgcttttagatgttctcgaaggttatctgaaatatgaggtttatctcttgcgtgatcattaacagaagcaaaaatcatccttttgtttctttatgttttccgaaaaagaaaaaagggggaaagctccttgtgtagtgtgcccaattcttttgtccctactctagaaaactgtgtagtcctgtatggatcaaggtaacaaatctctggctataggtaccgctatagtcagttctagctgttttagacactacaccactatttgtacccacattcatcttagcctgttttagccaggtattagccttatgggaactctgcaactagtatggatcctcttatgcattatgttcggtatgcagaaaaggtagtatattgagttggagcaataatccttcatattattggcgtcttgcttaatcgatctgtccaaaaaattggattgtttgccacaactacaatacgcatcaagaatttgtctcaagcaaggatgggcggcaggaggatgatgagttcagaatctgatccatcactaaatgctgaacatcggagcatgaggagggcaccatcagcatcagttgggaatctgcctcctatggggagacctatctcttcttcgcagcaggcatcagatcgcagaggggggtcttcagtttccaacacaaggaaagatgagtacaactggagatacgataccaccgatgatatatctgaagaggtgctgcgggcatcgactgccctagaaagtgttcagctagaccgcaaatctcggaatctgccgacatcttggaggcattcaggggatggcgccgagtaacaagaaggctttggagctggttgcttgacttgaccgaccctgtatcatgtaatttgtatgccactcatttgtggtgcttggattgctgctatcttagaaaaagaagtggtaaactggttatgtatggttgtcttgtaacgaacaaaacaaatcaaagagttaggtgccgtttgttttacatatttgtaacgtgatgggtaactgtgatgggtaactgataacgttaaaccatgtttgtttaagtccaaccgtaatcagataccacattaaaaattaatactagtttattcaaacttattatcgctcacactcaagtgtgaattat

SEQ ID NO: 26151 - DNA, 2282 bp, Zea Mays
gtcaacctctagcctgtaacccgttccccaacctctcgcgttcgtgtccatcttcgaattcgagctcctccatcttccttcaccctcctctctctcgctgtttgaggagaactacctgctcctgctccctcttccgctcctccgcgctcccgctcgccatccccaggcttcatttcggacggggatggacgactacgcccgggagatgatggagctgaagacgctcgtcacccgcaccctcgagaagaagggcgttctcgccaagattagggctgagctaagagcaagcgtgtttgaagccattgaagaggaggatcgggtgatggagaatgatgatggcggtaatcctgctttgcttggtagctgtaatgaccgggctaagcaactgcatgcttcaccttcaggttactaactgcacttgtttgcgaatacttggagtgggcgcaattaagtcacacaatgaaagtttacttgccagagtgtaacctgcccaaggacttctggaagaatgaactgaaagacttctctaacaaaagtggagctgaagggagcaggagtgctgaaagtggtccactgcttttagatgttctcgaaggttatctgaaatatgaggtttatctcttgcgtgatcattaacagaagcaaaaatcatccttttgtttctttatgttttccgaaaaagaaaaaagggggaaagctccttgtgtagtgtgcccaattcttttgtccctactctagaaaactgtgtagtcctgtatggatcaaggtaacaaatctctggctataggtaccgctatagtcagttctagctgttttagacactacaccactatttgtacccacattcatcttagcctgttttagccaggtattagccttatgggaactctgcaactagtatggatcctcttatgcattatgttcggtatgcagaaaaggtagtatattgagttggagcaataatccttcatattattggcgtcttgcttaatcgatctgtccaaaaaattggattgtttgccacaactacaatacgcatcaaggtattgccttagaacaaaaagtaggtgttattattctggaagcttagggagataggtttatcaagatcaagcacatcttcacaatttgtaaattttctagaagctgaaatattttgagaatgtagatcaatgattcttggaataaaccagaatggatacaaattgatgtactgttctctgagtttggtcggttgttttacactgcatgcatgagatttatatttacagtgcatcatcattatcattgtactgagatccgcttatatgtgatttttttcaatctcaacttattgatgaaaggcctgtactcaaggtctccttttgatggtatgtggtgcatttatgctgctttcttcctatgacctttagttcactgcacacacaaaacttgattcttttttccagcttgactttcactgtccttgagcaagtaaagttgatttgcctattatacttcattaatttacattttttatattattaacctccaaatacagtcagtatgctctagtttaagttttggttttctacagcatgctgtggtcatttaatcatattgttttggtcagaatttgtctcaagcaaggatgggcggcaggaggatgatgagttcagaatctgatccatcactaaatgctgaacatcggagcatgaggagggcaccatcagcatcagttgggaatctgcctcctatggggagacctatctcttcttcgcagcaggcatcagatcgcagaggggggtcttcagtttccaacacaaggaaagatgagtacaactggagatacgataccaccgatgatatatctgaagaggtgctgcgggcatcgactgccctagaaagtgttcagctagaccgcaaatctcggaatctgccgacatcttggaggcattcaggggatggcgccgagtaacaagaaggctttggagctggttgcttgacttgaccgaccctgtatcatgtaatttgtatgccactcatttgtggtgcttggattgctgctatcttagaaaaagaagtggtaaactggttatgtatggttgtcttgtaacgaacaaaacaaatcaaagagttaggtgccgtttgttttacatatttgtaacgtgatgggtaactgtgatgggtaactgataacgttaaaccatgtttgtttaagtccaaccgtaatcagataccacattaaaaattaatactagtttattcaaacttattatcgctcacactcaagtgtgaattat

SEQ ID NO: 26152 - DNA, 1966 bp, Zea Mays
gtcaacctctagcctgtaacccgttccccaacctctcgcgttcgtgtccatcttcgaattcgagctcctccatcttccttcaccctcctctctctcgctgtttgaggagaactacctgctcctgctccctcttccgctcctccgcgctcccgctcgccatccccaggcttcatttcggacggggatggacgactacgcccgggagatgatggagctgaagacgctcgtcacccgcaccctcgagaagaagggcgttctcgccaagattagggctgagctaagagcaagcgtgtttgaagccattgaagaggaggatcgggtgatggagaatgatgatggcggtaatcctgctttgcttggtagctgtaatgaccgggctaagcaactgcatgcttcaccttcagagtgtaacctgcccaaggacttctggaagaatgaactgaaagacttctctaacaaaagtggagctgaagggagcaggagtgctgaaagtggtccactgcttttagatgttctcgaaggttatctgaaatatgaggtttatctcttgcgtgatcattaacagaagcaaaaatcatccttttgtttctttatgttttccgaaaaagaaaaaagggggaaagctccttgtgtagtgtgcccaattcttttgtccctactctagaaaactgtgtagtcctgtatggatcaaggtaacaaatctctggctataggtaccgctatagtcagttctagctgttttagacactacaccactatttgtacccacattcatcttagcctgttttagccaggtattagccttatgggaactctgcaactagtatggatcctcttatgcattatgttcggtatgcagaaaaggtagtatattgagttggagcaataatccttcatattattggcgtcttgcttaatcgatctgtccaaaaaattggattgtttgccacaactacaatacgcatcaaggtattgccttagaacaaaaagtaggtgttattattctggaagcttagggagataggtttatcaagatcaagcacatcttcacaatttgtaaattttctagaagctgaaatattttgagaatgtagatcaatgattcttggaataaaccagaatggatacaaattgatgtactgttctctgagtttggtcggttgttttacactgcatgcatgagatttatatttacagtgcatcatcattatcattgtactgagatccgcttatatgtgatttttttcaatctcaacttattgatgaaaggcctgtactcaaggtctccttttgatgaatttgtctcaagcaaggatgggcggcaggaggatgatgagttcagaatctgatccatcactaaatgctgaacatcggagcatgaggagggcaccatcagcatcagttgggaatctgcctcctatggggagacctatctcttcttcgcagcaggcatcagatcgcagaggggggtcttcagtttccaacacaaggaaagatgagtacaactggagatacgataccaccgatgatatatctgaagaggtgctgcgggcatcgactgccctagaaagtgttcagctagaccgcaaatctcggaatctgccgacatcttggaggcattcaggggatggcgccgagtaacaagaaggctttggagctggttgcttgacttgaccgaccctgtatcatgtaatttgtatgccactcatttgtggtgcttggattgctgctatcttagaaaaagaagtggtaaactggttatgtatggttgtcttgtaacgaacaaaacaaatcaaagagttaggtgccgtttgttttacatatttgtaacgtgatgggtaactgtgatgggtaactgataacgttaaaccatgtttgtttaagtccaaccgtaatcagataccacattaaaaattaatactagtttattcaaacttattatcgctcacactcaagtgtgaattat

SEQ ID NO: 26153 - DNA, 1477 bp, Zea Mays
gtcaacctctagcctgtaacccgttccccaacctctcgcgttcgtgtccatcttcgaattcgagctcctccatcttccttcaccctcctctctctcgctgtttgaggagaactacctgctcctgctccctcttccgctcctccgcgctcccgctcgccatccccaggcttcatttcggacggggatggacgactacgcccgggagatgatggagctgaagacgctcgtcacccgcaccctcgagaagaagggcgttctcgccaagattagggctgagctaagagcaagcgtgtttgaagccattgaagaggaggatcgggtgatggagaatgatgatggcggtaatcctgctttgcttggtagctgtaatgaccgggctaagcaactgcatgcttcaccttcagagtgtaacctgcccaaggacttctggaagaatgaactgaaagacttctctaacaaaagtggagctgaagggagcaggagtgctgaaagtggtccactgcttttagatgttctcgaaggttatctgaaatatgaggcctgtactcaaggtctccttttgatggtatgtggtgcatttatgctgctttcttcctatgacctttagttcactgcacacacaaaacttgattcttttttccagcttgactttcactgtccttgagcaagtaaagttgatttgcctattatacttcattaatttacattttttatattattaacctccaaatacagtcagtatgctctagtttaagttttggttttctacagcatgctgtggtcatttaatcatattgttttggtcagaatttgtctcaagcaaggatgggcggcaggaggatgatgagttcagaatctgatccatcactaaatgctgaacatcggagcatgaggagggcaccatcagcatcagttgggaatctgcctcctatggggagacctatctcttcttcgcagcaggcatcagatcgcagaggggggtcttcagtttccaacacaaggaaagatgagtacaactggagatacgataccaccgatgatatatctgaagaggtgctgcgggcatcgactgccctagaaagtgttcagctagaccgcaaatctcggaatctgccgacatcttggaggcattcaggggatggcgccgagtaacaagaaggctttggagctggttgcttgacttgaccgaccctgtatcatgtaatttgtatgccactcatttgtggtgcttggattgctgctatcttagaaaaagaagtggtaaactggttatgtatggttgtcttgtaacgaacaaaacaaatcaaagagttaggtgccgtttgttttacatatttgtaacgtgatgggtaactgtgatgggtaactgataacgttaaaccatgtttgtttaagtccaaccgtaatcagataccacattaaaaattaatactagtttattcaaacttattatcgctcacactcaagtgtgaattat

SEQ ID NO: 26154 - DNA, 1282 bp, Zea Mays
gtcaacctctagcctgtaacccgttccccaacctctcgcgttcgtgtccatcttcgaattcgagctcctccatcttccttcaccctcctctctctcgctgtttgaggagaactacctgctcctgctccctcttccgctcctccgcgctcccgctcgccatccccaggcttcatttcggacggggatggacgactacgcccgggagatgatggagctgaagacgctcgtcacccgcaccctcgagaagaagggcgttctcgccaagattagggctgagctaagagcaagcgtgtttgaagccattgaagaggaggatcgggtgatggagaatgatgatggcggtaatcctgctttgcttggtagctgtaatgaccgggctaagcaactgcatgcttcaccttcaggttactaactgcacttgtttgcgaatacttggagtgggcgcaattaagtcacacaatgaaagtttacttgccagagtgtaacctgcccaaggacttctggaagaatgaactgaaagacttctctaacaaaagtggagctgaagggagcaggagtgctgaaagtggtccactgcttttagatgttctcgaaggttatctgaaatatgagaatttgtctcaagcaaggatgggcggcaggaggatgatgagttcagaatctgatccatcactaaatgctgaacatcggagcatgaggagggcaccatcagcatcagttgggaatctgcctcctatggggagacctatctcttcttcgcagcaggcatcagatcgcagaggggggtcttcagtttccaacacaaggaaagatgagtacaactggagatacgataccaccgatgatatatctgaagaggtgctgcgggcatcgactgccctagaaagtgttcagctagaccgcaaatctcggaatctgccgacatcttggaggcattcaggggatggcgccgagtaacaagaaggctttggagctggttgcttgacttgaccgaccctgtatcatgtaatttgtatgccactcatttgtggtgcttggattgctgctatcttagaaaaagaagtggtaaactggttatgtatggttgtcttgtaacgaacaaaacaaatcaaagagttaggtgccgtttgttttacatatttgtaacgtgatgggtaactgtgatgggtaactgataacgttaaaccatgtttgtttaagtccaaccgtaatcagataccacattaaaaattaatactagtttattcaaacttattatcgctcacactcaagtgtgaattat

SEQ ID NO: 26155 - DNA, 1195 bp, Zea Mays
gtcagtcaacctctagcctgtaacccgttccccaacctctcgcgttcgtgtccatcttcgaattcgagctcctccatcttccttcaccctcctctctctcgctgtttgaggagaactacctgctcctgctccctcttccgctcctccgcgctcccgctcgccatccccaggcttcatttcggacggggatggacgactacgcccgggagatgatggagctgaagacgctcgtcacccgcaccctcgagaagaagggcgttctcgccaagattagggctgagctaagagcaagcgtgtttgaagccattgaagaggaggatcgggtgatggagaatgatgatggcggtaatcctgctttgcttggtagctgtaatgaccgggctaagcaactgcatgcttcaccttcagagtgtaacctgcccaaggacttctggaagaatgaactgaaagacttctctaacaaaagtggagctgaagggagcaggagtgctgaaagtggtccactgcttttagatgttctcgaagaatttgtctcaagcaaggatgggcggcaggaggatgatgagttcagaatctgatccatcactaaatgctgaacatcggagcatgaggagggcaccatcagcatcagttgggaatctgcctcctatggggagacctatctcttcttcgcagcaggcatcagatcgcagaggggggtcttcagtttccaacacaaggaaagatgagtacaactggagatacgataccaccgatgatatatctgaagaggtgctgcgggcatcgactgccctagaaagtgttcagctagaccgcaaatctcggaatctgccgacatcttggaggcattcaggggatggcgccgagtaacaagaaggctttggagctggttgcttgacttgaccgaccctgtatcatgtaatttgtatgccactcatttgtggtgcttggattgctgctatcttagaaaaagaagtggtaaactggttatgtatggttgtcttgtaacgaacaaaacaaatcaaagagttaggtgccgtttgttttacatatttgtaacgtgatgggtaactgtgatgggtaactgataacgttaaaccatgtttgtttaagtccaaccgtaatcagataccacattaaaaattaatactagtttattcaaacttattatcgctcacactcaagtgtgaattat

SEQ ID NO: 26156 - DNA, 1201 bp, Zea Mays
gtcagtcaacctctagcctgtaacccgttccccaacctctcgcgttcgtgtccatcttcgaattcgagctcctccatcttccttcaccctcctctctctcgctgtttgaggagaactacctgctcctgctccctcttccgctcctccgcgctcccgctcgccatccccaggcttcatttcggacggggatggacgactacgcccgggagatgatggagctgaagacgctcgtcacccgcaccctcgagaagaagggcgttctcgccaagattagggctgagctaagagcaagcgtgtttgaagccattgaagaggaggatcgggtgatggagaatgatgatggcggtaatcctgctttgcttggtagctgtaatgaccgggctaagcaactgcatgcttcaccttcagcccaaggacttctggaagaatgaactgaaagacttctctaacaaaagtggagctgaagggagcaggagtgctgaaagtggtccactgcttttagatgttctcgaaggttatctgaaatatgagaatttgtctcaagcaaggatgggcggcaggaggatgatgagttcagaatctgatccatcactaaatgctgaacatcggagcatgaggagggcaccatcagcatcagttgggaatctgcctcctatggggagacctatctcttcttcgcagcaggcatcagatcgcagaggggggtcttcagtttccaacacaaggaaagatgagtacaactggagatacgataccaccgatgatatatctgaagaggtgctgcgggcatcgactgccctagaaagtgttcagctagaccgcaaatctcggaatctgccgacatcttggaggcattcaggggatggcgccgagtaacaagaaggctttggagctggttgcttgacttgaccgaccctgtatcatgtaatttgtatgccactcatttgtggtgcttggattgctgctatcttagaaaaagaagtggtaaactggttatgtatggttgtcttgtaacgaacaaaacaaatcaaagagttaggtgccgtttgttttacatatttgtaacgtgatgggtaactgtgatgggtaactgataacgttaaaccatgtttgtttaagtccaaccgtaatcagataccacattaaaaattaatactagtttattcaaacttattatcgctcacactcaagtgtgaattat

SEQ ID NO: 26157 - DNA, 2294 bp, Zea Mays
gtcagtcaacctctagcctgtaacccgttccccaacctctcgcgttcgtgtccatcttcgaattcgagctcctccatcttccttcaccctcctctctctcgctgtttgaggagaactacctgctcctgctccctcttccgctcctccgcgctcccgctcgccatccccaggcttcatttcggacggggatggacgactacgcccgggagatgatggagctgaagacgctcgtcacccgcaccctcgagaagaagggcgttctcgccaagattagggctgagctaagagcaagcgtgtttgaagccattgaagaggaggatcgggtgatggagaatgatgatggcggtaatcctgctttgcttggtagctgtaatgaccgggctaagcaactgcatgcttcaccttcaggtaggttactaactgcacttgtttgcgaatacttggagtgggcgcaattaagtcacacaatgaaagtttacttgccagagtgtaacctgcccaaggacttctggaagaatgaactgaaagacttctctaacaaaagtggagctgaagggagcaggagtgctgaaagtggtccactgcttttagatgttctcgaaggttatctgaaatatgaggtttatctcttgcgtgatcattaacagaagcaaaaatcatccttttgtttctttatgttttccgaaaaagaaaaaagggggaaagctccttgtgtagtgtgcccaattcttttgtccctactctagaaaactgtgtagtcctgtatggatcaaggtaacaaatctctggctataggtaccgctatagtcagttctagctgttttagacactacaccactatttgtacccacattcatcttagcctgttttagccaggtattagccttatgggaactctgcaactagtatggatcctcttatgcattatgttcggtatgcagaaaaggtagtatattgagttggagcaataatccttcatattattggcgtcttgcttaatcgatctgtccaaaaaattggattgtttgccacaactacaatacgcatcaaggtattgccttagaacaaaaagtaggtgttattattctggaagcttagggagataggtttatcaagatcaagcacatcttcacaatttgtaaattttctagaagctgaaatattttgagaatgtagatcaatgattcttggaataaaccagaatggatacaaattgatgtactgttctctgagtttggtcggttgttttacactgcatgcatgagatttatatttacagtgcatcatcattatcattgtactgagatccgcttatatgtgatttttttcaatctcaacttattgatgaaaggcctgtactcaaggtctccttttgatggtatgtggtgcatttatgctgctttcttcctatgacctttagttcactgcacacacaaaacttgattcttttttccagcttgactttcactgtccttgagcaagtaaagttgatttgcctattatacttcattaatttacattttttatattattaacctccaaatacagtcagtatgctctagtttaagttttggttttctacagcatgctgtggtcatttaatcatattgttttggtcagaatttgtctcaagcaaggatgggcggcaggaggatgatgagttcagaatctgatccatcactaaatgctgaacatcggagcatgaggagggcaccatcagcatcagttgggaatctgcctcctatggggagacctatctcttcttcgcagcaggcatcagatcgcagaggggggtcttcagtttccaacacaaggaaagatgagtacaactggagatacgataccaccgatgatatatctgaagaggtgctgcgggcatcgactgccctagaaagtgttcagctagaccgcaaatctcggaatctgccgacatcttggaggtaggcattcaggggatggcgccgagtaacaagaaggctttggagctggttgcttgacttgaccgaccctgtatcatgtaatttgtatgccactcatttgtggtgcttggattgctgctatcttagaaaaagaagtggtaaactggttatgtatggttgtcttgtaacgaacaaaacaaatcaaagagttaggtgccgtttgttttacatatttgtaacgtgatgggtaactgtgatgggtaactgataacgttaaaccatgtttgtttaagtccaaccgtaatcagataccacattaaaaattaatactagtttattcaaacttattatcgctcacactcaagtgtgaattat

SEQ ID NO: 26158 - DNA, 2048 bp, Zea Mays
gtcagtcaacctctagcctgtaacccgttccccaacctctcgcgttcgtgtccatcttcgaattcgagctcctccatcttccttcaccctcctctctctcgctgtttgaggagaactacctgctcctgctccctcttccgctcctccgcgctcccgctcgccatccccaggcttcatttcggacggggatggacgactacgcccgggagatgatggagctgaagacgctcgtcacccgcaccctcgagaagaagggcgttctcgccaagattagggctgagctaagagcaagcgtgtttgaagccattgaagaggaggatcgggtgatggagaatgatgatggcggtaatcctgctttgcttggtagctgtaatgaccgggctaagcaactgcatgcttcaccttcaggtaggttactaactgcacttgtttgcgaatacttggagtgggcgcaattaagtcacacaatgaaagtttacttgccagagtgtaacctgcccaaggacttctggaagaatgaactgaaagacttctctaacaaaagtggagctgaagggagcaggagtgctgaaagtggtccactgcttttagatgttctcgaaggttatctgaaatatgaggtttatctcttgcgtgatcattaacagaagcaaaaatcatccttttgtttctttatgttttccgaaaaagaaaaaagggggaaagctccttgtgtagtgtgcccaattcttttgtccctactctagaaaactgtgtagtcctgtatggatcaaggtaacaaatctctggctataggtaccgctatagtcagttctagctgttttagacactacaccactatttgtacccacattcatcttagcctgttttagccaggtattagccttatgggaactctgcaactagtatggatcctcttatgcattatgttcggtatgcagaaaaggtagtatattgagttggagcaataatccttcatattattggcgtcttgcttaatcgatctgtccaaaaaattggattgtttgccacaactacaatacgcatcaaggtattgccttagaacaaaaagtaggtgttattattctggaagcttagggagataggtttatcaagatcaagcacatcttcacaatttgtaaattttctagaagctgaaatattttgagaatgtagatcaatgattcttggaataaaccagaatggatacaaattgatgtactgttctctgagtttggtcggttgttttacactgcatgcatgagatttatatttacagtgcatcatcattatcattgtactgagatccgcttatatgtgatttttttcaatctcaacttattgatgaaaggcctgtactcaaggtctccttttgatgaatttgtctcaagcaaggatgggcggcaggaggatgatgagttcagaatctgatccatcactaaatgctgaacatcggagcatgaggagggcaccatcagcatcagttgggaatctgcctcctatggggagacctatctcttcttcgcagcaggcatcagatcgcagaggggggtcttcagtttccaacacaaggaaagatgagtacaactggagatacgataccaccgatgatatatctgaagaggtgctgcgggcatcgactgccctagaaagtgttcagctagaccgcaaatctcggaatctgccgacatcttggaggcattcaggggatggcgccgagtaacaagaaggctttggagctggttgcttgacttgaccgaccctgtatcatgtaatttgtatgccactcatttgtggtgcttggattgctgctatcttagaaaaagaagtggtaaactggttatgtatggttgtcttgtaacgaacaaaacaaatcaaagagttaggtgccgtttgttttacatatttgtaacgtgatgggtaactgtgatgggtaactgataacgttaaaccatgtttgtttaagtccaaccgtaatcagataccacattaaaaattaatactagtttattcaaacttattatcgctcacactcaagtgtgaattat

SEQ ID NO: 26159 - DNA, 2218 bp, Zea Mays
ccacctgtcagtcaacctctagcctgtaacccgttccccaacctctcgcgttcgtgtccatcttcgaattcgagctcctccatcttccttcaccctcctctctctcgctgtttgaggagaactacctgctcctgctccctcttccgctcctccgcgctcccgctcgccatccccaggcttcatttcggacggggatggacgactacgcccgggagatgatggagctgaagacgctcgtcacccgcaccctcgagaagaagggcgttctcgccaagattagggctgagctaagagcaagcgtgtttgaagccattgaagaggaggatcgggtgatggagaatgatgatggcggtaatcctgctttgcttggtagctgtaatgaccgggctaagcaactgcatgcttcaccttcagagtgtaacctgcccaaggacttctggaagaatgaactgaaagacttctctaacaaaagtggagctgaagggagcaggagtgctgaaagtggtccactgcttttagatgttctcgaaggttatctgaaatatgaggtttatctcttgcgtgatcattaacagaagcaaaaatcatccttttgtttctttatgttttccgaaaaagaaaaaagggggaaagctccttgtgtagtgtgcccaattcttttgtccctactctagaaaactgtgtagtcctgtatggatcaaggtaacaaatctctggctataggtaccgctatagtcagttctagctgttttagacactacaccactatttgtacccacattcatcttagcctgttttagccaggtattagccttatgggaactctgcaactagtatggatcctcttatgcattatgttcggtatgcagaaaaggtagtatattgagttggagcaataatccttcatattattggcgtcttgcttaatcgatctgtccaaaaaattggattgtttgccacaactacaatacgcatcaaggtattgccttagaacaaaaagtaggtgttattattctggaagcttagggagataggtttatcaagatcaagcacatcttcacaatttgtaaattttctagaagctgaaatattttgagaatgtagatcaatgattcttggaataaaccagaatggatacaaattgatgtactgttctctgagtttggtcggttgttttacactgcatgcatgagatttatatttacagtgcatcatcattatcattgtactgagatccgcttatatgtgatttttttcaatctcaacttattgatgaaaggcctgtactcaaggtctccttttgatggtatgtggtgcatttatgctgctttcttcctatgacctttagttcactgcacacacaaaacttgattcttttttccagcttgactttcactgtccttgagcaagtaaagttgatttgcctattatacttcattaatttacattttttatattattaacctccaaatacagtcagtatgctctagtttaagttttggttttctacagcatgctgtggtcatttaatcatattgttttggtcagaatttgtctcaagcaaggatgggcggcaggaggatgatgagttcagaatctgatccatcactaaatgctgaacatcggagcatgaggagggcaccatcagcatcagttgggaatctgcctcctatggggagacctatctcttcttcgcagcaggcatcagatcgcagaggggggtcttcagtttccaacacaaggaaagatgagtacaactggagatacgataccaccgatgatatatctgaagaggtgctgcgggcatcgactgccctagaaagtgttcagctagaccgcaaatctcggaatctgccgacatcttggaggcattcaggggatggcgccgagtaacaagaaggctttggagctggttgcttgacttgaccgaccctgtatcatgtaatttgtatgccactcatttgtggtgcttggattgctgctatcttagaaaaagaagtggtaaactggttatgtatggttgtcttgtaacgaacaaaacaaatcaaagagttaggtgccgtttgttttacatatttgtaacgtgatgggtaactgtgatgggtaactgataacgttaaaccatgtttgtttaagtccaaccgtaatcagataccacattaaaaattaatactagtttattcaaacttattatcgctcacactcaagtgtgaattat

SEQ ID NO: 26160 - DNA, 1340 bp, Zea Mays
gccaatctagtctgtctggcggcaagcgcttattgatacttaacttccactacataacagtggatcacactaaccgtgaactgatttttctgaatggtatatgtataacactggagcatagaagtgataaaatgttaggtatccagaccgtattaccttaatacgaggaaaccatgagagcagacagatcacacaggtttatggattctatgatgagtgccttcgcaaatatggctcagtcaatgtctggagatattgcactgatatattcgactatttaagtttgtctgcacttattgagaacaaaatatttagtgtccatggaggcctttctcctgctatcacgacactggatcaggcaaaactattctcctagtgttgttttatattctgtatgttttatttgttttaacgttgtaccctacaccaacagataagagtaatagaccgcaagcaagaagtacctcatgatggggctatgtgtgaccttctatggtctgatccagaggacactgtagatggttggggactaagtcctcggggtgcaggattcctctttggtggaaatgtggtctcatcatttaaccattcaaacaacatagattacatttgtcgtgcacatcaacttgtcatggaagggtataaatggatgttcaatagcaagattgtaactgtatggtctgctcctaattactgctacaggaatcaagaggtgttcctgctaagaggccagcaccagattactttctgtgatgctacacagcgaacgcttgagcttactgtgctttcaagcgctggacctcatgttgcaagaagagctcaggccctacagctttccagccaggaggtggttttcaggatgtgtaaattgagtgtcatcttctcccttcaggtccatgatttgtaagagagttggattttggcatccagttttttcacagaacatcacccatttgagctggagaaatacgcccttgcgaaggggtttcatgtgatgtgctaaaagtacacgttgtaagatttttttgcgattgcataccccctagaaaaaccgttcctggaatatgtggcaatcaggaaatgtgtcgatgctctggaaagtgtaggagatttttgtagtagtcatttgcgcgtgctgttagggactagggagcatgtggtcaggggacactagcactagcttgtcggcatgcaatggtgtattgtaactgtctttatgcagcatctctaattcaaatagctaactacatttgatgtcttcttctgagctgtcgtgttcatataaattcgttttattggatataaaatatatgatttaataatgacacttagatgttcac

SEQ ID NO: 26161 - DNA, 1398 bp, Zea Mays
accaatttgctgttctttcttcatgtgttgaattatttgtggagacatacatggacagttctatgacatgaaggagctgttcaaagttggaggtgactgcccaaagacaaactatttgttccttggggattttgttgaccgaggattttattctgttgaaacttttttgcttcttttggctttaaaggttaggtatccagaccgtattaccttaatacgaggaaaccatgagagcagacagatcacacaggtttatggattctatgatgagtgccttcgcaaatatggctcagtcaatgtctggagatattgcactgatatattcgactatttaagtttgtctgcacttattgagaacaaaatatttagtgtccatggaggcctttctcctgctatcacgacactggatcagataagagtaatagaccgcaagcaagaagtacctcatgatggggctatgtgtgaccttctatggtctgatccagaggacactgtagatggttggggactaagtcctcggggtgcaggattcctctttggtggaaatgtggtctcatcatttaaccattcaaacaacatagattacatttgtcgtgcacatcaacttgtcatggaagggtataaatggatgttcaatagcaagattgtaactgtatggtctgctcctaattactgctacaggtgtggcaatattgctgcaatcctagagctggatgagaacctgaataagcagttccgcgtatttgaagctgctccacatgaatcaagaggtgttcctgctaagaggccagcaccagattactttctgtgatgctacacagcgaacgcttgagcttactgtgctttcaagcgctggacctcatgttgcaagaagagctcaggccctacagctttccagccaggaggtggttttcaggatgtgtaaattgagtgtcatcttctcccttcaggtccatgatttgtaagagagttggattttggcatccagttttttcacagaacatcacccatttgagctggagaaatacgcccttgcgaaggggtttcatgtgatgtgctaaaagtacacgttgtaagatttttttgcgattgcataccccctagaaaaaccgttcctggaatatgtggcaatcaggaaatgtgtcgatgctctggaaagtgtaggagatttttgtagtagtcatttgcgcgtgctgttagggactagggagcatgtggtcaggggacactagcactagcttgtcggcatgcaatggtgtattgtaactgtctttatgcagcatctctaattcaaatagctaactacatttgatgtcttcttctgagctgtcgtgttcatataaattcgttttattggatataaaatatatgatttaataatgacacttagatgttcac

SEQ ID NO: 26162 - DNA, 1625 bp, Zea Mays
acgacgggactcggctcccctacggcccacgccacgtcaccgcggtccgcacgcgccccacggcttccgccgcctcctaaccctagaatcttcgagaagcacccggcgaagagcgcgctgccacggcgctttccggaaacttcttggagagagagagagagagagagacggccccgcagcggcggaggcggagatgggggcgtcggatctagaccggcagatcgagcagctgaagcggtgcgagccgctcacggaggcggaggtcaaggcactgtgcctcaaggccatggagatcctcatcgaggagagtaacgtgcagcgcgtcgacgcccccgtcaccatttgtggagacatacatggacagttctatgacatgaaggagctgttcaaagttggaggtgactgcccaaagacaaactatttgttccttggggattttgttgaccgaggattttattctgttgaaacttttttgcttcttttggctttaaaggttaggtatccagaccgtattaccttaatacgaggaaaccatgagagcagacagatcacacaggtttatggattctatgatgagtgccttcgcaaatatggctcagtcaatgtctggagatattgcactgatatattcgactatttaagtttgtctgcacttattgagaacaaaatatttagtgtccatggaggcctttctcctgctatcacgacactggatcagataagagtaatagaccgcaagcaagaagtacctcatgatggggctatgtgtgaccttctatggtctgatccagaggacactgtagatggttggggactaagtcctcggggtgcaggattcctctttggtggaaatgtggtctcatcatttaaccattcaaacaacatagattacatttgtcgtgcacatcaacttgtcatggaagggtataaatggatgttcaatagcaagattgtaactgtatggtctgctcctaattactgctacaggaatcaagaggtgttcctgctaagaggccagcaccagattactttctgtgatgctacacagcgaacgcttgagcttactgtgctttcaagcgctggacctcatgttgcaagaagagctcaggccctacagctttccagccaggaggtggttttcaggatgtgtaaattgagtgtcatcttctcccttcaggtccatgatttgtaagagagttggattttggcatccagttttttcacagaacatcacccatttgagctggagaaatacgcccttgcgaaggggtttcatgtgatgtgctaaaagtacacgttgtaagatttttttgcgattgcataccccctagaaaaaccgttcctggaatatgtggcaatcaggaaatgtgtcgatgctctggaaagtgtaggagatttttgtagtagtcatttgcgcgtgctgttagggactagggagcatgtggtcaggggacactagcactagcttgtcggcatgcaatggtgtattgtaactgtctttatgcagcatctctaattcaaatagctaactacatttgatgtcttcttctgagctgtcgtgttcatataaattcgttttattggatataaaatatatgatttaataatgacacttagatgttcac

SEQ ID NO: 26163 - DNA, 1551 bp, Zea Mays
acgacgggactcggctcccctacggcccacgccacgtcaccgcggtccgcacgcgccccacggcttccgccgcctcctaaccctagaatcttcgagaagcacccggcgaagagcgcgctgccacggcgctttccggaaacttcttggagagagagagagagagagagacggccccgcagcggcggaggcggagatgggggcgtcggatctagaccggcagatcgagcagctgaagcggtgcgagccgctcacggaggcggaggtcaaggcactgtgcctcaaggccatggagatcctcatcgaggagagtaacgtgcagcgcgtcgacgcccccgtcaccgttaggtatccagaccgtattaccttaatacgaggaaaccatgagagcagacagatcacacaggtttatggattctatgatgagtgccttcgcaaatatggctcagtcaatgtctggagatattgcactgatatattcgactatttaagtttgtctgcacttattgagaacaaaatatttagtgtccatggaggcctttctcctgctatcacgacactggatcagataagagtaatagaccgcaagcaagaagtacctcatgatggggctatgtgtgaccttctatggtctgatccagaggacactgtagatggttggggactaagtcctcggggtgcaggattcctctttggtggaaatgtggtctcatcatttaaccattcaaacaacatagattacatttgtcgtgcacatcaacttgtcatggaagggtataaatggatgttcaatagcaagattgtaactgtatggtctgctcctaattactgctacaggtgtggcaatattgctgcaatcctagagctggatgagaacctgaataagcagttccgcgtatttgaagctgctccacatgaatcaagaggtgttcctgctaagaggccagcaccagattactttctgtgatgctacacagcgaacgcttgagcttactgtgctttcaagcgctggacctcatgttgcaagaagagctcaggccctacagctttccagccaggaggtggttttcaggatgtgtaaattgagtgtcatcttctcccttcaggtccatgatttgtaagagagttggattttggcatccagttttttcacagaacatcacccatttgagctggagaaatacgcccttgcgaaggggtttcatgtgatgtgctaaaagtacacgttgtaagatttttttgcgattgcataccccctagaaaaaccgttcctggaatatgtggcaatcaggaaatgtgtcgatgctctggaaagtgtaggagatttttgtagtagtcatttgcgcgtgctgttagggactagggagcatgtggtcaggggacactagcactagcttgtcggcatgcaatggtgtattgtaactgtctttatgcagcatctctaattcaaatagctaactacatttgatgtcttcttctgagctgtcgtgttcatataaattcgttttattggatataaaatatatgatttaataatgacacttagatgttcac

SEQ ID NO: 26164 - DNA, 1845 bp, Zea Mays
acgacgggactcggctcccctacggcccacgccacgtcaccgcggtccgcacgcgccccacggcttccgccgcctcctaaccctagaatcttcgagaagcacccggcgaagagcgcgctgccacggcgctttccggaaacttcttggagagagagagagagagagagacggccccgcagcggcggaggcggagatgggggcgtcggatctagaccggcagatcgagcagctgaagcggtgcgagccgctcacggaggcggaggtcaaggcactgtgcctcaaggccatggagatcctcatcgaggagagtaacgtgcagcgcgtcgacgcccccgtcaccatttgtggagacatacatggacagttctatgacatgaaggagctgttcaaagttggaggtgtgttgttgctttttattgttggacttcatttggcattagggtgtcttctcgaaagaacatattcagagcatggttgttttggaacttctgtcctggagaagccaatctagtctgtctggcggcaagcgcttattgatacttaacttccactacataacagtggatcacactaaccgtgaactgatttttctgaatggtatatgtataacactggagcatagaagtgataaaatgttaggtatccagaccgtattaccttaatacgaggaaaccatgagagcagacagatcacacaggtttatggattctatgatgagtgccttcgcaaatatggctcagtcaatgtctggagatattgcactgatatattcgactatttaagtttgtctgcacttattgagaacaaaatatttagtgtccatggaggcctttctcctgctatcacgacactggatcagataagagtaatagaccgcaagcaagaagtacctcatgatggggctatgtgtgaccttctatggtctgatccagaggacactgtagatggttggggactaagtcctcggggtgcaggattcctctttggtggaaatgtggtctcatcatttaaccattcaaacaacatagattacatttgtcgtgcacatcaacttgtcatggaagggtataaatggatgttcaatagcaagattgtaactgtatggtctgctcctaattactgctacaggtgtggcaatattgctgcaatcctagagctggatgagaacctgaataagcagttccgcgtatttgaagctgctccacatgaatcaagaggtgttcctgctaagaggccagcaccagattactttctgtgatgctacacagcgaacgcttgagcttactgtgctttcaagcgctggacctcatgttgcaagaagagctcaggccctacagctttccagccaggaggtggttttcaggatgtgtaaattgagtgtcatcttctcccttcaggtccatgatttgtaagagagttggattttggcatccagttttttcacagaacatcacccatttgagctggagaaatacgcccttgcgaaggggtttcatgtgatgtgctaaaagtacacgttgtaagatttttttgcgattgcataccccctagaaaaaccgttcctggaatatgtggcaatcaggaaatgtgtcgatgctctggaaagtgtaggagatttttgtagtagtcatttgcgcgtgctgttagggactagggagcatgtggtcaggggacactagcactagcttgtcggcatgcaatggtgtattgtaactgtctttatgcagcatctctaattcaaatagctaactacatttgatgtcttcttctgagctgtcgtgttcatataaattcgttttattggatataaaatatatgatttaataatgacacttagatgttcac

SEQ ID NO: 26165 - DNA, 1709 bp, Zea Mays
ccgagatgctctaaccgcacgacgggactcggctcccctacggcccacgccacgtcaccgcggtccgcacgcgccccacggcttccgccgcctcctaaccctagaatcttcgagaagcacccggcgaagagcgcgctgccacggcgctttccggaaacttcttggagagagagagagagagagagacggccccgcagcggcggaggcggagatgggggcgtcggatctagaccggcagatcgagcagctgaagcggtgcgagccgctcacggaggcggaggtcaaggcactgtgcctcaaggccatggagatcctcatcgaggagagtaacgtgcagcgcgtcgacgcccccgtcaccatttgtggagacatacatggacagttctatgacatgaaggagctgttcaaagttggaggtgactgcccaaagacaaactatttgttccttggggattttgttgaccgaggattttattctgttgaaacttttttgcttcttttggctttaaaggttaggtatccagaccgtattaccttaatacgaggaaaccatgagagcagacagatcacacaggtttatggattctatgatgagtgccttcgcaaatatggctcagtcaatgtctggagatattgcactgatatattcgactatttaagtttgtctgcacttattgagaacaaaatatttagtgtccatggaggcctttctcctgctatcacgacactggatcagaccgcaagcaagaagtacctcatgatggggctatgtgtgaccttctatggtctgatccagaggacactgtagatggttggggactaagtcctcggggtgcaggattcctctttggtggaaatgtggtctcatcatttaaccattcaaacaacatagattacatttgtcgtgcacatcaacttgtcatggaagggtataaatggatgttcaatagcaagattgtaactgtatggtctgctcctaattactgctacaggtgtggcaatattgctgcaatcctagagctggatgagaacctgaataagcagttccgcgtatttgaagctgctccacatgaatcaagaggtgttcctgctaagaggccagcaccagattactttctgtgatgctacacagcgaacgcttgagcttactgtgctttcaagcgctggacctcatgttgcaagaagagctcaggccctacagctttccagccaggaggtggttttcaggatgtgtaaattgagtgtcatcttctcccttcaggtccatgatttgtaagagagttggattttggcatccagttttttcacagaacatcacccatttgagctggagaaatacgcccttgcgaaggggtttcatgtgatgtgctaaaagtacacgttgtaagatttttttgcgattgcataccccctagaaaaaccgttcctggaatatgtggcaatcaggaaatgtgtcgatgctctggaaagtgtaggagatttttgtagtagtcatttgcgcgtgctgttagggactagggagcatgtggtcaggggacactagcactagcttgtcggcatgcaatggtgtattgtaactgtctttatgcagcatctctaattcaaatagctaactacatttgatgtcttcttctgagctgtcgtgttcatataaattcgttttattggatataaaatatatgatttaataatgacacttagatgttcac

SEQ ID NO: 26166 - DNA, 1783 bp, Zea Mays
aatcaagctactaaggagccgaggcgaccggtatttggtccggccgagatgctctaaccgcacgacgggactcggctcccctacggcccacgccacgtcaccgcggtccgcacgcgccccacggcttccgccgcctcctaaccctagaatcttcgagaagcacccggcgaagagcgcgctgccacggcgctttccggaaacttcttggagagagagagagagagagagacggccccgcagcggcggaggcggagatgggggcgtcggatctagaccggcagatcgagcagctgaagcggtgcgagccgctcacggaggcggaggtcaaggcactgtgcctcaaggccatggagatcctcatcgaggagagtaacgtgcagcgcgtcgacgcccccgtcaccatttgtggagacatacatggacagttctatgacatgaaggagctgttcaaagttggaggtgactgcccaaagacaaactatttgttccttggggattttgttgaccgaggattttattctgttgaaacttttttgcttcttttggctttaaaggttaggtatccagaccgtattaccttaatacgaggaaaccatgagagcagacagatcacacaggtttatggattctatgatgagtgccttcgcaaatatggctcagtcaatgtctggagatattgcactgatatattcgactatttaagctctatctgttttttcagtttgtctgcacttattgagaacaaaatatttagtgtccatggaggcctttctcctgctatcacgacactggatcagataagagtaatagaccgcaagcaagaagtacctcatgatggggctatgtgtgaccttctatggtctgatccagaggacactgtagatggttggggactaagtcctcggggtgcaggattcctctttggtggaaatgtggtctcatcatttaaccattcaaacaacatagattacatttgtcgtgcacatcaacttgtcatggaagggtataaatggatgttcaatagcaagattgtaactgtatggtctgctcctaattactgctacaggtgtggcaatattgctgcaatcctagagctggatgagaacctgaataagcagttccgcgtatttgaagctgctccacatgaatcaagaggtgttcctgctaagaggccagcaccagattactttctgtgatgctacacagcgaacgcttgagcttactgtgctttcaagcgctggacctcatgttgcaagaagagctcaggccctacagctttccagccaggaggtggttttcaggatgtgtaaattgagtgtcatcttctcccttcaggtccatgatttgtaagagagttggattttggcatccagttttttcacagaacatcacccatttgagctggagaaatacgcccttgcgaaggggtttcatgtgatgtgctaaaagtacacgttgtaagatttttttgcgattgcataccccctagaaaaaccgttcctggaatatgtggcaatcaggaaatgtgtcgatgctctggaaagtgtaggagatttttgtagtagtcatttgcgcgtgctgttagggactagggagcatgtggtcaggggacactagcactagcttgtcggcatgcaatggtgtattgtaactgtctttatgcagcatctctaattcaaatagctaactacatttgatgtcttcttctgagctgtcgtgttcatataaattcgttttattggatataaaatatatgatttaataatgacacttagatgttcac

SEQ ID NO: 26167 - DNA, 382 bp, Zea Mays
agccgagctcgcccctctctcactccctcgccgccggagctcactgtcgtcaccgttgtggaaccccaccgaaacttgcgcgcgcagcaggcactctcgctgacccctgcccccgtacgaacgccgtcagcctctctgctcgcctcgatgtcgccagctgtgcccccatccgctctctgcgcaagtacaacaagtggttgatctagtagttaagaatcaagatatattcctatccgtggaagaacctcaagttttcagtaagcaaggcaagtggacttctccctctgcatactctgtttgatcccaaacaatacatttaataaagtttattcttttggatatatatgcataatttgacgggttacctatttagataaccttt

SEQ ID NO: 26168 - DNA, 2189 bp, Zea Mays
gatgggcgtgtgcatgaaagagtttagtgttggcatcaccttcgttcaaccaattcagtttagaccttgatctagcaatggttcttttgagagaagctagggccaatgagtgcttgcatcacttctgctttgaaaagagggattggatgactgtgcaaccaaatgaactgcctcgtggatcccaactaattatggggcttaatcctccttttggagtaaaagcaagtcttgcgaacaaatttattgacaaagcattgacattcaagcctaagctcattgtactaattgtccctaaagaaacaaaaaggttagataagaagaagataccttatgatttgatttgggaagacagtgagtgtcttgctgggaagttgaagggtggaatgcatccgcgccacccctctatttgtggagtcatcctcattggacaaagaagcacatgcaagtggctgaagagcatggtcacacttgcatggggaagatagcttcccatgttgaaaagagaaatctgtcagatgatctgcccgtgaggaaacaatctgaggctgcaaacaaatggaactccagatcagggaaagagactacatgcaatgacagaaaggacaatctacttgatgatgttactgctaagaagcaagcaggacctgaagaagaaaaggaaactctagggaagatggaccaccatgtgaaaaaggctactataccagatagccttacagtgaagaaacaaactgaagcttccagcaaagctctctctcattgtggaaatgatagaaagattggcaggtacagcagcaggaaatatgatgactggagaagtaagcggacacctgatcacgaagagagcttcccacctgaaaagcaagtggaagttgcatatgaggagacaaaagttattattccaagcaaaaagattactcataacgaacaaagcggtgcttgccgtgaaaatagaaagaattcttgtgtggaggaaaccaagaacgtggagtacaactatgagcagcagactgcagcagggatgaggttcagagagggagaggattctgacatgagtatctcacccccctcgagaccagttgaaccctttgatatgatagctcaccccattggctctctgacaaaagaaccttttgaccctgtgctcaatagaggggctactcatcaggacagttatgcagtaaccaaagaggaatacctgggtcaatttaagaggaaaaacgaccgtacctttactgacattgatgatagctcaaggatgaggggctccagcatcgaagaagtgaccaggccctatattgctgctccaaccagtgatccctacagcttgcggtatagaggagatggcagcttctacaggcatccgagctcagaggatttaaacactacaggcatcagtgcaggatatggacaaattggtggtgacagttacccacaagcaacaggctcgcaaacacataatactagaatgcatggtggaacaagtgatgataattacctgtcggcgagatactcccttggatattcaggttctcgctttagccaaccagcttcaactgttcccgcttttgggctctcaggtgcaagttcacaacgaggctcagtaatagacaagtattcctatgggctctcgggtcccactggaccacaggattctggtattaacagatatgctccaccggacgacggaacgagcacaagatccaagagctccttggctgaacaacagtacccgttcggacaatctggctcttccggtggcgagtggcctcatatctgatcgctggaacttgttgtcgaagtttttttttcaaggcaaaaactgtgggaagttctccacggtacttcattttcatttttagaggggattacatgttatcaaaatcatgcagcttttgacctgacctgggtgtaaattggagtaaaaccacaagcatctatccatgcggggctggtgttaaaaagcaaagttgtttcttataaaactgtctacagcagtctatccatgatttacccaaaattactgttttgtactgtagactgcattgtttgcataatgaagtttgaatatagatgaggatgggtaagagatagactaaggtagtttcatcatacatataagagttgtaatgacatataagtttgaatatagatgaggatggctatccgaggacatgccctttgcacag

SEQ ID NO: 26169 - DNA, 4336 bp, Zea Mays
atggtgatgtcggagtcggacgacgacgacgacgagccccagctcaacgcggtggagagctactacttcgttgactccacgaacgacaacgagcctgtctgcttctccactctgcctttcctgttcggggacactgatgatcttcctgactgcaagaaaaggctggtgctgcgcgggactggtggtgacccgggcgtcaaggtgtacagtgaggtggtggcctggagtctggggctcgaggggaagcaaccccagtttgcggtgctcacagcagaaggcagacgttgggttcgtctcgttaggcccttgaacagctacgaggagatgatcaggactgtgctgatcacagcgcatatgctgcattttctcatgaggaagcctcatgagccagagagaacgctgtggaaccacctttgcaaagttttcaacaagtttgacgttagaccctcagaggacgatttcaggaaccacatctcactgatgaagcagtttgtggcaaaagatcctatcttagcaaaatcagaggggagtctcccccatgagtggggtctgacgaagggaaaaactaaagctcagttcttgcttagctacgttatgcctagagctgtgttatgtaaagttgtaaacattgtccttaagacgattttgcgagtatttgttgaaggaaaatctggaaaaattttcactgaggctggtgcagaccatattgatgttaagcagccattcataactgatgatgaggacatagatgagatgattgtggaagatgccgataatgaatctgatgaagaggaggatggagatttgtttgattcaatatgtgctatttgtgacgacggaggagacatattatgctgtgatggtccatgtatgcgctctttccatgcaaaagaaggaagtggtgaagactcctattgtgatacccttggctacactgaggcagaagttgaggcaatgaaattatttctgtgcaagaactgtgagtataagcaacaccagtgtttcatctgcggagtgttggagccttcaaatggagcagcagctaaggtttttttatgtaacaatgctacatgtggacacttctaccacccgaaatgtgttgcccagcaacttcatcctaataacattgatgaagcctcagaattggagaagaagataacagatgggttttcatttacatgcccaattcactggtgctttcattgcaaaggtttggaggatagaacacaagggcctttgcaatttgctgtttgcagacgctgtccgaagtcatatcacagaaagtgtttaccaagagaaatttcctttgatgaaattgaagagaagggtgtcatcatacgggcttgggaattatcaaaaatgattttgatatactgcctgaaccatgagatcgatagtgaacttgagacacctgtcagagatcatataaagtttccaaggattgaaaaaccacttcaatttgtaaagaagggagctaacttgttgcctaagaagaaaaagaggacttacagtgagtcaattcttgagcaacctcccaaagatactgtgaaaatgaaaagcaaggttcgcatgcaagaaagcgagcaaaacaaacacgacaccagagaagtttctgtgaagagtttcactcaaaacgttgttgacacacctgtaaagaaaaaaggcaagttgaaagagaataaacagttgccttatgtggccaaggatcattttgtaagcagtccaaaatctgtgaaagagcaagaacaagagttggtacctttgcccttatctggaatcaggaagagttcatttcctaaagtggacagtgaaattgaaaagagggtgattagcatactgggaaatgaaatctcttcgttgacaataaaagatgtaacaaggaactgcagtttgccatcaactcatgtatactctggcagaccaactgacaagatgccactaggaaaaattgagcgttctgttcaggctgtagaagctgctttaaaaaagctgaaaaatggaggtagtgtcaatgatgctaaagcagtatgtgaacctgatgttttaagacagcttgcaaggtggcatattgttgatagacttcactggtatgtggaatctggtgacatgattgtagatttctgctgtgggtcaaatgattttagccggcttatgaaagaaaaactcgacaaagttcagaaaaagtgccatttcaagaattatgatcttatccaaccacagcatcacttctgctttgaaaagagggattggatgactgtgcaaccaaatgaactgcctcgtggatcccaactaattatggggcttaatcctccttttggagtaaaagcaagtcttgcgaacaaatttattgacaaagcattgacattcaagcctaagctcattgtactaattgtccctaaagaaacaaaaaggttagataagaagaagataccttatgatttgatttgggaagacagtgagtgtcttgctgggaagtccttctatttgcctggttctgtggatcttaatgataatacagttgaagggtggaatgcatccgcgccacccctctatttgtggagtcatcctcattggacaaagaagcacatgcaagtggctgaagagcatggtcacacttgcatggggaagatagcttcccatgttgaaaagagaaatctgtcagatgatctgcccgtgaggaaacaatctgaggctgcaaacaaatggaactccagatcagggaaagagactacatgcaatgacagaaaggacaatctacttgatgatgttactgctaagaagcaagcaggacctgaagaagaaaaggaaactctagggaagatggaccaccatgtgaaaaaggctactataccagatagccttacagtgaagaaacaaactgaagcttccagcaaagctctctctcattgtggaaatgatagaaagattggcaggtacagcagcaggaaatatgatgactggagaagtaagcggacacctgatcacgaagagagcttcccacctgaaaagcaagtggaagttgcatatgaggagacaaaagttattattccaagcaaaaagattactcataacgaacaaagcggtgcttgccgtgaaaatagaaagaattcttgtgtggaggaaaccaagaacgtggagtacaactatgagcagcagactgcagcagggatgaggttcagagagggagaggattctgacatgagtatctcacccccctcgagaccagttgaaccctttgatatgatagctcaccccattggctctctgacaaaagaaccttttgaccctgtgctcaatagaggggctactcatcaggacagttatgcagtaaccaaagaggaatacctgggtcaatttaagaggaaaaacgaccgtacctttactgacattgatgatagctcaaggatgaggggctccagcatcgaagaagtgaccaggccctatattgctgctccaaccagtgatccctacagcttgcggtatagaggagatggcagcttctacaggcatccgagctcagaggatttaaacactacaggcatcagtgcaggatatggacaaattggtggtgacagttacccacaagcaacaggctcgcaaacacataatactagaatgcatggtggaacaagtgatgataattacctgtcggcgagatactcccttggatattcaggttctcgctttagccaaccagcttcaactgttcccgcttttgggctctcaggtgcaagttcacaacgaggctcagtaatagacaagtattcctatgggctctcgggtcccactggaccacaggattctggtattaacagatatgctccaccggacgacggaacgagcacaagatccaagagctccttggctgaacaacagtacccgttcggacaatctggctcttccggtggcgagtggcctcatatctgatcgctggaacttgttgtcgaagtttttttttcaaggcaaaaactgtgggaagttctccacggtacttcattttcatttttagaggggattacatgttatcaaaatcatgcagcttttgacctgacctgggtgtaaattggagtaaaaccacaagcatctatccatgcggggctggtgttaaaaagcaaagttgtttcttataaaactgtctacagcagtctatccatgatttacccaaaattactgttttgtactgtagactgcattgtttgcataatgaagtttgaatatagatgaggatgggtaagagatagactaaggtagtttcatcatacatataagagttgtaatgacatataagtttgaatatagatgaggatggctatccgaggacatgccctttgcacag

SEQ ID NO: 26170 - DNA, 4660 bp, Zea Mays
ccgaccctttcgccgcgcccgtgcacaaacccgcgccgtcgaagctggccccttgcctcggagtcttgaacgcaaactcggaggatcgcctcgctactctgcgccgtcaccgcccacctcctcgttcttcaatctgctccctgtttgccgtgcagtggagaccagttatccgatttcccttgtcgttggtcgcagatttctccaagaaatctggggacgctgataggaggccgtacagaacgcagcggcagcaatggtgatgtcggagtcggacgacgacgacgacgagccccagctcaacgcggtggagagctactacttcgttgactccacgaacgacaacgagcctgtctgcttctccactctgcctttcctgttcggggacactgatgatcttcctgactgcaagaaaaggctggtgctgcgcgggactggtggtgacccgggcgtcaaggtgtacagtgaggtggtggcctggagtctggggctcgaggggaagcaaccccagtttgcggtgctcacagcagaaggcagacgttgggttcgtctcgttaggcccttgaacagctacgaggagatgatcaggactgtgctgatcacagcgcatatgctgcattttctcatgaggaagcctcatgagccagagagaacgctgtggaaccacctttgcaaagttttcaacaagtttgacgttagaccctcagaggacgatttcaggaaccacatctcactgatgaagcagtttgtggcaaaagatcctatcttagcaaaatcagaggggagtctcccccatgagtggggtctgacgaagggaaaaactaaagctcagttcttgcttagctacgttatgcctagagctgtgttatgtaaagttgtaaacattgtccttaagacgattttgcgagtatttgttgaaggaaaatctggaaaaattttcactgaggctggtgcagaccatattgatgttaagcagccattcataactgatgatgaggacatagatgagatgattgtggaagatgccgataatgaatctgatgaagaggaggatggagatttgtttgattcaatatgtgctatttgtgacgacggaggagacatattatgctgtgatggtccatgtatgcgctctttccatgcaaaagaaggaagtggtgaagactcctattgtgatacccttggctacactgaggcagaagttgaggcaatgaaattatttctgtgcaagaactgtgagtataagcaacaccagtgtttcatctgcggagtgttggagccttcaaatggagcagcagctaaggtttttttatgtaacaatgctacatgtggacacttctaccacccgaaatgtgttgcccagcaacttcatcctaataacattgatgaagcctcagaattggagaagaagataacagatgggttttcatttacatgcccaattcactggtgctttcattgcaaaggtttggaggatagaacacaagggcctttgcaatttgctgtttgcagacgctgtccgaagtcatatcacagaaagtgtttaccaagagaaatttcctttgatgaaattgaagagaagggtgtcatcatacgggcttgggaattatcaaaaatgattttgatatactgcctgaaccatgagatcgatagtgaacttgagacacctgtcagagatcatataaagtttccaaggattgaaaaaccacttcaatttgtaaagaagggagctaacttgttgcctaagaagaaaaagaggacttacagtgagtcaattcttgagcaacctcccaaagatactgtgaaaatgaaaagcaaggttcgcatgcaagaaagcgagcaaaacaaacacgacaccagagaagtttctgtgaagagtttcactcaaaacgttgttgacacacctgtaaagaaaaaaggcaagttgaaagagaataaacagttgccttatgtggccaaggatcattttgtaagcagtccaaaatctgtgaaagagcaagaacaagagttggtacctttgcccttatctggaatcaggaagagttcatttcctaaagtggacagtgaaattgaaaagagggtgattagcatactgggaaatgaaatctcttcgttgacaataaaagatgtaacaaggaactgcagtttgccatcaactcatgtatactctggcagaccaactgacaagatgccactaggaaaaattgagcgttctgttcaggctgtagaagctgctttaaaaaagctgaaaaatggaggtagtgtcaatgatgctaaagcagtatgtgaacctgatgttttaagacagcttgcaaggtggcataccaaactcagagtatatatatcaccttttattcatggcacaaggtatagttcttttggtcgacattttacgaaggtggagaaacttgttgagattgttgatagacttcactgattgtagatttctgctgtgggtcaaatgattttagccggcttatgaaagaaaaactcgacaaagttcagaaaaagtgccatttcaagaattatgatcttatccaaccacagcatcacttctgctttgaaaagagggattggatgactgtgcaaccaaatgaactgcctcgtggatcccaactaattatggggcttaatcctccttttggagtaaaagcaagtcttgcgaacaaatttattgacaaagcattgacattcaagcctaagctcattgtactaattgtccctaaagaaacaaaaaggttagataagaagaagataccttatgatttgatttgggaagacagtgagtgtcttgctgggaagtccttctatttgcctggttctgtggatcttaatgataatacagttgaagggtggaatgcatccgcgccacccctctatttgtggagtcatcctcattggacaaagaagcacatgcaagtggctgaagagcatggtcacacttgcatggggaagatagcttcccatgttgaaaagagaaatctgtcagatgatctgcccgtgaggaaacaatctgaggctgcaaacaaatggaactccagatcagggaaagagactacatgcaatgacagaaaggacaatctacttgatgatgttactgctaagaagcaagcaggacctgaagaagaaaaggaaactctagggaagatggaccaccatgtgaaaaaggctactataccagatagccttacagtgaagaaacaaactgaagcttccagcaaagctctctctcattgtggaaatgatagaaagattggcaggtacagcagcaggaaatatgatgactggagaagtaagcggacacctgatcacgaagagagcttcccacctgaaaagcaagtggaagttgcatatgaggagacaaaagttattattccaagcaaaaagattactcataacgaacaaagcggtgcttgccgtgaaaatagaaagaattcttgtgtggaggaaaccaagaacgtggagtacaactatgagcagcagactgcagcagggatgaggttcagagagggagaggattctgacatgagtatctcacccccctcgagaccagttgaaccctttgatatgatagctcaccccattggctctctgacaaaagaaccttttgaccctgtgctcaatagaggggctactcatcaggacagttatgcagtaaccaaagaggaatacctgggtcaatttaagaggaaaaacgaccgtacctttactgacattgatgatagctcaaggatgaggggctccagcatcgaagaagtgaccaggccctatattgctgctccaaccagtgatccctacagcttgcggtatagaggagatggcagcttctacaggcatccgagctcagaggatttaaacactacaggcatcagtgcaggatatggacaaattggtggtgacagttacccacaagcaacaggctcgcaaacacataatactagaatgcatggtggaacaagtgatgataattacctgtcggcgagatactcccttggatattcaggttctcgctttagccaaccagcttcaactgttcccgcttttgggctctcaggtgcaagttcacaacgaggctcagtaatagacaagtattcctatgggctctcgggtcccactggaccacaggattctggtattaacagatatgctccaccggacgacggaacgagcacaagatccaagagctccttggctgaacaacagtacccgttcggacaatctggctcttccggtggcgagtggcctcatatctgatcgctggaacttgttgtcgaagtttttttttcaaggcaaaaactgtgggaagttctccacggtacttcattttcatttttagaggggattacatgttatcaaaatcatgcagcttttgacctgacctgggtgtaaattggagtaaaaccacaagcatctatccatgcggggctggtgttaaaaagcaaagttgtttcttataaaactgtctacagcagtctatccatgatttacccaaaattactgttttgtactgtagactgcattgtttgcataatgaagtttgaatatagatgaggatgggtaagagatagactaaggtagtttcatcatacatataagagttgtaatgacatataagtttgaatatagatgaggatggctatccgaggacatgccctttgcacag

SEQ ID NO: 26171 - DNA, 4681 bp, Zea Mays
ccgaccctttcgccgcgcccgtgcacaaacccgcgccgtcgaagctggccccttgcctcggagtcttgaacgcaaactcggaggatcgcctcgctactctgcgccgtcaccgcccacctcctcgttcttcaatctgctccctgtttgccgtgcagtggagaccagttatccgatttcccttgtcgttggtcgcagatttctccaagaaatctggggacgctgataggaggccgtacagaacgcagcggcagcaatggtgatgtcggagtcggacgacgacgacgacgagccccagctcaacgcggtggagagctactacttcgttgactccacgaacgacaacgagcctgtctgcttctccactctgcctttcctgttcggggacactgatgatcttcctgactgcaagaaaaggctggtgctgcgcgggactggtggtgacccgggcgtcaaggtgtacagtgaggtggtggcctggagtctggggctcgaggggaagcaaccccagtttgcggtgctcacagcagaaggcagacgttgggttcgtctcgttaggcccttgaacagctacgaggagatgatcaggactgtgctgatcacagcgcatatgctgcattttctcatgaggaagcctcatgagccagagagaacgctgtggaaccacctttgcaaagttttcaacaagtttgacgttagaccctcagaggacgatttcaggaaccacatctcactgatgaagcagtttgtggcaaaagatcctatcttagcaaaatcagaggggagtctcccccatgagtggggtctgacgaagggaaaaactaaagctcagttcttgcttagctacgttatgcctagagctgtgttatgtaaagttgtaaacattgtccttaagacattttgcgagtatttgttgaaggaaaatctggaaaaattttcactgaggctggtgcagaccatattgatgttaagcagccattcataactgatgatgaggacatagatgagatgattgtggaagatgccgataatgaatctgatgaagaggaggatggagatttgtttgattcaatatgtgctatttgtgacgacggaggagacatattatgctgtgatggtccatgtatgcgctctttccatgcaaaagaaggaagtggtgaagactcctattgtgatacccttggctacactgaggcagaagttgaggcaatgaaattatttctgtgcaagaactgtgagtataagcaacaccagtgtttcatctgcggagtgttggagccttcaaatggagcagcagctaaggtttttttatgtaacaatgctacatgtggacacttctaccacccgaaatgtgttgcccagcaacttcatcctaataacattgatgaagcctcagaattggagaagaagataacagatgggttttcatttacatgcccaattcactggtgctttcattgcaaaggtttggaggatagaacacaagggcctttgcaatttgctgtttgcagacgctgtccgaagtcatatcacagaaagtgtttaccaagagaaatttcctttgatgaaattgaagagaagggtgtcatcatacgggcttgggaattatcaaaaatgattttgatatactgcctgaaccatgagatcgatagtgaacttgagacacctgtcagagatcatataaagtttccaaggattgaaaaaccacttcaatttgtaaagaagggagctaacttgttgcctaagaagaaaaagaggacttacagtgagtcaattcttgagcaacctcccaaagatactgtgaaaatgaaaagcaaggttcgcatgcaagaaagcgagcaaaacaaacacgacaccagagaagtttctgtgaagagtttcactcaaaacgttgttgacacacctgtaaagaaaaaaggcaagttgaaagagaataaacagttgccttatgtggccaaggatcattttgtaagcagtccaaaatctgtgaaagagcaagaacaagagttggtacctttgcccttatctggaatcaggaagagttcatttcctaaagtggacagtgaaattgaaaagagggtgattagcatactgggaaatgaaatctcttcgttgacaataaaagatgtaacaaggaactgcagtttgccatcaactcatgtatactctggcagaccaactgacaagatgccactaggaaaaattgagcgttctgttcaggctgtagaagctgctttaaaaaagctgaaaaatggaggtagtgtcaatgatgctaaagcagtatgtgaacctgatgttttaagacagcttgcaaggtggcataccaaactcagagtatatatatcaccttttattcatggcacaaggtatagttcttttggtcgacattttacgaaggtggagaaacttgttgagattgttgatagacttcactggtatgtggaatctggtgacatgattgtagatttctgctgtgggtcaaatgattttagccggcttatgaaagaaaaactcgacaaagttcagaaaaagtgccatttcaagaattatgatcttatccaaccacagcatcacttctgctttgaaaagagggattggatgactgtgcaaccaaatgaactgcctcgtggatcccaactaattatggggcttaatcctccttttggagtaaaagcaagtcttgcgaacaaatttattgacaaagcattgacattcaagcctaagctcattgtactaattgtccctaaagaaacaaaaaggttagataagaagaagataccttatgatttgatttgggaagacagtgagtgtcttgctgggaagtccttctatttgcctggttctgtggatcttaatgataatacagttgaagggtggaatgcatccgcgccacccctctatttgtggagtcatcctcattggacaaagaagcacatgcaagtggctgaagagcatggtcacacttgcatggggaagatagcttcccatgttgaaaagagaaatctgtcagatgatctgcccgtgaggaaacaatctgaggctgcaaacaaatggaactccagatcagggaaagagactacatgcaatgacagaaaggacaatctacttgatgatgttactgctaagaagcaagcaggacctgaagaagaaaaggaaactctagggaagatggaccaccatgtgaaaaaggctactataccagatagccttacagtgaagaaacaaactgaagcttccagcaaagctctctctcattgtggaaatgatagaaagattggcaggtacagcagcaggaaatatgatgactggagaagtaagcggacacctgatcacgaagagagcttcccacctgaaaagcaagtggaagttgcatatgaggagacaaaagttattattccaagcaaaaagattactcataacgaacaaagcggtgcttgccgtgaaaatagaaagaattcttgtgtggaggaaaccaagaacgtggagtacaactatgagcagcagactgcagcagggatgaggttcagagagggagaggattctgacatgagtatctcacccccctcgagaccagttgaaccctttgatatgatagctcaccccattggctctctgacaaaagaaccttttgaccctgtgctcaatagaggggctactcatcaggacagttatgcagtaaccaaagaggaatacctgggtcaatttaagaggaaaaacgaccgtacctttactgacattgatgatagctcaaggatgaggggctccagcatcgaagaagtgaccaggccctatattgctgctccaaccagtgatccctacagcttgcggtatagaggagatggcagcttctacaggcatccgagctcagaggatttaaacactacaggcatcagtgcaggatatggacaaattggtggtgacagttacccacaagcaacaggctcgcaaacacataatactagaatgcatggtggaacaagtgatgataattacctgtcggcgagatactcccttggatattcaggttctcgctttagccaaccagcttcaactgttcccgcttttgggctctcaggtgcaagttcacaacgaggctcagtaatagacaagtattcctatgggctctcgggtcccactggaccacaggattctggtattaacagatatgctccaccggacgacggaacgagcacaagatccaagagctccttggctgaacaacagtacccgttcggacaatctggctcttccggtggcgagtggcctcatatctgatcgctggaacttgttgtcgaagtttttttttcaaggcaaaaactgtgggaagttctccacggtacttcattttcatttttagaggggattacatgttatcaaaatcatgcagcttttgacctgacctgggtgtaaattggagtaaaaccacaagcatctatccatgcggggctggtgttaaaaagcaaagttgtttcttataaaactgtctacagcagtctatccatgatttacccaaaattactgttttgtactgtagactgcattgtttgcataatgaagtttgaatatagatgaggatgggtaagagatagactaaggtagtttcatcatacatataagagttgtaatgacatataagtttgaatatagatgaggatggctatccgaggacatgccctttgcacag

SEQ ID NO: 26172 - DNA, 4471 bp, Zea Mays
aaaagtcccatcatcccccgaccctttcgccgcgcccgtgcacaaacccgcgccgtcgaagctggccccttgcctcggagtcttgaacgcaaactcggaggatcgcctcgctactctgcgccgtcaccgcccacctcctcgttcttcaatctgctccctgtttgccgtgcagtggagaccagttatccgatttcccttgtcgttggtcgcagatttctccaagaaatctggggacgctgataggaggccgtacagaacgcagcggcagcaatggtgatgtcggagtcggacgacgacgacgacgagccccagctcaacgcggtggagagctactacttcgttgactccacgaacgacaacgagcctgtctgcttctccactctgcctttcctgttcggggacactgatgatcttcctgactgcaagaaaaggctggtgctgcgcgggactggtggtgacccgggcgtcaaggtgtacagtgaggtggtggcctggagtctggggctcgaggggaagcaaccccagtttgcggtgctcacagcagaaggcagacgttgggttcgtctcgttaggcccttgaacagctacgaggagatgatcaggactgtgctgatcacagcgcatatgctgcattttctcatgaggaagcctcatgagccagagagaacgctgtggaaccacctttgcaaagttttcaacaagtttgacgttagaccctcagaggacgatttcaggaaccacatctcactgatgaagcagtttgtggcaaaagatcctatcttagcaaaatcagagattttgcgagtatttgttgaaggaaaatctggaaaaattttcactgaggctggtgcagaccatattgatgttaagcagccattcataactgatgatgaggacatagatgagatgattgtggaagatgccgataatgaatctgatgaagaggaggatggagatttgtttgattcaatatgtgctatttgtgacgacggaggagacatattatgctgtgatggtccatgtatgcgctctttccatgcaaaagaaggaagtggtgaagactcctattgtgatacccttggctacactgaggcagaagttgaggcaatgaaattatttctgtgcaagaactgtgagtataagcaacaccagtgtttcatctgcggagtgttggagccttcaaatggagcagcagctaaggtttttttatgtaacaatgctacatgtggacacttctaccacccgaaatgtgttgcccagcaacttcatcctaataacattgatgaagcctcagaattggagaagaagataacagatgggttttcatttacatgcccaattcactggtgctttcattgcaaaggtttggaggatagaacacaagggcctttgcaatttgctgtttgcagacgctgtccgaagtcatatcacagaaagtgtttaccaagagaaatttcctttgatgaaattgaagagaagggtgtcatcatacgggcttgggaattatcaaaaatgattttgatatactgcctgaaccatgagatcgatagtgaacttgagacacctgtcagagatcatataaagtttccaaggattgaaaaaccacttcaatttgtaaagaagggagctaacttgttgcctaagaagaaaaagaggacttacagtgagtcaattcttgagcaacctcccaaagatactgtgaaaatgaaaagcaaggttcgcatgcaagaaagcgagcaaaacaaacacgacaccagagaagtttctgtgaagagtttcactcaaaacgttgttgacacacctgtaaagaaaaaaggcaagttgaaagagaataaacagttgccttatgtggccaaggatcattttgtaagcagtccaaaatctgtgaaagagcaagaacaagagttggtacctttgcccttatctggaatcaggaagagttcatttcctaaagtggacagtgaaattgaaaagagggtgattagcatactgggaaatgaaatctcttcgttgacaataaaagatgtaacaaggaactgcagtttgccatcaactcatgtatactctggcagaccaactgacaagatgccactaggaaaaattgagcgttctgttcaggctgtagaagctgctttaaaaaagctgaaaaatggaggtagtgtcaatgatgctaaagcagtatgtgaacctgatgttttaagacagcttgcaaggtggcataccaaactcagagtatatatatcaccttttattcatggcacaaggtatagttcttttggtcgacattttacgaaggtggagaaacttgttgagattgttgatagacttcactggtatgtggaatctggtgacatgcatcacttctgctttgaaaagagggattggatgactgtgcaaccaaatgaactgcctcgtggatcccaactaattatggggcttaatcctccttttggagtaaaagcaagtcttgcgaacaaatttattgacaaagcattgacattcaagcctaagctcattgtactaattgtccctaaagaaacaaaaaggttagataagaagaagataccttatgatttgatttgggaagacagtgagtgtcttgctgggaagtccttctatttgcctggttctgtggatcttaatgataatacagttgaagggtggaatgcatccgcgccacccctctatttgtggagtcatcctcattggacaaagaagcacatgcaagtggctgaagagcatggtcacacttgcatggggaagatagcttcccatgttgaaaagagaaatctgtcagatgatctgcccgtgaggaaacaatctgaggctgcaaacaaatggaactccagatcagggaaagagactacatgcaatgacagaaaggacaatctacttgatgatgttactgctaagaagcaagcaggacctgaagaagaaaaggaaactctagggaagatggaccaccatgtgaaaaaggctactataccagatagccttacagtgaagaaacaaactgaagcttccagcaaagctctctctcattgtggaaatgatagaaagattggcaggtacagcagcaggaaatatgatgactggagaagtaagcggacacctgatcacgaagagagcttcccacctgaaaagcaagtggaagttgcatatgaggagacaaaagttattattccaagcaaaaagattactcataacgaacaaagcggtgcttgccgtgaaaatagaaagaattcttgtgtggaggaaaccaagaacgtggagtacaactatgagcagcagactgcagcagggatgaggttcagagagggagaggattctgacatgagtatctcacccccctcgagaccagttgaaccctttgatatgatagctcaccccattggctctctgacaaaagaaccttttgaccctgtgctcaatagaggggctactcatcaggacagttatgcagtaaccaaagaggaatacctgggtcaatttaagaggaaaaacgaccgtacctttactgacattgatgatagctcaaggatgaggggctccagcatcgaagaagtgaccaggccctatattgctgctccaaccagtgatccctacagcttgcggtatagaggagatggcagcttctacaggcatccgagctcagaggatttaaacactacaggcatcagtgcaggatatggacaaattggtggtgacagttacccacaagcaacaggctcgcaaacacataatactagaatgcatggtggaacaagtgatgataattacctgtcggcgagatactcccttggatattcaggttctcgctttagccaaccagcttcaactgttcccgcttttgggctctcaggtgcaagttcacaacgaggctcagtaatagacaagtattcctatgggctctcgggtcccactggaccacaggattctggtattaacagatatgctccaccggacgacggaacgagcacaagatccaagagctccttggctgaacaacagtacccgttcggacaatctggctcttccggtggcgagtggcctcatatctgatcgctggaacttgttgtcgaagtttttttttcaaggcaaaaactgtgggaagttctccacggtacttcattttcatttttagaggggattacatgttatcaaaatcatgcagcttttgacctgacctgggtgtaaattggagtaaaaccacaagcatctatccatgcggggctggtgttaaaaagcaaagttgtttcttataaaactgtctacagcagtctatccatgatttacccaaaattactgttttgtactgtagactgcattgtttgcataatgaagtttgaatatagatgaggatgggtaagagatagactaaggtagtttcatcatacatataagagttgtaatgacatataagtttgaatatagatgaggatggctatccgaggacatgccctttgcacag

SEQ ID NO: 26173 - DNA, 4582 bp, Zea Mays
aaaagtcccatcatcccccgaccctttcgccgcgcccgtgcacaaacccgcgccgtcgaagctggccccttgcctcggagtcttgaacgcaaactcggaggatcgcctcgctactctgcgccgtcaccgcccacctcctcgttcttcaatctgctccctgtttgccgtgcagtggagaccagttatccgatttcccttgtcgttggtcgcagatttctccaagaaatctggggacgctgataggaggccgtacagaacgcagcggcagcaatggtgatgtcggagtcggacgacgacgacgacgagccccagctcaacgcggtggagagctactacttcgttgactccacgaacgacaacgagcctgtctgcttctccactctgcctttcctgttcggggacactgatgatcttcctgactgcaagaaaaggctggtgctgcgcgggactggtggtgacccgggcgtcaaggtgtacagtgaggtggtggcctggagtctggggctcgaggggaagcaaccccagtttgcggtgctcacagcagaaggcagacgttgggttcgtctcgttaggcccttgaacagctacgaggagatgatcaggactgtgctgatcacagcgcatatgctgcattttctcatgaggaagcctcatgagccagagagaacgctgtggaaccacctttgcaaagttttcaacaagtttgacgttagaccctcagaggacgatttcaggaaccacatctcactgatgaagcagtttgtggcaaaagatcctatcttagcaaaatcagagattttgcgagtatttgttgaaggaaaatctggaaaaattttcactgaggctggtgcagaccatattgatgttaagcagccattcataactgatgatgaggacatagatgagatgattgtggaagatgccgataatgaatctgatgaagaggaggatggagatttgtttgattcaatatgtgctatttgtgacgacggaggagacatattatgctgtgatggtccatgtatgcgctctttccatgcaaaagaaggaagtggtgaagactcctattgtgatacccttggctacactgaggcagaagttgaggcaatgaaattatttctgtgcaagaactgtgagtataagcaacaccagtgtttcatctgcggagtgttggagccttcaaatggagcagcagctaaggtttttttatgtaacaatgctacatgtggacacttctaccacccgaaatgtgttgcccagcaacttcatcctaataacattgatgaagcctcagaattggagaagaagataacagatgggttttcatttacatgcccaattcactggtgctttcattgcaaaggtttggaggatagaacacaagggcctttgcaatttgctgtttgcagacgctgtccgaagtcatatcacagaaagtgtttaccaagagaaatttcctttgatgaaattgaagagaagggtgtcatcatacgggcttgggaattatcaaaaatgattttgatatactgcctgaaccatgagatcgatagtgaacttgagacacctgtcagagatcatataaagtttccaaggattgaaaaaccacttcaatttgtaaagaagggagctaacttgttgcctaagaagaaaaagaggacttacagtgagtcaattcttgagcaacctcccaaagatactgtgaaaatgaaaagcaaggttcgcatgcaagaaagcgagcaaaacaaacacgacaccagagaagtttctgtgaagagtttcactcaaaacgttgttgacacacctgtaaagaaaaaaggcaagttgaaagagaataaacagttgccttatgtggccaaggatcattttgtaagcagtccaaaatctgtgaaagagcaagaacaagagttggtacctttgcccttatctggaatcaggaagagttcatttcctaaagtggacagtgaaattgaaaagagggtgattagcatactgggaaatgaaatctcttcgttgacaataaaagatgtaacaaggaactgcagtttgccatcaactcatgtatactctggcagaccaactgacaagatgccactaggaaaaattgagcgttctgttcaggctgtagaagctgctttaaaaaagctgaaaaatggaggtagtgtcaatgatgctaaagcagtatgtgaacctgatgttttaagacagcttgcaaggtggcataccaaactcagagtatatatatcaccttttattcatggcacaaggtatagttcttttggtcgacattttacgaaggtggagaaacttgttgagattgttgatagacttcactggtatgtggaatctggtgacatgattgtagatttctgctgtgggtcaaatgattttagccggcttatgaaagaaaaactcgacaaagttcagaaaaagtgccatttcaagaattatgatcttatccaaccacagcatcacttctgctttgaaaagagggattggatgactgtgcaaccaaatgaactgcctcgtggatcccaactaattatggggcttaatcctccttttggagtaaaagcaagtcttgcgaacaaatttattgacaaagcattgacattcaagcctaagctcattgtactaattgtccctaaagaaacaaaaaggttagataagaagaagataccttatgatttgatttgggaagacagtgagtgtcttgctgggaagtccttctatttgcctggttctgtggatcttaatgataatacagttgaagggtggaatgcatccgcgccacccctctatttgtggagtcatcctcattggacaaagaagcacatgcaagtggctgaagagcatggtcacacttgcatggggaagatagcttcccatgttgaaaagagaaatctgtcagatgatctgcccgtgaggaaacaatctgaggctgcaaacaaatggaactccagatcagggaaagagactacatgcaatgacagaaaggacaatctacttgatgatgttactgctaagaagcaagcaggacctgaagaagaaaaggaaactctagggaagatggaccaccatgtgaaaaaggctactataccagatagccttacagtgaagaaacaaactgaagcttccagcaaagctctctctcattgtggaaatgatagaaagattggcaggtacagcagcaggaaatatgatgactggagaagtaagcggacacctgatcacgaagagagcttcccacctgaaaagcaagtggaagttgcatatgaggagacaaaagttattattccaagcaaaaagattactcataacgaacaaagcggtgcttgccgtgaaaatagaaagaattcttgtgtggaggaaaccaagaacgtggagtacaactatgagcagcagactgcagcagggatgaggttcagagagggagaggattctgacatgagtatctcacccccctcgagaccagttgaaccctttgatatgatagctcaccccattggctctctgacaaaagaaccttttgaccctgtgctcaatagaggggctactcatcaggacagttatgcagtaaccaaagaggaatacctgggtcaatttaagaggaaaaacgaccgtacctttactgacattgatgatagctcaaggatgaggggctccagcatcgaagaagtgaccaggccctatattgctgctccaaccagtgatccctacagcttgcggtatagaggagatggcagcttctacaggcatccgagctcagaggatttaaacactacaggcatcagtgcaggatatggacaaattggtggtgacagttacccacaagcaacaggctcgcaaacacataatactagaatgcatggtggaacaagtgatgataattacctgtcggcgagatactcccttggatattcaggttctcgctttagccaaccagcttcaactgttcccgcttttgggctctcaggtgcaagttcacaacgaggctcagtaatagacaagtattcctatgggctctcgggtcccactggaccacaggattctggtattaacagatatgctccaccggacgacggaacgagcacaagatccaagagctccttggctgaacaacagtacccgttcggacaatctggctcttccggtggcgagtggcctcatatctgatcgctggaacttgttgtcgaagtttttttttcaaggcaaaaactgtgggaagttctccacggtacttcattttcatttttagaggggattacatgttatcaaaatcatgcagcttttgacctgacctgggtgtaaattggagtaaaaccacaagcatctatccatgcggggctggtgttaaaaagcaaagttgtttcttataaaactgtctacagcagtctatccatgatttacccaaaattactgttttgtactgtagactgcattgtttgcataatgaagtttgaatatagatgaggatgggtaagagatagactaaggtagtttcatcatacatataagagttgtaatgacatataagtttgaatatagatgaggatggctatccgaggacatgccctttgcacag

SEQ ID NO: 26174 - DNA, 4673 bp, Zea Mays
gccaaaacgctaaaccaaaaagtcccatcatcccccgaccctttcgccgcgcccgtgcacaaacccgcgccgtcgaagctggccccttgcctcggagtcttgaacgcaaactcggaggatcgcctcgctactctgcgccgtcaccgcccacctcctcgttcttcaatctgctccctgtttgccgtgcagtggagaccagttatccgatttcccttgtcgttggtcgcagatttctccaagaaatctggggacgctgataggaggccgtacagaacgcagcggcagcaatggtgatgtcggagtcggacgacgacgacgacgagccccagctcaacgcggtggagagctactacttcgttgactccacgaacgacaacgagcctgtctgcttctccactctgcctttcctgttcggggacactgatgatcttcctgactgcaagaaaaggctggtgctgcgcgggactggtggtgacccgggcgtcaaggtgtacagtgaggtggtggcctggagtctggggctcgaggggaagcaaccccagtttgcggtgctcacagcagaaggcagacgttgggttcgtctcgttaggcccttgaacagctacgaggagatgatcaggactgtgctgatcacagcgcatatgctgcattttctcatgaggaagcctcatgagccagagagaacgctgtggaaccacctttgcaaagttttcaacaagtttgacgttagaccctcagaggacgatttcaggaaccacatctcactgatgaagcagtttgtggcaaaagatcctatcttagcaaaatcagaggggagtctcccccatgagtggggtctgacgaagggaaaaactaaagctcagttcttgcttagctacgttatgcctagagctgtgttatgtaaagttgtaaacattgtccttaagacgattttgcgagtatttgttgaaggaaaatctggaaaaattttcactgaggctggtgcagaccatattgatgttaagcagccattcataactgatgatgaggacatagatgagatgattgtggaagatgccgataatgaatctgatgaagaggaggatggagatttgtttgattcaatatgtgctatttgtgacgacggaggagacatattatgctgtgatggtccatgtatgcgctctttccatgcaaaagaaggaagtggtgaagactcctattgtgatacccttggctacactgaggcagaagttgaggcaatgaaattatttctgtgcaagaactgtgagtataagcaacaccagtgtttcatctgcggagtgttggagccttcaaatggagcagcagctaaggtttttttatgtaacaatgctacatgtggacacttctaccacccgaaatgtgttgcccagcaacttcatcctaataacattgatgaagcctcagaattggagaagaagataacagatgggttttcatttacatgcccaattcactggtgctttcattgcaaaggtttggaggatagaacacaagggcctttgcaatttgctgtttgcagacgctgtccgaagtcatatcacagaaagtgtttaccaagagaaatttcctttgatgaaattgaagagaagggtgtcatcatacgggcttgggaattatcaaaaatgattttgatatactgcctgaaccatgagatcgatagtgaacttgagacacctgtcagagatcatataaagtttccaaggattgaaaaaccacttcaatttgtaaagaagggagctaacttgttgcctaagaagaaaaagaggacttacagtgagtcaattcttgagcaacctcccaaagatactgtgaaaatgaaaagcaaggttcgcatgcaagaaagcgagcaaaacaaacacgacaccagagaagtttctgtgaagagtttcactcaaaacgttgttgacacacctgtaaagaaaaaaggcaagttgaaagagaataaacagttgccttatgtggccaaggatcattttgtaagcagtccaaaatctgtgaaagagcaagaacaagagttggtacctttgcccttatctggaatcaggaagagttcatttcctaaagtggacagtgaaattgaaaagagggtgattagcatactgggaaatgaaatctcttcgttgacaataaaagatgtaacaaggaactgcagtttgccatcaactcatgtatactctggcagaccaactgacaagatgccactaggaaaaattgagcgttctgttcaggctgtagaagctgctttaaaaaagctgaaaaatggaggtagtgtcaatgatgctaaagcagtatgtgaacctgatgttttaagacagcttgcaaggtggcataccaaactcagagtatatatatcaccttttattcatggcacaaggtatagttcttttggtcgacattttacgaaggtggagaaacttgttgagattgttgatagacttcactggtatgtggaatctggtgacatgattgtagatttctgctgtgggtcaaatgattttagccggcttatgaaagaaaaactcgacaaagttcagaaaaagtgccatttcaagaattatgatcttatccaaccacagcatcacttctgctttgaaaagagggattggatgactgtgcaaccaaatgaactgcctcgtggatcccaactaattatggggcttaatcctccttttggagtaaaagcaagtcttgcgaacaaatttattgacaaagcattgacattcaagcctaagctcattgtactaattgtccctaaagaaacaaaaaggttagataagaagaagataccttatgatttgatttgggaagacagtgagtgtcttgctgggaagttgaagggtggaatgcatccgcgccacccctctatttgtggagtcatcctcattggacaaagaagcacatgcaagtggctgaagagcatggtcacacttgcatggggaagatagcttcccatgttgaaaagagaaatctgtcagatgatctgcccgtgaggaaacaatctgaggctgcaaacaaatggaactccagatcagggaaagagactacatgcaatgacagaaaggacaatctacttgatgatgttactgctaagaagcaagcaggacctgaagaagaaaaggaaactctagggaagatggaccaccatgtgaaaaaggctactataccagatagccttacagtgaagaaacaaactgaagcttccagcaaagctctctctcattgtggaaatgatagaaagattggcaggtacagcagcaggaaatatgatgactggagaagtaagcggacacctgatcacgaagagagcttcccacctgaaaagcaagtggaagttgcatatgaggagacaaaagttattattccaagcaaaaagattactcataacgaacaaagcggtgcttgccgtgaaaatagaaagaattcttgtgtggaggaaaccaagaacgtggagtacaactatgagcagcagactgcagcagggatgaggttcagagagggagaggattctgacatgagtatctcacccccctcgagaccagttgaaccctttgatatgatagctcaccccattggctctctgacaaaagaaccttttgaccctgtgctcaatagaggggctactcatcaggacagttatgcagtaaccaaagaggaatacctgggtcaatttaagaggaaaaacgaccgtacctttactgacattgatgatagctcaaggatgaggggctccagcatcgaagaagtgaccaggccctatattgctgctccaaccagtgatccctacagcttgcggtatagaggagatggcagcttctacaggcatccgagctcagaggatttaaacactacaggcatcagtgcaggatatggacaaattggtggtgacagttacccacaagcaacaggctcgcaaacacataatactagaatgcatggtggaacaagtgatgataattacctgtcggcgagatactcccttggatattcaggttctcgctttagccaaccagcttcaactgttcccgcttttgggctctcaggtgcaagttcacaacgaggctcagtaatagacaagtattcctatgggctctcgggtcccactggaccacaggattctggtattaacagatatgctccaccggacgacggaacgagcacaagatccaagagctccttggctgaacaacagtacccgttcggacaatctggctcttccggtggcgagtggcctcatatctgatcgctggaacttgttgtcgaagtttttttttcaaggcaaaaactgtgggaagttctccacggtacttcattttcatttttagaggggattacatgttatcaaaatcatgcagcttttgacctgacctgggtgtaaattggagtaaaaccacaagcatctatccatgcggggctggtgttaaaaagcaaagttgtttcttataaaactgtctacagcagtctatccatgatttacccaaaattactgttttgtactgtagactgcattgtttgcataatgaagtttgaatatagatgaggatgggtaagagatagactaaggtagtttcatcatacatataagagttgtaatgacatataagtttgaatatagatgaggatggctatccgaggacatgccctttgcacag

SEQ ID NO: 26175 - DNA, 2588 bp, Zea Mays
ccgaccctttcgccgcgcccgtgcacaaacccgcgccgtcgaagctggccccttgcctcggagtcttgaacgcaaactcggaggatcgcctcgctactctgcgccgtcaccgcccacctcctcgttcttcaatctgctccctgtttgccgtgcagtggagaccagttatccgatttcccttgtcgttggtcgcagatttctccaagaaatctggggacgctgataggaggccgtacagaacgcagcggcagcaatggtgatgtcggagtcggacgacgacgacgacgagccccagctcaacgcggtggagagctactacttcgttgactccacgaacgacaacgagcctgtctgcttctccactctgcctttcctgttcggggacactgatgatcttcctgactgcaagaaaaggctggtgctgcgcgggactggtggtgacccgggcgtcaaggtgtacagtgaggtggtggcctggagtctggggctcgaggggaagcaaccccagtttgcggtgctcacagcagaaggcagacgttgggttcgtctcgttaggcccttgaacagctacgaggagatgatcaggactgtgctgatcacagcgcatatgctgcattttctcatgaggaagcctcatgagccagagagaacgctgtggaaccacctttgcaaagttttcaacaagtttgacgttagaccctcagaggacgatttcaggaaccacatctcactgatgaagcagtttgtggcaaaagatcctatcttagcaaaatcagaggggagtctcccccatgagtggggtctgacgaagggaaaaactaaagctcagttcttgcttagctacgttatgcctagagctgtgttatgtaaagttgtaaacattgtccttaagacgattttgcgagtatttgttgaaggaaaatctggaaaaattttcactgaggctggtgcagaccatattgatgttaagcagccattcataactgatgatgaggacatagatgagatgattgtggaagatgccgataatgaatctgatgaagaggaggatggagatttgtttgattcaatatgtgctatttgtgacgacggaggagacatattatgctgtgatggtccatgtatgcgctctttccatgcaaaagaaggaagtggtgaagactcctattgtgatacccttggctacactgaggcagaagttgaggcaatgaaattatttctgtgcaagaactgtgagtataagcaacaccagtgtttcatctgcggagtgttggagccttcaaatggagcagcagctaaggtttttttatgtaacaatgctacatgtggacacttctaccacccgaaatgtgttgcccagcaacttcatcctaataacattgatgaagcctcagaattggagaagaagataacagatgggttttcatttacatgcccaattcactggtgctttcattgcaaaggtttggaggatagaacacaagggcctttgcaatttgctgtttgcagacgctgtccgaagtcatatcacagaaagtgtttaccaagagaaatttcctttgatgaaattgaagagaagggtgtcatcatacgggcttgggaattatcaaaaatgattttgatatactgcctgaaccatgagatcgatagtgaacttgagacacctgtcagagatcatataaagtttccaaggattgaaaaaccacttcaatttgtaaagaagggagctaacttgttgcctaagaagaaaaagaggacttacagtgagtcaattcttgagcaacctcccaaagatactgtgaaaatgaaaagcaaggttcgcatgcaagaaagcgagcaaaacaaacacgacaccagagaagtttctgtgaagagtttcactcaaaacgttgttgacacacctgtaaagaaaaaaggcaagttgaaagagaataaacagttgccttatgtggccaaggatcattttgtaagcagtccaaaatctgtgaaagagcaagaacaagagttggtacctttgcccttatctggaatcaggaagagttcatttcctaaagtggacagtgaaattgaaaagagggtgattagcatactgggaaatgaaatctcttcgttgacaataaaagatgtaacaaggaactgcagtttgccatcaactcatgtatactctggcagaccaactgacaagatgccactaggaaaaattgagcgttctgttcaggctgtagaagctgctttaaaaaagctgaaaaatggaggtagtgtcaatgatgctaaagcagtatgtgaacctgatgttttaagacagcttgcaaggtggcataccaaactcagagtatatatatcaccttttattcatggcacaaggtatagttcttttggtcgacattttacgaaggtggagaaacttgttgagattgttgatagacttcactggtatgtggaatctggtgacatgattgtagatttctgctgtgggtcaaatgattttagccggcttatgaaagaaaaactcgacaaagttcagaaaaagtgccatttcaagaattatgatcttatccaaccacaggatctccaaaccaaaacggtcc

SEQ ID NO: 26176 - DNA, 2384 bp, Zea Mays
aaaagtcccatcatcccccgaccctttcgccgcgcccgtgcacaaacccgcgccgtcgaagctggccccttgcctcggagtcttgaacgcaaactcggaggatcgcctcgctactctgcgccgtcaccgcccacctcctcgttcttcaatctgctccctgtttgccgtgcagtggagaccagttatccgatttcccttgtcgttggtcgcagatttctccaagaaatctggggacgctgataggaggccgtacagaacgcagcggcagcaatggtgatgtcggagtcggacgacgacgacgacgagccccagctcaacgcggtggagagctactacttcgttgactccacgaacgacaacgagcctgtctgcttctccactctgcctttcctgttcggggacactgatgatcttcctgactgcaagaaaaggctggtgctgcgcgggactggtggtgacccgggcgtcaaggtgtacagtgaggtggtggcctggagtctggggctcgaggggaagcaaccccagtttgcggtgctcacagcagaaggcagacgttgggttcgtctcgttaggcccttgaacagctacgaggagatgatcaggactgtgctgatcacagcgcatatgctgcattttctcatgaggaagcctcatgagccagagagaacgctgtggaaccacctttgcaaagttttcaacaagtttgacgttagaccctcagaggacgatttcaggaaccacatctcactgatgaagcagtttgtggcaaaagatcctatcttagcaaaatcagagattttgcgagtatttgttgaaggaaaatctggaaaaattttcactgaggctggtgcagaccatattgatgttaagcagccattcataactgatgatgaggacatagatgagatgattgtggaagatgccgataatgaatctgatgaagaggaggatggagatttgtttgattcaatatgtgctatttgtgacgacggaggagacatattatgctgtgatggtccatgtatgcgctctttccatgcaaaagaaggaagtggtgaagactcctattgtgatacccttggctacactgaggcagaagttgaggcaatgaaattatttctgtgcaagaactgtgagtataagcaacaccagtgtttcatctgcggagtgttggagccttcaaatggagcagcagctaaggtttttttatgtaacaatgctacatgtggacacttctaccacccgaaatgtgttgcccagcaacttcatcctaataacattgatgaagcctcagaattggagaagaagataacagatgggttttcatttacatgcccaattcactggtgctttcattgcaaaggtttggaggatagaacacaagggcctttgcaatttgctgtttgcagacgctgtccgaagtcatatcacagaaagtgtttaccaagagaaatttcctttgatgaaattgaagagaagggtgtcatcatacgggcttgggaattatcaaaaatgattttgatatactgcctgaaccatgagatcgatagtgaacttgagacacctgtcagagatcatataaagtttccaaggattgaaaaaccacttcaatttgtaaagaagggagctaacttgttgcctaagaagaaaaagaggacttacagtgagtcaattcttgagcaacctcccaaagatactgtgaaaatgaaaagcaaggttcgcatgcaagaaagcgagcaaaacaaacacgacaccagagaagtttctgtgaagagtttcactcaaaacgttgttgacacacctgtaaagaaaaaaggcaagttgaaagagaataaacagttgccttatgtggccaaggatcattttgtaagcagtccaaaatctgtgaaagagcaagaacaagagttggtacctttgcccttatctggaatcaggaagagttcatttcctaaagtggacagtgaaattgaaaagagggtgattagcatactgggaaatgaaatctcttcgttgacaataaaagatgtaacaaggaactgcagtttgccatcaactcatgtatactctggcagaccaactgacaagatgccactaggaaaaattgagcgttctgttcaggctgtagaagctgctttaaaaaagctgaaaaatggaggtagtgtcaatgatgctaaagcagtatgtgaacctgatgttttaagacagcttgcaaggtggcataccaaactcagagtatatatatcaccttttattcatggcacaaggtatagttcttttggtcgacattttacgaaggtggagaaacttgttgagattgttgatagacttcactggtatgtggaatctggtgacatgtgatacgagacttgaaaggaaaggatggc

SEQ ID NO: 26177 - DNA, 345 bp, Zea Mays
ttgttgagaacaaagaacatagtagtaagtctcatcaagtcacatgcaaggttttaaagtcggctagtcgactctagtcgcctaagcaccgataagcaagcagaggagggcgtccagcaagcagaggagggcggcggcgctcacagcagcagcaagcagaggagggcggcgctcagagcagcagcaagcagaggagggcggcgctcagagcagcagcaagcagaggagggcggcgacgctcagagcagcagcaagcagaggagggcggcggcgctcagagcagttagcagcaagcagatgaaggcgacggcgctcaactccagctagggtaaaagactgtacgag

SEQ ID NO: 26178 - DNA, 2725 bp, Zea Mays
ccaaaaagtcccatcatcccccgaccctttcgccgcgcccgtgcacaaacccgcgccgtcgaagctggccccttgcctcggagtcttgaacgcaaactcggaggatcgcctcgctactctgcgccgtcaccgcccacctcctcgttcttcaatctgctccctgtttgccgtgcagtggagaccagttatccgatttcccttgtcgttggtcgcagatttctccaagaaatctggggacgctgataggaggccgtacagaacgcagcggcagcaatggtgatgtcggagtcggacgacgacgacgacgagccccagctcaacgcggtggagagctactacttcgttgactccacgaacgacaacgagcctgtctgcttctccactctgcctttcctgttcggggacactgatgatcttcctgactgcaagaaaaggctggtgctgcgcgggactggtggtgacccgggcgtcaaggtgtacagtgaggtggtggcctggagtctggggctcgaggggaagcaaccccagtttgcggtgctcacagcagaaggcagacgttgggttcgtctcgttaggcccttgaacagctacgaggagatgatcaggactgtgctgatcacagcgcatatgctgcattttctcatgaggaagcctcatgagccagagagaacgctgtggaaccacctttgcaaagttttcaacaagtttgacgttagaccctcagaggacgatttcaggaaccacatctcactgatgaagcagtttgtggcaaaagatcctatcttagcaaaatcagagattttgcgagtatttgttgaaggaaaatctggaaaaattttcactgaggctggtgcagaccatattgatgttaagcagccattcataactgatgatgaggacatagatgagatgattgtggaagatgccgataatgaatctgatgaagaggaggatggagatttgtttgattcaatatgtgctatttgtgacgacggaggagacatattatgctgtgatggtccatgtatgcgctctttccatgcaaaagaaggaagtggtgaagactcctattgtgatacccttggctacactgaggcagaagttgaggcaatgaaattatttctgtgcaagaactgtgagtataagcaacaccagtgtttcatctgcggagtgttggagccttcaaatggagcagcagctaaggtttttttatgtaacaatgctacatgtggacacttctaccacccgaaatgtgttgcccagcaacttcatcctaataacattgatgaagcctcagaattggagaagaagataacagatgggttttcatttacatgcccaattcactggtgctttcattgcaaaggtttggaggatagaacacaagggcctttgcaatttgctgtttgcagacgctgtccgaagtcatatcacagaaagtgtttaccaagagaaatttcctttgatgaaattgaagagaagggtgtcatcatacgggcttgggaattatcaaaaatgattttgatatactgcctgaaccatgagatcgatagtgaacttgagacacctgtcagagatcatataaagtttccaaggattgaaaaaccacttcaatttgtaaagaagggagctaacttgttgcctaagaagaaaaagaggacttacagtgagtcaattcttgagcaacctcccaaagatactgtgaaaatgaaaagcaaggttcgcatgcaagaaagcgagcaaaacaaacacgacaccagagaagtttctgtgaagagtttcactcaaaacgttgttgacacacctgtaaagaaaaaaggcaagttgaaagagaataaacagttgccttatgtggccaaggatcattttgtaagcagtccaaaatctgtgaaagagcaagaacaagagttggtacctttgcccttatctggaatcaggaagagttcatttcctaaagtggacagtgaaattgaaaagagggtgattagcatactgggaaatgaaatctcttcgttgacaataaaagatgtaacaaggaactgcagtttgccatcaactcatgtatactctggcagaccaactgacaagatgccactaggaaaaattgagcgttctgttcaggctgtagaagctgctttaaaaaagctgaaaaatggaggtagtgtcaatgatgctaaagcagtatgtgaacctgatgttttaagacagcttgcaaggtggcataccaaactcagagtatatatatcaccttttattcatggcacaaggtatagttcttttggtcgacattttacgaaggtggagaaacttgttgagtttgttgataagtgctactgtgctatcctcatggaaaatataatttcaagactcgagaataagatatgaatgccgcacgtgttagggtctgtttggataaaagggctaattgctaggtgctaaaaattagctctagtgcatgtgcatccaaacaggagatctaatagctgaactatttttttttggctaagtctttaactagttgttagtcaactaggtagccaaccactgattgactatcagtcattcccttcatataattccatatcattatacttcattaatgtaataatgttcttctttctttgtacagattgttgatagacttcactggtatgtggaatctggtgacatggtatatttttttttctggtataagcagccatcaattgacgtttccctcttttga

SEQ ID NO: 26179 - DNA, 1045 bp, Zea Mays
agcatggagccacaaaaggaatgtgatgcacctgtcgtctactgagccatggatggtacaggtgacctcttcaaggacgcggccttcagatctaagtgtagttgtaggttgtctaagaagagggggctttcgttggaggagaaacgggagcaaatgcttcaaatattttatgagagccaggaattctttctgcttaaggagctagagaaaatgggtcctaaaaagggagtgattagtcagtctgtgaaagatgtggtgcaaagcctggtggatgatgatcttgtcttgaaggataaaattgggacttctgtgtacttttggagtcttccaagttgtgctgggaaccagctgaggaatacttacaacaagctggaatctgacctttcaaactctagaaagcgttacatggaccttgttgaacacagagataacttgaaaagaggccgggaagactctgaagagagggaagctgctttggaggagctgaagactgtagaactacaccataagaaactcaagaggatgctactgatattgctcattcagcagctaacaggtggacagacaacattttcactttgcaacaatggtgttcaaccacattcccagaagcaaaagaacaactggaacatatgtacagggaggttgggatcacagaagattttgagtatttgcagtgatgtccaacagcctattacagcgtcgaaaatgtgccacggaatgttggatcgatcacagatgcaagtttatcatgttggtgctgtgagttatctgcagtaaatagattttgtatatttcacatgcttggcaacaatgaccgatatggccacatgcatgttagggactacttttcctagatgctaccaagtggctagactataccgaaggctcctgctatgcttgaaaactttaccgaaggctcgattttattggatgtagtggctagactatatcatgaaatgtatatttctttgctgatggaaagaacaacaatagcttggcatctggaaataaaaatactgccctaaaaatagctgaaaataat

SEQ ID NO: 26180 - DNA, 1102 bp, Zea Mays
ctggttggctgttcttcgattaaagcaccacttggtgcggccttcacaggaggccagattcgggacgggggatcgacccccagccggccggcttctcccttggagcagtcactctgtctaagaagagggggctttcgttggaggagaaacgggagcaaatgcttcaaatattttatgagagccaggaattctttctgcttaaggagctagagaaaatgggtcctaaaaagggagtgattagtcagtctgtgaaagatgtggtgcaaagcctggtggatgatgatcttgtcttgaaggataaaattgggacttctgtgtacttttggagtcttccaagttgtgctgggaaccagctgaggaatacttacaacaagctggaatctgacctttcaaactctagaaagcgttacatggaccttgttgaacacagagataacttgaaaagaggccgggaagactctgaagagagggaagctgctttggaggagctgaagactgtagaactacaccataagaaactcaaggaggaactggctgcatatgcagatagtgatccagctgcagtagaagcaatgaaggatgctactgatattgctcattcagcagctaacaggtggacagacaacattttcactttgcaacaatggtgttcaaccacattcccagaagcaaaagaacaactggaacatatgtacagggaggttgggatcacagaagattttgagtatttgcagtgatgtccaacagcctattacagcgtcgaaaatgtgccacggaatgttggatcgatcacagatgcaagtttatcatgttggtgctgtgagttatctgcagtaaatagattttgtatatttcacatgcttggcaacaatgaccgatatggccacatgcatgttagggactacttttcctagatgctaccaagtggctagactataccgaaggctcctgctatgcttgaaaactttaccgaaggctcgattttattggatgtagtggctagactatatcatgaaatgtatatttctttgctgatggaaagaacaacaatagcttggcatctggaaataaaaatactgccctaaaaatagctgaaaataat

SEQ ID NO: 26181 - DNA, 958 bp, Zea Mays
ctcctttccgtttgggcgccaaaacagcatccgccgcgcgacgcgtctcgtcagcgccgccagccccgtcagaatgtctaagaagagggggctttcgttggaggagaaacgggagcaaatgcttcaaatattttatgagagccaggaattctttctgcttaaggagctagagaaaatgggtcctaaaaagggagtgattagtcagtctgtgaaagatgtggtgcaaagcctggtggatgatgatcttgtcttgaaggataaaattgggacttctgtgtacttttggagtcttccaagttgtgctgggaaccagctgaggaatacttacaacaagctggaatctgacctttcaaactctagaaagcgttacatggaccttgttgaacacagagataacttgaaaagaggccgggaagactctgaagagagggaagctgctttggaggagctgaagactgtagaactacaccataagaaactcaaggaggaactggctgcatatgcagatagtgatccagctgcagtagaagcaatgaaggatgctactgatattgctcattcagcagctaacaggtggacagacaacattttcactttgcaacaatggtgttcaaccacattcccagaagcaaaagaacaactggaacatatgtacagggaggttgggatcacagaagattttgagtatttgcagtgatgtccaacagcctattacagcgtcgaaaatgtgccacggaatgttggatcgatcacagatgcaagtttatcatatgctaccaagtggctagactataccgaaggctcctgctatgcttgaaaactttaccgaaggctcgattttattggatgtagtggctagactatatcatgaaatgtatatttctttgctgatggaaagaacaacaatagcttggcatctggaaataaaaatactgccctaaaaatagctgaaaataat

SEQ ID NO: 26182 - DNA, 1181 bp, Zea Mays
cgaactcatctcctttccgtttgggcgccaaaacagcatccgccgcgcgacgcgtctcgtcagcgccgccagccccgtcagaatggctctcaagcatggagccacaaaaggaatgtgatgcacctgtcgtctactgagccatggatggtacaggtgacctcttcaaggacgcggccttcagatctaagtgtagttgtaggttgtctaagaagagggggctttcgttggaggagaaacgggagcaaatgcttcaaatattttatgagagccaggaattctttctgcttaaggagctagagaaaatgggtcctaaaaagggagtgattagtcagtctgtgaaagatgtggtgcaaagcctggtggatgatgatcttgtcttgaaggataaaattgggacttctgtgtacttttggagtcttccaagttgtgctgggaaccagctgaggaatacttacaacaagctggaatctgacctttcaaactctagaaagcgttacatggaccttgttgaacacagagataacttgaaaagaggccgggaagactctgaagagagggaagctgctttggaggagctgaagactgtagaactacaccataagaaactcaaggaggaactggctgcatatgcagatagtgatccagctgcagtagaagcaatgaaggatgctactgatattgctcattcagcagctaacagacaacattttcactttgcaacaatggtgttcaaccacattcccagaagcaaaagaacaactggaacatatgtacagggaggttgggatcacagaagattttgagtatttgcagtgatgtccaacagcctattacagcgtcgaaaatgtgccacggaatgttggatcgatcacagatgcaagtttatcatgttggtgctgtgagttatctgcagtaaatagattttgtatatttcacatgcttggcaacaatgaccgatatggccacatgcatgttagggactacttttcctagatgctaccaagtggctagactataccgaaggctcctgctatgcttgaaaactttaccgaaggctcgattttattggatgtagtggctagactatatcatgaaatgtatatttctttgctgatggaaagaacaacaatagcttggcatctggaaataaaaatactgccctaaaaatagctgaaaataat

SEQ ID NO: 26183 - DNA, 984 bp, Zea Mays
ccgaactcatctcctttccgtttgggcgccaaaacagcatccgccgcgcgacgcgtctcgtcagcgccgccagccccgtcagaatgtctaagaagagggggctttcgttggaggagaaacgggagcaaatgcttcaaatattttatgagagccaggaattctttctgcttaaggagctagagaaaatgggtcctaaaaagggagtgattagtcagtctgtgaaagatgtggtgcaaagcctggtggatgatgatcttgtcttgaaggataaaattgggacttctgtgtacttttggagtcttccaagttgtgctgggaaccagctgaggaatacttacaacaagctggaatctgacctttcaaactctagaaagcgttacatggaccttgttgaacacagagataacttgaaaagaggccgggaagactctgaagagagggaagctgctttggaggagctgaagactgtagaactacaccataagaaactcaaggaggaactggctgcatatgcagatagtgatccagctgcagtagaagcaatgaaggatgctactgatattgctcattcagcagctaacaggtggacagacaacattttcactttgcaacaatggtgttcaaccacattcccagaagcaaaagaacaactggaacatatgtacagggaggttgggatcacagaagattttgagtatttgcagtgatgtccaacagcctattacagcgtcgaaaatgtgccacggaatgttggatcgatcacagatgcaagtttatcatggactacttttcctagatgctaccaagtggctagactataccgaaggctcctgctatgcttgaaaactttaccgaaggctcgattttattggatgtagtggctagactatatcatgaaatgtatatttctttgctgatggaaagaacaacaatagcttggcatctggaaataaaaatactgccctaaaaatagctgaaaataat

SEQ ID NO: 26184 - DNA, 1027 bp, Zea Mays
accgctcctcccgtccccgccgcccccgcccgaaccgaactcatctcctttccgtttgggcgccaaaacagcatccgccgcgcgacgcgtctcgtcagcgccgccagccccgtcagaatgtctaagaagagggggctttcgttggaggagaaacgggagcaaatgcttcaaatattttatgagagccaggaattctttctgcttaaggagctagagaaaatgggtcctaaaaagggagtgattagtcagtctgtgaaagatgtggtgcaaagcctggtggatgatgatcttgtcttgaaggataaaattgggacttctgtgtacttttggagtcttccaagttgtgctgggaaccagctgaggaatacttacaacaagctggaatctgacctttcaaactctagaaagcgttacatggaccttgttgaacacagagataacttgaaaagaggccgggaagactctgaagagagggaagctgctttggaggagctgaagactgtagaactacaccataagaaactcaaggaggaactggctgcatatgcagatagtgatccagctgcagtagaagcaatgaaggatgctactgatattgctcattcagcagctaacaggtggacagacaacattttcactttgcaacaatggtgttcaaccacattcccagaagcaaaagaacaactggaacatatgtacagggaggttgggatcacagaagattttgagtatttgcagtgatgtccaacagcctattacagcgtcgaaaatgtgccacggaatgttggatcgatcacagatgcaagtttatcatgttggtgctggactacttttcctagatgctaccaagtggctagactataccgaaggctcctgctatgcttgaaaactttaccgaaggctcgattttattggatgtagtggctagactatatcatgaaatgtatatttctttgctgatggaaagaacaacaatagcttggcatctggaaataaaaatactgccctaaaaatagctgaaaataat

SEQ ID NO: 26185 - DNA, 1059 bp, Zea Mays
tagacaccgctcctcccgtccccgccgcccccgcccgaaccgaactcatctcctttccgtttgggcgccaaaacagcatccgccgcgcgacgcgtctcgtcagcgccgccagccccgtcagaatgtctaagaagagggggctttcgttggaggagaaacgggagcaaatgcttcaaatattttatgagagccaggaattctttctgcttaaggagctagagaaaatgggtcctaaaaagggagtgattagtcagtctgtgaaagatgtggtgcaaagcctggtggatgatgatcttgtcttgaaggataaaattgggacttctgtgtacttttggagtcttccaagttgtgctgggaaccagctgaggaatacttacaacaagctggaatctgacctttcaaactctagaaagcgttacatggaccttgttgaacacagagataacttgaaaagaggccgggaagactctgaagagagggaagctgctttggaggagctgaagactgtagaactacaccataagaaactcaagaggatgctactgatattgctcattcagcagctaacaggtggacagacaacattttcactttgcaacaatggtgttcaaccacattcccagaagcaaaagaacaactggaacatatgtacagggaggttgggatcacagaagattttgagtatttgcagtgatgtccaacagcctattacagcgtcgaaaatgtgccacggaatgttggatcgatcacagatgcaagtttatcatgttggtgctgtgagttatctgcagtaaatagattttgtatatttcacatgcttggcaacaatgaccgatatggccacatgcatgttagggactacttttcctagatgctaccaagtggctagactataccgaaggctcctgctatgcttgaaaactttaccgaaggctcgattttattggatgtagtggctagactatatcatgaaatgtatatttctttgctgatggaaagaacaacaatagcttggcatctggaaataaaaatactgccctaaaaatagctgaaaataat

SEQ ID NO: 26186 - DNA, 1162 bp, Zea Mays
aaaaaagaagattagacaccgctcctcccgtccccgccgcccccgcccgaaccgaactcatctcctttccgtttgggcgccaaaacagcatccgccgcgcgacgcgtctcgtcagcgccgccagccccgtcagaatggctctcaagcatggagccacaaaaggaatgtgatgcacctgtcgtctactgagccatggatggtacaggtgacctcttcaaggacgcggccttcagatctaagtgtagttgtaggttgtctaagaagagggggctttcgttggaggagaaacgggagcaaatgcttcaaatattttatgagagccaggaattctttctgcttaaggagctagagaaaatgggtcctaaaaagggagtgattagtcagtctgtgaaagatgtggtgcaaagcctggtggatgatgatcttgtcttgaaggataaaattgggacttctgtgtacttttggagtcttccaagttgtgctgggaaccagctgaggaatacttacaacaagctggaatctgacctttcaaactctagaaagcgttacatggaccttgttgaacacagagataacttgaaaagaggccgggaagactctgaagagagggaagctgctttggaggagctgaagactgtagaactacaccataagaaactcaaggaggaactggctgcatatgcagatagtgatccagctgcagtagaagcaatgaaggatgctactgatattgctcattcagcagctaacaggtggacagacaacattttcactttgcaacaatggtgttcaaccacattcccagaagcaaaagaacaactggaacatatgtacagggaggttgggatcacagaagattttgagtatttgcagtgatgtccaacagcctattacagcgtcgaaaatgtgccacggaatgttggatcgatcacagatgcaagtttatcatgttggtgctggactacttttcctagatgctaccaagtggctagactataccgaaggctcctgctatgcttgaaaactttaccgaaggctcgattttattggatgtagtggctagactatatcatgaaatgtatatttctttgctgatggaaagaacaacaatagcttggcatctggaaataaaaatactgccctaaaaatagctgaaaataat

SEQ ID NO: 26187 - DNA, 1152 bp, Zea Mays
aaaaaagaagattagacaccgctcctcccgtccccgccgcccccgcccgaaccgaactcatctcctttccgtttgggcgccaaaacagcatccgccgcgcgacgcgtctcgtcagcgccgccagccccgtcagaatgtctaagaagagggggctttcgttggaggagaaacgggagcaaatgcttcaaatattttatgagagccaggaattctttctgcttaaggagctagagaaaatgggtcctaaaaagggagtgattagtcagtctgtgaaagatgtggtgcaaagcctggtggatgatgatcttgtcttgaaggataaaattgggacttctgtgtacttttggagtcttccaagttgtgctgggaaccagctgaggaatacttacaacaagctggaatctgacctttcaaactctagaaagcgttacatggaccttgttgaacacagagataacttgaaaagaggccgggaagactctgaagagagggaagctgctttggaggagctgaagactgtagaactacaccataagaaactcaaggaggaactggctgcatatgcagatagtgatccagctgcagtagaagcaatgagtatgagatggcctctttatacaactcttaggatgctactgatattgctcattcagcagctaacaggtggacagacaacattttcactttgcaacaatggtgttcaaccacattcccagaagcaaaagaacaactggaacatatgtacagggaggttgggatcacagaagattttgagtatttgcagtgatgtccaacagcctattacagcgtcgaaaatgtgccacggaatgttggatcgatcacagatgcaagtttatcatgttggtgctgtgagttatctgcagtaaatagattttgtatatttcacatgcttggcaacaatgaccgatatggccacatgcatgttagggactacttttcctagatgctaccaagtggctagactataccgaaggctcctgctatgcttgaaaactttaccgaaggctcgattttattggatgtagtggctagactatatcatgaaatgtatatttctttgctgatggaaagaacaacaatagcttggcatctggaaataaaaatactgccctaaaaatagctgaaaataat

SEQ ID NO: 26188 - DNA, 1042 bp, Zea Mays
aaaaaagaagattagacaccgctcctcccgtccccgccgcccccgcccgaaccgaactcatctcctttccgtttgggcgccaaaacagcatccgccgcgcgacgcgtctcgtcagcgccgccagccccgtcagaatgcttaaggagctagagaaaatgggtcctaaaaagggagtgattagtcagtctgtgaaagatgtggtgcaaagcctggtggatgatgatcttgtcttgaaggataaaattgggacttctgtgtacttttggagtcttccaagttgtgctgggaaccagctgaggaatacttacaacaagctggaatctgacctttcaaactctagaaagcgttacatggaccttgttgaacacagagataacttgaaaagaggccgggaagactctgaagagagggaagctgctttggaggagctgaagactgtagaactacaccataagaaactcaaggaggaactggctgcatatgcagatagtgatccagctgcagtagaagcaatgaaggatgctactgatattgctcattcagcagctaacaggtggacagacaacattttcactttgcaacaatggtgttcaaccacattcccagaagcaaaagaacaactggaacatatgtacagggaggttgggatcacagaagattttgagtatttgcagtgatgtccaacagcctattacagcgtcgaaaatgtgccacggaatgttggatcgatcacagatgcaagtttatcatgttggtgctgtgagttatctgcagtaaatagattttgtatatttcacatgcttggcaacaatgaccgatatggccacatgcatgttagggactacttttcctagatgctaccaagtggctagactataccgaaggctcctgctatgcttgaaaactttaccgaaggctcgattttattggatgtagtggctagactatatcatgaaatgtatatttctttgctgatggaaagaacaacaatagcttggcatctggaaataaaaatactgccctaaaaatagctgaaaataat

SEQ ID NO: 26189 - DNA, 841 bp, Zea Mays
ctcccgtccccgccgcccccgcccgaaccgaactcatctcctttccgtttgggcgccaaaacagcatccgccgcgcgacgcgtctcgtcagcgccgccagccccgtcagaatgtctaagaagagggggctttcgttggaggagaaacgggagcaaatgcttcaaatattttatgagagccaggaattctttctgcttaaggagctagagaaaatgggtcctaaaaagggagtgattagtcagtctgtgaaagatgtggtgcaaagcctggtggatgatgatcttgtcttgaaggataaaattgggacttctgtgtacttttggagtcttccaagttgtgctgggaaccagctgaggaatacttacaacaagctggaatctgacctttcaaactctagaaagcgttacatggaccttgttgaacacagagataacttgaaaagaggccgggaagactctgaagagagggaagctgctttggaggagctgaagactgtagaactacaccataagaaactcaaggaggaactggctgcatatgcagatagtgatccagctgcagtagaagcaatgaaggatgctactgatattgctcattcagcagctaacaggtggacagacaacattttcactttgcaacaatggtgttcaaccacattcccagaagcaaaagaacaactggaacatatgtacagggagtatgctgcctgacttccagttgattaagtatgtttcattatgcaatgtgatttacccacaagtgtcaaggacattggtgcctctgtgtctatagtatccagatagcgaaagagcctctagtcgagttggttaggaggtctgag

SEQ ID NO: 26190 - DNA, 829 bp, Zea Mays
ctaaaactgcaggcctaaaaaagaagattagacaccgctcctcccgtccccgccgcccccgcccgaaccgaactcatctcctttccgtttgggcgccaaaacagcatccgccgcgcgacgcgtctcgtcagcgccgccagccccgtcagaatgtctaagaagagggggctttcgttggaggagaaacgggagcaaatgcttcaaatattttatgagagccaggaattctttctgcttaaggagctagagaaaatgggtcctaaaaagggagtgattagtcagtctgtgaaagatgtggtgcaaagcctggtggatgatgatcttgtcttgaaggataaaattgggacttctgtgtacttttggagtcttccaagttgtgctgggaaccagctgaggaatacttacaacaagctggaatctgacctttcaaactctagaaagcgttacatggaccttgttgaacacagagataacttgaaaagaggccgggaagactctgaagagagggaagctgctttggaggagctgaagactgtagaactacaccataagaaactcaagaggatgctactgatattgctcattcagcagctaacaggtggacagacaacattttcactttgcaacaatggtgttcaaccacattcccagaagcaaaagaacaactggaacatatgtacagggagtatgctgcctgacttccagttgattaagtatgtttcattatgcaatgtgatttacccacaagtgtcaaggacattggtgcctctgtgtctatagtatccagatagcgaaagagcctctagtcgagttggttaggaggtctgag

SEQ ID NO: 26191 - DNA, 400 bp, Zea Mays
gcaagatggagatcacaaggctgcaccccgtggttcttatgtcgaaggcgcccgtgatgttgccgtgctagaagccatgttggaatctagtgcgaagcaaggagccccagttcaagtgaagagattctaacagatccgaaatgtcacataaaagagactacgtttcttctagggtgatttgtccattggatcatatattttcggtagtaaaatgaacattgttccaaattcatgtacataccgtcgaggttatatattaaatatatatgtgaaaaaatgacatacattagaaccaccattcctacactcgtaaaaatcatgtaccttttcttatacactagatatgttgccctattagatattataaatattagtttttttacgggaaatacgaaagaga

SEQ ID NO: 26192 - DNA, 1948 bp, Zea Mays
ttatatctttcgttagcgttaatggacttcttcatttctttcatttgcattatagtggacagaagtcggagagaactacagatttgagcctgcctttattgagtcaagcaagctgatcaatgatattggggatatgatgcacatccaagttatcatcgaagggtcaatgaacagttcaaatccatatttcaatagcacctggagacggaattttgtgggtggtttcattctggacatgggtgttcacttcattgcaggactacgaatggtaacttcatcatgttatatttcgaagtctccttttttttctcaaaaaacacaggaaatctgggcatcattaagaagaatagagggtgtaagaacccaacagcacttacaccacacacccaaacacaacgcactcacacaacacactctacagcagccttaaaacacagacacaccaagacagctgaaggtcaacccgcacagacccaaaaaactaatcacctgggaggtgagcggacaagaggaatagtcctcaggaccctgccatggcccacaactggcgttcctcaccatccatgactaaagccccaacaacacttggacccgattcataaaaaacacaacgattatgatggttccaaagaatccaagctccaagaataattaaggaattgacacctttccttcaagactatttccagcggccttaatcatcctatctcctattttaaactctaatctgtaaacagtatagtctacagtgcaaacagtgttttgtatggtcatatgcatgatctgctggtcacatcctaattgctccaaagtagcattatctcattcccaccaataagaaaggaattttcattaggttgtgggtcggcctagagactgacctgccttagcaaatgaaatatggatcagattctgagaatatggatcggactctggcctatgctaccagaagcaacattgtttagttaataactctaatcaatttttagatttggcaccccacatccacatagaaagtttagtcctgaaaaactgcttgtgtcatcttaagttgaagtggtcagatttgccaccatgtaactcttttgatagttgtaccctttggcccaagtttcttagcaatgtttctacctactgaattgaagtgtttaagataacaaattcattcactaattcccttgtctgctttgtgaagatgaggatctttctctaacagcttgtaggttcagaaatcacaagcgtatcttctatctcccgtcatgtggatatggctttgccgccaccagataacatatgttccctcttccaactggaaaatggatgcgctggtgtctttgtgtttgccgtcaattcaagatcaccaaagatattatggcgggtcgatggaacaaaaggaacaattcaggtagaacgtggagttgatagtggaaaacatggctaccaggtgttattctctggtgaaaatgggcagtgccagaagacattttacccgttctgtggagtgaatgaagaactgaagacgtttgtccatgacatgttggaagctggcaaagatggagatcacaaggctgcaccccgtggttcttatgtcgaaggcgcccgtgatgttgccgtgctagaagccatgttggaatctagtgcgaagcaaggagccccagttcaagtgaagagattctaacagatccgaaatgtcacataaaagagactacgtttcttctagggtgatttgtccattggatcatatattttcggtagtaaaatgaacattgttccaaattcatgtacataccgtcgaggttatatattaaatatatatgtgaaaaaatgacatacattagaaccaccattcctacactcgtaaaaatcatgtaccttttcttatacactagatatgttgccctattagatattataaatattagtttttttacgggaaatacgaaagaga

SEQ ID NO: 26193 - DNA, 1590 bp, Zea Mays
atccctaggtacggccactacaacagtgcagagcatctgaagcgtccgattgtctttgtctccatagcagcgttggtcttcgaggtgagaagtcagcgaaggcaaatctgaagtctgcttgattgcttgagtcagatctgatccagtctttcggcaccgagaaggcgagaaccgaggaggagaacatggcgggtgacggcaacggccgcgcggagcttccccggatcgcggtgatcggcgccggtatctttgcgcgcacgcagtacatcccaaggctccgcgagatcgcgcacctcgtcgtcctcaagtccatctggagtcgcacccaggaatctgcaaaggcggccgcggagcttgctcgtgacttcgcgcctgatatcgagtgcaaatggggtgatgcggggctggaggagatcatgggagatagttcaatcatgggcgttgctattgttctcgctgggcaagtccaggttgagctttccctaaagatgctcaaggctggaaaacacgttattcaagagaaacctgcttctggatcaacaacagaagcagaaactgcactgtcaatctaccactcatttcaaaacctgttcccgcataaacccatttgggcagtcggagagaactacagatttgagcctgcctttattgagtcaagcaagctgatcaatgatattggggatatgatgcacatccaagttatcatcgaagggtcaatgaacagttcaaatccatatttcaatagcacctggagacggaattttgtgggtggtttcattctggacatgggtgttcacttcattgcaggactacgaatgcttgtaggttcagaaatcacaagcgtatcttctatctcccgtcatgtggatatggctttgccgccaccagataacatatgttccctcttccaactggaaaatggatgcgctggtgtctttgtgtttgccgtcaattcaagatcaccaaagatattatggcgggtcgatggaacaaaaggaacaattcaggtagaacgtggagttgatagtggaaaacatggctaccaggtctgtatgatagcattatgaatcaaatcgattgttacaagtgttattctctggtgaaaatgggcagtgccagaagacattttacccgttctgtggagtgaatgaagaactgaagacgtttgtccatgacatgttggaagctggcaaagatggagatcacaaggctgcaccccgtggttcttatgtcgaaggcgcccgtgatgttgccgtgctagaagccatgttggaatctagtgcgaagcaaggagccccagttcaagtgaagagattctaacagatccgaaatgtcacataaaagagactacgtttcttctagggtgatttgtccattggatcatatattttcggtagtaaaatgaacattgttccaaattcatgtacataccgtcgaggttatatattaaatatatatgtgaaaaaatgacatacattagaaccaccattcctacactcgtaaaaatcatgtaccttttcttatacactagatatgttgccctattagatattataaatattagtttttttacgggaaatacgaaagaga

SEQ ID NO: 26194 - DNA, 1571 bp, Zea Mays
atccctaggtacggccactacaacagtgcagagcatctgaagcgtccgattgtctttgtctccatagcagcgttggtcttcgaggtgagaagtcagcgaaggcaaatctgaagtctgcttgattgcttgagtcagatctgatccagtctttcggcaccgagaaggcgagaaccgaggaggagaacatggcgggtgacggcaacggccgcgcggagcttccccggatcgcggtgatcggcgccggtatctttgcgcgcacgcagtacatcccaaggctccgcgagatcgcgcacctcgtcgtcctcaagtccatctggagtcgcacccaggaatctgcaaaggcggccgcggagcttgctcgtgacttcgcgcctgatatcgagtgcaaatggggtgatgcggggctggaggagatcatgggagatagttcaatcatgggcgttgctattgttctcgctgggcaagtccaggttgagctttccctaaagatgctcaaggctggaaaacacgttattcaagagaaacctgcttctggatcaacaacagaagcagaaactgcactgtcaatctaccactcatttcaaaacctgttcccgcataaacccatttgggcagtcggagagaactacagatttgagcctgcctttattgagtcaagcaagctgatcaatgatattggggatatgatgcacatccaagttatcatcgaagggtcaatgaacagttcaaatccatatttcaatagcacctggagacggaattttgtgggtggtttcattctggacatgggtgttcacttcattgcaggactacgaatgatgaggatctttctctaacagcttgtaggttcagaaatcacaagcgtatcttctatctcccgtcatgtggatatggctttgccgccaccagataacatatgttccctcttccaactggaaaatggatgcgctggtgtctttgtgtttgccgtcaattcaagatcaccaaagatattatggcgggtcgatggaacaaaaggaacaattcaggtagaacgtggagttgatagtggaaaacatggctaccaggtgttattctctggtgaaaatgggcagtgccagaagacattttacccgttctgtggagtgaatgaagaactgaagacgtttgtccatgacatgttggaagctggcaaagatggagatcacaaggctgcaccccgtggttcttatgtcgaaggcgcccgtgatgttgccgtgctagaagccatgttggaatctagtgcgaagcaaggagccccagttcaagtgaagagattctaacagatccgaaatgtcacataaaagagactacgtttcttctagggtgatttgtccattggatcatatattttcggtagtaaaatgaacattgttccaaattcatgtacataccgtcgaggttatatattaaatatatatgtgaaaaaatgacatacattagaaccaccattcctacactcgtaaaaatcatgtaccttttcttatacactagatatgttgccctattagatattataaatattagtttttttacgggaaatacgaaagaga

SEQ ID NO: 26195 - DNA, 1470 bp, Zea Mays
atccctaggtacggccactacaacagtgcagagcatctgaagcgtccgattgtctttgtctccatagcagcgttggtcttcgaggcgagaaccgaggaggagaacatggcgggtgacggcaacggccgcgcggagcttccccggatcgcggtgatcggcgccggtatctttgcgcgcacgcagtacatcccaaggctccgcgagatcgcgcacctcgtcgtcctcaagtccatctggagtcgcacccaggaatctgcaaaggcggccgcggagcttgctcgtgacttcgcgcctgatatcgagtgcaaatggggtgatgcggggctggaggagatcatgggagatagttcaatcatgggcgttgctattgttctcgctgggcaagtccaggttgagctttccctaaagatgctcaaggctggaaaacacgttattcaagagaaacctgcttctggatcaacaacagaagcagaaactgcactgtcaatctaccactcatttcaaaacctgttcccgcataaacccatttgggcagtcggagagaactacagatttgagcctgcctttattgagtcaagcaagctgatcaatgatattggggatatgatgcacatccaagttatcatcgaagggtcaatgaacagttcaaatccatatttcaatagcacctggagacggaattttgtgggtggtttcattctggacatgggtgttcacttcattgcaggactacgaatgcttgtaggttcagaaatcacaagcgtatcttctatctcccgtcatgtggatatggctttgccgccaccagataacatatgttccctcttccaactggaaaatggatgcgctggtgtctttgtgtttgccgtcaattcaagatcaccaaagatattatggcgggtcgatggaacaaaaggaacaattcaggtagaacgtggagttgatagtggaaaacatggctaccaggtgttattctctggtgaaaatgggcagtgccagaagacattttacccgttctgtggagtgaatgaagaactgaagacgtttgtccatgacatgttggaagctggcaaagatggagatcacaaggctgcaccccgtggttcttatgtcgaaggcgcccgtgatgttgccgtgctagaagccatgttggaatctagtgcgaagcaaggagccccagttcaagtgaagagattctaacagatccgaaatgtcacataaaagagactacgtttcttctagggtgatttgtccattggatcatatattttcggtagtaaaatgaacattgttccaaattcatgtacataccgtcgaggttatatattaaatatatatgtgaaaaaatgacatacattagaaccaccattcctacactcgtaaaaatcatgtaccttttcttatacactagatatgttgccctattagatattataaatattagtttttttacgggaaatacgaaagaga

SEQ ID NO: 26196 - DNA, 2521 bp, Zea Mays
atccctaggtacggccactacaacagtgcagagcatctgaagcgtccgattgtctttgtctccatagcagcgttggtcttcgaggtgagaagtcagcgaaggcaaatctgaagtctgcttgattgcttgagtcagatctgatccagtctttcggcaccgagaaggcgagaaccgaggaggagaacatggcgggtgacggcaacggccgcgcggagcttccccggatcgcggtgatcggcgccggtatctttgcgcgcacgcagtacatcccaaggctccgcgagatcgcgcacctcgtcgtcctcaagtccatctggagtcgcacccaggaatctgcaaaggcggccgcggagcttgctcgtgacttcgcgcctgatatcgagtgcaaatggggtgatgcggggctggaggagatcatgggagatagttcaatcatgggcgttgctattgttctcgctgggcaagtccaggtcggtgttcccactccaaaaaggttgagctttccctaaagatgctcaaggctggaaaacacgttattcaagagaaacctgcttctggatcaacaacagaagcagaaactgcactgtcaatctaccactcatttcaaaacctgttcccgcataaacccatttgggcagtcggagagaactacagatttgagcctgcctttattgagtcaagcaagctgatcaatgatattggggatatgatgcacatccaagttatcatcgaagggtcaatgaacagttcaaatccatatttcaatagcacctggagacggaattttgtgggtggtttcattctggacatgggtgttcacttcattgcaggactacgaatggtaacttcatcatgttatatttcgaagtctccttttttttctcaaaaaacacaggaaatctgggcatcattaagaagaatagagggtgtaagaacccaacagcacttacaccacacacccaaacacaacgcactcacacaacacactctacagcagccttaaaacacagacacaccaagacagctgaaggtcaacccgcacagacccaaaaaactaatcacctgggaggtgagcggacaagaggaatagtcctcaggaccctgccatggcccacaactggcgttcctcaccatccatgactaaagccccaacaacacttggacccgattcataaaaaacacaacgattatgatggttccaaagaatccaagctccaagaataattaaggaattgacacctttccttcaagactatttccagcggccttaatcatcctatctcctattttaaactctaatctgtaaacagtatagtctacagtgcaaacagtgttttgtatggtcatatgcatgatctgctggtcacatcctaattgctccaaagtagcattatctcattcccaccaataagaaaggaattttcattaggttgtgggtcggcctagagactgacctgccttagcaaatgaaatatggatcagattctgagaatatggatcggactctggcctatgctaccagaagcaacattgtttagttaataactctaatcaatttttagatttggcaccccacatccacatagaaagtttagtcctgaaaaactgcttgtgtcatcttaagttgaagtggtcagatttgccaccatgtaactcttttgatagttgtaccctttggcccaagtttcttagcaatgtttctacctactgaattgaagtgtttaagataacaaattcattcactaattcccttgtctgctttgtgaagatgaggatctttctctaacagcttgtaggttcagaaatcacaagcgtatcttctatctcccgtcatgtggatatggctttgccgccaccagataacatatgttccctcttccaactggaaaatggatgcgctggtgtctttgtgtttgccgtcaattcaagatcaccaaagatattatggcgggtcgatggaacaaaaggaacaattcaggtagaacgtggagttgatagtggaaaacatggctaccaggtgttattctctggtgaaaatgggcagtgccagaagacattttacccgttctgtggagtgaatgaagaactgaagacgtttgtccatgacatgttggaagctggcaaagatggagatcacaaggctgcaccccgtggttcttatgtcgaaggcgcccgtgatgttgccgtgctagaagccatgttggaatctagtgcgaagcaaggagccccagttcaagtgaagagattctaacagatccgaaatgtcacataaaagagactacgtttcttctagggtgatttgtccattggatcatatattttcggtagtaaaatgaacattgttccaaattcatgtacataccgtcgaggttatatattaaatatatatgtgaaaaaatgacatacattagaaccaccattcctacactcgtaaaaatcatgtaccttttcttatacactagatatgttgccctattagatattataaatattagtttttttacgggaaatacgaaagaga

SEQ ID NO: 26197 - DNA, 1537 bp, Zea Mays
atccctaggtacggccactacaacagtgcagagcatctgaagcgtccgattgtctttgtctccatagcagcgttggtcttcgaggtgagaagtcagcgaaggcaaatctgaagtctgcttgattgcttgagtcagatctgatccagtctttcggcaccgagaaggcgagaaccgaggaggagaacatggcgggtgacggcaacggccgcgcggagcttccccggatcgcggtgatcggcgccggtatctttgcgcgcacgcagtacatcccaaggctccgcgagatcgcgcacctcgtcgtcctcaagtccatctggagtcgcacccaggaatctgcaaaggcggccgcggagcttgctcgtgacttcgcgcctgatatcgagtgcaaatggggtgatgcggggctggaggagatcatgggagatagttcaatcatgggcgttgctattgttctcgctgggcaagtccaggttgagctttccctaaagatgctcaaggctggaaaacacgttattcaagagaaacctgcttctggatcaacaacagaagcagaaactgcactgtcaatctaccactcatttcaaaacctgttcccgcataaacccatttgggcagtcggagagaactacagatttgagcctgcctttattgagtcaagcaagctgatcaatgatattggggatatgatgcacatccaagttatcatcgaagggtcaatgaacagttcaaatccatatttcaatagcacctggagacggaattttgtgggtggtttcattctggacatgggtgttcacttcattgcaggactacgaatgaaatcacaagcgtatcttctatctcccgtcatgtggatatggctttgccgccaccagataacatatgttccctcttccaactggaaaatggatgcgctggtgtctttgtgtttgccgtcaattcaagatcaccaaagatattatggcgggtcgatggaacaaaaggaacaattcaggtagaacgtggagttgatagtggaaaacatggctaccaggtgttattctctggtgaaaatgggcagtgccagaagacattttacccgttctgtggagtgaatgaagaactgaagacgtttgtccatgacatgttggaagctggcaaagatggagatcacaaggctgcaccccgtggttcttatgtcgaaggcgcccgtgatgttgccgtgctagaagccatgttggaatctagtgcgaagcaaggagccccagttcaagtgaagagattctaacagatccgaaatgtcacataaaagagactacgtttcttctagggtgatttgtccattggatcatatattttcggtagtaaaatgaacattgttccaaattcatgtacataccgtcgaggttatatattaaatatatatgtgaaaaaatgacatacattagaaccaccattcctacactcgtaaaaatcatgtaccttttcttatacactagatatgttgccctattagatattataaatattagtttttttacgggaaatacgaaagaga

SEQ ID NO: 26198 - DNA, 2123 bp, Zea Mays
acgcgtccttctctctggaattttcagccgccgcccctcccaaatccccttctccctcacgtctctttctctccatccactgccgttctcatttcttgcacgcagcagcaacacaagccgcaccctcctcctcctgcgcacgccacctccagccctcttccatggatgacgattttctttccggtagcaagaagccatggcgcccctcctccccttgttttccatggaaaccccaaccatctactcctccccatggctgcgcctcccgtaggttttcgtacaatcgcagcagcagcggatatggaatcatctcaatgtcgtgcccacagcatgctcaatgaaatgtcgcagcgagttacacctagatctgtgcagccctggcccgcgatgtcgtgacccttgaaatctgaggtcaattagtgaagaagcgaggcccgtatgtattgctcgtcaagtgttcagtcgaagacttcaatcaaatgtcgtcgtggttcgtgtgatgatcgagtcaaattgcaatatggtacgttaattgatcacagagtatggagaataagagctgaattgatctcaaggtgatactgatggttgcacctaaggatggaagatgctcgccaagtggtcgtcatctaaccacactaatctagtgttatcccaggcaagtcccggtgcatttgccacctccttgctgttttaaattttttatcacttatatgttgcattaggtgataggagtggagtgatgaaacacttgatgcattgccattccttggaatttgattatcttccttgatacctgttttataaagagaactaatgaggcttagccctgcttagaaaaactaaaggttgtttcttttaaaaagaatgatgtggaacactgttatgggcttttgttttagaaatcaaagcaaacttatggtgatgattccccttcggcccgaatgggttcatcattcagtaaagagtacccctgccaggtaccaaaaatggggaaatggtttgaataaatctagaccagacgctgagtaggaaaagtcgcccatttgtgtcgcttaaggaccgcatgattgttggcctgctgatctaggaccctttaactggccacatgcctcatcatgggtaagcttagcctcggtcggaccaataccagaaaggttggcccgcaatgggagtggagagatggtgagagtatcgtgtgtccacctggcaagaggctggatggtggggtactgagctctcggttggcggggacccgttctagtcttgagaaacccatgggtgagttgacatatgcaatggttaagtgctacatatgtcgtgtggttggagatccctagctaggtatcaatcgattcggatcgccgaacttctcggatatgaagactggatcttcgaccttcagcgtagataaaaagtgaaattaaagttgataaaatgaggctagtgtaggacaagtgaatgctctagattaggcaaatctagattcaggaaaagaacttaacttgtgaggtaaaattttggcataaggatccactactagctagtaaagcttttctggaaaaatgagtctttgaaatttgataagctttaccttgattctcgacaaaccagcatacccttgagagtcttttctttagtcaggtaagtcttgttgagtaattgcgtactcagggttttattcccattattggtgcaagttacgagtcgcttcgattgtgattgatgttaagtgtcggtgggctcggccttcttatataagtgtatcccatctttagcttcttttgaggattgtcacttaagctagcatatattttaaaacttataaatatttatacatttcaaagtgtaattcttttaaatcactttcttttgtaatcactccgataattgtataatgtaaacttattgtaacatgtaatcattttacaataaagaatttatttccgctgcaaatgttgatgtgtgatttgtgtttacttaatcctacgatcttgacggtaagtcgtttatccggggtcctcggggcactcggacaaatcctgttaagttgtttggtgcacatgcatagccgtctgaggtctttaagacaaggacaggtgcatgtgggcccaataacttag

SEQ ID NO: 26199 - DNA, 3402 bp, Zea Mays
cgtccgactccgagaaagaaccaccgcagggcaccggccgcccgcaaggaatggcggcagcgatcatcatgcctccacatacagacccaccacggccagccacagcgagtaatcccaccgctcccgcttcccatccccaacgccagcgagacgccccgacaccgtccctacgcgcgctcttcctccgcgccgtggacccttcccgcccctcgtcatggtccacggccgtcgctgatcttctctcctccggtgaccccgtcgccgcgctggccgtgttcgctgccgccctccgagccaaccccgctgcgctccggccggccctgcccccagcccttcgcgccgccgccgccgccacctccctctccgccggtcgccagctccacctcctcgcgctccgctcgggcctcttcccctccgacgcctactgcgcctccgccctcctccacatgtaccaccattgcttccgtcccctcgatgcccgcagggcgttcgacgaaatccccacccccaaccccgtcattgtcactgccatggcgtccggttgcatgcgcaacaacctcgtatataccacgctctctatcttccgctccatggtggcctctggttctgcgggagtggtcgacgaggcggctgcactggtagcgctctctgcatctgctcgtgtccctgaccgtggcattaccggtggtattcatgcacttgtctccaagattggcttggacgggcagacaggggtagcaaacacgataatagacgcgtatgcaaagggcggtggtcatgacctgggggctgcgaggaagctctttgatatgatggatagggatgtggtgtcctggaacacgatgattgcattatacgcgcagaatggactgtcaactgaggcacttgggttgtatagcaagatgctgattgtgggaggtgatgttagatgcaatgcggtaaccttgtcagccgtgctattggcctgtgcgcatgcaggggcaatacaaactggaaagcgcatccataatcaggtggtaagaatggggttggaggacaatgtctatgttgggacttctgtagttgatatgtacagcaagtgtggaaaagttgaaatggcatggaaagcctttcaaaaaattaagggaaagaatatcctttcatggtctgccatgattgctggctatggcatgcatggatatggccaagaagcccttcatgttttcactgacatgaggaagtcagggctaaagccaaactacataacctttatcacagttttagctgcttgcagtcatgctggtcttttgagtgagggccgttattggtacaataccatgaaaactgagttcggaattgaacctggtgtcgagcactatggatgcatggtcgatcttcttggccgtgctggttgtcttgatgaagcttatggccttattaaagaaatgaaagtcaaacctgatgctgctttgtggggagctcttcttagtgcatgccgaatatacaaaaatgttgagttggcaaaaatttgtgcagaaagattgtttgagttggatgcaactaactctgggtattatgttctcttgtcaaatatatatgcagaagctggaatgtggaaagaagtggaaagaatgagagttctggttaaaaccagaggaatagaaaaacctccagggtatagctcggttgagttgaaaggtaaaacccatttgttttatgttggggacaagagtcatccacagtacaaggaaatctatgcttatttggagaaattgcttgagagaattcatgatgcaggctatgtaccaaacacaggttctgttcttcatgatttggatgtagaagagagagaatccatgttgcgcatccatagtgaaaagcttgctgttgcctttgccctgatgaactctgtacaagggtcagtaatccatgtcataaagaatctccgggtctgcactgattgccatgcagcaataaagattattacaaagcttactggacgagagataattattagagacctaaagcgctttcatcatttcaaggatggattatgctcatgtggggattattggtgacattatgcaaagaagcttagtttgtgatgccatattggtagtatcagaatatcacaaattgagataactgtttacgatactctcagtgcatctgtccatccaggacacaaaggccaatacatcagtgagatagtttataacttctcaacctgattaggataaaatggtctgaactacatagctagctgacgcagttggtcaacttatctgtggtgaagatgaaggacattagggctttcaatagtcctgcacaatacacttgcactttcatgtgcaagacatggatttttatcatgatatgaagggcttgtaacataatggctcagccttgaccatttgtagaagcagcacaaagtcattttgaagtacatggatttctgtgaggattaatttttttaatatttacttgtgttgagaaatagaagggagtggtgagagctatctcgttgaaacaccaggttacgtgttagaagcagcatctccgcatttgcagtgggaggcttgcctcggtttatcccttcccctatcctactcatgtaggagcctccgacagcaggtctgtcccctttttacatgtgatgacaaacactgcacacttcagaagcatggatttgtcaatcccagaaatgtgccccagagagtaaaattgggacatgaccatttctcaatatcaactctgttccataacatcatagaagccacaatcccattgcttagcccatgccctgtcaaacatggcatgcctggaggcgacagggatgtgcatacgaggtgaacagatctgctggatggtgcatcacatggaaggcatgatttcgacgtggtctcccatttaccaaatcagctgtcgacagttggcaccactgttcctcctcttcctcaaattatctgaccgaagtaatccaacaaagaagacaaggggtgtagcagaaacggagggagcacagagtacacgcttgtgttcaagtgtttgtctcggtgattttggttaggagaaatgaagaataggggtgaagggtttgattttgtgttgtagggttttattttttttcggttgcaaggatccaagttgaattgttagaatttgtaccgagtttcctatatctgttgaattaataggtgtatgtggtattcaattaggtcccgtttgttcctttcattttgaggaattgaaatcttactaatagaataagctatttttttagaatgtgacattccaccacttttgaaagttatcatataagcatatctcaaattcatgaggtgagatggaaattgattctatagatttacatgttatttttccgatgtataacttataacacacttttctacttgcttcgat

SEQ ID NO: 26200 - DNA, 890 bp, Zea Mays
cggctctatatcatatagcaacgcatctatagccgccgtgccacaaacacacaacagccgccgcgcacgcgatcgacgacgacggccgccggatagttagctcctccttgcagctagcttctctagctaataattctagctagccaccaccacctgctgccttagccagagacaaagagagagccatggccaccgtgaacgccacgacgacgacggcagggtccggcaagcagaccgacgcggcgccgtcccctccggcggcagcggcggcggcgtgcagaagcctctccggcgccgacctggccctcagggtgctcctgttcgcggtgacgctgtcggggctcgtcgtgctggccaccgccaagcagaccgtgcgcgtcccggtcccgcagattccagggctcgtcctctcgctcccggccaagttcaaggactcgccggcgctcatttctatgcagctatcatggcttcggcgaccggctcagcgggtggtgtagcgtggatcgggctcaagggcaactcacacaccaactggaacaagatctgcaacatctacagcaagttctgccgtcacattggcagctctgttttcctgggcctcatcgcctccgtcgtcctcgtcctgcttaccatcctcaacgcccactccttataccgccgcagtcgctagttaaggaattgatgaatatgcatatatgcatgggatgtgatgagtgacatggcatctattttgtattgcagcagtagtctctgcaatcgaacaatgtagagcgtgagctgtatcttgtactgcatgttagaaaattgtgtgcttttaagattagaaattacttcctaaatcaatcattacatgaataaaggataaatcacgtatagcaaataaaagtgtg

SEQ ID NO: 26201 - DNA, 2392 bp, Zea Mays
tagctgcttcaaatttaggtcttcaattgattttactggtctccaaacaatttttccctcatttagctgttggatttgaagaccctcgtgtgtcattacacattggagatggggttgcctttttgaaaaatgctccagaaggtacttatgacgcagtaattgtggactcatctgatccgataggtcctgctcaagagctttttgagaagcctttcttccagttggtggccagagctttgcgtccaggtggagttgtatgcacccaagcagagagcatatggctacatatgcacattattgaagatattgttgtcaattgtcgacaagttttcaaaggctcggttaactatgcttggacaacggtgcctacataccctagcggagttattgggttcatgctttgctccaccgaagggcctgctgttgatttccagcaccctgttttcaacatcgaggaggatgagcatcctatgaaatcaaagggaccccttaagttctacaactcggagatccacacggcatcattctgtttgccttcttttgcaaagagggtaatcgagtcaaaagcgaactagatgtgaagggtatctccaagggctaagtaccttaggcgcgcaacacagaatttgttgtagtgtgaaaagcggatgcctccctcccttttctcccactttgatgaatagtataagcacaggagatgagatgcaacagttatcggagttatcggtctacatggtcctgaccagtcgtatgtctcggctgcctggtgcagctatgaaaacgttttgcaatagcttttttcggcagtcctcacatcatcacggttgtgtttccgcttccatatctgaatggaatacatatacgtatgaaataaaactgtgtaatggctgttgctcggatccttttcaaaacaggttcagctctcgtcgagtgatttgtaggtcctttaggatcttgggtgatatcctcgatcttatttctttagaaggatttgtggttttagcttggttttaataggagggtgctgatgtaggagattgagaaaacacattttatttatttaggttagatctacctttccctcccttttttccatttcctgcacggcagagctcgtgtgacttgctcggtctccgtgtctatcgatttgggggcgattgccgatcccccgccaatgcccccattccactccgacgccaccgccgtttccctctagcatctggtaggatcctccaccttatgtttcccttctagcctctcgagcctcttatggcttctataagatgataagctgctccagtgttctggcttcttctacctgatgtccgataaggttgacacttgactcttgcttttgtaagagtaagacggtaagttgtttgttgtggacttgtgatactcttattacctctggatatagttgtacattctggttcttaaccctaagtttcttgaaggatcggaaagacgacagggggggttgaatgggaccctcaatttttttttctcgaatgagaatacgcgttacacatggcttgattcctaagttcaatctagacaatccactgttgattggctgcacaaaaattgtttctagaaaaaacactctagagcgagcagcagtgccaggcagtggcaatgttgtgcacatggccggtagtatcgggtagcgacagtgctgtgcgtcagagccacaatgccgcgcgatcaaatctgccagaatgaccaaaatctgccagaacaagtgattcgtggagtatgagcacaaaaagatcacaactttcaaaacaaattcaaaaactcgtttcaaatgtttttttgggttttgagatttcgagtccaggaacatgatcaattcttactagagattcgcagtgaccctaggtgttgggggccgaccttgccgaaggtcgttaaaacacttgtacttctgcataatcaaatgtgtttcaggtgtatgatcaaggctggacgaagctggcttttggccgaagtaacgtgtagcgaagcttcgtatgtacacacaagcaacaaaggtatgagtcgaagccaatagtttcgccatggaaaaaagcttcgaacgcaagctaacgaaggagaagaagtccaatgcttgcgcaacaagaaacataaaagacgacaatgtctctacatcatttgtaaaccatgtgtgcaaattttatgggtatgtttgtaattttctacgaagctgttcagctttcctataaatagatgaacaatgtcgtacataagatgatctttgaagggccttagcttcgttttaattagccttcgaagcaccttcgcgcaatcttgtgccaataagtcgaaggtatgtttgtaaacttatacaataagaagaaagttggaataaaatgccaaggtgtttgag

SEQ ID NO: 26202 - DNA, 1677 bp, Zea Mays
tgacagagcatgaggtatcaggtatgtttggtatggtccgttacctcgttttgcagggtggcgggggtgaggcagcagctctgctgagggagtgagagctgacaccatgggcgatcggctttgatttggaacgaaaggaaggagacaaggaggtgaaggcgatgctgtgctggcccaggtcggccggggaaggataagggaagaagattctgacgaacgggaacgccacaaaataatctttgctgggcccgaagacggaccagtacagaattttactgggccgtggttgtgaccacctatacccgacagagcgaggtgtgcactgcgtttggcggggcctgcccgacgcacgccggcacgccgagccggtagcagaggatccccgttcgcctccctacaacctgacccccccacggccccacccccctccgtcggcgacagggcgagcgccgccgcccttgtcttcgccggcgacgagcatcgccagtgcctggaatttgcatctttgcttctgcttctgccggaacctcaatgctctatctgatgggcagaatgggtgtgcaggggactaccgattgcagggcggttgcggagatgggggctgatcagaaaccacgacaagccttgccattcggaactggggcttctacgacaccgtcaaaggcagcctaggcctgcagctcatgtcgtccatgccgcctgaccgggacacaaagccgctgctcccgagaggtgccttgctgcagcagcatggacatcacaatgccgcacaccagctccacgcgcagcaatcacaacatcatcgtgactatgctggcggcacatcctgacccggacacaaagccgcctgtaaagaagaggtggcaggttcggcagcctaagtcactgaagcctaggaagcctaagaaggctgctgttccaccagagaatggggcacttaatgagcatgcgccccgaaggaggggacctaagaagactgtggggatggtgattaatggtattgagttggaccttgctaacataccgacaccagtgtgctcatgcaccggagctccccagcaatgctaccgatggggcgcaggtggctggcagtctgcatgctgcacaacttctatttcaacgtatccactgccaatgagcacaaagcgccggggcgctcgaattgctggaaggaagatgagccaaggtgcattcaaaaaggtgcttgagaagcttgctggcgaagggtacaaccttgctaatccaattgacttgaagacgttttgggctaagcatggcacaaataagtttgtaacgatcaggtaaaatgacatagtatgtttctagctttgtaggttgtagagctgcagttaggcccgatttattgcttttatgtctatgtaagaatctgcagaaatttgtagtagtagtagtagcagcagcatgtagcaatgtttagttttaaatgacttagttgtaatgtctatcttgagcttcagatattgacccgactgaagcctgtttgtatccttcactttgcaaattgtagtttaccctgtacccataattgtctctaatttagggcatggaatttaatgcattaattaaatctgtgtggaagtaagcactacgtggaggttttctctggtggacttttaccagttccttttggacaaggagataaatgtgaagtttctg

SEQ ID NO: 26203 - DNA, 1727 bp, Zea Mays
ggcgtatcttgctccggaagtgccgaagtctatcccgaggtacagaggaggcgtgccggcgctctcgccgcccggattctgctggctgagcatggccttggattggattggatgagcagcagcgcagtgacagagcatgaggtatcaggtatgtttggtatggtccgttacctcgttttgcagggtggcgggggtgaggcagcagctctgctgagggagtgagagctgacaccatgggcgatcggctttgatttggaacgaaaggaaggagacaaggaggtgaaggcgatgctgtgctggcccaggtcggccggggaaggataagggaagaagattctgacgaacgggaacgccacaaaataatctttgctgggcccgaagacggaccagtacagaattttactgggccgtggttgtgaccacctatacccgacagagcgaggtgtgcactgcgtttggcggggcctgcccgacgcacgccggcacgccgagccggtagcagaggatccccgttcgcctccctacaacctgacccccccacggccccacccccctccgtcggcgacagggcgagcgccgccgcccttgtcttcgccggcgacgagcatcgccaggggactaccgattgcagggcggttgcggagatgggggctgatcagaaaccacgacaagccttgccattcggaactggggcttctacgacaccgtcaaaggcagcctaggcctgcagctcatgtcgtccatgccgcctgaccgggacacaaagccgctgctcccgagaggtgccttgctgcagcagcatggacatcacaatgccgcacaccagctccacgcgcagcaatcacaacatcatcgtgactatgctggcggcacatcctgacccggacacaaagccgcctgtaaagaagaggtggcaggttcggcagcctaagtcactgaagcctaggaagcctaagaaggctgctgttccaccagagaatggggcacttaatgagcatgcgccccgaaggaggggacctaagaagactgtggggatggtgattaatggtattgagttggaccttgctaacataccgacaccagtgtgctcatgcaccggagctccccagcaatgctaccgatggggcgcaggtggctggcagtctgcatgctgcacaacttctatttcaacgtatccactgccaatgagcacaaagcgccggggcgctcgaattgctggaaggaagatgagccaaggtgcattcaaaaaggtgcttgagaagcttgctggcgaagggtacaaccttgctaatccaattgacttgaagacgttttgggctaagcatggcacaaataagtttgtaacgatcaggtaaaatgacatagtatgtttctagctttgtaggttgtagagctgcagttaggcccgatttattgcttttatgtctatgtaagaatctgcagaaatttgtagtagtagtagtagcagcagcatgtagcaatgtttagttttaaatgacttagttgtaatgtctatcttgagcttcagatattgacccgactgaagcctgtttgtatccttcactttgcaaattgtagtttaccctgtacccataattgtctctaatttagggcatggaatttaatgcattaattaaatctgtgtggaagtaagcactacgtggaggttttctctggtggacttttaccagttccttttggacaaggagataaatgtgaagtttctg

SEQ ID NO: 26204 - DNA, 2226 bp, Zea Mays
gcagagcgtccgggaagccttcgttgtagaggaacggcccgcccaggagctccccggtctcgctgcgtcggcggatggttaagtagccaatcatcatcacacacgagtacacgacacactcacacgcacgcatttatttgccgggttcgaccgcgtgcgtcggccgagaagttttggttcacctgtcgacgattagcgcggtggcggaggtgccgtctatggagatggaggagacggacgggcggtgggcaggcgggacgtcggcgaggagctggaagagcgccgctcgccacgagctcgcccagcccgcggcgtcgccgacctgagtatataatatatatataccaactccagtcaaaggaataaaggattcgctggctggttcgtcgtcagggacggacacggacggaaagcggatgctcggctcttacaggcgcacagtaagctcgcttcccttccgaatggatggccccgtgctcgtcgatgagggcgtatcttgctccggaagtgccgaagtctatcccgaggtacagaggaggcgtgccggcgctctcgccgcccggattctgctggctgagcatgcattcttacaggccttggattggattggatgagcagcagcgcagtgacagagcatgaggtatcaggtatgtttggtatggtccgttacctcgttttgcagggtggcgggggtgaggcagcagctctgctgagggagtgagagctgacaccatgggcgatcggctttgatttggaacgaaaggaaggagacaaggaggtgaaggcgatgctgtgctggcccaggtcggccggggaaggataagggaagaagattctgacgaacgggaacgccacaaaataatctttgctgggcccgaagacggaccagtacagaattttactgggccgtggttgtgaccacctatacccgacagagcgaggtgtgcactgcgtttggcggggcctgcccgacgcacgccggcacgccgagccggtagcagaggatccccgttcgcctccctacaacctgacccccccacggccccacccccctccgtcggcgacagggcgagcgccgccgcccttgtcttcgccggcgacgagcatcgccaggggactaccgattgcagggcggttgcggagatgggggctgatcagaaaccacgacaagccttgccattcggaactggggcttctacgacaccgtcaaaggcagcctaggcctgcagctcatgtcgtccatgccgcctgaccgggacacaaagccgctgctcccgagaggtgccttgctgcagcagcatggacatcacaatgccgcacaccagctccacgcgcagcaatcacaacatcatcgtgactatgctggcggcacatcctgacccggacacaaagccgcctgtaaagaagaggtggcaggttcggcagcctaagtcactgaagcctaggaagcctaagaaggctgctgttccaccagagaatggggcacttaatgagcatgcgccccgaaggaggggacctaagaagactgtggggatggtgattaatggtattgagttggaccttgctaacataccgacaccagtgtgctcatgcaccggagctccccagcaatgctaccgatggggcgcaggtggctggcagtctgcatgctgcacaacttctatttcaacgtatccactgccaatgagcacaaagcgccggggcgctcgaattgctggaaggaagatgagccaaggtgcattcaaaaaggtgcttgagaagcttgctggcgaagggtacaaccttgctaatccaattgacttgaagacgttttgggctaagcatggcacaaataagtttgtaacgatcaggtaaaatgacatagtatgtttctagctttgtaggttgtagagctgcagttaggcccgatttattgcttttatgtctatgtaagaatctgcagaaatttgtagtagtagtagtagcagcagcatgtagcaatgtttagttttaaatgacttagttgtaatgtctatcttgagcttcagatattgacccgactgaagcctgtttgtatccttcactttgcaaattgtagtttaccctgtacccataattgtctctaatttagggcatggaatttaatgcattaattaaatctgtgtggaagtaagcactacgtggaggttttctctggtggacttttaccagttccttttggacaaggagataaatgtgaagtttctg

SEQ ID NO: 26205 - DNA, 1200 bp, Zea Mays
aaaatcctgcgcgcgtgccaaggcgagaccgaagatgaaacgatacgcaactggcggattgctccaaaaaagactcggaaaccgtcggggactaccgattgcagggcggttgcggagatgggggctgatcagaaaccacgacaagccttgccattcggaactggggcttctacgacaccgtcaaaggcagcctaggcctgcagctcatgtcgtccatgccgcctgaccgggacacaaagccgctgctcccgagaggtgccttgctgcagcagcatggacatcacaatgccgcacaccagctccacgcgcagcaatcacaacatcatcgtgactatgctggcggcacatcctgacccggacacaaagccgcctgtaaagaagaggtggcaggttcggcagcctaagtcactgaagcctaggaagcctaagaaggctgctgttccaccagagaatggggcacttaatgagcatgcgccccgaaggaggggacctaagaagactgtggggatggtgattaatggtattgagttggaccttgctaacataccgacaccagtgtgctcatgcaccggagctccccagcaatgctaccgatggggcgcaggtggctggcagtctgcatgctgcacaacttctatttcaacgtatccactgccaatgagcacaaagcgccggggcgctcgaattgctggaaggaagatgagccaaggtgcattcaaaaaggtgcttgagaagcttgctggcgaagggtacaaccttgctaatccaattgacttgaagacgttttgggctaagcatggcacaaataagtttgtaacgatcaggtaaaatgacatagtatgtttctagctttgtaggttgtagagctgcagttaggcccgatttattgcttttatgtctatgtaagaatctgcagaaatttgtagtagtagtagtagcagcagcatgtagcaatgtttagttttaaatgacttagttgtaatgtctatcttgagcttcagatattgacccgactgaagcctgtttgtatccttcactttgcaaattgtagtttaccctgtacccataattgtctctaatttagggcatggaatttaatgcattaattaaatctgtgtggaagtaagcactacgtggaggttttctctggtggacttttaccagttccttttggacaaggagataaatgtgaagtttctg

SEQ ID NO: 26206 - DNA, 1036 bp, Zea Mays
catcttgaaaaatacaaaaccattaagcacatgattgggtgagagaaggaggaaaggcatctgaaatacccttggatatatcagtattacataatatgcgtcagtttgtgaaatacagtcgtttcaagcaatttgctttaagggcattagcatctacattaaactcagaagagatgtctgatcttcgtgatcaattcaatgccattgatgttgacaaaaatggaacgattagtcttgaggaactgaagcaggctcttgcaaaggatgttccatggagattaaagggtccacgtgttttagagatcattgaagcgattgacagtaatacagatgggctagttgattttgaggagtttgttgctgcaacactacacgtgcatcagctggtggaacatgatactgagaagtggaaatcattgtctcaagctgcatttgataaatttgatgttgacagagatggctacatcacacctgatgaacttagaatgcatacaggaatgaagggttctattgatcccctcctggaggaggctgacattgacaaagatggcaagataagcctagatgaatttcgccggctcttgaagactgcaagcatgagcgcacgcaatgtacaaactcctaggggtgttcgcaagtcatagttttctgttttttgtagttcacataactgaactagagagcagcagcacatgtgattggagaaaggcttttccatgtaaattagacaatcaataatacacatgaatggaggtaatccgtagttgttccttgaaaacgagcactgtattcttgctattgcaatactatgtttggtttgttcccagcaagttctgcagttgagctttccatgctcgaaatcgaatgttgtaaaaatgttgcactgctagttcagtttagattaggtttgagtcagttagagataagatgggactatgtagttcagaattaggtttgagtcaactaatgataggttatgccatttgggattgtatctacaaggtcctctattagattgctctggagtaaagttgtg

SEQ ID NO: 26207 - DNA, 1753 bp, Zea Mays
acagctcttctttggccttaagcagttgtgacataacggtattaggaacatatttggttttctgcacttttgtctaaatgaagatggtccttcctgttgctgttgaagacgtaaagagagaagttaaaatcttaaaggcattacaagggcacgaaaatgttgtacacttttacaatgcattcgaagatgacaactatgtttatatagtcatggaattatgtgagggtggcgagctacttgatcggatattagccaagaaagatagtcgttacagcgagaaagatgctgcagtagttgtccgacagatgctcaaggttgcagctgagtgccacctgcatggtttggttcatcgggacatgaaacctgagaacttcctattcaaatcaaaaaaggaggactcgccccttaaggctacagattttggtctttcagacttcataaaaccagggaggcaattccgtgacattgttggaagtgcctactacgtagcaccagaagtactcaaacgcaggtcagggccagaatccgatgtttggagtataggtgttataacctatattttgctgtgtggaagacgaccattctgggacaaaacagaagatgggatatttaaagaggtcttaaaaaagaagccagatttccgccgcaagccttggtcaaacattacttcgagtgcaaaagattttgtacaaaaattactagttaaggatccccgtgcaagactaactgctgcacaggcattatcacatgattgggtgagagaaggaggaaaggcatctgaaatacccttggatatatcagtattacataatatgcgtcagtttgtgaaatacagtcgtttcaagcaatttgctttaagggcattagcatctacattaaactcagaagagatgtctgatcttcgtgatcaattcaatgccattgatgttgacaaaaatggaacgattagtcttgaggaactgaagcaggctcttgcaaaggatgttccatggagattaaagggtccacgtgttttagagatcattgaagcgattgacagtaatacagatgggctagttgattttgaggagtttgttgctgcaacactacacgtgcatcagctggtggaacatgatactgagaagtggaaatcattgtctcaagctgcatttgataaatttgatgttgacagagatggctacatcacacctgatgaacttagaatgcatacaggaatgaagggttctattgatcccctcctggaggaggctgacattgacaaagatggcaagataagcctagatgaatttcgccggctcttgaagactgcaagcatgagcgcacgcaatgtacaaactcctaggggtgttcgcaagtcatagttttctgttttttgtagttcacataactgaactagagagcagcagcacatgtgattggagaaaggcttttccatgtaaattagacaatcaataatacacatgaatggaggtaatccgtagttgttccttgaaaacgagcactgtattcttgctattgcaatactatgtttggtttgttcccagcaagttctgcagttgagctttccatgctcgaaatcgaatgttgtaaaaatgttgcactgctagttcagtttagattaggtttgagtcagttagagataagatgggactatgtagttcagaattaggtttgagtcaactaatgataggttatgccatttgggattgtatctacaaggtcctctattagattgctctggagtaaagttgtg

SEQ ID NO: 26208 - DNA, 2196 bp, Zea Mays
gcgggccccacctctccagtccccacaacgtcatcttgacgggcagccaaggtgtcgcggcgggccaagtcgcagacgcggagccaccgccattttttttactcccgaaaccaggcaggagggaggaggcgacgacatcgccatcacaccagatcactgaagaagagagaggcgcgtcgagtctccccaaagaacgagctagtacaaagtctcctcttcctttgactccgaatcccctagaccattgatggttgcgggggcaccggaaggagccactgacgatgggcctctgctcctcctccaccgccgcccgggccgcctccgaccccggcgccgcagccgcgggtgatgccgccgcggcaaagaaggggcgcgggatcgtcgcgtgcgggaagcggaccgacttcggatacgacaaggatttcgaggtgcgctactcgcttgggaagcttttgggccacggccagttcggctacacctttgccgccgtcgatcgcgcctccaccgagcgcgtcgccgtcaagcgcatcgacaagaataagatggtccttcctgttgctgttgaagacgtaaagagagaagttaaaatcttaaaggcattacaagggcacgaaaatgttgtacacttttacaatgcattcgaagatgacaactatgtttatatagtcatggaattatgtgagggtggcgagctacttgatcggatattagccaagaaagatagtcgttacagcgagaaagatgctgcagtagttgtccgacagatgctcaaggttgcagctgagtgccacctgcatggtttggttcatcgggacatgaaacctgagaacttcctattcaaatcaaaaaaggaggactcgccccttaaggctacagattttggtctttcagacttcataaaaccagggaggcaattccgtgacattgttggaagtgcctactacgtagcaccagaagtactcaaacgcaggtcagggccagaatccgatgtttggagtataggtgttataacctatattttgctgtgtggaagacgaccattctgggacaaaacagaagatgggatatttaaagaggtcttaaaaaagaagccagatttccgccgcaagccttggtcaaacattacttcgagtgcaaaagattttgtacaaaaattactagttaaggatccccgtgcaagactaactgctgcacaggcattatcacatgattgggtgagagaaggaggaaaggcatctgaaatacccttggatatatcagtattacataatatgcgtcagtttgtgaaatacagtcgtttcaagcaatttgctttaagggcattagcatctacattaaactcagaagagatgtctgatcttcgtgatcaattcaatgccattgatgttgacaaaaatggaacgattagtcttgaggaactgaagcaggctcttgcaaaggatgttccatggagattaaagggtccacgtgttttagagatcattgaagcgatgggctagttgattttgaggagtttgttgctgcaacactacacgtgcatcagctggtggaacatgatactgagaagtggaaatcattgtctcaagctgcatttgataaatttgatgttgacagagatggctacatcacacctgatgaacttagaatgcatacaggaatgaagggttctattgatcccctcctggaggaggctgacattgacaaagatggcaagataagcctagatgaatttcgccggctcttgaagactgcaagcatgagcgcacgcaatgtacaaactcctaggggtgttcgcaagtcatagttttctgttttttgtagttcacataactgaactagagagcagcagcacatgtgattggagaaaggcttttccatgtaaattagacaatcaataatacacatgaatggaggtaatccgtagttgttccttgaaaacgagcactgtattcttgctattgcaatactatgtttggtttgttcccagcaagttctgcagttgagctttccatgctcgaaatcgaatgttgtaaaaatgttgcactgctagttcagtttagattaggtttgagtcagttagagataagatgggactatgtagttcagaattaggtttgagtcaactaatgataggttatgccatttgggattgtatctacaaggtcctctattagattgctctggagtaaagttgtg

SEQ ID NO: 26209 - DNA, 1501 bp, Zea Mays
actgcacctgctggctgctgttgccgtgccgtgccgcgcctgcgttgcgtaccatcgcgccgcggcaggcacctcaacccctggcgatggccatgcggtcccggcctcgccgctccgccggccacctataccacctccgcctcccccggctcctcttcctcctcccgttcgctctcctcctcatcctcctcgcgcgcctccccgcgctcctccgccgcgccaacgcacacggccgccagtgcatgccagccgccaccgaccgccccatccccttccctcaccccgtcccggacccccgcctcagccttgccatagtcaccctcgccgacgaggacgccggcgggccgggcgcgcgccggtccttccgcggcgtgctggcggcatccgcgcggaacaaacgcgcctacgcggcagcgcacgggtatagcctcgtcgcgctccccgcctctgccgtcgaccccagccgcccgcccagctggagcaaggtcctcgcgctccgcgcccacctccgccaccaccactggctcttctggaacgacgcggatacactggttactaacccggaaatcccgctggagagaattttattctcagtgatcggacataataattttgttgagtcacctgatcttgttctgacagaggatttcggtggtgtgaatgctggtatgggagactaacactgttaacacagagtatttgtgtcttttgtttatcaaaattgctttgttaccaacttgttgggggcactgctttttattcatgtccaatcccaagaggcgtctctgtaatcccaaactgtcaactcatcttacgtcaatataatggagtttgaaactacatttatttatctgagtgttctgcacctacccatgcatgctcagaataatctgatgttcagaaataaacatgtcgtatggccatctctgttattcggtaccatgatttgaaatcctttttttctattcgttcatcattcactatgatactgtaaaatatccatgccacttctcatgcaggagttttcttcataaggaggtcaaaatggagtgagaagtttttggatacatggtggaaccagacatcatttatacagtttggttctacgagaagtggagataatgcagcactcaagcatctcatagatcacttatcagctgaagaaatgcaagagcatgttcggattgtaaaaatgcagtgcctcttcaattcctacccgtggatcctcacattgaaatcggtgcaccgcctgatcttccacctgcccactacgtggaaaggttccactttctctcgttcactctactagtctacattgcatatgtaatgagggtttacatttgaatgttatggctcattgcattgatcttgacttcttgaggggaacaacttcctaggagctttccagatttatctgctttggaaaattggttttttatatatcacatgcaaattgtttgtcaaccatggtgaaggatggtatcacattaaactaaatcag

SEQ ID NO: 26210 - DNA, 1115 bp, Zea Mays
actgcacctgctggctgctgttgccgtgccgtgccgcgcctgcgttgcgtaccatcgcgccgcggcaggcacctcaacccctggcgatggccatgcggtcccggcctcgccgctccgccggccacctataccacctccgcctcccccggctcctcttcctcctcccgttcgctctcctcctcatcctcctcgcgcgcctccccgcgctcctccgccgcgccaacgcacacggccgccagtgcatgccagccgccaccgaccgccccatccccttccctcaccccgtcccggacccccgcctcagccttgccatagtcaccctcgccgacgaggacgccggcgggccgggcgcgcgccggtccttccgcggcgtgctggcggcatccgcgcggaacaaacgcgcctacgcggcagcgcacgggtatagcctcgtcgcgctccccgcctctgccgtcgaccccagccgcccgcccagctggagcaaggtcctcgcgctccgcgcccacctccgccaccaccactggctcttctggaacgacgcggagagaattttattctcagtgatcggacataataattttgttgagtcacctgatcttgttctgacagaggatttcggtggtgtgaatgctggagttttcttcataaggaggtcaaaatggagtgagaagtttttggatacatggtggaaccagacatcatttatacagtttggttctacgagaagtggagataatgcagcactcaagcatctcatagatcacttatcagctgaagaaatgcaagagcatgttcggattgtaaaaatgcagtgcctcttcaattcctacccgtggatcctcacattgaaatcggtgcaccgcctgatcttccacctgcccactacgtggaaaggttccactttctctcgttcactctactagtctacattgcatatgtaatgagggtttacatttgaatgttatggctcattgcattgatcttgacttcttgaggggaacaacttcctaggagctttccagatttatctgctttggaaaattggttttttatatatcacatgcaaattgtttgtcaaccatggtgaaggatggtatcacattaaactaaatcag

SEQ ID NO: 26211 - DNA, 1444 bp, Zea Mays
tactcattcacctgcctcttcatctcagcctcacgccacgcacgcaatggctggcgttcgtctcgtcggcgtgcgtccgtcccctggccgtctggagaggtgggtggggagtctaccggacgcgggtagccggggcggtcgccccaccttgccgatacgaggtgtccgctcctatttcattcggtccattccgcctctcggaagagttgagagaggagtaaggaaggcgaggacctcgcgccccgcgatgggcggcgacctgtacgccctcgacttcgacggcgtcttgtgcgacagctgcggggagagctccctctcagccatcaaggctgcgaaggtgaggtggccgtcgctgtttgagcaggttgacgccgccatggaggagtggatagtggagcagatgtacacccttcgtccagtggtggaaacaggatatgaaaacttattgcttgtaaggttgcttgttgagatccagatacactctgttcgaaaatcatcagttgcagatgggcttagcatccaagaaatattggagaactggtcaaaactgaagcccactctcatggatgagtggcaagaagatagggaatctcttgtagatctctttggccgtgtaagagatgactggattgaaaatgatttttcgggctggataggtgctaacaggttttatcctggaacagctgatgcattgaagctttcaagctccgaagcatacatagtcacaacaaaacagagtagatttgctgaagcgctactcaaagaattggctggaatagactttccctctgaaaggatatatggccttggcactggtccgaaggttaaagttctccagcagctgcagcaaatgctgcagcaccaaggcctaaaacttcatttcatcgaggaccgactagcgactctgaagaatgtgatcaaagaaccagcactggacaattggaacctctacctggtgaaatggggatacaacacacagaaagagagggaagaaacagaggctataccaaggatccaactcattgatctaccagatttcagtaggcagctcaaataactaccaatggcgtcgacttgtgaatcttggaaactttgtttttgtttggtatacgtaactaatgaacagcagaaatacttgatttttcgattggatatcgttgttcacatatccgtgtactgattttttttccaagcattctcggtaaactgagacgtcatgccgtgagcccgcgcacgggcttcacagctcataacgagaatcgttgcgggaaaagcacttacctcctcaactacaactagaaaatatgatgtctcgactgtgtttggtttaagaaacgagattgatggcgatcgaagtgctgttatcactcgaaaagaatgtggatggtccagtctgggacgtgtatatgttgtgagtcagctcgtagagagcacttgatccttg

SEQ ID NO: 26212 - DNA, 1117 bp, Zea Mays
tcattcacctgcctcttcatctcagcctcacgccacgcacgcaatggctggcgttcgtctcgtcggcgtgcgtccgtcccctggccgtctggagaggtgggtggggagtctaccggacgcgggtagccggggcggtcgccccaccttgccgatacgaggtgtccgctcctatttcattcggtccattccgcctctcggaagagttgagagaggagtaaggaaggcgaggacctcgcgccccgcgatgggcggcgacctgtacgccctcgacttcgacggcgtcttgtgcgacagctgcggggagagctccctctcagccatcaaggctgcgaaggtgaggtggccgtcgctgtttgagcaggttgacgccgccatggaggagtggatagtggagcagatgtacacccttcgtccagtggtggaaacaggatatgaaaacttattgcttgtaaggttgcttgttgagatccagatacactctgttcgaaaatcatcaagtagatttgctgaagcgctactcaaagaattggctggaatagactttccctctgaaaggatatatggccttggcactggtccgaaggttaaagttctccagcagctgcagcaaatgctgcagcaccaaggcctaaaacttcatttcatcgaggaccgactagcgactctgaagaatgtgatcaaagaaccagcactggacaattggaacctctacctggtgaaatggggatacaacacacagaaagagagggaagaaacagaggctataccaaggatccaactcattgatctaccagatttcagtaggcagctcaaataactaccaatggcgtcgacttgtgaatcttggaaactttgtttttgtttggtatacgtaactaatgaacagcagaaatacttgatttttcgattggatatcgttgttcacatatccgtgtactgattttttttccaagcattctcggtaaactgagacgtcatgccgtgagcccgcgcacgggcttcacagctcataacgagaatcgttgcgggaaaagcacttacctcctcaactacaactagaaaatatgatgtctcgactgtgtttggtttaagaaacgaggtattacattatttactt

SEQ ID NO: 26213 - DNA, 1368 bp, Zea Mays
tcattcacctgcctcttcatctcagcctcacgccacgcacgcaatggctggcgttcgtctcgtcggcgtgcgtccgtcccctggccgtctggagaggtgggtggggagtctaccggacgcgggtagccggggcggtcgccccaccttgccgatacgaggtgtccgctcctatttcattcggtccattccgcctctcggaagagttgagagaggagtaaggaaggcgaggacctcgcgccccgcgatgggcggcgacctgtacgccctcgacttcgacggcgtcttgtgcgacagctgcggggagagctccctctcagccatcaaggctgcgaaggtgaggtggccgtcgctgtttgagcaggttgacgccgccatggaggagtggatagtggagcagatgtacacccttcgtccagtggtggaaacaggatatgaaaacttattgcttgtaaggttgcttgttgagatccagatacactctgttcgaaaatcatcagtaatatttgcaaggttgcagatgggcttagcatccaagaaatattggagaactggtcaaaactgaagcccactctcatggatgagtggcaagaagatagggaatctcttgtagatctctttggccgtgtaagagatgactggattgaaaatgatttttcgggctggataggtgctaacaggttttatcctggaacagctgatgcattgaagctttcaagctccgaagcatacatagtcacaacaaaacagagtagatttgctgaagcgctactcaaagaattggctggaatagactttccctctgaaaggatatatggccttggcactggtccgaaggttaaagttctccagcagctgcagcaaatgctgcagcaccaaggcctaaaacttcatttcatcgaggaccgactagcgactctgaagaatgtgatcaaagaaccagcactggacaattggaacctctacctggtgaaatggggatacaacacacagaaagagagggaagaaacagaggctataccaaggatccaactcattgatctaccagatttcagtaggcagctcaaataactaccaatggcgtcgacttgtgaatcttggaaactttgtttttgtttggtatacgtaactaatgaacagcagaaatacttgatttttcgattggatatcgttgttcacatatccgtgtactgattttttttccaagcattctcggtaaactgagacgtcatgccgtgagcccgcgcacgggcttcacagctcataacgagaatcgttgcgggaaaagcacttacctcctcaactacaactagaaaatatgatgtctcgactgtgtttggtttaagaaacgaggtattacattatttactt

SEQ ID NO: 26214 - DNA, 1301 bp, Zea Mays
tcattcacctgcctcttcatctcagcctcacgccacgcacgcaatggctggcgttcgtctcgtcggcgtgcgtccgtcccctggccgtctggagaggtgggtggggagtctaccggacgcgggtagccggggcggtcgccccaccttgccgatacgaggtgtccgctcctatttcattcggtccattccgcctctcggaagagttgagagaggagtaaggaaggcgaggacctcgcgccccgcgatgggcggcgacctgtacgccctcgacttcgacggcgtcttgtgcgacagctgcggggagagctccctctcagccatcaaggctgcgaaggtgaggtggccgtcgctgtttgagcaggttgacgccgccatggaggagtggatagtggagcagatgtacacccttcgtccagtggtggaaacaggatatgaaaacttattgcttgtaaggttgcttgttgagatccagatacactctgttcgaaaatcatcagttgcagatgggcttagcatccaagaaatattggagaactggtcaaaactgaagcccactctcatggatgagtggcaagaagatagggaatctcttgtagatctctttggccgtgttttatcctggaacagctgatgcattgaagctttcaagctccgaagcatacatagtcacaacaaaacagagtagatttgctgaagcgctactcaaagaattggctggaatagactttccctctgaaaggatatatggccttggcactggtccgaaggttaaagttctccagcagctgcagcaaatgctgcagcaccaaggcctaaaacttcatttcatcgaggaccgactagcgactctgaagaatgtgatcaaagaaccagcactggacaattggaacctctacctggtgaaatggggatacaacacacagaaagagagggaagaaacagaggctataccaaggatccaactcattgatctaccagatttcagtaggcagctcaaataactaccaatggcgtcgacttgtgaatcttggaaactttgtttttgtttggtatacgtaactaatgaacagcagaaatacttgatttttcgattggatatcgttgttcacatatccgtgtactgattttttttccaagcattctcggtaaactgagacgtcatgccgtgagcccgcgcacgggcttcacagctcataacgagaatcgttgcgggaaaagcacttacctcctcaactacaactagaaaatatgatgtctcgactgtgtttggtttaagaaacgaggtattacattatttactt

SEQ ID NO: 26215 - DNA, 2372 bp, Zea Mays
cgatttgatccgcgttggtcttaggacttggtagtgatgttgtcgcggtgtggcattgtcgcgtagaaggttgattctggccttctaggggccgatttcgagggaggcgttatgtgtccaacaattgtttcccacaagatgagggtacaagctccagcgaaatgatcaatactgaatgctctgagacgtcctcagaggtgtcgggttctgaaagaacaagacctgaacatagcaaaaaagcatcttctgtacttggtaagaagatatctattagaaagaagctaaaaatgtttagtcgaatggctacattgaaagatgatggaactgtagttgtcgatatccctactactattgaagctgcatcacttgatcttcattcagaggatcaccaggatgtggcctttggtggcgaacccttggactcttcagatcttcaggatagaccaccaatgcaaattgctatgctgattgttggtacaagaggggatgtgcagccattcatagctataggaaaacgtttgcaggactacggtcatcgtgttagattagcaacccatgccaacttcaaggacttcgtgatgactactgggttggagttttatccccttggtggagacccaaaaattcttgctggattacagggttggtaatttgagcagacatggttaagaacaaaggattcttgcctgcaactccatcagaaattcctatccagcgcaagcagattagggacattatattctccttgcttcctgcttgcaaggacccagacattgatactggtgtttcttttagtgcagacgccataatagctaatccagcagcatatggacatgtacatgtggcagaggctctcaatataccgattcacataattttcacaatgccgtggacgcctacctgtgaatttccgcatcctttctctcatgtgaagcaacctgctggatatagactttcataccagattgttgactcttttgtctggcttggcataagggatatgataaatgatctccgaaaaaggaagttgaaattgagaccagtcacatacctaagcggtacacatgcttattcgaatgatattcctcatgcatatatctggagtccttaccttgtccccaaaccaaaagactggggacctaagattgatgttgttggattttgtttccttgatcttgcttcagattatgagcctcccgagacccttttgaggtggttagggagtggtgacagtcctatttatattggttttggtagccttccaattccagaaccagataagttgacaagaatcattgtccaagcacttgaaatttctggacagagaggtatcattaacaagggttggggcgggcttggaaacttggaagaatcaaaggaatttgtgtatgtacttgataatgttccacatgattggctctttttgcaatgcaaagctgtggtacaccatggtggtgctggcactactgctgctggtcttaaggctgggtgccccactaccatcataccattctttggtgatcaattcttttggggcagcatggttcatgccagaggattgggtgcaccacctatacccgtggagcaattacaattgcattcgctgattgatgcaatcaaatttatgattgatcctaaggtaaaggaacgagctgttgagctagcgaagtcaatcgaatcagaagacggtgtggatggggctgtaaaatcctttttaaaacatcttccacagaaaagggattccgagacgacaccaactgcgccagagccaacgttcgtgcaccggctgcttcaccctgtaaacagatgctttggcatggcatcctaaccccgcatttcaaagaacctgctttgattttgtggcatcaccggaacaagttgcaccacatgctaaaggagaaggggggagcaccaacatcgctagccagtcgttacatcctatataaatattaaaagaatgcaggtagggctactagttattcatatactgtaagttttttgaatctttattatatttgtatagcttgtggtcagtgtggataatacggtaacttgagactgcggctcctcaaaaatgtttgtcattacccacattttttttctttttaaaatactggtgtatatagattacagaactaggctggcctttgggttgctgcggaatttcatccaaacttttgtccacccaatgatttggtctgaactctgaacccgatcgctgctgaattgacatgtgtatgctttacaaagatattggtcggctgactccaattactttacaaatgtatacgtttcagtttggaaacatgttgccgtgcagcactgtagcgaatattgaatgggtccatacgacatgacaagttcaaatgttt

SEQ ID NO: 26216 - DNA, 3633 bp, Zea Mays
ttcgcatcccgttccgtgagaaacctccgtccgcgttccccgtttctctctcctttgggctttggctccgagcctccgatgactctcgtggcgtggcccgcttggaggttggtcttctagaggagaccttgcccctcgagagggaggaagtgaaggaaacttccagaagcctttcccgcagccgatgaaggaaaccagcagcagccatgtcggcggccccggcgctgaggacgtctgttcctcgtccgtgtccaacaattgtttcccacaagatgagggtacaagctccagcgaaatgatcaatactgaatgctctgagacgtcctcagaggtgtcgggttctgaaagaacaagacctgaacatagcaaaaaagcatcttctgtacttgctaaaaatgtttagtcgaatggctacattgaaagatgatggaactgtagttgtcgatatccctactactattgaagctgcatcacttgatcttcattcagaggatcaccaggatgtggcctttggtggcgaacccttggactcttcagatcttcaggatagaccaccaatgcaaattgctatgctgattgttggtacaagaggggatgtgcagccattcatagctataggaaaacgtttgcaggactacggtcatcgtgttagattagcaacccatgccaacttcaaggacttcgtgatgactactgggttggagttttatccccttggtggagacccaaaaattcttgctggattacagggttggtaatttgagcagacatggttaagaacaaaggattcttgcctgcaactccatcagaaattcctatccagcgcaagcagattagggacattatattctccttgcttcctgcttgcaaggacccagacattgatactggtgtttcttttagtgcagacgccataatagctaatccagcagcatatggacatgtacatgtggcagaggctctcaatataccgattcacataattttcacaatgccgtggacgcctacctgtgaatttccgcatcctttctctcatgtgaagcaacctgctggatatagactttcataccagattgttgactcttttgtctggcttggcataagggatatgataaatgatctccgaaaaaggaagttgaaattgagaccagtcacatacctaagcggtacacatgcttattcgaatgatattcctcatgcatatatctggagtccttaccttgtccccaaaccaaaagactggggacctaagattgatgttgttggattttgtttccttgatcttgcttcagattatgagcctcccgagacccttttgaggtggttagggagtggtgacagtcctatttatattggttttggtagccttgtaagtttttatttattgttcagaactaatttgatgtgtttacttttcttcctacatgtaagccatgattatgctttaaaatgtttcatttatacctggctaaatgctgtatttatactgtgtattctatgttggtcggtccattctttgttttctatcatgtggaacaaatggaaaatagagttggtaggtttgttatagatggaatggaactgacatgcaataaaatctgtgaaataaatatgtgcccatgagcactccaatgaaccataaaaatggaacttggtgttgaggtctggaaatgccactgtatgactcattttggtgtctaggatggtaggatcatgtcagccactcggctttattgttggtatttctgataactgtatgatttacagtgacattgtatatttcaaatattaatttgtcaagttatggcatcggttaaaattaatttgactgacaaaagcatagctcagttttattctgcaatggaagtccttattctgtgtagattagaaattgattcaaagcttactatgttataaacttattaattttctgggtcatggtcgtgtgtaaactagggtgtggcacgaatgattttatatgggtgtttgaggtgtagggtcagcctctcctttgtttgttccctcttcttaatgaaatgacatgcaactctctgttgtttgagaaaaaaataaccttattttgccaaacaaaagcatgatcttagtttctttgagcaattgacatgaacttgaaccttaagctgagtttctctgaaatgttaagctgaagtttaacattagaagacatttctatattctatgaggctttcttctagcaaggatatcaaacatacttactttttggttccactactaacaagtcaaatctcatctagaaagttggaattgaggctaaatgttactttgaccattttggcctacaattgttgctgtacaatttgtcaattgctatatggaataatttatcactgatatcaagataaaatttctctacagttgtggtttaattattttgggacattttggccttcttgtcgttcttgataagtagctggctagctgctacacattttttttgtttgtctgttttttagtttattactgatgactcctatttccagccaattccagaaccagataagttgacaagaatcattgtccaagcacttgaaatttctggacagagaggtatcattaacaagggttggggcgggcttggaaacttggaagaatcaaaggaatttgtgtatgtacttgataatgttccacatgattggctctttttgcaatgcaaagctgtggtacaccatggtggtgctggcactactgctgctggtcttaaggctgggtgccccactaccatcataccattctttggtgatcaattcttttggggcagcatggttcatgccagaggattgggtgcaccacctatacccgtggagcaattacaattgcattcgctgattgatgcaatcaaatttatgattgatcctaaggtaaaggaacgagctgttgagctagcgaagtcaatcgaatcagaagacggtgtggatggggctgtaaaatcctttttaaaacatcttccacagaaaagggattccgagacgacaccaactgcgccagagccaacgttcgtgcaccggctgcttcaccctgtaaacagatgctttggcatggcatcctaaccccgcatttcaaagaacctgctttgattttgtggcatcaccggaacaagttgcaccacatgctaaaggagaaggggggagcaccaacatcgctagccagtcgttacatcctatataaatattaaaagaatgcaggtagggctactagttattcatatactgtaagttttttgaatctttattatatttgtatagcttgtggtcagtgtggataatacggtaacttgagactgcggctcctcaaaaatgtttgtcattacccacattttttttctttttaaaatactggtgtatatagattacagaactaggctggcctttgggttgctgcggaatttcatccaaacttttgtccacccaatgatttggtctgaactctgaacccgatcgctgctgaattgacatgtgtatgctttacaaagatattggtcggctgactccaattactttacaaatgtatacgtttcagtttggaaacatgttgccgtgcagcactgtagcgaatattgaatgggtccatacgacatgacaagttcaaatgttt

SEQ ID NO: 26217 - DNA, 2380 bp, Zea Mays
ttcgcatcccgttccgtgagaaacctccgtccgcgttccccgtttctctctcctttgggctttggctccgagcctccgatgactctcgtggcgtggcccgcttggaggttggtcttctagaggagaccttgcccctcgagagggaggaagtgaaggaaacttccagaagcctttcccgcagccgatgaaggaaaccagcagcagccatgtcggcggccccggcgctgaggacgtctgttcctcgtccgtgtccaacaattgtttcccacaagatgagggtacaagctccagcgaaatgatcaatactgaatgctctgagacgtcctcagaggtgtcgggttctgaaagaacaagacctgaacatagcaaaaaagcatcttctgtacttgaggatcaccaggatgtggcctttggtggcgaacccttggactcttcagatcttcaggatagaccaccaatgcaaattgctatgctgattgttggtacaagaggggatgtgcagccattcatagctataggaaaacgtttgcaggactacggtcatcgtgttagattagcaacccatgccaacttcaaggacttcgtgatgactactgggttggagttttatccccttggtggagacccaaaaattcttgctggattacagggttggtaatttgagcagacatggttaagaacaaaggattcttgcctgcaactccatcagaaattcctatccagcgcaagcagattagggacattatattctccttgcttcctgcttgcaaggacccagacattgatactggtgtttcttttagtgcagacgccataatagctaatccagcagcatatggacatgtacatgtggcagaggctctcaatataccgattcacataattttcacaatgccgtggacgcctacctgtgaatttccgcatcctttctctcatgtgaagcaacctgctggatatagactttcataccagattgttgactcttttgtctggcttggcataagggatatgataaatgatctccgaaaaaggaagttgaaattgagaccagtcacatacctaagcggtacacatgcttattcgaatgatattcctcatgcatatatctggagtccttaccttgtccccaaaccaaaagactggggacctaagattgatgttgttggattttgtttccttgatcttgcttcagattatgagcctcccgagacccttttgaggtggttagggagtggtgacagtcctatttatattggttttggtagccttccaattccagaaccagataagttgacaagaatcattgtccaagcacttgaaatttctggacagagaggtatcattaacaagggttggggcgggcttggaaacttggaagaatcaaaggaatttgtgtatgtacttgataatgttccacatgattggctctttttgcaatgcaaagctgtggtacaccatggtggtgctggcactactgctgctggtcttaaggctgggtgccccactaccatcataccattctttggtgatcaattcttttggggcagcatggttcatgccagaggattgggtgcaccacctatacccgtggagcaattacaattgcattcgctgattgatgcaatcaaatttatgattgatcctaaggtaaaggaacgagctgttgagctagcgaagtcaatcgaatcagaagacggtgtggatggggctgtaaaatcctttttaaaacatcttccacagaaaagggattccgagacgacaccaactgcgccagagccaacgttcgtgcaccggctgcttcaccctgtaaacagatgctttggcatggcatcctaaccccgcatttcaaagaacctgctttgattttgtggcatcaccggaacaagttgcaccacatgctaaaggagaaggggggagcaccaacatcgctagccagtcgttacatcctatataaatattaaaagaatgcaggtagggctactagttattcatatactgtaagttttttgaatctttattatatttgtatagcttgtggtcagtgtggataatacggtaacttgagactgcggctcctcaaaaatgtttgtcattacccacattttttttctttttaaaatactggtgtatatagattacagaactaggctggcctttgggttgctgcggaatttcatccaaacttttgtccacccaatgatttggtctgaactctgaacccgatcgctgctgaattgacatgtgtatgctttacaaagatattggtcggctgactccaattactttacaaatgtatacgtttcagtttggaaacatgttgccgtgcagcactgtagcgaatattgaatgggtccatacgacatgacaagttcaaatgttt

SEQ ID NO: 26218 - DNA, 2784 bp, Zea Mays
cttcgtccttcgcttcgcatcccgttccgtgagaaacctccgtccgcgttccccgtttctctctcctttgggctttggctccgagcctccgatgactctcgtggcgtggcccgcttggaggttggtcttctagaggagaccttgcccctcgagagggaggaagtgaaggaaacttccagaagcctttcccgcagccgatgaaggaaaccagcagcagccatgtcggcggccccggcgctgaggacgtctgttcctcgtccgtgtccaacaattgtttcccacaagatgagggtacaagctccagcgaaatgatcaatactgaatgctctgagacgtcctcagaggtgtcgggttctgaaagaacaagacctgaacatagcaaaaaagcatcttctgtacttgctaaaaatgtttagtcgaatggctacattgaaagatgatggaactgtagttgtcgatatccctactactattgaagctgcatcacttgatcttcattcagaggatcaccaggatgtggcctttggtggcgaacccttggactcttcagatcttcaggatagaccaccaatgcaaattgctatgctgattgttggtacaagaggggatgtgcagccattcatagctataggaaaacgtttgcaggactacggtcatcgtgttagattagcaacccatgccaacttcaaggacttcgtgatgactactgggttggagttttatccccttggtggagacccaaaaattcttgctggattacagggttggtaatttgagcagacatggttaagaacaaaggattcttgcctgcaactccatcagaaattcctatccagcgcaagcagattagggacattatattctccttgcttcctgcttgcaaggacccagacattgatactggtgtttcttttagtgcagacgccataatagctaatccagcagcatatggacatgtacatgtggcagaggctctcaatataccgattcacataattttcacaatgccgtggacgcctacctgtgaatttccgcatcctttctctcatgtgaagcaacctgctggatatagactttcataccagattgttgactcttttgtctggcttggcataagggatatgataaatgatctccgaaaaaggaagttgaaattgagaccagtcacatacctaagcggtacacatgcttattcgaatgatattcctcatgcatatatctggagtccttaccttgtccccaaaccaaaaggtcggtgcctcatgcctggtattaccccaatcaaagttaacaaaaagattttgaaaatgccttggtacttttttcttttacatcatcaagataattgtgcataaactggccatacaattttggaaatcgaagcaaaacaaggtccctttttttgtatttaatgagcttccttaaatatctgaatacttccatcagttttgggaactaaattttgctgagtcatagttactattactgatgttaataactgattttttattgctgaaaaattaacttgcgcctcctttacagactggggacctaagattgatgttgttggattttgtttccttgatcttgcttcagattatgagcctcccgagacccttttgaggtggttagggagtggtgacagtcctatttatattggttttggtagccttccaattccagaaccagataagttgacaagaatcattgtccaagcacttgaaatttctggacagagaggtatcattaacaagggttggggcgggcttggaaacttggaagaatcaaaggaatttgtgtatgtacttgataatgttccacatgattggctctttttgcaatgcaaagctgtggtacaccatggtggtgctggcactactgctgctggtcttaaggctgggtgccccactaccatcataccattctttggtgatcaattcttttggggcagcatggttcatgccagaggattgggtgcaccacctatacccgtggagcaattacaattgcattcgctgattgatgcaatcaaatttatgattgatcctaaggtaaaggaacgagctgttgagctagcgaagtcaatcgaatcagaagacggtgtggatggggctgtaaaatcctttttaaaacatcttccacagaaaagggattccgagacgacaccaactgcgccagagccaacgttcgtgcaccggctgcttcaccctgtaaacagatgctttggcatggcatcctaaccccgcatttcaaagaacctgctttgattttgtggcatcaccggaacaagttgcaccacatgctaaaggagaaggggggagcaccaacatcgctagccagtcgttacatcctatataaatattaaaagaatgcaggtagggctactagttattcatatactgtaagttttttgaatctttattatatttgtatagcttgtggtcagtgtggataatacggtaacttgagactgcggctcctcaaaaatgtttgtcattacccacattttttttctttttaaaatactggtgtatatagattacagaactaggctggcctttgggttgctgcggaatttcatccaaacttttgtccacccaatgatttggtctgaactctgaacccgatcgctgctgaattgacatgtgtatgctttacaaagatattggtcggctgactccaattactttacaaatgtatacgtttcagtttggaaacatgttgccgtgcagcactgtagcgaatattgaatgggtccatacgacatgacaagttcaaatgttt

SEQ ID NO: 26219 - DNA, 3659 bp, Zea Mays
caatagccgtcttcgtccttcgcttcgcatcccgttccgtgagaaacctccgtccgcgttccccgtttctctctcctttgggctttggctccgagcctccgatgactctcgtggcgtggcccgcttggaggttggtcttctagaggagaccttgcccctcgagagggaggaagtgaaggaaacttccagaagcctttcccgcagccgatgaaggaaaccagcagcagccatgtcggcggccccggcgctgaggacgtctgttcctcgtccgtgtccaacaattgtttcccacaagatgagggtacaagctccagcgaaatgatcaatactgaatgctctgagacgtcctcagaggtgtcgggttctgaaagaacaagacctgaacatagcaaaaaagcatcttctgtacttggtaagaagatatctattagaaagaagctaaaaatgtttagtcgaatggctacattgaaagatgatggaactgtagttgtcgatatccctactactattgaagctgcatcacttgatcttcattcagaggatcaccaggatgtggcctttggtggcgaacccttggactcttcagatcttcaggatagaccaccaatgcaaattgctatgctgattgttggtacaagaggggatgtgcagccattcatagctataggaaaacgtttgcaggactacggtcatcgtgttagattagcaacccatgccaacttcaaggacttcgtgatgactactgggttggagttttatccccttggtggagacccaaaaattcttgctggatacatggttaagaacaaaggattcttgcctgcaactccatcagaaattcctatccagcgcaagcagattagggacattatattctccttgcttcctgcttgcaaggacccagacattgatactggtgtttcttttagtgcagacgccataatagctaatccagcagcatatggacatgtacatgtggcagaggctctcaatataccgattcacataattttcacaatgccgtggacgcctacctgtgaatttccgcatcctttctctcatgtgaagcaacctgctggatatagactttcataccagattgttgactcttttgtctggcttggcataagggatatgataaatgatctccgaaaaaggaagttgaaattgagaccagtcacatacctaagcggtacacatgcttattcgaatgatattcctcatgcatatatctggagtccttaccttgtccccaaaccaaaagactggggacctaagattgatgttgttggattttgtttccttgatcttgcttcagattatgagcctcccgagacccttttgaggtggttagggagtggtgacagtcctatttatattggttttggtagccttgtaagtttttatttattgttcagaactaatttgatgtgtttacttttcttcctacatgtaagccatgattatgctttaaaatgtttcatttatacctggctaaatgctgtatttatactgtgtattctatgttggtcggtccattctttgttttctatcatgtggaacaaatggaaaatagagttggtaggtttgttatagatggaatggaactgacatgcaataaaatctgtgaaataaatatgtgcccatgagcactccaatgaaccataaaaatggaacttggtgttgaggtctggaaatgccactgtatgactcattttggtgtctaggatggtaggatcatgtcagccactcggctttattgttggtatttctgataactgtatgatttacagtgacattgtatatttcaaatattaatttgtcaagttatggcatcggttaaaattaatttgactgacaaaagcatagctcagttttattctgcaatggaagtccttattctgtgtagattagaaattgattcaaagcttactatgttataaacttattaattttctgggtcatggtcgtgtgtaaactagggtgtggcacgaatgattttatatgggtgtttgaggtgtagggtcagcctctcctttgtttgttccctcttcttaatgaaatgacatgcaactctctgttgtttgagaaaaaaataaccttattttgccaaacaaaagcatgatcttagtttctttgagcaattgacatgaacttgaaccttaagctgagtttctctgaaatgttaagctgaagtttaacattagaagacatttctatattctatgaggctttcttctagcaaggatatcaaacatacttactttttggttccactactaacaagtcaaatctcatctagaaagttggaattgaggctaaatgttactttgaccattttggcctacaattgttgctgtacaatttgtcaattgctatatggaataatttatcactgatatcaagataaaatttctctacagttgtggtttaattattttgggacattttggccttcttgtcgttcttgataagtagctggctagctgctacacattttttttgtttgtctgttttttagtttattactgatgactcctatttccagccaattccagaaccagataagttgacaagaatcattgtccaagcacttgaaatttctggacagagaggtatcattaacaagggttggggcgggcttggaaacttggaagaatcaaaggaatttgtgtatgtacttgataatgttccacatgattggctctttttgcaatgcaaagctgtggtacaccatggtggtgctggcactactgctgctggtcttaaggctgggtgccccactaccatcataccattctttggtgatcaattcttttggggcagcatggttcatgccagaggattgggtgcaccacctatacccgtggagcaattacaattgcattcgctgattgatgcaatcaaatttatgattgatcctaaggtaaaggaacgagctgttgagctagcgaagtcaatcgaatcagaagacggtgtggatggggctgtaaaatcctttttaaaacatcttccacagaaaagggattccgagacgacaccaactgcgccagagccaacgttcgtgcaccggctgcttcaccctgtaaacagatgctttggcatggcatcctaaccccgcatttcaaagaacctgctttgattttgtggcatcaccggaacaagttgcaccacatgctaaaggagaaggggggagcaccaacatcgctagccagtcgttacatcctatataaatattaaaagaatgcaggtagggctactagttattcatatactgtaagttttttgaatctttattatatttgtatagcttgtggtcagtgtggataatacggtaacttgagactgcggctcctcaaaaatgtttgtcattacccacattttttttctttttaaaatactggtgtatatagattacagaactaggctggcctttgggttgctgcggaatttcatccaaacttttgtccacccaatgatttggtctgaactctgaacccgatcgctgctgaattgacatgtgtatgctttacaaagatattggtcggctgactccaattactttacaaatgtatacgtttcagtttggaaacatgttgccgtgcagcactgtagcgaatattgaatgggtccatacgacatgacaagttcaaatgttt

SEQ ID NO: 26220 - DNA, 2575 bp, Zea Mays
gtcaagcacctgccacgagttccctacccaacgcccaataggcaatagccgtcttcgtccttcgcttcgcatcccgttccgtgagaaacctccgtccgcgttccccgtttctctctcctttgggctttggctccgagcctccgatgactctcgtggcgtggcccgcttggaggttggtcttctagaggagaccttgcccctcgagagggaggaagtgaaggaaacttccagaagcctttcccgcagccgatgaaggaaaccagcagcagccatgtcggcggccccggcgctgaggacgtctgttcctcgtccgtgtccaacaattgtttcccacaagatgagggtacaagctccagcgaaatgatcaatactgaatgctctgagacgtcctcagaggtgtcgggttctgaaagaacaagacctgaacatagcaaaaaagcatcttctgtacttggtaagaagatatctattagaaagaagctaaaaatgtttagtcgaatggctacattgaaagatgatggaactgtagttgtcgatatccctactactattgaagctgcatcacttgatcttcattcagaggatcaccaggatgtggcctttggtggcgaacccttggactcttcagatcttcaggatagaccaccaatgcaaattgctatgctgattgttggtacaagaggggatgtgcagccattcatagctataggaaaacgtttgcaggactacggtcatcgtgttagattagcaacccatgccaacttcaaggacttcgtgatgactactgggttggagttttatccccttggtggagacccaaaaattcttgctggatgtattacagggttggtaatttgagcagacatggttaagaacaaaggattcttgcctgcaactccatcagaaattcctatccagcgcaagcagattagggacattatattctccttgcttcctgcttgcaaggacccagacattgatactggtgtttcttttagtgcagacgccataatagctaatccagcagcatatggacatgtacatgtggcagaggctctcaatataccgattcacataattttcacaatgccgtggacgcctacctgtgaatttccgcatcctttctctcatgtgaagcaacctgctggatatagactttcataccagattgttgactcttttgtctggcttggcataagggatatgataaatgatctccgaaaaaggaagttgaaattgagaccagtcacatacctaagcggtacacatgcttattcgaatgatattcctcatgcatatatctggagtccttaccttgtccccaaaccaaaagactggggacctaagattgatgttgttggattttgtttccttgatcttgcttcagattatgagcctcccgagacccttttgaggtggttagggagtggtgacagtcctatttatattggttttggtagccttccaattccagaaccagataagttgacaagaatcattgtccaagcacttgaaatttctggacagagaggtatcattaacaagggttggggcgggcttggaaacttggaagaatcaaaggaatttgtgtatgtacttgataatgttccacatgattggctctttttgcaatgcaaagctgtggtacaccatggtggtgctggcactactgctgctggtcttaaggctgggtgccccactaccatcataccattctttggtgatcaattcttttggggcagcatggttcatgccagaggattgggtgcaccacctatacccgtggagcaattacaattgcattcgctgattgatgcaatcaaatttatgattgatcctaaggtaaaggaacgagctgttgagctagcgaagtcaatcgaatcagaagacggtgtggatggggctgtaaaatcctttttaaaacatcttccacagaaaagggattccgagacgacaccaactgcgccagagccaacgttcgtgcaccggctgcttcaccctgtaaacagatgctttggcatggcatcctaaccccgcatttcaaagaacctgctttgattttgtggcatcaccggaacaagttgcaccacatgctaaaggagaaggggggagcaccaacatcgctagccagtcgttacatcctatataaatattaaaagaatgcaggtagggctactagttattcatatactgtaagttttttgaatctttattatatttgtatagcttgtggtcagtgtggataatacggtaacttgagactgcggctcctcaaaaatgtttgtcattacccacattttttttctttttaaaatactggtgtatatagattacagaactaggctggcctttgggttgctgcggaatttcatccaaacttttgtccacccaatgatttggtctgaactctgaacccgatcgctgctgaattgacatgtgtatgctttacaaagatattggtcggctgactccaattactttacaaatgtatacgtttcagtttggaaacatgttgccgtgcagcactgtagcgaatattgaatgggtccatacgacatgacaagttcaaatgttt

SEQ ID NO: 26221 - DNA, 2667 bp, Zea Mays
accattttcaacggcagttcgatcacccgcagacatggtccagcacgcatgacgcatccggatcgtccgtcaagcacctgccacgagttccctacccaacgcccaataggcaatagccgtcttcgtccttcgcttcgcatcccgttccgtgagaaacctccgtccgcgttccccgtttctctctcctttgggctttggctccgagcctccgatgactctcgtggcgtggcccgcttggaggttggtcttctagaggagaccttgcccctcgagagggaggaagtgaaggaaacttccagaagcctttcccgcagccgatgaaggaaaccagcagcagccatgtcggcggccccggcgctgaggacgtctgttcctcgtccgtgtccaacaattgtttcccacaagatgagggtacaagctccagcgaaatgatcaatactgaatgctctgagacgtcctcagaggtgtcgggttctgaaagaacaagacctgaacatagcaaaaaagcatcttctgtacttgctaaaaatgtttagtcgaatggctacattgaaagatgatggaactgtagttgtcgatatccctactactattgaagctgcatcacttgatcttcattcagaggatcaccaggatgtggcctttggtggcgaacccttggactcttcagatcttcaggatagaccaccaatgcaaattgctatgctgattgttggtacaagaggggatgtgcagccattcatagctataggaaaacgtttgcaggactacggtcatcgtgttagattagcaacccatgccaacttcaaggacttcgtgatgactactgggttggagttttatccccttggtggagacccaaaaattcttgctggatacatggttaagaacaaaggattcttgcctgcaactccatcagaaattcctatccagcgcaagcagattagggacattatattctccttgcttcctgcttgcaaggacccagacattgatactggtgtttcttttagtgcagacgccataatagctaatccagcagcatatggacatgtacatgtggcagaggctctcaatataccgattcacataattttcacaatgccgtggacgcctacctgtgaatttccgcatcctttctctcatgtgaagcaacctgctggatatagactttcataccagattgttgactcttttgtctggcttggcataagggatatgataaatgatctccgaaaaaggaagttgaaattgagaccagtcacatacctaagcggtacacatgcttattcgaatgatattcctcatgcatatatctggagtccttaccttgtccccaaaccaaaagactggggacctaagattgatgttgttggattttgtttccttgatcttgcttcagattatgagcctcccgagacccttttgaggtggttagggagtggtgacagtcctatttatattggttttggtagccttccaattccagaaccagataagttgacaagaatcattgtccaagcacttgaaatttctggacagagaggtatcattaacaagggttggggcgggcttggaaactgtaagttataagagttctttaacttttgttatgttaccatgttcttcactttcagaggctttgcatgtccaactttttataataaaaataataatagcatgtgcatgtctaactgttttattttcagtggaagaatcaaaggaatttgtgtatgtacttgataatgttccacatgattggctctttttgcaatgcaaagctgtggtacaccatggtggtgctggcactactgctgctggtcttaaggctgggcatggttcatgccagaggattgggtgcaccacctatacccgtggagcaattacaattgcattcgctgattgatgcaatcaaatttatgattgatcctaaggtaaaggaacgagctgttgagctagcgaagtcaatcgaatcagaagacggtgtggatggggctgtaaaatcctttttaaaacatcttccacagaaaagggattccgagacgacaccaactgcgccagagccaacgttcgtgcaccggctgcttcaccctgtaaacagatgctttggcatggcatcctaaccccgcatttcaaagaacctgctttgattttgtggcatcaccggaacaagttgcaccacatgctaaaggagaaggggggagcaccaacatcgctagccagtcgttacatcctatataaatattaaaagaatgcaggtagggctactagttattcatatactgtaagttttttgaatctttattatatttgtatagcttgtggtcagtgtggataatacggtaacttgagactgcggctcctcaaaaatgtttgtcattacccacattttttttctttttaaaatactggtgtatatagattacagaactaggctggcctttgggttgctgcggaatttcatccaaacttttgtccacccaatgatttggtctgaactctgaacccgatcgctgctgaattgacatgtgtatgctttacaaagatattggtcggctgactccaattactttacaaatgtatacgtttcagtttggaaacatgttgccgtgcagcactgtagcgaatattgaatgggtccatacgacatgacaagttcaaatgttt

SEQ ID NO: 26222 - DNA, 521 bp, Zea Mays
cgcatggtgtcgcttacacgtgggaccgacgcgccgggtcgtgtgctaacagcttcgccgagctccgcgcgggcgcgtgcaaccacccgcgcgacaatggcgggccacaacctcttctcctctgcccgacttggactccagaggattaaaggggttctcgtgaccaccacctcttccctactcgcctcgccgtagtgaccagagcacgtgtaacacaaaatcgtgggtgagagaagagggctcgcggccgtgctcgattcgccacggtttaccggatcctgctgtcgattggaagcgggaggtggtcagggaagatcgcacgatcgtgggtgtggcgtcttcttccgcgaaggggcgtcgattgctcgtcaattgcttaccgtggcggaaaatccccgccggaccgccaagcttcgtggacgggcatcaccttacctcggctggccactgacgagcaacccactgtggaacctgagcttcaacaagtagagatagctgagcaggagctcgttgaaggcaag

SEQ ID NO: 26223 - DNA, 1038 bp, Zea Mays
caggagcatgtaattggagagtggcacgagctcggaatttcaacagctgttaagagaaaacaagagaatgctagatcgatccatcagggaaattgagcgagagagacaaggattgcaggcccaggagaaaaagctcatcactgagatcaagaaaacagctaaagaaggccagatgggagctgtcaaagtaatggccaaagatcttattcgcacccggcatcagataacaaagttctaccaactcaaatctcaactccaaggagtttctctaagagttcagacactaaaatcaactcaagctatgggtgatgccatgaagggtgtcacaaaggcaatgtcccaaatgaacaggcagctaaatctaccaggattgcagaggataatgcaagagtttgagcgacagaacgagaggatggagatggtgagtgaagtgatgggagatgccatagatgatgctttggaaggagatgaggaagaagaagaaactgaggagcttgtgaatcaagtacttgatgaaattggcattgatatcaaccaagagcttgttggagctccgtcggccactgttgctcaacctgcttctgtgggaagggtcgcccaggctgaaagtgctgggaatgctgacagtggtatcgacgctgatttgcaggcaaggctagacaatctgaggagaatgtaggtgctacactagcaaaaagagtagtgccttcaagcactgttcctgcgaatgtgaatgaatacctgatcgatcaaagcggttacaagccaatgtgtatgttgaaatgaatgaagtgttcaatatgccggtagtaataacaaatgatgattatatatttattacatgtattgtcatatgcaattcttcccctctttttacttttttgtgcatgcgtggttagaatttttaatttttgcttttttcggcacgcaacacacatttctcctatgtatggctagactttttattttttctttgccacatgtagcacacatttttcatttttttgcatgtttgctgcttcatttattgtattcaca

SEQ ID NO: 26224 - DNA, 552 bp, Zea Mays
agactcaacctcagctggatctccgtcatcactcacttctgcagtccttccttcctcttcaatagaagtaagttgtgctccatcgtttccatgaatatcatttgcaccattaccacccttcactacccgatagatcatcattttgtcaatgatgctaagtgctgcacgtacccgccgctgggactcaacttttatgggcttcagttcatccaacaatcccttatccaagaagagctctaccagcttttccatgttgccattattctcttcttccaattcttctgagcttccattcaaatattttagttcttcaaagtccctgtttgtttccatcaatccctctaaggctttgattgcttctgtagagctgctgctaccagtcttctcttgcagtttgtccaagttagttacatctttcagatcttctgatttaccatttgcttctcgtgattcaacacttgcatcaacttcctttgggctttccaagttgttgttatgttctgcattctcagatccctcctcttcatcatcacaatgtatttcgatgccgct

SEQ ID NO: 26225 - DNA, 1733 bp, Zea Mays
cctttctggccattgctgccaatgaggatgcttgtgtatgagtacgtgaacaatggaaatttagaacagtggcttcatggtgccatgcgtcagcatggtgttcttacttgggaagcccggatgaaaatcattcttggaattgctaaggcgcttgcttatttacatgaagccatagaaccaaaagttgtgcaccgtgatatcaaatctagcaatatcctagttgatgaagaattcaatggcaagctttctgattttggattggccaagctcttgggtgcagggaagagtcatatcacaactcgagttatgggaactttcgggtatgtggcccctgaatatgccaacactggtctgttaaatgagaggagtgatgtctacagttttggagtgctactactggaatcagttactgggagggacccagttgactatggtcggccagctaatgaggtacatctggtcgagtggctcaaaatgatggttggcacgagaagagctgaggaggtggtggatcctgacatggagttgaaacctgccactcgggctctgaagcgtgcccttctagtggcactgcggtgtgttgatccggactctgagaaaagacccactatggggcaggttgtccggatgctcgaggcagaagatgtcccgtcacgggaggaccgccggagccggaggggccacagcggtaacgcagacagcgagtctaaggcaagctcaagtgagttcgagataagcagtgatcgaagagagttggggccgtccgcgaggttccagtcctaacccctgacgagaactcggttttggactagcgatgaacatcagatgagcggtgtgtgtgggggggggggggggggggctggttggtaggaggtaggaaggccattgcatttcattttcgcgaggacatttgcattttgtactgtgtagagatcggaagggcattgcatttctggaggggtaggcattatcctttggtagtaggcagcttagaatgcagagggagatgactccccctgagacgaaagattcagacttgctgtcgtgaatcttggtgttctgttggtgcggacggcagcagcttcagcttgtacagacatttctttctctgtcgtttggttattaggacttgttgggtagtaggaacattaaggtctctttcgtaatgtgatgaatgacttgaaccatcaacctcttgtaatcttcttagtccattggccaagctagagttctgtgaagctccatcttcagcatgggaatctcaccgattcagatcgagctgatgctgtttcctgtgatatttctgaagatgttccaagcagggtggtaatttcctgtgacaattggaaagatgtagacgatcgctggctcattggttctaatcaatgggatgaatgtcaaatgcgaataaatcaaaatccgaggtacacagaagagctccggcgacggggaaagggcccgggagctccaaaggcttggcgatggcccggcggttgcgagcacaaagagaagcgcacggaggagggaggtgctagtactacgcatggcaaattgattctttgtaatgtttggcgtggagttgtaagagcatcggaggagggaggtgctagtactacgcatggcaaattgattctttgtaatgtttggcgtggagttgtaagagcatctgtaagagactagacaaatggttcatcaagttaaattttgactaatcaatagcaaaataattctcc

SEQ ID NO: 26226 - DNA, 2764 bp, Zea Mays
gtcactgactcactgccactcccactgtgctgccgcaacggcactggatttttgtgagtccgcggctccgcgctcgcttctctctctctctctcccccctttctgccgctcactctcgctcgctcgctcgctcgctcttctactgcgggctggcggcggcggcggcggcgactgggcgagccgcgagcgcgccgcccttcgccaggtcttcgccggccacttcgcgggcgagggcgaccaccgacgagcatccaccaggccgctgaggaataacaaagatgtccgccggcggagtcctgagggcagagttatcttccaggacgccgccgttcggcctgaggctatggattgtgattggcatctgtatctgggcgctaatcctgttcatcctaggcttcatgtgcttctggtccctacaccggaggaagccgggcaagccctgcgacaaggttccgctgtcccaaatccctgacgtctccaaggagattgcggtggacgaggcgcgggagcaagctgttgtccacagcctccgtgtgcaggagagccacacactgtccgtgcaggagaagaagcactgcgaaaaggattcggggaaaatgctcgcgcacctggttaggagcaagtcgagcgatgcagataatctgagccagtgcagctccgcgttccagtgcgaaagggctgggagctcgtattctggtgacgaaggcagctcgggcaatgctaggaggcagtactctcagaccgtctccgcgtcgccattggttggtctccctgagttctcgcatctgggttgggggcattggtttactttgagggatttggagcatgcgacgaatcggttttctaaggagaatgtcattggagaaggtgggtatggagtagtttaccgtggccgcctcataaatggtactgatgttgcaataaagaagctccttaataacatgggccaagcagaaaaggagttcagggttgaagttgaggcaattggacatgtcaggcataagaatcttgtccgccttcttggatattgcgtggagggaatacacaggatgcttgtgtatgagtacgtgaacaatggaaatttagaacagtggcttcatggtgccatgcgtcagcatggtgttcttacttgggaagcccggatgaaaatcattcttggaattgctaaggcgcttgcttatttacatgaagccatagaaccaaaagttgtgcaccgtgatatcaaatctagcaatatcctagttgatgaagaattcaatggcaagctttctgattttggattggccaagctcttgggtgcagggaagagtcatatcacaactcgagttatgggaactttcgggtatgtggcccctgaatatgccaacactggtctgttaaatgagaggagtgatgtctacagttttggagtgctactactggaatcagttactgggagggacccagttgactatggtcggccagctaatgagacggtgcaggtacatctggtcgagtggctcaaaatgatggttggcacgagaagagctgaggaggtggtggatcctgacatggagttgaaacctgccactcgggctctgaagcgtgcccttctagtggcactgcggtgtgttgatccggactctgagaaaagacccactatggggcaggttgtccggatgctcgaggcagaagatgtcccgtcacgggaggaccgccggagccggaggggccacagcggtaacgcagacagcgagtctaaggcaagctcaagtgagttcgagataagcagtgatcgaagagagttggggccgtccgcgaggttccagtcctaacccctgacgagaactcggttttggactagcgatgaacatcagatgagcggtgtgtgtgggggggggggggggggggctggttggtaggaggtaggaaggccattgcatttcattttcgcgaggacatttgcattttgtactgtgtagagatcggaagggcattgcatttctggaggggtaggcattatcctttggtagtaggcagcttagaatgcagagggagatgactccccctgagacgaaagattcagacttgctgtcgtgaatcttggtgttctgttggtgcggacggcagcagcttcagcttgtacagacatttctttctctgtcgtttggttattaggacttgttgggtagtaggaacattaaggtctctttcgtaatgtgatgaatgacttgaaccatcaacctcttgtaatcttcttagtccattggccaagctagagttctgtgaagctccatcttcagcatgggaatctcaccgattcagatcgagctgatgctgtttcctgtgatatttctgaagatgttccaagcagggtggtaatttcctgtgacaattggaaagatgtagacgatcgctggctcattggttctaatcaatgggatgaatgtcaaatgcgaataaatcaaaatccgaggtacacagaagagctccggcgacggggaaagggcccgggagctccaaaggcttggcgatggcccggcggttgcgagcacaaagagaagcgcacggaggagggaggtgctagtactacgcatggcaaattgattctttgtaatgtttggcgtggagttgtaagagcatcggaggagggaggtgctagtactacgcatggcaaattgattctttgtaatgtttggcgtggagttgtaagagcatctgtaagagactagacaaatggttcatcaagttaaattttgactaatcaatagcaaaataattctcc

SEQ ID NO: 26227 - DNA, 846 bp, Zea Mays
gggtcctcactcctccccctctctctctatcatcacccttcttccgccggaaggaaaagagaaaaacacacactctctttccgagctctctcgctgtctctcacccagccgccaccatgtcaggcctctacaaccagggcttctcccctgcaagaaccctctccccccagattaggagcaaccccgacgctgatagccagtacttggccgagcttctcgccgagcaccagaagttggggccattcatgcaggtgctgccgatatgcagccggctgctcaaccaagaaatcatgcgggtgtcaagcatggttcatgaccatggatttagtgatcttgacagacgccggtttagaagtcctagccctatgtcttcaccgattgtccggcctaatctacatggaaatggttttggtccttggaatgggatgcaccaagagagattgggctttcctcctcctggaacaagtatggactggcaaggagcaccaccgagccctggctcttatattgtcaagaagatcatgcgcttggaagttcccgtcgactcttaccctaatttcaactttgtgggacgcattctagggccaaggggtaattctctaaagcgagttgaatcatcaactggctgccgtgtttttattagagggaagggttccgtcaaagatacagaaaaggaggacaaacttaaaggaaaacctgggtatgaacatctgaacgagccactgcatatattaatcgaggctgagttaccagcgaacattgttgatacaagactgagacaggcacaagaagtcatggaggaattgctaaagccagtggaggagatattggcaacatggaggatta

SEQ ID NO: 26228 - DNA, 834 bp, Zea Mays
atgtgccatgaccgtgacctagactttggaggacaaacttaaaggaaaacctgggtatgaacatctgaacgagccactgcatatattaatcgaggctgagttaccagcgaacattgttgatacaagactgagacaggcacaagaagtcatggaggaattgctaaagccagtggacgagtcacaagatttgtacaagaggcaacagctgagggagttggctatgctaaactctactctgagagaagacagtcctcaccctggaagtgtctcccctttcagcaacggcggcatgaagcgcgcaaaaccaagccagtagagaaaggtttcaggctctcctccaccctcctccactccagtcgttcttggtgcagcaccagcaaggtgtgcctgcccttgaacctgcgctgcttcgtgtcgtgggtgcttgtgtaagaaaaaaaaggtatatgcattttgctgctgctggacggacaggtggtcgagacgaggaggaaatcgctggtcgttgaactgtctccatcttcggtggatccggccattttgctgctgtaaggtgatgggcattcgttctattcgttactgactgttgaccagattatgatgccgtggtttcaggggagactagctatgcctatggccctgataattagtgtgagctggttcgtttaggtgtttaattagtttgtattattattattcgcgttacgttgtggagtagtagcaaacgtcacagctggtgatgcactccgctctgacagtttgatgaggacagctttgaataaaccatgtgaattcagaatgttactgaaacggtgggacgtccgttctatgcct

SEQ ID NO: 26229 - DNA, 1203 bp, Zea Mays
ctcactcctccccctctctctctatcatcacccttcttccgccggaaggaaaagagaaaaacacacactctctttccgagctctctcgctgtctctcacccagccgccaccatgtcaggcctctacaaccagggcttctcccctgcaagaaccctctccccccagattaggagcaaccccgacgctgatagccagtacttggccgagcttctcgccgagcaccagaagttggggccattcatgcaggtgctgccgatatgcagccggctgctcaaccaagttcaactttgtgggacgcattctagggccaaggggtaattctctaaagcgagttgaatcatcaactggctgccgtgtttttattagagggaagggttccgtcaaagatacagaaaaggaggacaaacttaaaggaaaacctgggtatgaacatctgaacgagccactgcatatattaatcgaggctgagttaccagcgaacattgttgatacaagactgagacaggcacaagaagtcatggaggaattgctaaagccagtggacgagtcacaagatttgtacaagaggcaacagctgagggagttggctatgctaaactctactctgagagaagacagtcctcaccctggaagtgtctcccctttcagcaacggcggcatgaagcgcgcaaaaccaagccagtagagaaaggtttcaggctctcctccaccctcctccactccagtcgttcttggtgcagcaccagcaaggtgtgcctgcccttgaacctgcgctgcttcgtgtcgtgggtgcttgtgtaagaaaaaaaaggtatatgcattttgctgctgctggacggacaggtggtcgagacgaggaggaaatcgctggtcgttgaactgtctccatcttcggtggatccggccattttgctgctgtaaggtgatgggcattcgttctattcgttactgactgttgaccagattatgatgccgtggtttcaggggagactagctatgcctatggccctgataattagtgtgagctggttcgtttaggtgtttaattagtttgtattattattattcgcgttacgttgtggagtagtagcaaacgtcacagctggtgatgcactccgctctgacagtttgatgaggacagctttgaataaaccatgtgaattcagaatgttactgaaacggtgggacgtccgttctatgcct

SEQ ID NO: 26230 - DNA, 1385 bp, Zea Mays
gtcctcactcctccccctctctctctatcatcacccttcttccgccggaaggaaaagagaaaaacacacactctctttccgagctctctcgctgtctctcacccagccgccaccatgtcaggcctctacaaccagggcttctcccctgcaagaaccctctccccccagattaggagcaaccccgacgctgatagccagtacttggccgagcttctcgccgagcaccagaagttggggccattcatgcaggtgctgccgatatgcagccggctgctcaaccaagaaatcatgcgggtgtcaagcatggttcatgaccatggatttagtgatcttgacagacgccggtttagaagtcctagccctatgtcttcaccgattgtccggcctaatctacatggaaatggttttggtccttggaatgggatgcaccaagagagattgggctttcctcctcctggaacaagtatggactggcaaggagcaccaccgagccctggctcttatattgtcaagaagatcatgcgcttggaagttcccgtcgactcttaccctaatttcaactttgtgggacgcattctagggccaaggggtaattctctaaagcgagttgaatcatcaactggctgccgtgtttttattagagggaagggttccgtcaaagatacagaaaaggaggacaaacttaaaggaaaacctgggtatgaacatctgaacgagccactgcatatattaatcgaggctgagttaccagcgaacattgttgatacaagactgagacaggcacaagaagtcatggaggaattgctaaagccagtggacgagtcacaagatttgtacaagaggcaacagctgagggagttggctatgctaaactctactctgagagaagacagtcctcaccctggaagtgtctcccctttcagcaacggcggcatgaagcgcgcaaaaccaagccagtagagaaaggtttcaggctctcctccaccctcctccactccagtcgttcttggtgcagcaccagcaaggtggtcgagacgaggaggaaatcgctggtcgttgaactgtctccatcttcggtggatccggccattttgctgctgtaaggtgatgggcattcgttctattcgttactgactgttgaccagattatgatgccgtggtttcaggggagactagctatgcctatggccctgataattagtgtgagctggttcgtttaggtgtttaattagtttgtattattattattcgcgttacgttgtggagtagtagcaaacgtcacagctggtgatgcactccgctctgacagtttgatgaggacagctttgaataaaccatgtgaattcagaatgttactgaaacggtgggacgtccgttctatgcct

SEQ ID NO: 26231 - DNA, 1336 bp, Zea Mays
ctgggagtgggtcctcactcctccccctctctctctatcatcacccttcttccgccggaaggaaaagagaaaaacacacactctctttccgagctctctcgctgtctctcacccagccgccaccatgtcaggcctctacaaccagggcttctcccctgcaagaaccctctccccccagattaggagcaaccccgacgctgatagccagtacttggccgagcttctcgccgagcaccagaagttggggccattcatgcaggtgctgccgatatgcagccggctgctcaaccaagaaatcatgcgggtgtcaagcatggttcatgaccatggatttagtgatcttgacagacgccggtttagaagtcctagccctatgtcttcaccgattgtccggcctaatctacatggaaatggttttggtccttggaatgggatgcaccaagagagattgggctttcctcctcctggaacaagtatggactggcaaggagcaccaccgagccctggctcttatattgtcaagaagatcatgcgcttggaagttcccgtcgactcttaccctaatttcaactttgtgggacgcattctagggccaaggggtaattctctaaagcgagttgaatcatcaactggctgccgtgtttttattagagggaagggttccgtcaaagatacagaaaaggaggacaaacttaaaggaaaacctgggtatgaacatctgaacgagccactgcatatattaatcgaggctgagttaccagcgaacattgttgatacaagactgagacaggcacaagaagtcatggaggaattgctaaagccagtggacgagtcacaagatttgtacaagaggcaacagctgagggagttggctatgctaaactctactctgagagaagacagtcctcaccctggaagtgtctcccctttcagcaacggcggcatgaagcgcgcaaaaccaagccagtagagaaaggtggtcgagacgaggaggaaatcgctggtcgttgaactgtctccatcttcggtggatccggccattttgctgctgtaaggtgatgggcattcgttctattcgttactgactgttgaccagattatgatgccgtggtttcaggggagactagctatgcctatggccctgataattagtgtgagctggttcgtttaggtgtttaattagtttgtattattattattcgcgttacgttgtggagtagtagcaaacgtcacagctggtgatgcactccgctctgacagtttgatgaggacagctttgaataaaccatgtgaattcagaatgttactgaaacggtgggacgtccgttctatgcct

SEQ ID NO: 26232 - DNA, 1195 bp, Zea Mays
gtaaaaatgggcctgcaagtccagcgtgctgcacggttagacgaggagcagcctatgccggccctaaacccgtgtccccctcgtttccgctcttctgctcctcgcgccgccgcagcgacccgacgacagatgatgctatggtgcctatctcctctcctttgactcctccactaggtgacagtgaagaaactgacaaaaagggggctgtggtaaaacgcctaaaggtccaagccataaaaaaagatatcaaacagagtcccaagaaggtgaatctagtagcaaagctggttcgaggtatgcgtgtagaagatgccctactgcagctgcaagtgactgttaaaagggctgccaaaaccgtttaccaggtgatccattctgctcgggccaatgcatctcacaaccatggattggatcctgataagctcattgttgaggaggcctttgtgggaaagggacttttcctgaagagagtgtcttaccatgccagagggaggtccggcattatggtgcgaccaaggtgcagactgacagtggtggttagagaagctacagctgaggaggaggcaaagatcgccaaactcagggtgagcaactacaagaagctgaccaggaaggagcagcagcttatgcctcacaggctcatcgaggttagcccgaggtggattcgcaagaggaaagcggaggctggtgctacggcgtagtactttatgtatgcagaacctgcattcactgctttgcacatccgaggagcgaacatgccttccctggcacaaatacttgatcctctctcggtgtcgattcacgcaaacgggttacaaagctaggcttggtttgttttgctctaaatccatgtggattggatgtgtttaaatcgcaaacaagtcaaaatcctttataagtttttctaatctcatcaaatccacatgggatagagaataatcgaacaagaccgtaggtggattcgactatttggtaatcttggtcgtttggagtctaggaagagaggaaaatgctatgtattttagcgatgtgcattgtagccaactaaaacctcgccaaagcattggatgtgcatgagacacgtaccattgcttctacaatttcatgcaactattggtttcagctggtttcaatgctttgtctagtgcgcattgtacaagaagactacaaatggtggtaagctgtagttccatgc

SEQ ID NO: 26233 - DNA, 2468 bp, Zea Mays
cgataacctcgagaaaacattgaggtcacgagtgttggggaggagctagaccatgaagggaaaacatgagatatgggaagaagaagaaaaaaaatagagaaaggaggaggatatagataggcctcttctttccgaaaatcgggacgatcactctagacaaagtaattattttcttggaagttctgtaggagaaccttcaaagattcaatcaaataggagtaacatttcgcctagaagtcatgcaattgctgatacagggaggacttatccagatgaatgttgtgctacacaaggagaaactcatgtaatcaatattgaaaatgatacttctgaagagtttcgattaggaagcacgttaagacggacatcaccagcaaaattgacaacacctgctcagaagcacagaagggtttctggagatgactatcataatggaagtgttcctctgaaggatagtacatatcatagtagcctagatttagaggtcatagctggtccatctcatggaataagctgttctcggcagtcaagtaggccttctatgctcccaataactcttggaagggttcccccaagtgatttagtgttaaaggactctgaagtatctgggaaacatgctcagataaactggaatgcaaagacattaaaatgggaacttgtggacatgggcagcttgaatggaactttcttgaactcccaggcagttcatcatccagatgctgagtctaggcattggggtgaacctgctgaacttgcacatggtgatattataactctagggacttcatctaaactatctgttcaaattacactgcaaaatcaacgagttcctgctggtgttggtatggcatccgatccaatggtggcacgtagaagtggaaagaaacttccaatggaagacataagcttttgccagtgtcctctgcagggtgttgaacattttgggctctttggaatttttgatggacatggtggggatggagctgccaaagctgtcagcaagattcttccagaaaatctgggatacatgttatctcatcctgaaacaaaagaacgagtgcagtcatgttctgatgcttctgatgttcttagatatgcttttactttgacagaagatgcaatcgatcatcagtacgagggatgtacaggcacagcacttcttatttggtttgatcaaaataaagattgttttgcccagtgtgctaatcttggtgattctgcttgcgtaatgagtgtcaatggaaagacgatcgatatgactgaagatcaccgggtagctagcgcaactgaaagagctaggatagcaagaactgggcagcccctgaaagatggggaagtccgtcttaatggactgaatcttgcgaggatgtttggagacaagtttcttaaggagcaagactcacgcttcagctcagaaccatatctgagccaagctgttcgtatcaccaaagcgtgcacagcttttgccgttattgctagtgacgggctttgggatgtcatcagcacgaaaagggcggtacagcttgttgttgagggaacggagaggtactctggtgacagcgcctcagcggctaaagtagccaaccgcgtgttggacgaagctaggagcttgcgaaccaaggacaacacatccttaatatttgtagattttgacattctgagaacagatccttgtatcgccaaatgacatgtcagattcaagacacctttccgtgaaccatcttcctggctgcttatatagctccaagttttggtccacccattcagttttttagtgagatgtgatatatatattcagctgtagattggcataggagcagagtccataccatgtaatctggtgcatgcttttagactctagtgcgtgcgcgctgcctgcgtgtgggtgtgtgtgtgagggggattgtcaatgagaaggtcttcatggagaaacttcctggtcaattttcaatagagttagaattttggaacaagagtttcttggccactgaccccctcaatcttgtctgaagaacgtcgggagaaacttggtgctagacccagttgctgccacgtggacagcattgagcctgagtttttgtcaagtctggaatccttttaccgcattggtgaacttcggtgttggatcactcatccattctaaatttgaaactagtttttgttctatgaattcaggaagttttggctcatttttttaccacaaaaaaatatcaacacttgtgccagaagtattcaagggacaatctagatattggcaaccaacgtgcaactgaattcctactccctagataggccttgcagagataagagaagatggggatgtacaagatcgaattagggtttaggttgatgagttacgtctaataataatatattaattccctgagaaactgaggagccgggtggccaaatccatgcaggaaaatttgatgaaagactatgatttaatcgtcgtcatcaggcatggg

SEQ ID NO: 26234 - DNA, 4292 bp, Zea Mays
aaaccaacccagcagcacagcacctgcagggctgcagcagacaccactccagcagcctctctctctctctctcctcaccggcacggcactccacgcggcggcaggagcacccaccgccactgacgggcgggggggaacacgcgcggccatggccacgtcggcgccgccaccgtcctccgcgccgtggctggagtgggccgcggagtataccaaggcggcgcaggccgaggcccgcccgccgccggagtgggcggcgcgggtggcggcggccgctgcggcggcgggcgagagtgaggacgtgccctggtccgcggggctcgcggaggtgctggcgcgagcgctgttccccggcggcggcggcggcggtggcggggctgccccggcggccgccgcttggaagtacgcggaggccgcgctcgcggcgcggcttgcgtccccggcgctcctcctcgcgctcctctccaccagggtaattcctcaccggctttccaggccaatggagtatagactctaccttgagctcttgaaaagacatgggttcaacttccatcatcagatgaaagcagcaaatttcagaaagatcatggatataatagagcggaatcttagactttccaagatatttggcatctctacatgtgaaccaggggtttttgttgtgcatttcattctttgtattatatggcagttgattgatgttgttctggatgatgagggcctactagagttaactccagagaagaatgctcaatggccaacaaggcctgaagatgtgagcacatttgaaggaacttttactgaacaaagaactgagaagatcaaaaagttacagaagatgaacactgtaacaactatggagctcattgagcatcttcttcgcgataaagtaattactcgtatcctatcattggcacgcgaaaacatgcaatctcactggggggcatttactaaccggttgcacttgcttgcaacaaactcatctaccttgcaaaattcagcaatatccttggaaccatttcagcatttgattctaggtgattgtgatgcatatggtgaaactaaacataatgtgcataaaagattccaccaaatagtggcttctaaccctctatcttcaccaaatggacgatgtcttggtgctagctattctgcactatggattcctattgatatgtatcttgaggattgtctcgattgttcaattgctgcaacaaattctattgagattttaagtggtttggtcaaggctcttcaagcagtcaataggtcgacttggcatgatgctttcttggccctctgggtagcttcacttcgccttgtacaaagagaaagagaaccaattgaaggtcctgtacctcacctagacacccggctgtgcatgttgttgtctatcacaacacttgcgattgctgacataattatggaagcagattcactttgcaatgaaacagaactcaacagtcatgtgaatgagaagaaagcaattggtaatctacgcaatgaattgatgctaagcttacagatacttggtgattatgaaagcttgctggttcctccttcatgtgtcatcccagcagctaatcaagctgctactaaagctgcaatgttcatttctggaatcagtataaacaatggctacatggataatgtcaatgggatgaactatactggaaatatgcgacatttgattgtggagtcatgtatctcaaggcagttgctggatacatcagcttactattggcctggttatatcatgaatcatgccaactctacatctcatacactccctagtcaacttgctggttggtcatccttcatgaagggtgcaccactgactcaaccactggttaatatgttggtatcaactcctgcttccagaggtcgacaagttatttgaagttgcagttgatgggtcagatgacgacagcatttcagctgccactgttttatgtggagccacccttttacgaggttggaattttcaggaatatcggccgtggactatgctccaatcttctcgttccatggcctgattccagagctggctgcttctcttatggcaatctgtgaagtatttgggtgtctttctccaagtgtttcctggacactgagaactggagaggaaatatctgctcacacagtcttctcgaatgcatttattcttctgttgagactttggaagtttaaccatccaccacttgagtattgcataatgggagatggtgctccagttggctcgcagctaactcctgagtatcttctgctgttacggaattcccaggtcctatcttccagcagtttgtcaaaacaacgaaacggacaaaggcaatcacaagtatcaacttcacacccatcatctggaaatcctatttttatggactcgtttccaaagttgaagttatggtaccagcagcaccaagcttgtctggcctcaactctctctggacttgctcatgggacacctgtacgtaacaatgtggatagccttcttaatcagatgttcagaaaagctaataaaggaggcacatcaataggttctttatctggaagtagcagcataagtaattcttccagtcctggtggggatgattcacatctttggcctcagttgccagcttgggagatactggaggctgttccttttgtggttgatgctgctcttactgcttgttcccatggaagactatttccacgtgaactggccacaggcctgaaggatctggctgatttcctccctgcatctcttgctacaatagtaagctacttttccgctgaggtgacgcggggtgtctggaagcctgcatccatgaatggatcagattggcctagcccctctgtgaacctatccatggttgatgagcacatcaagaaaatcgtagctgctaccggtgttgatgttccaaagctagttacaggaggaagctcttcaggtacacttccgttaccattggctgctttcgtgagcctcacaatcacatacaagcttgacaaggcatcagagtgtttcctcaaccttgctggtccagctctagagaacctggctgcaagctgcccttggccaagcatggcaatcgttgcagcactgtggacccagaaggtgaagcgatggagcgatttcctaatattttcagcttcgcgcactgtgttccaccacaacaacgatgcagtcgtccagctcctccgaagttgcttcgccgctacccttggcatgtcttcgacatcagtatgcagctgtggaggtgtcgccagccttctgggccacgggtactgccctggtggtttctcgccagttgcgccaggaatcctctacctccggatattccggtgcatcaaggactgctccatactcgccgaggacatactctcccttctgatgctctcagtgaaggatatcgcagaaacaactgtgcccagacaaaggccagacaagctaaagaagaccaagtacgggatgaggcatggccaggtatctctttccgctgcaatgacgcaggtgaaggtggcggcatctctgggggcgacactcgtctggctatccggcggcacggctctcgtccagtccctgatccaggagatgctgccgtcttggttcctgtccgcgcagaacctggatcagggcggggctagcggaggcgtggtgtacaagctaggcgggcacgcgttggcctacttcgcggtgtactcggggatgttggcctggggcatcgaccagacgcccgtgtcccggcgccgcgagagggtcatgcggtcgcacctggggttcctggcgagcgcgctggccgggaagatcttcctcggctgcgacctctccctgtggcgagcctacgtctctgggttcctaggactggtggttgaatgcaccccgtgctgggtgcaggaggtggacctgagggtgctcaagcgcctgagcagcggcctccggcactggggcgaggatgagctcgcggtggcgctcctccgccgcgccggtcccgaggctatgggcacagccgcggagatgatcttgggcagggagttgtgacgccgatgcgcgcgcgcgccgcgcggcgtatgctgttcgtcagcgatgatgcagtttttgtatataatcggttaaaatctggccatgtgtatgctcacgggtaatatttgaatgattttatctgtaaaactgttaagacgttttgatctctctaatactaaccttcatctacccgtttgcaaaaaaaagaaatgatgtaccagaatgtaaaacctaggtttatgaacggacatgtttggcacagttctcatgcagcttccactgagttgat

SEQ ID NO: 26235 - DNA, 4369 bp, Zea Mays
aaaccaacccagcagcacagcacctgcagggctgcagcagacaccactccagcagcctctctctctctctctcctcaccggcacggcactccacgcggcggcaggagcacccaccgccactgacgggcgggggggaacacgcgcggccatggccacgtcggcgccgccaccgtcctccgcgccgtggctggagtgggccgcggagtataccaaggcggcgcaggccgaggcccgcccgccgccggagtgggcggcgcgggtggcggcggccgctgcggcggcgggcgagagtgaggacgtgccctggtccgcggggctcgcggaggtgctggcgcgagcgctgttccccggcggcggcggcggcggtggcggggctgccccggcggccgccgcttggaagtacgcggaggccgcgctcgcggcgcggcttgcgtccccggcgctcctcctcgcgctcctctccaccagggtaattcctcaccggctttccaggccaatggagtatagactctaccttgagctcttgaaaagacatgggttcaacttccatcatcagatgaaagcagcaaatttcagaaagatcatggatataatagagcggaatcttagactttccaagatatttggcatctctacatgtgaaccaggggtttttgttgtgcatttcattctttgtattatatggcagttgattgatgttgttctggatgatgagggcctactagagttaactccagagaagaatgctcaatggccaacaaggcctgaagatgtgagcacatttgaaggaacttttactgaacaaagaactgagaagatcaaaaagttacagaagatgaacactgtaacaactatggagctcattgagcatcttcttcgcgataaagcaatctcactggggggcatttactaaccggttgcacttgcttgcaacaaactcatctaccttgcaaaattcagcaatatccttggaaccatttcagcatttgattctaggtgattgtgatgcatatggtgaaactaaacataatgtgcataaaagattccaccaaatagtggcttctaaccctctatcttcaccaaatggacgatgtcttggtgctagctattctgcactatggattcctattgatatgtatcttgaggattgtctcgattgttcaattgctgcaacaaattctattgagattttaagtggtttggtcaaggctcttcaagcagtcaataggtcgacttggcatgatgctttcttggccctctgggtagcttcacttcgccttgtacaaagagaaagagaaccaattgaaggtcctgtacctcacctagacacccggctgtgcatgttgttgtctatcacaacacttgcgattgctgacataattatggaagcagattcactttgcaatgaaacagaactcaacagtcatgtgaatgagaagaaagcaattggtaatctacgcaatgaattgatgctaagcttacagatacttggtgattatgaaagcttgctggttcctccttcatgtgtcatcccagcagctaatcaagctgctactaaagctgcaatgttcatttctggaatcagtataaacaatggctacatggataatgtcaatgggatgaactatactggaaatatgcgacatttgattgtggagtcatgtatctcaaggcagttgctggatacatcagcttactattggcctggttatatcatgaatcatgccaactctacatctcatacactccctagtcaacttgctggttggtcatccttcatgaagggtgcaccactgactcaaccactggttaatatgttggtatcaactcctgcttccagaggtcgacaagttatttgaagttgcagttgatgggtcagatgacgacagcatttcagctgccactgttttatgtggagccacccttttacgaggttggaattttcaggagcatacagttcggttagttgttaaactgctctcaccatctgatccaattgataattctggaagagagagccaattgataaagcttggtccaatgctcaatgttattctttcaggaatatcggccgtggactatgctccaatcttctcgttccatggcctgattccagagctggctgcttctcttatggcaatctgtgaagtatttgggtgtctttctccaagtgtttcctggacactgagaactggagaggaaatatctgctcacacagtcttctcgaatgcatttattcttctgttgagactttggaagtttaaccatccaccacttgagtattgcataatgggagatggtgctccagttggctcgcagctaactcctgagtatcttctgctgttacggaattcccaggtcctatcttccagcagtttgtcaaaacaacgaaacggacaaaggcaatcacaagtatcaacttcacacccatcatctggaaatcctatttttatggactcgtttccaaagttgaagttatggtaccagcagcaccaagcttgtctggcctcaactctctctggacttgctcatgggacacctgtacgtaacaatgtggatagccttcttaatcagatgttcagaaaagctaataaaggaggcacatcaataggttctttatctggaagtagcagcataagtaattcttccagtcctggtggggatgattcacatctttggcctcagttgccagcttgggagatactggaggctgttccttttgtggttgatgctgctcttactgcttgttcccatggaagactatttccacgtgaactggccacaggcctgaaggatctggctgatttcctccctgcatctcttgctacaatagtaagctacttttccgctgaggtgacgcggggtgtctggaagcctgcatccatgaatggatcagattggcctagcccctctgtgaacctatccatggttgatgagcacatcaagaaaatcgtagctgctaccggtgttgatgttccaaagctagttacaggaggaagctcttcaggtacacttccgttaccattggctgctttcgtgagcctcacaatcacatacaagcttgacaaggcatcagagtgtttcctcaaccttgctggtccagctctagagaacctggctgcaagctgcccttggccaagcatggcaatcgttgcagcactgtggacccagaaggtgaagcgatggagcgatttcctaatattttcagcttcgcgcactgtgttccaccacaacaacgatgcagtcgtccagctcctccgaagttgcttcgccgctacccttggcatgtcttcgacatcagtatgcagctgtggaggtgtcgccagccttctgggccacgggtactgccctggtggtttctcgccagttgcgccaggaatcctctacctccggatattccggtgcatcaaggactgctccatactcgccgaggacatactctcccttctgatgctctcagtgaaggatatcgcagaaacaactgtgcccagacaaaggccagacaagctaaagaagaccaagtacgggatgaggcatggccaggtatctctttccgctgcaatgacgcaggtgaaggtggcggcatctctgggggcgacactcgtctggctatccggcggcacggctctcgtccagtccctgatccaggagatgctgccgtcttggttcctgtccgcgcagaacctggatcagggcggggctagcggaggcgtggtgtacaagctaggcgggcacgcgttggcctacttcgcggtgtactcggggatgttggcctggggcatcgaccagacgcccgtgtcccggcgccgcgagagggtcatgcggtcgcacctggggttcctggcgagcgcgctggccgggaagatcttcctcggctgcgacctctccctgtggcgagcctacgtctctgggttcctaggactggtggttgaatgcaccccgtgctgggtgcaggaggtggacctgagggtgctcaagcgcctgagcagcggcctccggcactggggcgaggatgagctcgcggtggcgctcctccgccgcgccggtcccgaggctatgggcacagccgcggagatgatcttgggcagggagttgtgacgccgatgcgcgcgcgcgccgcgcggcgtatgctgttcgtcagcgatgatgcagtttttgtatataatcggttaaaatctggccatgtgtatgctcacgggtaatatttgaatgattttatctgtaaaactgttaagacgttttgatctctctaatactaaccttcatctacccgtttgcaaaaaaaagaaatgatgtaccagaatgtaaaacctaggtttatgaacggacatgtttggcacagttctcatgcagcttccactgagttgat

SEQ ID NO: 26236 - DNA, 4300 bp, Zea Mays
aaaccaacccagcagcacagcacctgcagggctgcagcagacaccactccagcagcctctctctctctctctcctcaccggcacggcactccacgcggcggcaggagcacccaccgccactgacgggcgggggggaacacgcgcggccatggccacgtcggcgccgccaccgtcctccgcgccgtggctggagtgggccgcggagtataccaaggcggcgcaggccgaggcccgcccgccgccggagtgggcggcgcgggtggcggcggccgctgcggcggcgggcgagagtgaggacgtgccctggtccgcggggctcgcggaggtgctggcgcgagcgctgttccccggcggcggcggcggcggtggcggggctgccccggcggccgccgcttggaagtacgcggaggccgcgctcgcggcgcggcttgcgtccccggcgctcctcctcgcgctcctctccaccagggtaattcctcaccggctttccaggccaatggagtatagactctaccttgagctcttgaaaagacatgggttcaacttccatcatcagatgaaagcagcaaatttcagaaagatcatggatataatagagcggaatcttagactttccaagatatttggcatctctacatgtgaaccaggggtttttgttgtgcatttcattctttgtattatatggcagttgattgatgttgttctggatgatgagggcctactagagttaactccagagaagaatgctcaatggccaacaaggcctgaagatgtgagcacatttgaaggaacttttactgaacaaagaactgagaagatcaaaaagttacagaagatgaacactgtaacaactatggagctcattgagcatcttcttcgcgataaagtaattactcgtatcctatcattggcacgcgaaaacatgcaatctcactggggggcatttactaaccggttgcacttgcttgcaacaaactcatctaccttgcaaaattcagcaatatccttggaaccatttcagcatttgattctaggtgattgtgatgcatatggtgaaactaaacataatgtgcataaaagattccaccaaatagtggcttctaaccctctatcttcaccaaatggacgatgtcttggtgctagctattctgcactatggattcctattgatatgtatcttgaggattgtctcgattgttcaattgctgcaacaaattctattgagattttaagtggtttggtcaaggctcttcaagcagtcaataggtcgacttggcatgatgctttcttggccctctgggtagcttcacttcgccttgtacaaagagaaagagaaccaattgaaggtcctgtacctcacctagacacccggctgtgcatgttgttgtctatcacaacacttgcgattgctgacataattatggaagcagattcactttgcaatgaaacagaactcaacagtcatgtgaatgagaagaaagcaattggtaatctacgcaatgaattgatgctaagcttacagatacttggtgattatgaaagcttgctggttcctccttcatgtgtcatcccagcagctaatcaagctgctactaaagctgcaatgttcatttctggaatcagtataaacaatggctacatggataatgtcaatgggatgaactatactggaaatatgcgacatttgattgtggagtcatgtatctcaaggcagttgctggatacatcagcttactattggcctggttatatcatgaatcatgccaactctacatctcatacactccctagtcaacttgctggttggtcatccttcatgaagggtgcaccactgactcaaccactggttaatatgttggtatcaactcctgcttccaggagcatacagttcggttagttgttaaactgctctcaccatctgatccaattgataattctggaagagagagccaattgataaagcttggtccaatgctcaatgttattctttcaggaatatcggccgtggactatgctccaatcttctcgttccatggcctgattccagagctggctgcttctcttatggcaatctgtgaagtatttgggtgtctttctccaagtgtttcctggacactgagaactggagaggaaatatctgctcacacagtcttctcgaatgcatttattcttctgttgagactttggaagtttaaccatccaccacttgagtattgcataatgggagatggtgctccagttggctcgcagctaactcctgagtatcttctgctgttacggaattcccaggtcctatcttccagcagtttgtcaaaacaacgaaacggacaaaggcaatcacaagtatcaacttcacacccatcatctggaaatcctatttttatggactcgtttccaaagttgaagttatggtaccagcagcaccaagcttgtctggcctcaactctctctggacttgctcatgggacacctgtacgtaacaatgtggatagccttcttaatcagatgttcagaaaagctaataaaggaggcacatcaataggttctttatctggaagtagcagcataagtaattcttccagtcctggtggggatgattcacatctttggcctcagttgccagcttgggagatactggaggctgttccttttgtggttgatgctgctcttactgcttgttcccatggaagactatttccacgtgaactggccacaggcctgaaggatctggctgatttcctccctgcatctcttgctacaatagtaagctacttttccgctgaggtgacgcggggtgtctggaagcctgcatccatgaatggatcagattggcctagcccctctgtgaacctatccatggttgatgagcacatcaagaaaatcgtagctgctaccggtgttgatgttccaaagctagttacaggaggaagctcttcaggtacacttccgttaccattggctgctttcgtgagcctcacaatcacatacaagcttgacaaggcatcagagtgtttcctcaaccttgctggtccagctctagagaacctggctgcaagctgcccttggccaagcatggcaatcgttgcagcactgtggacccagaaggtgaagcgatggagcgatttcctaatattttcagcttcgcgcactgtgttccaccacaacaacgatgcagtcgtccagctcctccgaagttgcttcgccgctacccttggcatgtcttcgacatcagtatgcagctgtggaggtgtcgccagccttctgggccacgggtactgccctggtggtttctcgccagttgcgccaggaatcctctacctccggatattccggtgcatcaaggactgctccatactcgccgaggacatactctcccttctgatgctctcagtgaaggatatcgcagaaacaactgtgcccagacaaaggccagacaagctaaagaagaccaagtacgggatgaggcatggccaggtatctctttccgctgcaatgacgcaggtgaaggtggcggcatctctgggggcgacactcgtctggctatccggcggcacggctctcgtccagtccctgatccaggagatgctgccgtcttggttcctgtccgcgcagaacctggatcagggcggggctagcggaggcgtggtgtacaagctaggcgggcacgcgttggcctacttcgcggtgtactcggggatgttggcctggggcatcgaccagacgcccgtgtcccggcgccgcgagagggtcatgcggtcgcacctggggttcctggcgagcgcgctggccgggaagatcttcctcggctgcgacctctccctgtggcgagcctacgtctctgggttcctaggactggtggttgaatgcaccccgtgctgggtgcaggaggtggacctgagggtgctcaagcgcctgagcagcggcctccggcactggggcgaggatgagctcgcggtggcgctcctccgccgcgccggtcccgaggctatgggcacagccgcggagatgatcttgggcagggagttgtgacgccgatgcgcgcgcgcgccgcgcggcgtatgctgttcgtcagcgatgatgcagtttttgtatataatcggttaaaatctggccatgtgtatgctcacgggtaatatttgaatgattttatctgtaaaactgttaagacgttttgatctctctaatactaaccttcatctacccgtttgcaaaaaaaagaaatgatgtaccagaatgtaaaacctaggtttatgaacggacatgtttggcacagttctcatgcagcttccactgagttgat

SEQ ID NO: 26237 - DNA, 4508 bp, Zea Mays
ggggagaggtggttacaccaacgggacgccatcagcatcatcggcgatcggaccaccaccaaaccaacccagcagcacagcacctgcagggctgcagcagacaccactccagcagcctctctctctctctctcctcaccggcacggcactccacgcggcggcaggagcacccaccgccactgacgggcgggggggaacacgcgcggccatggccacgtcggcgccgccaccgtcctccgcgccgtggctggagtgggccgcggagtataccaaggcggcgcaggccgaggcccgcccgccgccggagtgggcggcgcgggtggcggcggccgctgcggcggcgggcgagagtgaggacgtgccctggtccgcggggctcgcggaggtgctggcgcgagcgctgttccccggcggcggcggcggcggtggcggggctgccccggcggccgccgcttggaagtacgcggaggccgcgctcgcggcgcggcttgcgtccccggcgctcctcctcgcgctcctctccaccagggtaattcctcaccggctttccaggccaatggagtatagactctaccttgagctcttgaaaagacatgggttcaacttccatcatcagatgaaagcagcaaatttcagaaagatcatggatataatagagcggaatcttagactttccaagatatttggcatctctacatgtgaaccaggggtttttgttgtgcatttcattctttgtattatatggcagttgattgatgttgttctggatgatgagggcctactagagttaactccagagaagaatgctcaatggccaacaaggcctgaagatgtgagcacatttgaaggaacttttactgaacaaagaactgagaagatcaaaaagttacagaagatgaacactgtaacaactatggagctcattgagcatcttcttcgcgataaagtaattactcgtatcctatcattggcacgcgaaaacatgcaatctcactggggggcatttactaaccggttgcacttgcttgcaacaaactcatctaccttgcaaaattcagcaatatccttggaaccatttcagcatttgattctaggtgattgtgatgcatatggtgaaactaaacataatgtgcataaaagattccaccaaatagtggcttctaaccctctatcttcaccaaatggacgatgtcttggtgctagctattctgcactatggattcctattgatatgtatcttgaggattgtctcgattgttcaattgctgcaacaaattctattgagattttaagtggtttggtcaaggctcttcaagcagtcaataggtcgacttggcatgatgctttcttggccctctgggtagcttcacttcgccttgtacaaagagaaagagaaccaattgaaggtcctgtacctcacctagacacccggctgtgcatgttgttgtctatcacaacacttgcgattgctgacataattatggaagcagattcactttgcaatgaaacagaactcaacagtcatgtgaatgagaagaaagcaattggtaatctacgcaatgaattgatgctaagcttacagatacttggtgattatgaaagcttgctggttcctccttcatgtgtcatcccagcagctaatcaagctgctactaaagctgcaatgttcatttctggaatcagtataaacaatggctacatggataatgtcaatgggatgaactatagtatgtggcttctcttaagatatttttttttacacatataattgacgttctagattgaccttctagtggatgtaaggcagttgctggatacatcagcttactattggcctggttatatcatgaatcatgccaactctacatctcatacactccctagtcaacttgctggttggtcatccttcatgaagggtgcaccactgactcaaccactggttaatatgttggtatcaactcctgcttccagcttggcagaggtcgacaagttatttgaagttgcagttgatgggtcagatgacgacagcatttcagctgccactgttttatgtggagccacccttttacgaggttggaattttcaggagcatacagttcggttagttgttaaactgctctcaccatctgatccaattgataattctggaagagagagccaattgataaagcttggtccaatgctcaatgttattctttcaggaatatcggccgtggactatgctccaatcttctcgttccatggcctgattccagagctggctgcttctcttatggcaatctgtgaagtatttgggtgtctttctccaagtgtttcctggacactgagaactggagaggaaatatctgctcacacagtcttctcgaatgcatttattcttctgttgagactttggaagtttaaccatccaccacttgagtattgcataatgggagatggtgctccagttggctcgcagctaactcctgagtatcttctgctgttacggaattcccaggtcctatcttccagcagtttgtcaaaacaacgaaacggacaaaggcaatcacaagtatcaacttcacacccatcatctggaaatcctatttttatggactcgtttccaaagttgaagttatggtaccagcagcaccaagcttgtctggcctcaactctctctggacttgctcatgggacacctgtacgtaacaatgtggatagccttcttaatcagatgttcagaaaagctaataaaggaggcacatcaataggttctttatctggaagtagcagcataagtaattcttccagtcctggtggggatgattcacatctttggcctcagttgccagcttgggagatactggaggctgttccttttgtggttgatgctgctcttactgcttgttcccatggaagactatttccacgtgaactggccacaggcctgaaggatctggctgatttcctccctgcatctcttgctacaatagtaagctacttttccgctgaggtgacgcggggtgtctggaagcctgcatccatgaatggatcagattggcctagcccctctgtgaacctatccatggttgatgagcacatcaagaaaatcgtagctgctaccggtgttgatgttccaaagctagttacaggaggaagctcttcaggtacacttccgttaccattggctgctttcgtgagcctcacaatcacatacaagcttgacaaggcatcagagtgtttcctcaaccttgctggtccagctctagagaacctggctgcaagctgcccttggccaagcatggcaatcgttgcagcactgtggacccagaaggtgaagcgatggagcgatttcctaatattttcagcttcgcgcactgtgttccaccacaacaacgatgcagtcgtccagctcctccgaagttgcttcgccgctacccttggcatgtcttcgacatcagtatgcagctgtggaggtgtcgccagccttctgggccacgggtactgccctggtggtttctcgccagttgcgccaggaatcctctacctccggatattccggtgcatcaaggactgctccatactcgccgaggacatactctcccttctgatgctctcagtgaaggatatcgcagaaacaactgtgcccagacaaaggccagacaagctaaagaagaccaagtacgggatgaggcatggccaggtatctctttccgctgcaatgacgcaggtgaaggtggcggcatctctgggggcgacactcgtctggctatccggcggcacggctctcgtccagtccctgatccaggagatgctgccgtcttggttcctgtccgcgcagaacctggatcagggcggggctagcggaggcgtggtgtacaagctaggcgggcacgcgttggcctacttcgcggtgtactcggggatgttggcctggggcatcgaccagacgcccgtgtcccggcgccgcgagagggtcatgcggtcgcacctggggttcctggcgagcgcgctggccgggaagatcttcctcggctgcgacctctccctgtggcgagcctacgtctctgggttcctaggactggtggttgaatgcaccccgtgctgggtgcaggaggtggacctgagggtgctcaagcgcctgagcagcggcctccggcactggggcgaggatgagctcgcggtggcgctcctccgccgcgccggtcccgaggctatgggcacagccgcggagatgatcttgggcagggagttgtgacgccgatgcgcgcgcgcgccgcgcggcgtatgctgttcgtcagcgatgatgcagtttttgtatataatcggttaaaatctggccatgtgtatgctcacgggtaatatttgaatgattttatctgtaaaactgttaagacgttttgatctctctaatactaaccttcatctacccgtttgcaaaaaaaagaaatgatgtaccagaatgtaaaacctaggtttatgaacggacatgtttggcacagttctcatgcagcttccactgagttgat

SEQ ID NO: 26238 - DNA, 4622 bp, Zea Mays
caccacgccacttggtgtgggaccacacgtacctccaggatccgctgcggccagtggtagcctggcgactccattttctcttggttggaaagctcggtcacgcagaagatcctgaagcggcggccccaccgcgaggtggtgcggtgggggactggggggagaggtggttacaccaacgggacgccatcagcatcatcggcgatcggaccaccaccaaaccaacccagcagcacagcacctgcagggctgcagcagacaccactccagcagcctctctctctctctctcctcaccggcacggcactccacgcggcggcaggagcacccaccgccactgacgggcgggggggaacacgcgcggccatggccacgtcggcgccgccaccgtcctccgcgccgtggctggagtgggccgcggagtataccaaggcggcgcaggccgaggcccgcccgccgccggagtgggcggcgcgggtggcggcggccgctgcggcggcgggcgagagtgaggacgtgccctggtccgcggggctcgcggaggtgctggcgcgagcgctgttccccggcggcggcggcggcggtggcggggctgccccggcggccgccgcttggaagtacgcggaggccgcgctcgcggcgcggcttgcgtccccggcgctcctcctcgcgctcctctccaccagggtaattcctcaccggctttccaggccaatggagtatagactctaccttgagctcttgaaaagacatgggttcaacttccatcatcagatgaaagcagcaaatttcagaaagatcatggatataatagagcggaatcttagactttccaagatatttggcatctctacatgtgaaccaggggtttttgttgtgcatttcattctttgtattatatggcagttgattgatgttgttctggatgatgagggcctactagagttaactccagagaagaatgctcaatggccaacaaggcctgaagatgtgagcacatttgaaggaacttttactgaacaaagaactgagaagatcaaaaagttacagaagatgaacactgtaacaactatggagctcattgagcatcttcttcgcgataaagtaattactcgtatcctatcattggcacgcgaaaacatgcaatctcactggggggcatttactaaccggttgcacttgcttgcaacaaactcatctaccttgcaaaattcagcaatatccttggaaccatttcagcatttgattctaggtgattgtgatgcatatggtgaaactaaacataatgtgcataaaagattccaccaaatagtggcttctaaccctctatcttcaccaaatggacgatgtcttggtgctagctattctgcactatggattcctattgatatgtatcttgaggattgtctcgattgttcaattgctgcaacaaattctattgagattttaagtggtttggtcaaggctcttcaagcagtcaataggtcgacttggcatgatgctttcttggccctctgggtagcttcacttcgccttgtacaaagagaaagagaaccaattgaaggtcctgtacctcacctagacacccggctgtgcatgttgttgtctatcacaacacttgcgattgctgacataattatggaagcagattcactttgcaatgaaacagaactcaacagtcatgtgaatgagaagaaagcaattggtaatctacgcaatgaattgatgctaagcttacagatacttggtgattatgaaagcttgctggttcctccttcatgtgtcatcccagcagctaatcaagctgctactaaagctgcaatgttcatttctggaatcagtataaacaatggctacatggataatgtcaatgggatgaactatactggaaatatgcgacatttgattgtggagtcatgtatctcaaggcagttgctggatacatcagcttactattggcctggttatatcatgaatcatgccaactctacatctcatacactccctagtcaacttgctggttggtcatccttcatgaagggtgcaccactgactcaaccactggttaatatgttggtatcaactcctgcttccagaggtcgacaagttatttgaagttgcagttgatgggtcagatgacgacagcatttcagctgccactgttttatgtggagccacccttttacgaggttggaattttcaggagcatacagttcggttagttgttaaactgctctcaccatctgatccaattgataattctggaagagagagccaattgataaagcttggtccaatgctcaatgttattctttcaggaatatcggccgtggactatgctccaatcttctcgttccatggcctgattccagagctggctgcttctcttatggcaatctgtgaagtatttgggtgtctttctccaagtgtttcctggacactgagaactggagaggaaatatctgctcacacagtcttctcgaatgcatttattcttctgttgagactttggaagtttaaccatccaccacttgagtattgcataatgggagatggtgctccagttggctcgcagctaactcctgagtatcttctgctgttacggaattcccaggtcctatcttccagcagtttgtcaaaacaacgaaacggacaaaggcaatcacaagtatcaacttcacacccatcatctggaaatcctatttttatggactcgtttccaaagttgaagttatggtaccagcagcaccaagcttgtctggcctcaactctctctggacttgctcatgggacacctgtacgtaacaatgtggatagccttcttaatcagatgttcagaaaagctaataaaggaggcacatcaataggttctttatctggaagtagcagcataagtaattcttccagtcctggtggggatgattcacatctttggcctcagttgccagcttgggagatactggaggctgttccttttgtggttgatgctgctcttactgcttgttcccatggaagactatttccacgtgaactggccacaggcctgaaggatctggctgatttcctccctgcatctcttgctacaatagtaagctacttttccgctgaggtgacgcggggtgtctggaagcctgcatccatgaatggatcagattggcctagcccctctgtgaacctatccatggttgatgagcacatcaagaaaatcgtagctgctaccggtgttgatgttccaaagctagttacaggaggaagctcttcaggtacacttccgttaccattggctgctttcgtgagcctcacaatcacatacaagcttgacaaggcatcagagtgtttcctcaaccttgctggtccagctctagagaacctggctgcaagctgcccttggccaagcatggcaatcgttgcagcactgtggacccagaaggtgaagcgatggagcgatttcctaatattttcagcttcgcgcactgtgttccaccacaacaacgatgcagtcgtccagctcctccgaagttgcttcgccgctacccttggcatgtcttcgacatcagtatgcagctgtggaggtgtcgccagccttctgggccacgggtactgccctggtggtttctcgccagttgcgccaggaatcctctacctccggatattccggtgcatcaaggactgctccatactcgccgaggacatactctcccttctgatgctctcagtgaaggatatcgcagaaacaactgtgcccagacaaaggccagacaagctaaagaagaccaagtacgggatgaggcatggccaggtatctctttccgctgcaatgacgcaggtgaaggtggcggcatctctgggggcgacactcgtctggctatccggcggcacggctctcgtccagtccctgatccaggagatgctgccgtcttggttcctgtccgcgcagaacctggatcagggcggggctagcggaggcgtggtgtacaagctaggcgggcacgcgttggcctacttcgcggtgtactcggggatgttggcctggggcatcgaccagacgcccgtgtcccggcgccgcgagagggtcatgcggtcgcacctggggttcctggcgagcgcgctggccgggaagatcttcctcggctgcgacctctccctgtggcgagcctacgtctctgggttcctaggactggtggttgaatgcaccccgtgctgggtgcaggaggtggacctgagggtgctcaagcgcctgagcagcggcctccggcactggggcgaggatgagctcgcggtggcgctcctccgccgcgccggtcccgaggctatgggcacagccgcggagatgatcttgggcagggagttgtgacgccgatgcgcgcgcgcgccgcgcggcgtatgctgttcgtcagcgatgatgcagtttttgtatataatcggttaaaatctggccatgtgtatgctcacgggtaatatttgaatgattttatctgtaaaactgttaagacgttttgatctctctaatactaaccttcatctacccgtttgcaaaaaaaagaaatgatgtaccagaatgtaaaacctaggtttatgaacggacatgtttggcacagttctcatgcagcttccactgagttgat

SEQ ID NO: 26239 - DNA, 4520 bp, Zea Mays
ggcaccaccacgccacttggtgtgggaccacacgtacctccaggatccgctgcggccagtggtagcctggcgactccattttctcttggttggaaagctcggtcacgcagaagatcctgaagcggcggccccaccgcgaggtggtgcggtgggggactggggggagaggtggttacaccaacgggacgccatcagcatcatcggcgatcggaccaccaccaaaccaacccagcagcacagcacctgcagggctgcagcagacaccactccagcagcctctctctctctctctcctcaccggcacggcactccacgcggcggcaggagcacccaccgccactgacgggcgggggggaacacgcgcggccatggccacgtcggcgccgccaccgtcctccgcgccgtggctggagtgggccgcggagtataccaaggcggcgcaggccgaggcccgcccgccgccggagtgggcggcgcgggtggcggcggccgctgcggcggcgggcgagagtgaggacgtgccctggtccgcggggctcgcggaggtgctggcgcgagcgctgttccccggcggcggcggcggcggtggcggggctgccccggcggccgccgcttggaagtacgcggaggccgcgctcgcggcgcggcttgcgtccccggcgctcctcctcgcgctcctctccaccagggtaattcctcaccggctttccaggccaatggagtatagactctaccttgagctcttgaaaagacatgggttcaacttccatcatcagatgaaagcagcaaatttcagaaagatcatggatataatagagcggaatcttagactttccaagatatttggcatctctacatgtgaaccaggggtttttgttgtgcatttcattctttgtattatatggcagttgattgatgttgttctggatgatgagggcctactagagttaactccagagaagaatgctcaatggccaacaaggcctgaagatgtgagcacatttgaaggaacttttactgaacaaagaactgagaagatcaaaaagttacagaagatgaacactgtaacaactatggagctcattgagcatcttcttcgcgataaagtaattactcgtatcctatcattggcacgcgaaaacatgcaatctcactggggggcatttactaaccggttgcacttgcttgcaacaaactcatctaccttgcaaaattcagcaatatccttggaaccatttcagcatttgattctaggtgattgtgatgcatatggtgaaactaaacataatgtgcataaaagattccaccaaatagtggcttctaaccctctatcttcaccaaatggacgatgtcttggtgctagctattctgcactatggattcctattgatatgtatcttgaggattgtctcgattgttcaattgctgcaacaaattctattgagattttaagtggtttggtcaaggctcttcaagcagtcaataggtcgacttggcatgatgctttcttggccctctgggtagcttcacttcgccttgtacaaagagaaagagaaccaattgaaggtcctgtacctcacctagacacccggctgtgcatgttgttgtctatcacaacacttgcgattgctgacataattatggaagcagattcactttgcaatgaaacagaactcaacagtcatgtgaatgagaagaaagcaattggtaatctacgcaatgaattgatgctaagcttacagatacttggtgattatgaaagcttgctggttcctccttcatgtgtcatcccagcagctaatcaagctgctactaaagctgcaatgttcatttctggaatcagtataaacaatggctacatggataatgtcaatgggatgaactatactggaaatatgcgacatttgattgtggagtcatgtatctcaaggcagttgctggatacatcagcttactattggcctggttatatcatgaatcatgccaactctacatctcatacactccctagtcaacttgctggttggtcatccttcatgaagggtgcaccactgactcaaccactggttaatatgttggtatcaactcctgcttccagcttggcagaggtcgacaagttatttgaagttgcagttgatgggtcagatgacgacagcatttcagctgccactgttttatgtggagccacccttttacgaggttggaattttcaggaatatcggccgtggactatgctccaatcttctcgttccatggcctgattccagagctggctgcttctcttatggcaatctgtgaagtatttgggtgtctttctccaagtgtttcctggacactgagaactggagaggaaatatctgctcacacagtcttctcgaatgcatttattcttctgttgagactttggaagtttaaccatccaccacttgagtattgcataatgggagatggtgctccagttggctcgcagctaactcctgagtatcttctgctgttacggaattcccaggtcctatcttccagcagtttgtcaaaacaacgaaacggacaaaggcaatcacaagtatcaacttcacacccatcatctggaaatcctatttttatggactcgtttccaaagttgaagttatggtaccagcagcaccaagcttgtctggcctcaactctctctggacttgctcatgggacacctgtacgtaacaatgtggatagccttcttaatcagatgttcagaaaagctaataaaggaggcacatcaataggttctttatctggaagtagcagcataagtaattcttccagtcctggtggggatgattcacatctttggcctcagttgccagcttgggagatactggaggctgttccttttgtggttgatgctgctcttactgcttgttcccatggaagactatttccacgtgaactggccacaggcctgaaggatctggctgatttcctccctgcatctcttgctacaatagtaagctacttttccgctgaggtgacgcggggtgtctggaagcctgcatccatgaatggatcagattggcctagcccctctgtgaacctatccatggttgatgagcacatcaagaaaatcgtagctgctaccggtgttgatgttccaaagctagttacaggaggaagctcttcaggtacacttccgttaccattggctgctttcgtgagcctcacaatcacatacaagcttgacaaggcatcagagtgtttcctcaaccttgctggtccagctctagagaacctggctgcaagctgcccttggccaagcatggcaatcgttgcagcactgtggacccagaaggtgaagcgatggagcgatttcctaatattttcagcttcgcgcactgtgttccaccacaacaacgatgcagtcgtccagctcctccgaagttgcttcgccgctacccttggcatgtcttcgacatcagtatgcagctgtggaggtgtcgccagccttctgggccacgggtactgccctggtggtttctcgccagttgcgccaggaatcctctacctccggatattccggtgcatcaaggactgctccatactcgccgaggacatactctcccttctgatgctctcagtgaaggatatcgcagaaacaactgtgcccagacaaaggccagacaagctaaagaagaccaagtacgggatgaggcatggccaggtatctctttccgctgcaatgacgcaggtgaaggtggcggcatctctgggggcgacactcgtctggctatccggcggcacggctctcgtccagtccctgatccaggagatgctgccgtcttggttcctgtccgcgcagaacctggatcagggcggggctagcggaggcgtggtgtacaagctaggcgggcacgcgttggcctacttcgcggtgtactcggggatgttggcctggggcatcgaccagacgcccgtgtcccggcgccgcgagagggtcatgcggtcgcacctggggttcctggcgagcgcgctggccgggaagatcttcctcggctgcgacctctccctgtggcgagcctacgtctctgggttcctaggactggtggttgaatgcaccccgtgctgggtgcaggaggtggacctgagggtgctcaagcgcctgagcagcggcctccggcactggggcgaggatgagctcgcggtggcgctcctccgccgcgccggtcccgaggctatgggcacagccgcggagatgatcttgggcagggagttgtgacgccgatgcgcgcgcgcgccgcgcggcgtatgctgttcgtcagcgatgatgcagtttttgtatataatcggttaaaatctggccatgtgtatgctcacgggtaatatttgaatgattttatctgtaaaactgttaagacgttttgatctctctaatactaaccttcatctacccgtttgcaaaaaaaagaaatgatgtaccagaatgtaaaacctaggtttatgaacggacatgtttggcacagttctcatgcagcttccactgagttgat

SEQ ID NO: 26240 - DNA, 4324 bp, Zea Mays
ggcaccaccacgccacttggtgtgggaccacacgtacctccaggatccgctgcggccagtggtagcctggcgactccattttctcttggttggaaagctcggtcacgcagaagatcctgaagcggcggccccaccgcgaggtggtgcggtgggggactggggggagaggtggttacaccaacgggacgccatcagcatcatcggcgatcggaccaccaccaaaccaacccagcagcacagcacctgcagggctgcagcagacaccactccagcagcctctctctctctctctcctcaccggcacggcactccacgcggcggcaggagcacccaccgccactgacgggcgggggggaacacgcgcggccatggccacgtcggcgccgccaccgtcctccgcgccgtggctggagtgggccgcggagtataccaaggcggcgcaggccgaggcccgcccgccgccggagtgggcggcgcgggtggcggcggccgctgcggcggcgggcgagagtgaggacgtgccctggtccgcggggctcgcggaggtgctggcgcgagcgctgttccccggcggcggcggcggcggtggcggggctgccccggcggccgccgcttggaagtacgcggaggccgcgctcgcggcgcggcttgcgtccccggcgctcctcctcgcgctcctctccaccagggtaattcctcaccggctttccaggccaatggagtatagactctaccttgagctcttgaaaagacatgggttcaacttccatcatcagatgaaagcagcaaatttcagaaagatcatggatataatagagcggaatcttagactttccaagatatttggcatctctacatgtgaaccaggggtttttgttgtgcatttcattctttgtattatatggcagttgattgatgttgttctggatgatgagggcctactagagttaactccagagaagaatgctcaatggccaacaaggcctgaagatgtgagcacatttgaaggaacttttactgaacaaagaactgagaagatcaaaaagttacagaagatgaacactgtaacaactatggagctcattgagcatcttcttcgcgataaagtaattactcgtatcctatcattggcacgcgaaaacatgtttggtcaaggctcttcaagcagtcaataggtcgacttggcatgatgctttcttggccctctgggtagcttcacttcgccttgtacaaagagaaagagaaccaattgaaggtcctgtacctcacctagacacccggctgtgcatgttgttgtctatcacaacacttgcgattgctgacataattatggaagcagattcactttgcaatgaaacagaactcaacagtcatgtgaatgagaagaaagcaattggtaatctacgcaatgaattgatgctaagcttacagatacttggtgattatgaaagcttgctggttcctccttcatgtgtcatcccagcagctaatcaagctgctactaaagctgcaatgttcatttctggaatcagtataaacaatggctacatggataatgtcaatgggatgaactatactggaaatatgcgacatttgattgtggagtcatgtatctcaaggcagttgctggatacatcagcttactattggcctggttatatcatgaatcatgccaactctacatctcatacactccctagtcaacttgctggttggtcatccttcatgaagggtgcaccactgactcaaccactggttaatatgttggtatcaactcctgcttccagcttggcagaggtcgacaagttatttgaagttgcagttgatgggtcagatgacgacagcatttcagctgccactgttttatgtggagccacccttttacgaggttggaattttcaggagcatacagttcggttagttgttaaactgctctcaccatctgatccaattgataattctggaagagagagccaattgataaagcttggtccaatgctcaatgttattctttcaggaatatcggccgtggactatgctccaatcttctcgttccatggcctgattccagagctggctgcttctcttatggcaatctgtgaagtatttgggtgtctttctccaagtgtttcctggacactgagaactggagaggaaatatctgctcacacagtcttctcgaatgcatttattcttctgttgagactttggaagtttaaccatccaccacttgagtattgcataatgggagatggtgctccagttggctcgcagctaactcctgagtatcttctgctgttacggaattcccaggtcctatcttccagcagtttgtcaaaacaacgaaacggacaaaggcaatcacaagtatcaacttcacacccatcatctggaaatcctatttttatggactcgtttccaaagttgaagttatggtaccagcagcaccaagcttgtctggcctcaactctctctggacttgctcatgggacacctgtacgtaacaatgtggatagccttcttaatcagatgttcagaaaagctaataaaggaggcacatcaataggttctttatctggaagtagcagcataagtaattcttccagtcctggtggggatgattcacatctttggcctcagttgccagcttgggagatactggaggctgttccttttgtggttgatgctgctcttactgcttgttcccatggaagactatttccacgtgaactggccacaggcctgaaggatctggctgatttcctccctgcatctcttgctacaatagtaagctacttttccgctgaggtgacgcggggtgtctggaagcctgcatccatgaatggatcagattggcctagcccctctgtgaacctatccatggttgatgagcacatcaagaaaatcgtagctgctaccggtgttgatgttccaaagctagttacaggaggaagctcttcaggtacacttccgttaccattggctgctttcgtgagcctcacaatcacatacaagcttgacaaggcatcagagtgtttcctcaaccttgctggtccagctctagagaacctggctgcaagctgcccttggccaagcatggcaatcgttgcagcactgtggacccagaaggtgaagcgatggagcgatttcctaatattttcagcttcgcgcactgtgttccaccacaacaacgatgcagtcgtccagctcctccgaagttgcttcgccgctacccttggcatgtcttcgacatcagtatgcagctgtggaggtgtcgccagccttctgggccacgggtactgccctggtggtttctcgccagttgcgccaggaatcctctacctccggatattccggtgcatcaaggactgctccatactcgccgaggacatactctcccttctgatgctctcagtgaaggatatcgcagaaacaactgtgcccagacaaaggccagacaagctaaagaagaccaagtacgggatgaggcatggccaggtatctctttccgctgcaatgacgcaggtgaaggtggcggcatctctgggggcgacactcgtctggctatccggcggcacggctctcgtccagtccctgatccaggagatgctgccgtcttggttcctgtccgcgcagaacctggatcagggcggggctagcggaggcgtggtgtacaagctaggcgggcacgcgttggcctacttcgcggtgtactcggggatgttggcctggggcatcgaccagacgcccgtgtcccggcgccgcgagagggtcatgcggtcgcacctggggttcctggcgagcgcgctggccgggaagatcttcctcggctgcgacctctccctgtggcgagcctacgtctctgggttcctaggactggtggttgaatgcaccccgtgctgggtgcaggaggtggacctgagggtgctcaagcgcctgagcagcggcctccggcactggggcgaggatgagctcgcggtggcgctcctccgccgcgccggtcccgaggctatgggcacagccgcggagatgatcttgggcagggagttgtgacgccgatgcgcgcgcgcgccgcgcggcgtatgctgttcgtcagcgatgatgcagtttttgtatataatcggttaaaatctggccatgtgtatgctcacgggtaatatttgaatgattttatctgtaaaactgttaagacgttttgatctctctaatactaaccttcatctacccgtttgcaaaaaaaagaaatgatgtaccagaatgtaaaacctaggtttatgaacggacatgtttggcacagttctcatgcagcttccactgagttgat

SEQ ID NO: 26241 - DNA, 1412 bp, Zea Mays
ctttttgctccccttccctccctcccaacgcagcgcagcgactgctgctgcttccccacaccgccccccggtaggctcaccgccggcgacgcgcacgcgtcccaccgcacccaaaccgaccgccggaagggaaaggcaaggggaagggcgggggcgcgtcgcctgagaagggcagctctggggcgccctccggtgaggacgactccaggagtgacagcggcagcgatgagtcgtcagagacgagagatgatgacactgaccataagggttcatctgcgcccaagaaaaggaaatctggtaacacgtcggctgaaggtgaaccgtctcaagctgctgttgtgcgctatgctacggttgagtcgccatatcccgcaaagggaaggtctgcctcaaagcttccagtgtctgcacctggcagggcagcgcttcctagtgccaccccgaatctgaacattgggatggacatttggaatacttctcctgccttggctgttcctgcagtgcagggggaagcgaatcctgggttggcgcttgcccgacgtgatagcgttactcaactggatgaacgtgaattgaagagggagaggcggaaacaatctaacagggagtctgcaaggagatctaggttacgcaagcagcaagagtgtgaggaattagccaggaaggtagctgacctaacaactgagaatagtgctctcagagcggaacttgacaacctgaggaaggcttgccaagacatggaagcagaaaattcacgtctattggtaccaagtgtcacaaccacactgggaatgagcatcgagccgccaaaggcgcagcagcatcatgacgacgagggccagctccacaagaaatctagtaataacagcaacgggaaaggaagccacaaaccggaggctaacactaggtgagagacaggtgaatgagaaagtgacagagatgagatgaggtgtttcctatctaaccacaacacccatcatcaaccagtgcgttttcacagcccgctggggggccatgtagagtcgccccccactgcagccatgtattatttatggctcgccgcggtgtgcgttgtgtgtttttttgtgtgtgtgtcgtgtaaacctattgatgtagctattgtaacaaaaacctagagagcctagaatttttatgtctgctaactcctgatgaggggggatgtaaccggccaatttggtgcctggtcgatcgtttagatgaaatgcgagcaaatatcatttgatagcctgcctcgccttgttgttgttttggattttttttgcgactttgcgggagtcttttatacaggctattgaattttcgatggtgcttttggatgttgtggtggattaatgtagtggcacgaccagatttagaccaacactgctggaagcttcaaagttgttaatttt

SEQ ID NO: 26242 - DNA, 1909 bp, Zea Mays
ctttttgctccccttccctccctcccaacgcagcgcagcgactgctgctgcttccccacaccgccccccggtaggctcaccgccggcgacgcgcacgcgtcccaccgcacccaaaccgaccgccacagctgctcgctcgcttccgcccaggaccagagggggggagcctccagatctcggcgcgccatggcgtcgtcctccgacgagcagcccaagccgccggagccgcccgccgccgccgtggtcgccgcaccgccgcagacgcacgccgagtgggccgcctcgctccaggcctactacgccgccgcggggcacccctacgcctggccggcgcagcacctcatggcggcggccgcggcgggggcgcccttcggcacgccggtgccgttccccgtctaccacccaggcgccgccgcggcatactacgcgcacgcgtccatggccgcgggcgtcccttacccgacgagcgaagctgtcgccacggtggcggcggccactgcgccggaagggaaaggcaaggggaagggcgggggcgcgtcgcctgagaagggcagctctggggcgccctccggtgaggacgactccaggagcagtgacagcggcagcgatgagtcgtcagagacgagagatgatgacactgaccataaggtaccaatcaacttgctgtgccacaaggggccatttttaaattgcatgttttttcctgtaattagctggctttctgtggttcatgtttgttctcctcagggttcatctgcgcccaagaaaaggaaatctggtaacacgtcggctgaaggtgaaccgtctcaagctgctgttgtgcgctatgctacggttgagtcgccatatcccgcaaagggaaggtctgcctcaaagcttccagtgtctgcacctggcagggcagcgcttcctagtgccaccccgaatctgaacattgggatggacatttggaatacttctcctgccttggctgttcctgcagtgcagggggaagcgaatcctgggttggcgcttgcccgacgtgatagcgttactcaactgttccttatttcttcaggatgaacgtgaattgaagagggagaggcggaaacaatctaacagggagtctgcaaggagatctaggttacgcaagcagcaagagtgtgaggaattagccaggaaggtagctgacctaacaactgagaatagtgctctcagagcggaacttgacaacctgaggaaggcttgccaagacatggaagcagaaaattcacgtctattggtaccaagtgtcacaaccacactgggaatgagcatcgagccgccaaaggcgcagcagcatcatgacgacgagggccagctccacaagaaatctagtaataacagcaacgggaaaggaagccacaaaccggaggctaacactaggtgagagacaggtgaatgagaaagtgacagagatgagatgaggtgtttcctatctaaccacaacacccatcatcaaccagtgcgttttcacagcccgctggggggccatgtagagtcgccccccactgcagccatgtattatttatggctcgccgcggtgtgcgttgtgtgtttttttgtgtgtgtgtcgtgtaaacctattgatgtagctattgtaacaaaaacctagagagcctagaatttttatgtctgctaactcctgatgaggggggatgtaaccggccaatttggtgcctggtcgatcgtttagatgaaatgcgagcaaatatcatttgatagcctgcctcgccttgttgttgttttggattttttttgcgactttgcgggagtcttttatacaggctattgaattttcgatggtgcttttggatgttgtggtggattaatgtagtggcacgaccagatttagaccaacactgctggaagcttcaaagttgttaatttt

SEQ ID NO: 26243 - DNA, 1791 bp, Zea Mays
ctttttgctccccttccctccctcccaacgcagcgcagcgactgctgctgcttccccacaccgccccccggtaggctcaccgccggcgacgcgcacgcgtcccaccgcacccaaaccgaccgccacagctgctcgctcgcttccgcccaggaccagagggggggagcctccagatctcggcgcgccatggcgtcgtcctccgacgagcagcccaagccgccggagccgcccgccgccgccgtggtcgccgcaccgccgcagacgcacgccgagtgggccgcctcgctccaggcctactacgccgccgcggggcacccctacgcctggccggcgcagcacctcatggcggcggccgcggcgggggcgcccttcggcacgccggtgccgttccccgtctaccacccaggcgccgccgcggcatactacgcgcacgcgtccatggccgcgggcgtcccttacccgacgagcgaagctgtcgccacggtggcggcggccactgcgccggaagggaaaggcaaggggaagggcgggggcgcgtcgcctgagaagggcagctctggggcgccctccggtgaggacgactccaggagtgacagcggcagcgatgagtcgtcagagacgagagatgatgacactgaccataagggttcatctgcgcccaagaaaaggaaatctggtaacacgtcggctgaaggtgaaccgtctcaagctgctgttgtgcgctatgctacggttgagtcgccatatcccgcaaagggaaggtctgcctcaaagcttccagtgtctgcacctggcagggcagcgcttcctagtgccaccccgaatctgaacattgggatggacatttggaatacttctcctgccttggctgttcctgcagtgcagggggaagcgaatcctgggttggcgcttgcccgacgtgatagcgttactcaactggatgaacgtgaattgaagagggagaggcggaaacaatctaacagggagtctgcaaggagatctaggttacgcaagcagcaagagtgtgaggaattagccaggaaggtagctgacctaacaactgagaatagtgctctcagagcggaacttgacaacctgaggaaggcttgccaagacatggaagcagaaaattcacgtctattggtaccaagtgtcacaaccacactgggaatgagcatcgagccgccaaaggcgcagcagcatcatgacgacgagggccagctccacaagaaatctagtaataacagcaacgggaaaggaagccacaaaccggaggctaacactaggtgagagacaggtgaatgagaaagtgacagagatgagatgaggtgtttcctatctaaccacaacacccatcatcaaccagtgcgttttcacagcccgctggggggccatgtagagtcgccccccactgcagccatgtattatttatggctcgccgcggtgtgcgttgtgtgtttttttgtgtgtgtgtcgtgtaaacctattgatgtagctattgtaacaaaaacctagagagcctagaatttttatgtctgctaactcctgatgaggggggatgtaaccggccaatttggtgcctggtcgatcgtttagatgaaatgcgagcaaatatcatttgatagcctgcctcgccttgttgttgttttggattttttttgcgactttgcgggagtcttttatacaggctattgaattttcgatggtgcttttggatgttgtggtggattaatgtagtggcacgaccagatttagaccaacactgctggaagcttcaaagttgttaatttt

SEQ ID NO: 26244 - DNA, 1794 bp, Zea Mays
ctttttgctccccttccctccctcccaacgcagcgcagcgactgctgctgcttccccacaccgccccccggtaggctcaccgccggcgacgcgcacgcgtcccaccgcacccaaaccgaccgccacagctgctcgctcgcttccgcccaggaccagagggggggagcctccagatctcggcgcgccatggcgtcgtcctccgacgagcagcccaagccgccggagccgcccgccgccgccgtggtcgccgcaccgccgcagacgcacgccgagtgggccgcctcgctccaggcctactacgccgccgcggggcacccctacgcctggccggcgcagcacctcatggcggcggccgcggcgggggcgcccttcggcacgccggtgccgttccccgtctaccacccaggcgccgccgcggcatactacgcgcacgcgtccatggccgcgggcgtcccttacccgacgagcgaagctgtcgccacggtggcggcggccactgcgccggaagggaaaggcaaggggaagggcgggggcgcgtcgcctgagaagggcagctctggggcgccctccggtgaggacgactccaggagcagtgacagcggcagcgatgagtcgtcagagacgagagatgatgacactgaccataagggttcatctgcgcccaagaaaaggaaatctggtaacacgtcggctgaaggtgaaccgtctcaagctgctgttgtgcgctatgctacggttgagtcgccatatcccgcaaagggaaggtctgcctcaaagcttccagtgtctgcacctggcagggcagcgcttcctagtgccaccccgaatctgaacattgggatggacatttggaatacttctcctgccttggctgttcctgcagtgcagggggaagcgaatcctgggttggcgcttgcccgacgtgatagcgttactcaactggatgaacgtgaattgaagagggagaggcggaaacaatctaacagggagtctgcaaggagatctaggttacgcaagcagcaagagtgtgaggaattagccaggaaggtagctgacctaacaactgagaatagtgctctcagagcggaacttgacaacctgaggaaggcttgccaagacatggaagcagaaaattcacgtctattggtaccaagtgtcacaaccacactgggaatgagcatcgagccgccaaaggcgcagcagcatcatgacgacgagggccagctccacaagaaatctagtaataacagcaacgggaaaggaagccacaaaccggaggctaacactaggtgagagacaggtgaatgagaaagtgacagagatgagatgaggtgtttcctatctaaccacaacacccatcatcaaccagtgcgttttcacagcccgctggggggccatgtagagtcgccccccactgcagccatgtattatttatggctcgccgcggtgtgcgttgtgtgtttttttgtgtgtgtgtcgtgtaaacctattgatgtagctattgtaacaaaaacctagagagcctagaatttttatgtctgctaactcctgatgaggggggatgtaaccggccaatttggtgcctggtcgatcgtttagatgaaatgcgagcaaatatcatttgatagcctgcctcgccttgttgttgttttggattttttttgcgactttgcgggagtcttttatacaggctattgaattttcgatggtgcttttggatgttgtggtggattaatgtagtggcacgaccagatttagaccaacactgctggaagcttcaaagttgttaatttt

SEQ ID NO: 26245 - DNA, 1457 bp, Zea Mays
ccctagcaagcaggcgcctttttgctccccttccctccctcccaacgcagcgcagcgactgctgctgcttccccacaccgccccccggtaggctcaccgccggcgacgcgcacgcgtcccaccgcacccaaaccgaccgccggaagggaaaggcaaggggaagggcgggggcgcgtcgcctgagaagggcagctctggggcgccctccggtgaggacgactccaggagcagtgacagcggcagcgatgagtcgtcagagacgagagatgatgacactgaccataagggttcatctgcgcccaagaaaaggaaatctggtaacacgtcggctgaaggtgaaccgtctcaagctgctgttgtgcgctatgctacggttgagtcgccatatcccgcaaagggaaggtctgcctcaaagcttccagtgtctgcacctggcagggcagcgcttcctagtgccaccccgaatctgaacattgggatggacatttggaatacttctcctgccttggctgttcctgcagtgcagggggaagcgaatcctgggttggcgcttgcccgacgtgatagcgttactcaactgttccttatttcttcaggatgaacgtgaattgaagagggagaggcggaaacaatctaacagggagtctgcaaggagatctaggttacgcaagcagcaagagtgtgaggaattagccaggaaggtagctgacctaacaactgagaatagtgctctcagagcggaacttgacaacctgaggaaggcttgccaagacatggaagcagaaaattcacgtctattggtgagcacggtaccaagtgtcacaaccacactgggaatgagcatcgagccgccaaaggcgcagcagcatcatgacgacgagggccagctccacaagaaatctagtaataacagcaacgggaaaggaagccacaaaccggaggctaacactaggtgagagacaggtgaatgagaaagtgacagagatgagatgaggtgtttcctatctaaccacaacacccatcatcaaccagtgcgttttcacagcccgctggggggccatgtagagtcgccccccactgcagccatgtattatttatggctcgccgcggtgtgcgttgtgtgtttttttgtgtgtgtgtcgtgtaaacctattgatgtagctattgtaacaaaaacctagagagcctagaatttttatgtctgctaactcctgatgaggggggatgtaaccggccaatttggtgcctggtcgatcgtttagatgaaatgcgagcaaatatcatttgatagcctgcctcgccttgttgttgttttggattttttttgcgactttgcgggagtcttttatacaggctattgaattttcgatggtgcttttggatgttgtggtggattaatgtagtggcacgaccagatttagaccaacactgctggaagcttcaaagttgttaatttt

SEQ ID NO: 26246 - DNA, 1494 bp, Zea Mays
agccgagtcgctgcgcgcacatggggaagcgtacacggggacgggaggacaccgaaccctagcaagcaggcgcctttttgctccccttccctccctcccaacgcagcgcagcgactgctgctgcttccccacaccgccccccggtaggctcaccgccggcgacgcgcacgcgtcccaccgcacccaaaccgaccgccggaagggaaaggcaaggggaagggcgggggcgcgtcgcctgagaagggcagctctggggcgccctccggtgaggacgactccaggagtgacagcggcagcgatgagtcgtcagagacgagagatgatgacactgaccataagggttcatctgcgcccaagaaaaggaaatctggtaacacgtcggctgaaggtgaaccgtctcaagctgctgttgtgcgctatgctacggttgagtcgccatatcccgcaaagggaaggtctgcctcaaagcttccagtgtctgcacctggcagggcagcgcttcctagtgccaccccgaatctgaacattgggatggacatttggaatacttctcctgccttggctgttcctgcagtgcagggggaagcgaatcctgggttggcgcttgcccgacgtgatagcgttactcaactggatgaacgtgaattgaagagggagaggcggaaacaatctaacagggagtctgcaaggagatctaggttacgcaagcagcaagagtgtgaggaattagccaggaaggtagctgacctaacaactgagaatagtgctctcagagcggaacttgacaacctgaggaaggcttgccaagacatggaagcagaaaattcacgtctattggtgagcacggtaccaagtgtcacaaccacactgggaatgagcatcgagccgccaaaggcgcagcagcatcatgacgacgagggccagctccacaagaaatctagtaataacagcaacgggaaaggaagccacaaaccggaggctaacactaggtgagagacaggtgaatgagaaagtgacagagatgagatgaggtgtttcctatctaaccacaacacccatcatcaaccagtgcgttttcacagcccgctggggggccatgtagagtcgccccccactgcagccatgtattatttatggctcgccgcggtgtgcgttgtgtgtttttttgtgtgtgtgtcgtgtaaacctattgatgtagctattgtaacaaaaacctagagagcctagaatttttatgtctgctaactcctgatgaggggggatgtaaccggccaatttggtgcctggtcgatcgtttagatgaaatgcgagcaaatatcatttgatagcctgcctcgccttgttgttgttttggattttttttgcgactttgcgggagtcttttatacaggctattgaattttcgatggtgcttttggatgttgtggtggattaatgtagtggcacgaccagatttagaccaacactgctggaagcttcaaagttgttaatttt

SEQ ID NO: 26247 - DNA, 1375 bp, Zea Mays
atgcaacaaggctcacctgaaaattgaccgtggtcagtttgttctagttgaaagcagcggaccttaggggttttggtggatcagtggaccagaacgcagtccttgaatttattgatgctgggcttgatatgatcctggcggcagattcctctgcctctgatcttattcgtggcattgcgacagagtgtggggttgattttgatgaggatccagaggcaatggttattgaccacattaactatgccgctatggatgttgaaggcgatcacaccttgattgttggtgatgatcttattcagtcagatgtcatactggggtctaaaaagattgaggctcctgtattatttcgtggaattggacacacggctaatccatcaaacagtttggttctgaaagtcctatctgcctctccatcagcatactcagctaacccaaagactaagttatcgttgcctccatcgcttactgggtcagctatatcactggtttcggttatgcaggcaagaaataatgctcgggtgctgctatctggatcacttgatctttttagcaaccggttcctgaagtctggtgttcaaaaggctggtagcaaaacgagatacgagagagctggaaatgagcaatttgtgacagagacaagcaaatgggtcttccatgagagggggcaccttaaggctgttaatgttaagcaccacaaggttggggagaccaatgaaccaggcatgtaccgcattaacgatgacctggaatactctgttgagatctatgaatggtctggaacaagctggaagccatatgttgctgatgatgtgcaactccagtttttcatgatgagtccttatgttctgaaaactatgtcgaatgacaacaagggtttatactcaacatccttcaaagttcctgatgtctacggagttttccagttcaaagttgagtaccagaggctgggatatactggtttgtcttttacaaagcagattccagtgcgcccttacaggcataacgagtatgagaggttcataacatcagcgtacccatactacactgcctcattttcaacggactcacgggagcgcacaagtttctggaggctgctgatgcgacctagatctgtggccaagtgttacccggtgcaattttatggaatcatatatttgtagtaggccaacttagctagaattagacgaccgtgaccgcaatcatgggaaatttactcgtgctagtaggatgttcgatctgccccacaaattttttttgttcggatccttctgatcagcacttgtgaaaacgtttacagtctgtagcattgaaaggatgacgaagcatgtagtgattttgaaactactgctcttgctcagttcttcctcgttgcacg

SEQ ID NO: 26248 - DNA, 1425 bp, Zea Mays
atgcaacaaggctcacctgaaaattgaccgtggtcagtttgttctagttgaaagcagcggaccttaggggttttggtggatcagtggaccagaacgcagtccttgaatttattgatgctgggcttgatatgatcctggcggcagattcctctgcctctgatcttattcgtggcattgcgacagagtgtggggttgattttgatgaggatccagaggcaatggttattgaccacattaactatgccgctatggatgttgaaggcgatcacaccttgattgttggtgatgatcttattcagtcagatgtcatactggggtctaaaaagattgaggctcctgtattatttcgtggaattggacacacggctaatccatcaaacagtttggttctgaaagtcctatctgcctctccatcagcatactcagctaacccaaagactaagttatcgttgcctccatcgcttactgggtcagctatatcactggtttcggttatgcaggcaagaaataatgctcgggtgctgctatctggatcacttgatctttttagcaaccggttcctgaagtctggtgttcaaaaggctggtagcaaaacgagatacgagagagctggaaatgagcaatttgtgacagagacaagcaaatgggtcttccatgagagggggcaccttaaggctgttaatgttaagcaccacaaggttggggagaccaatgaaccaggcatgtaccgcattaacgatgacctggaatactctgttgagatctatgaatggtctggaacaagctggaagccatatgttgctgatgatgtgcaactccagtttttcatgatgagtccttatgttctgaaaactatgtcgaatgacaacaagggtttatactcaacatccttcaaagttcctgatgtctacggagttttccagttcaaagttgagtaccagaggctgggatatactggtttgtcttttacaaagcagattccagtgcgcccttacaggcataacgagtatgagaggttcataacatcagcgtacccatactacactgcctcattttcaacgatgtgtgctttcttcatattctcgcttgtgtacctgtaccacaaataaaggactcacgggagcgcacaagtttctggaggctgctgatgcgacctagatctgtggccaagtgttacccggtgcaattttatggaatcatatatttgtagtaggccaacttagctagaattagacgaccgtgaccgcaatcatgggaaatttactcgtgctagtaggatgttcgatctgccccacaaattttttttgttcggatccttctgatcagcacttgtgaaaacgtttacagtctgtagcattgaaaggatgacgaagcatgtagtgattttgaaactactgctcttgctcagttcttcctcgttgcacg

SEQ ID NO: 26249 - DNA, 1731 bp, Zea Mays
cggggctccgagccattcgatctccaatcggacggcctagacggctcccttcctctccttgccacacttgcgctcctctccgagttgtcgtctccgtcgctgctggctgctgcgccactcccccagccccgagatctgctcaacaatggcgacgcggcgccacatcctcctcctcgccgctgccttcgtgtcccttctcgcgctcgaggctgtggagggcctcgaagaggggccccgcgggcgccggctgctggtcctgctggacgacctggccgtgcggtcgtcgcactcggccttcttcggctcgctccaggcgcgcgggttcgatctcgaattccgcctcgccgacgaccccaagctctcgctgcaccgctacggccagtacctctacgatggcctcgtgctgttcgccccctccaccccacgttttggtggatcagtggaccagaacgcagtccttgaatttattgatgctgggcttgatatgatcctggcggcagattcctctgcctctgatcttattcgtggcattgcgacagagtgtggggttgattttgatgaggatccagaggcaatggttattgaccacattaactatgccgctatggatgttgaaggcgatcacaccttgattgttggtgatgatcttattcagtcagatgtcatactggggtctaaaaagattgaggctcctgtattatttcgtggaattggacacacggctaatccatcaaacagtttggttctgaaagtcctatctgcctctccatcagcatactcagctaacccaaagactaagttatcgttgcctccatcgcttactgggtcagctatatcactggtttcggttatgcaggcaagaaataatgctcgggtgctgctatctggatcacttgatctttttagcaaccggttcctgaagtctggtgttcaaaaggctggtagcaaaacgagatacgagagagctggaaatgagcaatttgtgacagagacaagcaaatgggtcttccatgagagggggcaccttaaggctgttaatgttaagcaccacaaggttggggagaccaatgaaccaggcatgtaccgcattaacgatgacctggaatactctgttgagatctatgaatggtctggaacaagctggaagccatatgttgctgatgatgtgcaactccagtttttcatgatgagtccttatgttctgaaaactatgtcgaatgacaacaagggtttatactcaacatccttcaaagttcctgatgtctacggagttttccagttcaaagttgagtaccagaggctgggatatactggtttgtcttttacaaagcagattccagtgcgcccttacaggcataacgagtatgagaggttcataacatcagcgtacccatactacactgcctcattttcaacggactcacgggagcgcacaagtttctggaggctgctgatgcgacctagatctgtggccaagtgttacccggtgcaattttatggaatcatatatttgtagtaggccaacttagctagaattagacgaccgtgaccgcaatcatgggaaatttactcgtgctagtaggatgttcgatctgccccacaaattttttttgttcggatccttctgatcagcacttgtgaaaacgtttacagtctgtagcattgaaaggatgacgaagcatgtagtgattttgaaactactgctcttgctcagttcttcctcgttgcacg

SEQ ID NO: 26250 - DNA, 881 bp, Zea Mays
gcgtgacatggcatgccatggtggggctcctgtttatccgtgtaagagtcattagcgtggtcgaatatgttaattttaaaaattaaaatgttataaactagttttaaattttatttgtaaacagtttaaaaaaattaaaaatatcctgtgcaggtggaggcgtggagccaccgagccacgttgtatacgcggatcacggatcaccgtcctcctcgcccgctcattgcttgcctccagtctccagagaacgcgatttgttctgttgttcggtccccaatcttcgcctccgctccgcccgccccgacccagatcaggagctgagagatggacgccaacaggcgccaaggtgggattcagcagttgctggctgcggagcaggaggctcagcaaattgtgaatgcggctagagctgctaagtcagcaaggcttaggcaagcgaaagaggaggcagagagggaaatagccgaataccgtgcccagatggaggctgagttccagaggaaggtcgcagagagcagtggtgactctggtgcgaacgtcaagcgtctcgaggaagagacaacggcgaaaatcgaacagctcaaccagcaggctgcaagcatctccccagatgtcattcagatgcttctgaggcatgtcaccaccgtgaagaactgagaagtgctgctcccaaactatgctcatcggtctatttatttttgtcagagcagatctgcaaattcatcatggagtgaaagccgctcgacatggaaattcatggtgttgctttttttttatgtgcaaactgtgagttgttttggaaaagagaacaagaaaaatggttatgttcttggtgaactagaaactccgaagaaaaatggttatgttcttggtcaacgagt

SEQ ID NO: 26251 - DNA, 1093 bp, Zea Mays
gcgtgacatggcatgccatggtggggctcctgtttatccgtgtaagagtcattagcgtggtcgaatatgttaattttaaaaattaaaatgttataaactagttttaaattttatttgtaaacagtttaaaaaaattaaaaatatcctgtgcaggtggaggcgtggagccaccgagccacgttgtatacgcggatcacggatcaccgtcctcctcgcccgctcattgcttgcctccagtctccagagaacgcgatttgttctgttgttcggtccccaatcttcgcctccgctccgcccgccccgacccagatcaggagctgagagatggacgccaacaggcgccaaggtgggattcagcagttgctggctgcggagcaggaggctcagcaaattgtgaatgcggctagagctgctaagtcagcaaggcttaggcaagcgaaagaggaggcagagagggaaatagccgaataccgtgcccagatggaggctgagttccagaggaaggtcgcagagtggtgactctggtgcgaacgtcaagcgtctcgaggaagagacaacggcgaaaatcgaacagctcaaccagcaggctgcaagcatctccccagatgtcattcagatgcttctgaggcatgtcaccaccgtgaagaactgagaagtgctgctcccaaactatgctcatcggtctatttatttttgtcagagcaggtgaggaataataatatggcccttgtaccagtaattctttttttaactacggaataagccgcagcagctttagcggcaaccgtgactgttactaccagaacttgccattatttggtataatcggcaaattaaataatattgttttatattggatttttgaacaaacttttttttgctgattccctacctggtgtttctgtttcatttcttgtatgagatctgcaaattcatcatggagtgaaagccgctcgacatggaaattcatggtgttgctttttttttatgtgcaaactgtgagttgttttggaaaagagaacaagaaaaatggttatgttcttggtgaactagaaactccgaagaaaaatggttatgttcttggtcaacgagt

SEQ ID NO: 26252 - DNA, 1641 bp, Zea Mays
gcccgtcttagtgagcagtttcttatgtctgatcttggttatcttcggtattttcttgggattgaggtttcctctactcctaagggttttgtatctttcagggaaaatacattcagaggcttcttgatttggcttctcttactaatcaacgcactattgagactctcatggagctcaacgtttgtcttcgtggcattgatagcgaacatcttgtggttcctactcgctatcgtcacaatgttggtagtctggtctacctttgtgttgctcgctctgatatctcgtatcttgtgcatattccgagtcagtttatatctgctcccactcagccccatgcctactgtgatgcgatttggctagtgattcttcgatcgtcggttttttttctgcccattgtgtttttcttggtggttcccttattgcttggaagactaaaaagcagttagcagtttcacgttcaagtacaaaggcatagttgcgtgctacaacttttgcgacgtcaaaggaatagttggctgatttcttcaccaaggcgcagaccagagctcaacatcgcttctctctctccaaactcgctgtcttgggccgtttacctggcactactgtgtacaggaatacattgcagtaccctgaggcttatacgtataatgggatagtagtggttcgaattgatgcaccgatctactttgccaacattagctacatcaaagacaggttgcgtgagtatgagctcaatcttccaagttcaaacaagggacttgatgttggaagggtgtattttgtgatcctcgagatgtcccctgttacatatattgattcgagtgctgttcaagctcttaaagacttgcaccaagaatacaaagcacgccatattcaggtcctttcccatagtcacatttgaaactattgcaccgagaaacttgtacaactgttttcagaagcagcatattctttactgactgcagattgccatagctaacccgaaccggcaagtgtaccttctgttgtcaagatcgggcatcattgacttggtaggagctgggtggtgctttgtgcgagtgcatgacgccgtgcaagtgtgcctacagcacgtgcagaattcatcttcaaatgcgttgaagctacccgtgcaggcatcaggcgtgttgaccgattctgtttcgactcctaaaccagagcagcagcatcaaaagcagcacggcctcttcaaggacctatggaaggcacaggacagtaacgcggatgctggtggtgaggtgcagccactgctccggcaaaaccttgtgtaatactcctacaaaatacggagtacttcctgggatggactcacgccctcgctggcctatacatatacgtgtttatttatttgtctatgttgttgttaacatggtatcgtggtgaacaaaagaaactgaacatgccattgttactgtggtgtggcgttttttgtacacttttgatacctaaatggaactcctatgatttgggtctggaaagggtgtgtgaagatgttttgttccaggttttggagttccgctcccagattggcttgacaagcatgttaattccatgaactctcttccacaaaaacagtacagctgattatcagttttatgtttagaatgagaaaatagccctggc

SEQ ID NO: 26253 - DNA, 992 bp, Zea Mays
atttgatacaattttgacatcatgctgtcttgggccgtttacctggcactactgtgtacaggaatacattgcagtaccctgaggcttatacgtataatgggatagtagtggttcgaattgatgcaccgatctactttgccaacattagctacatcaaagacaggttgcgtgagtatgagctcaatcttccaagttcaaacaagggacttgatgttggaagggtgtattttgtgatcctcgagatgtcccctgttacatatattgattcgagtgctgttcaagctcttaaagacttgcaccaagaatacaaagcacgccatattcagctaacccgaaccggcaagtgtaccttctgttgtcaagatcgggcatcattgacttggtaggagctgggtggtgctttgtgcgagtgcatgacgccgtgcaagtgtgcctacagcacgtgcagaattcatcttcaaatgcgttgaagctacccgtgcaggcatcaggcgtgttgaccgattctgtttcgactcctaaaccagagcagcagcatcaaaagcagcacggcctcttcaaggacctatggaaggcacaggacagtaacgcggatgctggtggtgaggtgcagccactgctccggcaaaaccttgtgtaatactcctacaaaatacggagtacttcctgggatggactcacgccctcgctggcctatacatatacgtgtttatttatttgtctatgttgttgttaacatggtatcgtggtgaacaaaagaaactgaacatgccattgttactgtggtgtggcgttttttgtacacttttgatacctaaatggaactcctatgatttgggtctggaaagggtgtgtgaagatgttttgttccaggttttggagttccgctcccagattggcttgacaagcatgttaattccatgaactctcttccacaaaaacagtacagctgattatcagttttatgtttagaatgagaaaatagccctggc

SEQ ID NO: 26254 - DNA, 2617 bp, Zea Mays
gccgttcacattgtggggaaacgtacggccattcccgttccccgccgcccctcgcctccgctgcacgcgatcgacgatccacagccaccacctctgcgttccccaccggagcatcttcaccaatcaccactgggctggctcccgcgttccccactggatttctgcacccagcgcttcttctgaaatttagaaggcggtggaaccgtcaaatcaaatggagggatcctcttacgcgtcaaggagctacagcgaactagctgccgcagcttccggaggtggaaggacgctgagggtaataccgctgcggcatccgctgggttctctgtcgacgtcttccacgtcgccgtggtggcgggcggtggtgggaagggctcggggcatggggccgcttgattgggcggaggcggccttgccgtgtgtggcgtggacacggaactacagatggaagcaggacctccaggccgacctcgcctcgggcatcaccgttggagtcatgcttgtgccccaggcaatgtcatatgcaaagctggctgggctgcacccaatttatgggctctacacaggctttgtcccgttatttatatatgcaatatttggctcgtcacgacaactagcagtaggtccagtggcacttgtttctcttcttgtatccaatgttcttgggggtatagttaattcatctagtaagctgtacacagaattagccatattactggcattcatggttgggatattggagtgcttgatgggactgctaaggcttggttggctcattcgtttcattagccattctgtaatatctgggttcactacagcttcagccattgttattggtttatcccagataaagtatttcttaggttacaacgtcacaagaagcagcaaaattataccactaattgagagcataattgcaggagctgatgagttctcctggcctccgtttgtgatgggatcaatttttcttgcgattcttctaattatgaaaaatacaggaaaatccaataaaagattgcattttctaagagtttctggtcctcttacggctgttgtgcttggaacaatttttgtgaaaatctttcatccaccagccatatcagtggttggtgaaataccacagggtcttcccaggttctccattcctcaaggatttgagcatctaatgtcacttgtgccaactgctgtactaatcactggtgttgctattttggaatctgttggtattgctaaagctttggcagcgaagaatgggtatgagttggactctaacaaagagttatttggtctgggaatagcaaatatctgtggttcattcttctctgcatatcctgccacaggctccttttctaggtcagcagtgaatcatgaaagtggggcaaaaactgggttatctggaatcataatgggcataatcattggtggtgctctcttatttatgaccccattatttactgatataccccagtgtgcattggctgcaattgtgatttctgctgttactggcctggtagattatgaagaggccatcttcttgtgggctattgataagaaagatttctttttatgggcaatcacatttatcacaacattagtttttggcattgagattggcgtccttgttggggttgcattctcattggcctttgtgattcatgagtcagcaaatccacatataggaatacattgcagtaccctgaggcttatacgtataatgggatagtagtggttcgaattgatgcaccgatctactttgccaacattagctacatcaaagacaggttgcgtgagtatgagctcaatcttccaagttcaaacaagggacttgatgttggaagggtgtattttgtgatcctcgagatgtcccctgttacatatattgattcgagtgctgttcaagctcttaaagacttgcaccaagaatacaaagcacgccatattcagattgccatagctaacccgaaccggcaagtgtaccttctgttgtcaagatcgggcatcattgacttggtaggagctgggtggtgctttgtgcgagtgcatgacgccgtgcaagtgtgcctacagcacgtgcagaattcatcttcaaatgcgttgaagctacccgtgcaggcatcaggcgtgttgaccgattctgtttcgactcctaaaccagagcagcagcatcaaaagcagcacggcctcttcaaggacctatggaaggcacaggacagtaacgcggatgctggtggtgaggtgcagccactgctccggcaaaaccttgtgtaatactcctacaaaatacggagtacttcctgggatggactcacgccctcgctggcctatacatatacgtgtttatttatttgtctatgttgttgttaacatggtatcgtggtgaacaaaagaaactgaacatgccattgttactgtggtgtggcgttttttgtacacttttgatacctaaatggaactcctatgatttgggtctggaaagggtgtgtgaagatgttttgttccaggttttggagttccgctcccagattggcttgacaagcatgttaattccatgaactctcttccacaaaaacagtacagctgattatcagttttatgtttagaatgagaaaatagccctggc

SEQ ID NO: 26255 - DNA, 3001 bp, Zea Mays
attttatcttctcgttgcaacgcacgggcatccacctaacagtgtatacgagtgggttgaaagctaggctataaaggttcttacaaccaataattagctatactattaaaatctacaggctctatactagtgggttgaaaggtagagatagatgagacttgctcttaagtcgtattcatgcgttgtccagccgttcacattgtggggaaacgtacggccattcccgttccccgccgcccctcgcctccgctgcacgcgatcgacgatccacagccaccacctctgcgttccccaccggagcatcttcaccaatcaccactgggctggctcccgcgttccccactggatttctgcacccagcgcttcttctgaaatttagaaggcggtggaaccgtcaaatcaaatggagggatcctcttacgcgtcaaggagctacagcgaactagctgccgcagcttccggaggtggaaggacgctgagggtaataccgctgcggcatccgctgggttctctgtcgacgtcttccacgtcgccgtggtggcgggcggtggtgggaagggctcggggcatggggccgcttgattgggcggaggcggccttgccgtgtgtggcgtggacacggaactacagatggaagcaggacctccaggccgacctcgcctcgggcatcaccgttggagtcatgcttgtgccccaggcaatgtcatatgcaaagctggctgggctgcacccaatttatgggctctacacaggctttgtcccgttatttatatatgcaatatttggctcgtcacgacaactagcagtaggtccagtggcacttgtttctcttcttgtatccaatgttcttgggggtatagttaattcatctagtaagctgtacacagaattagccatattactggcattcatggttgggatattggagtgcttgatgggactgctaaggcttggttggctcattcgtttcattagccattctgtaatatctgggttcactacagcttcagccattgttattggtttatcccagataaagtatttcttaggttacaacgtcacaagaagcagcaaaattataccactaattgagagcataattgcaggagctgatgagttctcctggcctccgtttgtgatgggatcaatttttcttgcgattcttctaattatgaaaaatacaggaaaatccaataaaagattgcattttctaagagtttctggtcctcttacggctgttgtgcttggaacaatttttgtgaaaatctttcatccaccagccatatcagtggttggtgaaataccacagggtcttcccaggttctccattcctcaaggatttgagcatctaatgtcacttgtgccaactgctgtactaatcactggtgttgctattttggaatctgttggtattgctaaagctttggcagcgaagaatgggtatgagttggactctaacaaagagttatttggtctgggaatagcaaatatctgtggttcattcttctctgcatatcctgccacaggctccttttctaggtcagcagtgaatcatgaaagtggggcaaaaactgggttatctggaatcataatgggcataatcattggtggtgctctcttatttatgaccccattatttactgatataccccagtgtgcattggctgcaattgtgatttctgctgttactggcctggtagattatgaagaggccatcttcttgtgggctattgataagaaagatttctttttatgggcaatcacatttatcacaacattagtttttggcattgagattggcgtccttgttggggttgcattctcattggcctttgtgattcatgagtcagcaaatccacatataggaatagttggctgatttcttcaccaaggcgcagaccagagctcaacatcgcttctctctctccaaactcgctgtcttgggccgtttacctggcactactgtgtacaggaatacattgcagtaccctgaggcttatacgtataatgggatagtagtggttcgaattgatgcaccgatctactttgccaacattagctacatcaaagacaggttgcgtgagtatgagctcaatcttccaagttcaaacaagggacttgatgttggaagggtgtattttgtgatcctcgagatgtcccctgttacatatattgattcgagtgctgttcaagctcttaaagacttgcaccaagaatacaaagcacgccatattcaggtcctttcccatagtcacatttgaaactattgcaccgagaaacttgtacaactgttttcagaagcagcatattctttactgactgcagattgccatagctaacccgaaccggcaagtgtaccttctgttgtcaagatcgggcatcattgacttggtaggagctgggtggtgctttgtgcgagtgcatgacgccgtgcaagtgtgcctacagcacgtgcagaattcatcttcaaatgcgttgaagctacccgtgcaggcatcaggcgtgttgaccgattctgtttcgactcctaaaccagagcagcagcatcaaaagcagcacggcctcttcaaggacctatggaaggcacaggacagtaacgcggatgctggtggtgaggtgcagccactgctccggcaaaaccttgtgtaatactcctacaaaatacggagtacttcctgggatggactcacgccctcgctggcctatacatatacgtgtttatttatttgtctatgttgttgttaacatggtatcgtggtgaacaaaagaaactgaacatgccattgttactgtggtgtggcgttttttgtacacttttgatacctaaatggaactcctatgatttgggtctggaaagggtgtgtgaagatgttttgttccaggttttggagttccgctcccagattggcttgacaagcatgttaattccatgaactctcttccacaaaaacagtacagctgattatcagttttatgtttagaatgagaaaatagccctggc

SEQ ID NO: 26256 - DNA, 1110 bp, Zea Mays
ctgaatttatcaatagacatctctgtttttctgtgtggggtttcatggtatccataatttcatatctaagcatttacaattagcaagccttctgttaatctttgctaccgtaagcatttacctaatattgttggccatactgcctaattattcagtaaaagcgtgcatgtacattatgtcttcaatttgctgctccatacatctgtgtcgacacctatattcagcctgattggaattgctagttgatgcagcgttgttgttgctgctgctgtagccaacctgcctgtaagtactatgctttgtagtacaaaatgagctcgatcaggtgaattttttgtttcaactaaataggagctacttaatcaagtaaatggggctttcggattcttgtggtgttccaagaaattataatagatttcctattttatgttacaaaacttggtatttcaaagggaacctttttcacaccaggaagtgtaaggaaaggctctattttcgatttgaaatcgtaaggacatatcttcaccccaacatgcatagtttttttatgttctaatgagaggtggaaattataatattataaaaataataactgaggtcttggaaagctaactttggcagattgctaggttgcaaattcttagatgctggattcttcttgattcttttattaatttgcccgtgtttattgcagatggatggatttgatcaaatagtgaatgtgaaggttgtaatggcaactaatagggcagatactctagatcctgctttgctgtgaccaggtagacttgacaggaaagttgagttcccttgtcccgattggcggcaaaagaggcttgtgttccaagtctatactgctaagatggatttgagtgatgaggctgatttggaagattatgtttgcagaccggataagatcagtgctactgatgttgagttggtttcatggcacataccaagatttttatgcatttgttgttttctaagtattgtattgctagggtacttatgtcctgtgctggccaaagctgtcaaaaccatgagaaaggcagagaaggtgcttcttatagcaaagccacattgttttcaagtgattatagccgagcttcg

SEQ ID NO: 26257 - DNA, 2536 bp, Zea Mays
agcaccaaccgccatccccgcccgccatctgcgcgcgtctggccgtctctctcgcccccgttctcctctctgctatccgcgcccaaatctcaccgtatgtgcgcgtctccatctgcgcgcatctccccagatccactctactcgctccaccacgccgaccccgacccgacaccggcaaccacacggatccactgtgctctccatggccatgaaagggaacgatcttgcgccgacctcaaccaggctctccatggaaggtccgcgtggttccctctcctgcatcccatgatccggatgccgccacaccatggtcgatggtcggggccgtcgaatccggatgcccgcgctctgcgtcgcgtggatcttctagatcacgcgggagctcgaccacaagtccgacggcgagaccatgaagtggctgctagtacatgcttgtcatgctctcccctccacaccccacctcggtaagacagccccccactgccagcactgatggagccacagtaatagcggatctcatccatgcctgcctttcttgttaccgtggctagcacttgattggcccgtccggttaattgttaattgttggacatgaataaccaaagcagttagaggcagatcgtgcgggtacagcgccttggctgccgagatcaatgggggcatcctcgccgtcggcaggcccaggcagcactgagttgtgctctgctgcggccgctacttccaggtactacctctagctgttttttctttctgaatcgctctacgtttcccattttgtttcttcttctcttgcccttccatttgctcgcttgattagcttgagttgtgcacgacatattgttcatttcgcttgtgcgagaggcggagctacgtctgctggttctgaatttatcaatagacatctctgtttttctgtgtggggtttcatggtatccataatttcatatctaagcatttacaattagcaagccttctgttaatctttgctaccgtaagcatttacctaatattgttggccatactgcctaattattcagtaaaagcgtgcatgtacattatgtcttcaatttgctgctccatacatctgtgtcgacacctatattcagcctgattggaattgctagttgatgcagcgttgttgttgctgctgctgtagccaacctgcctgtaagtactatgctttgtagtacaaaatgagctcgatcaggtgaattttttgtttcaactaaataggagctacttaatcaagtaaatggggctttcggattcttgtggtgttccaagaaattataatagatttcctattttatgttacaaaacttggtatttcaaagggaacctttttcacaccaggaagtgtaaggaaaggctctattttcgatttgaaatcgtaaggacatatcttcaccccaacatgcatagtttttttatgttctaatgagaggtggaaattataatattataaaaataataactgaggtcttggaaagctaactttggcagattgctaggttgcaaattcttagatgctggattcttcttgattcttttattaatttgcccgtgtttattgcagatggatggatttgatcaaatagtgaatgtgaaggttgtaatggcaactaatagggcagatactctagatcctgctttgctgtgaccaggtagacttgacaggaaagttgagttcccttgtcccgattggcggcaaaagaggcttgtgttccaagtctatactgctaagatggatttgagtgatgaggctgatttggaagattatgtttgcagaccggataagatcagtgctactgatgttgagttggtttcatggcacataccaagatttttatgcatttgttgttttctaagtattgtattgctagggtacttatgtcctgtgctggccaaagctgtcaaaaccatgagaaaggcagagaaggtgcttcttatagcaaagccacattaccaacagttggagaggaaggtgttgtgatgagcatcatcttgttctacatcatcactaatgaactggttgaacttttggttgctttggtgaatggaggcgacagcatgcagattgccatgtccggatgttatgcgggacctatgtttaatacacttgctggtttgggtacattgttgctagattgatctgggctcttgttatgctgccgagaggtgacatgtagcctaacaagatacttggagttggcctcattgctctttactcaaattttctttttattagagtaagcaatgttggtggaatattgctactacctagagttagataattatttgcttgtaaagttgggatttacatcaaagtacttgcccatggcttccatttttataaatgaaatgaagttatacagtgttgctctgttctatacggctgttcttgtatgtcaagttgtcttcacattttccgggttttgatatttttgggagaaaacaaacttgcaattatggaatttagttttatgtatgccaagttatattccgcttggctaattagagcattataaattctcac

SEQ ID NO: 26258 - DNA, 1985 bp, Zea Mays
ctcagcaccaaccgccatccccgcccgccatctgcgcgcgtctggccgtctctctcgcccccgttctcctctctgctatccgcgcccaaatctcaccgtatgtgcgcgtctccatctgcgcgcatctccccagatccactctactcgctccaccacgccgaccccgacccgacaccggcaaccacacggatccactgtgctctccatggccatgaaagggaacgatcttgcgccgacctcaaccaggctctccatggaaggtccgcgtggttccctctcctgcatcccatgatccggatgccgccacaccatggtcgatggtcggggccgtcgaatccggatgcccgcgctctgcgtcgcgtggatcttctagatcacgcgggagctcgaccacaagtccgacggcgagaccatgaagtggctgctagtacatgcttgtcatgctctcccctccacaccccacctcgaggcagatcgtgcgggtacagcgccttggctgccgagatcaatgggggcatcctcgccgtcggcaggcccaggcagcactgagttgtgctctgctgcggccgctacttccagatggatggatttgatcaaatagtgaatgtgaaggttgtaatggcaactaatagggcagatactctagatcctgctttgctgtgaccaggtagacttgacaggaaagttgagttcccttgtcccgattggcggcaaaagaggcttgtgttccaagtaagttgcccttttgtgtgaaactgtgaactaattgataggcattatatttggttcttatgaagtagcatgacttgcatatttattaatttactgaagtgttgtataatatattgcatccacatatgatgaaacttcgatggattgcttcaggtattgctattaaggtctttttcatctcatgcacataactattaagctgctcaaatttctttatttggtaattaattaaaattttcaaccatgtcatattgcatacaaattgccaactctttttgcacaaatgcacatgctcaattgcgataatgtcatatggtatgtcaaggatttgtggtcaatgcaaactaaatcgttttcttatttatatgttggcacttgattattcgtatttgtcactgtgatcattttttttctcaattgttttgctggctgctgtttcaaatcaggtctatactgctaagatggatttgagtgatgaggctgatttggaagattatgtttgcagaccggataagatcagtgctactgatgttgagttggtttcatggcacataccaagatttttatgcatttgttgttttctaagtattgtattgctagggtacttatgtcctgtgctggccaaagctgtcaaaaccatgagaaaggcagagaaggtgcttcttatagcaaagccacattaccaacagttggagaggaaggtgttgtgatgagcatcatcttgttctacatcatcactaatgaactggttgaacttttggttgctttggtgaatggaggcgacagcatgcagattgccatgtccggatgttatgcgggacctatgtttaatacacttgctggtttgggtacattgttgctagattgatctgggctcttgttatgctgccgagaggtgacatgtagcctaacaagatacttggagttggcctcattgctctttactcaaattttctttttattagagtaagcaatgttggtggaatattgctactacctagagttagataattatttgcttgtaaagttgggatttacatcaaagtacttgcccatggcttccatttttataaatgaaatgaagttatacagtgttgctctgttctatacggctgttcttgtatgtcaagttgtcttcacattttccgggttttgatatttttgggagaaaacaaacttgcaattatggaatttagttttatgtatgccaagttatattccgcttggctaattagagcattataaattctcac

SEQ ID NO: 26259 - DNA, 2034 bp, Zea Mays
gttctgcctcccactcccacccgcgacaccctccgctctgctcagcaccaaccgccatccccgcccgccatctgcgcgcgtctggccgtctctctcgcccccgttctcctctctgctatccgcgcccaaatctcaccgtatgtgcgcgtctccatctgcgcgcatctccccagatccactctactcgctccaccacgccgaccccgacccgacaccggcaaccacacggatccactgtgctctccatggccatgaaagggaacgatcttgcgccgacctcaaccaggctctccatggaaggtccgcgtggttccctctcctgcatcccatgatccggatgccgccacaccatggtcgatggtcggggccgtcgaatccggatgcccgcgctctgcgtcgcgtggatcttctagatcacgcgggagctcgaccacaagtccgacggcgagaccatgaagtggctgctagtacatgcttgtcatgctctcccctccacaccccacctcgttagaggcagatcgtgcgggtacagcgccttggctgccgagatcaatgggggcatcctcgccgtcggcaggcccaggcagcactgagttgtgctctgctgcggccgctacttccagatggatggatttgatcaaatagtgaatgtgaaggttgtaatggcaactaatagggcagatactctagatcctgctttgctgtgaccaggtagacttgacaggaaagttgagttcccttgtcccgattggcggcaaaagaggcttgtgttccaagtaagttgcccttttgtgtgaaactgtgaactaattgataggcattatatttggttcttatgaagtagcatgacttgcatatttattaatttactgaagtgttgtataatatattgcatccacatatgatgaaacttcgatggattgcttcaggtattgctattaaggtctttttcatctcatgcacataactattaagctgctcaaatttctttatttggtaattaattaaaattttcaaccatgtcatattgcatacaaattgccaactctttttgcacaaatgcacatgctcaattgcgataatgtcatatggtatgtcaaggatttgtggtcaatgcaaactaaatcgttttcttatttatatgttggcacttgattattcgtatttgtcactgtgatcattttttttctcaattgttttgctggctgctgtttcaaatcaggtctatactgctaagatggatttgagtgatgaggctgatttggaagattatgtttgcagaccggataagatcagtgctactgatgttgagttggtttcatggcacataccaagatttttatgcatttgttgttttctaagtattgtattgctagggtacttatgtcctgtgctggccaaagctgtcaaaaccatgagaaaggcagagaaggtgcttcttatagcaaagccacattggtagaccaacagttggagaggaaggtgttgtgatgagcatcatcttgttctacatcatcactaatgaactggttgaacttttggttgctttggtgaatggaggcgacagcatgcagattgccatgtccggatgttatgcgggacctatgtttaatacacttgctggtttgggtacattgttgctagattgatctgggctcttgttatgctgccgagaggtgacatgtagcctaacaagatacttggagttggcctcattgctctttactcaaattttctttttattagagtaagcaatgttggtggaatattgctactacctagagttagataattatttgcttgtaaagttgggatttacatcaaagtacttgcccatggcttccatttttataaatgaaatgaagttatacagtgttgctctgttctatacggctgttcttgtatgtcaagttgtcttcacattttccgggttttgatatttttgggagaaaacaaacttgcaattatggaatttagttttatgtatgccaagttatattccgcttggctaattagagcattataaattctcac

SEQ ID NO: 26260 - DNA, 2029 bp, Zea Mays
gttctgcctcccactcccacccgcgacaccctccgctctgctcagcaccaaccgccatccccgcccgccatctgcgcgcgtctggccgtctctctcgcccccgttctcctctctgctatccgcgcccaaatctcaccgtatgtgcgcgtctccatctgcgcgcatctccccagatccactctactcgctccaccacgccgaccccgacccgacaccggcaaccacacggatccactgtgctctccatggccatgaaagggaacgatcttgcgccgacctcaaccaggctctccatggaaggtccgcgtggttccctctcctgcatcccatgatccggatgccgccacaccatggtcgatggtcggggccgtcgaatccggatgcccgcgctctgcgtcgcgtggatcttctagatcacgcgggagctcgaccacaagtccgacggcgagaccatgaagtggctgctagtacatgcttgtcatgctctcccctccacaccccacctcgttagaggcagatcgtgcgggtacagcgccttggctgccgagatcaatgggggcatcctcgccgtcggcaggcccaggcagcactgagttgtgctctgctgcggccgctacttccagatggatggatttgatcaaatagtgaatgtgaaggttgtaatggcaactaatagggcagatactctagatcctgctttgctgtgaccaggtagacttgacaggaaagttgagttcccttgtcccgattggcggcaaaagaggcttgtgttccaagtaagttgcccttttgtgtgaaactgtgaactaattgataggcattatatttggttcttatgaagtagcatgacttgcatatttattaatttactgaagtgttgtataatatattgcatccacatatgatgaaacttcgatggattgcttcaggtattgctattaaggtctttttcatctcatgcacataactattaagctgctcaaatttctttatttggtaattaattaaaattttcaaccatgtcatattgcatacaaattgccaactctttttgcacaaatgcacatgctcaattgcgataatgtcatatggtatgtcaaggatttgtggtcaatgcaaactaaatcgttttcttatttatatgttggcacttgattattcgtatttgtcactgtgatcattttttttctcaattgttttgctggctgctgtttcaaatcaggtctatactgctaagatggatttgagtgatgaggctgatttggaagattatgtttgcagaccggataagatcagtgctactgatgttgagttggtttcatggcacataccaagatttttatgcatttgttgttttctaagtattgtattgctagggtacttatgtcctgtgctggccaaagctgtcaaaaccatgagaaaggcagagaaggtgcttcttatagcaaagccacattaccaacagttggagaggaaggtgttgtgatgagcatcatcttgttctacatcatcactaatgaactggttgaacttttggttgctttggtgaatggaggcgacagcatgcagattgccatgtccggatgttatgcgggacctatgtttaatacacttgctggtttgggtacattgttgctagattgatctgggctcttgttatgctgccgagaggtgacatgtagcctaacaagatacttggagttggcctcattgctctttactcaaattttctttttattagagtaagcaatgttggtggaatattgctactacctagagttagataattatttgcttgtaaagttgggatttacatcaaagtacttgcccatggcttccatttttataaatgaaatgaagttatacagtgttgctctgttctatacggctgttcttgtatgtcaagttgtcttcacattttccgggttttgatatttttgggagaaaacaaacttgcaattatggaatttagttttatgtatgccaagttatattccgcttggctaattagagcattataaattctcac

SEQ ID NO: 26261 - DNA, 2441 bp, Zea Mays
ggttctgcctcccactcccacccgcgacaccctccgctctgctcagcaccaaccgccatccccgcccgccatctgcgcgcgtctggccgtctctctcgcccccgttctcctctctgctatccgcgcccaaatctcaccgtatgtgcgcgtctccatctgcgcgcatctccccagatccactctactcgctccaccacgccgaccccgacccgacaccggcaaccacacggatccactgtgctctccatggccatgaaagggaacgatcttgcgccgacctcaaccaggctctccatggaaggtccgcgtggttccctctcctgcatcccatgatccggatgccgccacaccatggtcgatggtcggggccgtcgaatccggatgcccgcgctctgcgtcgcgtggatcttctagatcacgcgggagctcgaccacaagtccgacggcgagaccatgaagtggctgctagtacatgcttgtcatgctctcccctccacaccccacctcgttagaggcagatcgtgcgggtacagcgccttggctgccgagatcaatgggggcatcctcgccgtcggcaggcccaggcagcactgagttgtgctctgctgcggccgctacttccaggtactacctctagctgttttttctttctgaatcgctctacgtttcccattttgtttcttcttctcttgcccttccatttgctcgcttgattagcttgagttgtgcacgacatattgttcatttcgcttgtgcgagaggcggagctacgtctgctggttctgaatttatcaatagacatctctgtttttctgtgtggggtttcatggtatccataatttcatatctaagcatttacaattagcaagccttctgttaatctttgctaccgtaagcatttacctaatattgttggccatactgcctaattattcagtaaaagcgtgcatgtacattatgtcttcaatttgctgctccatacatctgtgtcgacacctatattcagcctgattggaattgctagttgatgcagcgttgttgttgctgctgctgtagccaacctgcctgtaagtactatgctttgtagtacaaaatgagctcgatcaggtgaattttttgtttcaactaaataggagctacttaatcaagtaaatggggctttcggattcttgtggtgttccaagaaattataatagatttcctattttatgttacaaaacttggtatttcaaagggaacctttttcacaccaggaagtgtaaggaaaggctctattttcgatttgaaatcgtaaggacatatcttcaccccaacatgcatagtttttttatgttctaatgagaggtggaaattataatattataaaaataataactgaggtcttggaaagctaactttggcagattgctaggttgcaaattcttagatgctggattcttcttgattcttttattaatttgcccgtgtttattgcagatggatggatttgatcaaatagtgaatgtgaaggttgtaatggcaactaatagggcagatactctagatcctgctttgctgtgaccaggtagacttgacaggaaagttgagttcccttgtcccgattggcggcaaaagaggcttgtgttccaagtctatactgctaagatggatttgagtgatgaggctgatttggaagattatgtttgcagaccggataagatcagtgctactgatgttgagttggtttcatggcacataccaagatttttatgcatttgttgttttctaagtattgtattgctagggtacttatgtcctgtgctggccaaagctgtcaaaaccatgagaaaggcagagaaggtgcttcttatagcaaagccacattggtagaccaacagttggagaggaaggtgttgtgatgagcatcatcttgttctacatcatcactaatgaactggttgaacttttggttgctttggtgaatggaggcgacagcatgcagattgccatgtccggatgttatgcgggacctatgtttaatacacttgctggtttgggtacattgttgctagattgatctgggctcttgttatgctgccgagaggtgacatgtagcctaacaagatacttggagttggcctcattgctctttactcaaattttctttttattagagtaagcaatgttggtggaatattgctactacctagagttagataattatttgcttgtaaagttgggatttacatcaaagtacttgcccatggcttccatttttataaatgaaatgaagttatacagtgttgctctgttctatacggctgttcttgtatgtcaagttgtcttcacattttccgggttttgatatttttgggagaaaacaaacttgcaattatggaatttagttttatgtatgccaagttatattccgcttggctaattagagcattataaattctcac

SEQ ID NO: 26262 - DNA, 1584 bp, Zea Mays
ggttctgcctcccactcccacccgcgacaccctccgctctgctcagcaccaaccgccatccccgcccgccatctgcgcgcgtctggccgtctctctcgcccccgttctcctctctgctatccgcgcccaaatctcaccgtatgtgcgcgtctccatctgcgcgcatctccccagatccactctactcgctccaccacgccgaccccgacccgacaccggcaaccacacggatccactgtgctctccatggccatgaaagggaacgatcttgcgccgacctcaaccaggctctccatggaaggtccgcgtggttccctctcctgcatcccatgatccggatgccgccacaccatggtcgatggtcggggccgtcgaatccggatgcccgcgctctgcgtcgcgtggatcttctagatcacgcgggagctcgaccacaagtccgacggcgagaccatgaagtggctgctagtacatgcttgtcatgctctcccctccacaccccacctcgttagaggcagatcgtgcgggtacagcgccttggctgccgagatcaatgggggcatcctcgccgtcggcaggcccaggcagcactgagttgtgctctgctgcggccgctacttccagatggatggatttgatcaaatagtgaatgtgaaggttgtaatggcaactaatagggcagatactctagatcctgctttgctgtgaccaggtagacttgacaggaaagttgagttcccttgtcccgattggcggcaaaagaggcttgtgttccaagtctatactgctaagatggatttgagtgatgaggctgatttggaagattatgtttgcagaccggataagatcagtgctactgatgttgagttggtttcatggcacataccaagatttttatgcatttgttgttttctaagtattgtattgctagggtacttatgtcctgtgctggccaaagctgtcaaaaccatgagaaaggcagagaaggtgcttcttatagcaaagccacattaccaacagttggagaggaaggtgttgtgatgagcatcatcttgttctacatcatcactaatgaactggttgaacttttggttgctttggtgaatggaggcgacagcatgcagattgccatgtccggatgttatgcgggacctatgtttaatacacttgctggtttgggtacattgttgctagattgatctgggctcttgttatgctgccgagaggtgacatgtagcctaacaagatacttggagttggcctcattgctctttactcaaattttctttttattagagtaagcaatgttggtggaatattgctactacctagagttagataattatttgcttgtaaagttgggatttacatcaaagtacttgcccatggcttccatttttataaatgaaatgaagttatacagtgttgctctgttctatacggctgttcttgtatgtcaagttgtcttcacattttccgggttttgatatttttgggagaaaacaaacttgcaattatggaatttagttttatgtatgccaagttatattccgcttggctaattagagcattataaattctcac

SEQ ID NO: 26263 - DNA, 1590 bp, Zea Mays
cggttctgcctcccactcccacccgcgacaccctccgctctgctcagcaccaaccgccatccccgcccgccatctgcgcgcgtctggccgtctctctcgcccccgttctcctctctgctatccgcgcccaaatctcaccgtatgtgcgcgtctccatctgcgcgcatctccccagatccactctactcgctccaccacgccgaccccgacccgacaccggcaaccacacggatccactgtgctctccatggccatgaaagggaacgatcttgcgccgacctcaaccaggctctccatggaaggtccgcgtggttccctctcctgcatcccatgatccggatgccgccacaccatggtcgatggtcggggccgtcgaatccggatgcccgcgctctgcgtcgcgtggatcttctagatcacgcgggagctcgaccacaagtccgacggcgagaccatgaagtggctgctagtacatgcttgtcatgctctcccctccacaccccacctcgttagaggcagatcgtgcgggtacagcgccttggctgccgagatcaatgggggcatcctcgccgtcggcaggcccaggcagcactgagttgtgctctgctgcggccgctacttccagatggatggatttgatcaaatagtgaatgtgaaggttgtaatggcaactaatagggcagatactctagatcctgctttgctgtgaccaggtagacttgacaggaaagttgagttcccttgtcccgattggcggcaaaagaggcttgtgttccaagtctatactgctaagatggatttgagtgatgaggctgatttggaagattatgtttgcagaccggataagatcagtgctactgatgttgagttggtttcatggcacataccaagatttttatgcatttgttgttttctaagtattgtattgctagggtacttatgtcctgtgctggccaaagctgtcaaaaccatgagaaaggcagagaaggtgcttcttatagcaaagccacattggtagaccaacagttggagaggaaggtgttgtgatgagcatcatcttgttctacatcatcactaatgaactggttgaacttttggttgctttggtgaatggaggcgacagcatgcagattgccatgtccggatgttatgcgggacctatgtttaatacacttgctggtttgggtacattgttgctagattgatctgggctcttgttatgctgccgagaggtgacatgtagcctaacaagatacttggagttggcctcattgctctttactcaaattttctttttattagagtaagcaatgttggtggaatattgctactacctagagttagataattatttgcttgtaaagttgggatttacatcaaagtacttgcccatggcttccatttttataaatgaaatgaagttatacagtgttgctctgttctatacggctgttcttgtatgtcaagttgtcttcacattttccgggttttgatatttttgggagaaaacaaacttgcaattatggaatttagttttatgtatgccaagttatattccgcttggctaattagagcattataaattctcac

SEQ ID NO: 26264 - DNA, 1567 bp, Zea Mays
cacggttctgcctcccactcccacccgcgacaccctccgctctgctcagcaccaaccgccatccccgcccgccatctgcgcgcgtctggccgtctctctcgcccccgttctcctctctgctatccgcgcccaaatctcaccgtatgtgcgcgtctccatctgcgcgcatctccccagatccactctactcgctccaccacgccgaccccgacccgacaccggcaaccacacggatccactgtgctctccatggccatgaaagggaacgatcttgcgccgacctcaaccaggctctccatggaaggtccgcgtggttccctctcctgcatcccatgatccggatgccgccacaccatggtcgatggtcggggccgtcgaatccggatgcccgcgctctgcgtcgcgtggatcttctagatcacgcgggagctcgaccacaagtccgacggcgagaccatgaagtggctgctagtacatgcttgtcatgctctcccctccacaccccacctcgcgccttggctgccgagatcaatgggggcatcctcgccgtcggcaggcccaggcagcactgagttgtgctctgctgcggccgctacttccagatggatggatttgatcaaatagtgaatgtgaaggttgtaatggcaactaatagggcagatactctagatcctgctttgctgtgaccaggtagacttgacaggaaagttgagttcccttgtcccgattggcggcaaaagaggcttgtgttccaagtctatactgctaagatggatttgagtgatgaggctgatttggaagattatgtttgcagaccggataagatcagtgctactgatgttgagttggtttcatggcacataccaagatttttatgcatttgttgttttctaagtattgtattgctagggtacttatgtcctgtgctggccaaagctgtcaaaaccatgagaaaggcagagaaggtgcttcttatagcaaagccacattggtagaccaacagttggagaggaaggtgttgtgatgagcatcatcttgttctacatcatcactaatgaactggttgaacttttggttgctttggtgaatggaggcgacagcatgcagattgccatgtccggatgttatgcgggacctatgtttaatacacttgctggtttgggtacattgttgctagattgatctgggctcttgttatgctgccgagaggtgacatgtagcctaacaagatacttggagttggcctcattgctctttactcaaattttctttttattagagtaagcaatgttggtggaatattgctactacctagagttagataattatttgcttgtaaagttgggatttacatcaaagtacttgcccatggcttccatttttataaatgaaatgaagttatacagtgttgctctgttctatacggctgttcttgtatgtcaagttgtcttcacattttccgggttttgatatttttgggagaaaacaaacttgcaattatggaatttagttttatgtatgccaagttatattccgcttggctaattagagcattataaattctcac

SEQ ID NO: 26265 - DNA, 1344 bp, Zea Mays
ggtaaatatagaaacaaaaattatacgtacaaactatggcaaacattaggcagctaagcctgaatccgctttgtggcgcctatgcgcccgcagcaaccaacgaggcaacggatcgagttcctctccgaactccaactctgcgccgcaatccactcaagaaggttagccctcgtggtctcggatttggataatcctccgccgaggtatgaaacaggaggcggccaccagcatagtggtgacccaggaggacgtcctgcaccactacaaggagcctccaccccgccgcgaggacgatccgccagcactggctgcgtcgctgtcgttgccgtcgtcactgtcggaggacgatggcgacgccatgccgcagccatcttcatacgcggtcttgccgcgccgggaaggcgagctggtgtctgcggaggagctgctgctggtgccgccgctcaacttcgccatggtggaccacggcgtgtaccgctccggattcccggacgcctccaacttgccgtttcttgagacgctccgactccgctccgtcctgtgcctgtgcccggagccatacccggaggctaatctggagttcctccgtgcccacgggatcaagctcttccagttcggaatcgacggctccaagttttggacttttgatactgaaataacaggaaccatttgtgaacataccagaagatagaatccgtgaagctctagaagtcatcctagatgcaagcaaccatccggttcttattcactgcaagcgaggaaagcatcgaaccggctgtgtggttggatgctttaggaaattgcaacgctggtgtctaacttcaatatttgacgaataccagcgttttgctgctgccaaaacaagagtttctgacctacggttcatggagctatttgatgtatcgagcataaagcatttagcatttgagtcgtctgtatgatagtaacattggtgcatgataacaactcaatactggttccattacggtgtcatctttttcatttaagaaaaaaaatcatttctaaaaatgctaccttattactccctccatccccaaatataattcgttttagactaaatatatattaattaattaatctataaatattatttgtatttgtatgtatatattcattatcattgtggacggaaaaaaagtctatattttgagacagagcgagtatttttttagcataatggtttgggagaggcaagtcataagaataagtcctgactacatgtggttattatcagttcatatatgtgataatggcagcttaatatctgttgctaagaaaatggacgaaatcgctcgagtctacttcattgtgggagttcttttt

SEQ ID NO: 26266 - DNA, 621 bp, Zea Mays
atggcaaacattaggcagctaagcctgaatccgctttgtggcgcctatgcgcccgcagcaaccaacgaggcaacggatcgagttcctctccgaactccaactctgcgccgcaatccactcaagaaggttagccctcgtggtctcggatttggataatcctccgccgaggtatgaaacaggaggcggccaccagcatagtggtgacccaggaggacgtcctgcaccactacaaggagcctccaccccgccgcgaggacgatccgccagcactggctgcgtcgctgtcgttgccgtcgtcactgtcggaggacgatggcgacgccatgccgcagccatcttcatacgcggtcttgccgcgccgggaaggcgagctggtgtctgcggaggagctgctgctggtgccgccgctcaacttcgccatggtggaccacggcgtgtaccgctccggattcccggacgcctccaacttgccgtttcttgagacgctccgactccgctccgtcctgtgcctgtgcccggagccatacccggaggctaatctggagttcctccgtgcccacgggatcaagctcttccagttcggaatcgacggctccaaggggggcatcatcttgctattta

SEQ ID NO: 26267 - DNA, 706 bp, Zea Mays
tgttagtgcatctgaactgatgactgtttattgattgctgccatggaatgggcttcagagcactgttcttctcattaccgtgcccccgaactatgggagtgtccaagtcatgctgacattgatgagaggacagatatatggtctttgggatgcactttgtatgctatgatgtatggaaagtctccatttgattatgagcttgatgagtcttctggtgaaagcttgcacagtgttattaaaaatgtacagattaaatggcctgaagaagcgggatctacataccctgattccctccgccagtttataacttggatgctgcagccacatcccgcagttcgtcctcatattgatgatatcataattcatgttgataaacttgtcatgaagtactctaattaaccgctacaccaagccgcttctccaccagaaaaaagaatcattattatgtaagtctacacgattcattagcaaaatgtgatatgtatgttccttgatagctattactgtattaaacgagaaaaggacattctgctgtagtcttcaaccattcgtggactcgccattgttcatgagtatgttatctatagatgttttttttgtatgcccgacagtgttaccgggttaataaatgatacagtacctcttttatagttataatggtgccctcattgtgttgttcatggtgctatacgatcctgcatattct

SEQ ID NO: 26268 - DNA, 1779 bp, Zea Mays
tccattaaaactcttaagtgtcgcttagtcacccaattaatatcatcaactatggttgggtaccgtcacaatgcacgaggattagactagtttgaactaaaacgcgacaaataaaaaagaacggaaagaacggagagaacgttatatcaattttttacttgtactaaatagtcaaataagatgtctaaaaaattaaattgcagtatattttaggaaaaaaaatagagctcatcgcctcttaaaaatccttttaaccatcgaaggttagtgacttatttcgagagaggagtacgttttaagccggtgctccatgtgtcccgtcccgtgtcccgtcccgtctacgttttaagctgcgagcgagatctgctttcacagcgtggctgaccagcagatccgtcgttgccggaacccacgctcgccggctgcgaatgcatctgtagcctgctcttcgtccacacggacaattggacgagctagactctgcgtcgccggcgatggggctcggcgatgccggccctgcgggctcgtcggtcttcctcgtcaaggaggtcgtcgccgccgcaaccgcctccgacggcacggctgggtcagagcccggcgcctcagggatcgccgggaagaaaggcatcgacccatcacacatctcagctgacgggacatatgctctcaagaaagttcttgttcagagtgatcagcacttagagcttgttcagcaagagatccgagtgtcctctcaattcagccatccaaatttacttcctcttcttgaacatgccatcgttgctgtcaagggtgttcaggatggatcccagaactatgaggcctacttattattcccagttcatttagaaggaacattacatgatataactaaaaccatgcttgaaaagaaggaattcttcccaacaattactgttctccagatatttcgccagctttgttctggattaaagcacatgcacagttttgatccaccatatgcgcacaatggggttaaaccagataatgtcctcataacacagaggaagcagtctcatctagcaattttgatggattttgagagtgctggtccagcaagaaagactattagatcacaagctgaagctttgcagttacaggaatgggcttcagagcactgttcttctcattaccgtgcccccgaactatgggagtgtccaagtcatgctgacattgatgagaggacagatatatggtctttgggatgcactttgtatgctatgatgtatggaaagtctccatttgattatgagcttgatgagtcttctggtgaaagcttgcacagtgttattaaaaatgtacagattaaatggcctgaagaagcgggatctacataccctgattccctccgccagtttataacttggatgctgcagccacatcccgcagttcgtcctcatattgatgatatcataattcatgttgataaacttgtcatgaagtactctaattaaccgctacaccaagccgcttctccaccagaaaaaagaatcattattatgtaagtctacacgattcattagcaaaatgtgatatgtatgttccttgatagctattactgtattaaacgagaaaaggacattctgctgtagtcttcaaccattcgtggactcgccattgttcatgagtatgttatctatagatgttttttttgtatgcccgacagtgttaccgggttaataaatgatacagtacctcttttatagttataatggtgccctcattgtgttgttcatggtgctatacgatcctgcatattct

SEQ ID NO: 26269 - DNA, 2025 bp, Zea Mays
taaatcgtgtccgtccgttgctgcagacccaccccgcgctccatgtgatgtgtagtgttttctccctctgctttccccactcgtccgctcctgcttcccgccgccatcgcccatgacgccggcggcaccggcatccgccgcggacgcgcttgcgcagatcctgcaggacctcctgccttcggttctgctggccgcggcgtcggtcagggcgctccactcgcggtggcgcgcgctccaggcctccctcctcgcgttgcagtcctcgctcgtctccgcgcccgcctccgccccgtcccacccgctcttcgccgacctggtggccgcgcttctcccagccctccgttccctccacgcgctctctgtccggtgccaggaccctgggctccccggggggcggctgcggctacagagcgaccttgacatggtgcctgcgtcggcggctccgcacgcagacaagtccctcttcgtccgtgacgcctttgcccgcctccagatcgggtcgctggacctgaagctaaaggcgctagtgtcgctgctcgacctgctgggtgacgaccctactgcggaggccgcgcagatcgtcgccaccgaaggggacgttgcggcgctgctccgtttgcttgacgcgtcgtcccactcggcgctgcgggaccgtgcggtcacggccgtggcccaccttgcgaccgcctgcgctgcgtcccggagggtggtcttcgacgaaggcggactcggcccacttctgcgcgtgctcgactcaggctcaccgcccgccacgcgtgagcggtctgctgcggccattgtggccatcactggtgatgccggcagcgcgtgggctctatcggcttatggtggattgcccatcttgattaatgcttgccgtcctgggtctggatcccccgcattgcaggcatttgccgtggcggcaattaagaatgtttcttcagtcgatgatgtgcgctccactctggtggaggagagtggtttgcctgttcttgttgacctgcttgccagtggcactgctgagacgcagaagagtgctgctctctgcctctgggcacttgcttcgatgggagaccataagacacagaaccagattgtgcaagcaggtgcattgtcgccactcctacaagcactgcatatcgcctctgatcaggacctccatgattctgtactgcgtgctatacacgcacttacatcagcccctgctgccaccagaatcctttgttcatcgccactgttctttgcacgacttacagacctcatatgcagctctggtagcttcctgttgcaacaaatggctgctgatatgattgctgatcttgcacctactgtgagcgatgacacaaagaggtgcatggcaccatgcattggtacactgattaagctgatggaggtggctaagccagcaacaatacaggagtcagctggagactgataagaagtatccactctcgatctttctagttcttgccatgggtggcgggaacgggacacgacgacgacttgttgatgctggttcttgtcagcatctacagaagctggctgatgctgatgtgcctggtgcaaagaaggctttgcagaggatatctaacaatcgtcttaaaagtttgttttccataggatggcaaaactagtccatatgctgcactgggttgaagagcagcccaagactgcagatgtggagagcctctaccaaatgacagaagaacgctcaagtatttgtttgagtaggagttatgatagtacaagaacatcaagcgagagagttctcagtttctctgcggctaaaggtggccagtagatggtattattaagtacaagtagtatgttaacaagctggaagcttggacgtggcattttaggaagcgtctaaaagcttctttggtttgctcctttccgttttcccttgtattttagctttttttttctttctttcttctgttttataattgtggctctcaccatctactttgtgaaaatttgtttgtgttgatttggaatgaagcaaggaattgatctgtgtca

SEQ ID NO: 26270 - DNA, 1224 bp, Zea Mays
ctcaccttctgcgccgccggtccaccgccatggaagctgatcctgcgccgacgagcgtgatggaggaggaggtcctactacgcttccctcccgcgctccagcccaacccgctcctctgcagttggcaagagtaccctagtcgcgctcatgtttgcaaggatgaaagagtccgtgattatttctcagaaatcttgtggctgcacgaccatgattttacagacgacgagctagctttcagacaaggatatgcaatggaacgtcaaaaccaagtgtcaaacttgaacaaaggcaggcgagtgctagttgttatagaactatctggagacctctatgaagatgcttggaataggtcgtatcttgcttccaaatggagcctttgtagcgggagtaaactcataggtacaagccgttctgacaagattgtaaagtttgggacaacacgggctctgactctgaacagtttgtcccatgcggcatactggtatttcttcaaggtacttacgtttggaagcacacccaaggcttgcccaagtggccagccagaatgcaattttaacatatgtcacctcttatttgttgagggacaattttaacatacacttttggtgtaaggttctgagctttataagccggtgtgtccagaagcatatctccaaatttggggtgcatcgttctgtacttctgttcttctaaatcaaaatatacatgaacaacttgggagaacggttgcgccttctgaagatttcatggttcgtcatcagtatcaccggtcttcccaagaggaggttccagagataagaatccaagatgtgttgtatggaagcatcaagagacatggaaaatttgaggtcctagcatggagatctcagatacctccctactacagctatgtccatgcttgtgagatttaggtgcgaaaaaatacaggtggaagggaagaggaagcgctgtatgaatggagtcatattctgttaattttgtcattttctggtctatgcaggaacatatatatattttggttcacttttttggggtaggatgtcataagttacaggcctacattttaatatcttaagtgtaagtgcttatttacataataacgcatgagcctgagcataatattttcatggaacatggtgaatccttccctgtatttggtttagcccagatagccgcgtcagcctaggcttgggcttcagtgttcatgcctgtatttggctttat

SEQ ID NO: 26271 - DNA, 1487 bp, Zea Mays
agtagatcaacattccctcaccttctgcgccgccggtccaccgccatggaagctgatcctgcgccgacgagcgtgatggaggaggaggtcctactacgcttccctcccgcgctccagcccaacccgctcctctgcaggtttgctggcgctctgctttgcatttctaggcgggcacgacagtccttgggtaggaaatccctagtaagtgtggacacctgctttaattaggagtgacgaacatgcattacttgctaatctgacaatctgattttttttgtgacattcatattatatatatggtgatggctcagtggttcactcagccaaagggatcggtttcagcaacatcagaacacatagggttgtcctgctgaggagagcgagacagagctcccaaatggttccgagaacaactacaggaggcgctagacgggttgagttccatgattgttgatctgaatgagttggtgatgttcttggcgagctaccctcgtctatattgccagccttacaacatgcataccctgctcggtaactgcatgtttggtcgccaagtggaagcagagcttgtcattaagttcctgttgcacacgcagcctcactcatagtttccaagaatggaggtcctgccaattgttggtccacccaaagttggcaagagtaccctagtcgcgctcatgtttgcaaggatgaaagagtccgtgattatttctcagaaatcttgtggctgcacgaccatgattttacagacgacgagctagctttcagacaaggatatgcaatggaacgtcaaaaccaagtgtcaaacttgaacaaaggcaggcgagtgctagttgttatagaactatctggagacctctatgaagatgcttggaataggtcgtatcttgcttccaaatggagcctttgtagcgggagtaaactcataggtacaagccgttctgacaagattgtaaagtttgggacaacacgggctctgactctgaacagtttgtcccatgcggcatactggtatttcttcaagtatcaccggtcttcccaagaggaggttccagagataagaatccaagatgtgttgtatggaagcatcaagagacatggaaaatttgaggtcctagcatggagatctcagatacctccctactacagctatgtccatgcttgtgagatttaggtgcgaaaaaatacaggtggaagggaagaggaagcgctgtatgaatggagtcatattctgttaattttgtcattttctggtctatgcaggaacatatatatattttggttcacttttttggggtaggatgtcataagttacaggcctacattttaatatcttaagtgtaagtgcttatttacataataacgcatgagcctgagcataatattttcatggaacatggtgaatccttccctgtatttggtttagcccagatagccgcgtcagcctaggcttgggcttcagtgttcatgcctgtatttggctttat

SEQ ID NO: 26272 - DNA, 395 bp, Zea Mays
gcatcgcagcagggagcagctcacaaacgcaggggagagctagcagagcaacaaacaatggccaagagcggcacggaggagtggcgccgcaacgccgacacgcacaagatgagcgcggaggagggctcgcgtgaagccaagtagctcggtccgttgtaaccgtaatagcaggatgtagcgtgcgtgttgtgttcggtagggtattcagttctgtttttctgctttgcgaaagactgaataagttctctccatcgtcccggaatgaagaatctcaactcttgatttcagttggaaaaaaaaacgacactagaaataaatctcttctttttttcttttaaggctagtttggaaaacttatttttgggatttctatgttttcaagagaaattaggttc

SEQ ID NO: 26273 - DNA, 499 bp, Zea Mays
gtccaacacgtgcttcccctacgtgttccattcatggcgatggcgccacgttgccacctcgctttgcaccttatattagcacagaccttgttgccgcatcgcagcagggagcagctcacaaacgcaggggagagctagcagagcaacaaacaatggccaagagcggcacggaggagtggcgccgcaacgccgacacgcacaagatgagcgcggaggagcgccgcgagggctcgcgtgaagccaagtagctcggtccgttgtaaccgtaatagcaggatgtagcgtgcgtgttgtgttcggtagggtattcagttctgtttttctgctttgcgaaagactgaataagttctctccatcgtcccggaatgaagaatctcaactcttgatttcagttggaaaaaaaaacgacactagaaataaatctcttctttttttcttttaaggctagtttggaaaacttatttttgggatttctatgttttcaagagaaattaggttc

SEQ ID NO: 26274 - DNA, 938 bp, Zea Mays
cgcaaatatcttcttaccccaacgtcgcccaaaaacccttgcggcgtcgcactcacactagcgaccaacccccaaccccagaccttcctctccggcggcggccggcgcgcgcgcgagggagatggaccgcccttccggcacatcgtaccagcgcttcccccgcgttcggatccgcgagctcaaggacgactacgccaagttcgaactccgcgacaccgacgctagcatggccaacgccctccgccgcgtcatgatcgccgaagtcccaactgtcgccatcgatctcgtagagatcgaggttaactcctccgtcctcaacgacgagttcatcgcccaccgtctggggctcatcccgctcacctccgccgccgccatgcaaatgcgcttctctcgggactgcgacgcttgcgacggcgacggctcctgcgagtactgctccgtcgagtttcacctctccgtgcacgccaccgactccgaccagacgctcgaggtcacatccaacgacctgagatccatggaccccaaggtctgcccagtcgaccaagcacgcgcctaccagcacgcgctcggaggcaccgacccctttggagccaatgcctcgaacgaaaacaggggcatacttattgtaaagctgcgtcgggggcaagaactaaggcttcgtgccatagctaggaaaggaattggcaaggaccatgccaaatggtcaccagctgctaccgtgactttcatgtatgagcctgacatacgtatcaatgaagaactaatggaaacattgacggtggaagagagaataagcttgattgaaagcagccctacaaaagtatttgagcttgattctgccaatcaggttctttacctataaaggcaacgaatgcagtacacaagctatgctgttatgctttctgaaatgatgggacatgcaaatcacttaggtggtg

SEQ ID NO: 26275 - DNA, 882 bp, Zea Mays
cgcaaatatcttcttaccccaacgtcgcccaaaaacccttgcggcgtcgcactcacactagcgaccaacccccaaccccagaccttcctctccggcggcggccggcgcgcgcgcgagggagatggaccgcccttccggcacatcgtaccagcgcttcccccgcgttcggatccgcgagctcaaggacgactacgccaagttcgaactccgcgacaccgacgctagcatggccaacgccctccgccgcgtcatgatcgccgaagtcccaactgtcgccatcgatctcgtagagatcgaggttaactcctccgtcctcaacgacgagttcatcgcccaccgtctggggctcatcccgctcacctccgccgccgccatgcaaatgcgcttctctcgggactgcgacgcttgcgacggcgacggctcctgcgagtactgctccgtcgagtttcacctctccgtgcacgccaccgactccgaccagacgctcgaggtcacatccaacgacctgagatccatggaccccaaggtctgcccagtcgaccaagcacgcgcctaccagcacgcgctcggaggcaccgacccctttggagccaatgcctcgaacgaaaacaggggcatacttattgtaaagctgcgtcgggggcaagaactaaggcttcgtgccatagctaggaaaggaattggcaaggaccatgccaaatggtcaccagctgctaccgtgactttcatgtatgagcctgacatacgtatcaatgaagaactaatggaaacattgacggtggaagagagaataagcttgattgaaagcagccctacaaaagtatttgagcttgattctgccaatcagagatcgatgaccaacgcgtacatgatggatgtgcg

SEQ ID NO: 26276 - DNA, 221 bp, Zea Mays
gggctttctgtctcgcacaggaaagccatatggtcgaccggaggtttcagggaacaatgcagaagtcaatgcctgggtgacgacaaattcagtaaacaatcatgcgcgcgctagttaatcgttctagcacgtctcagtttacagatagcaagtgaagttagctaagagctcaaacattctcctagtctttttcatttagggggtctctaatgttgctgtcg

SEQ ID NO: 26277 - DNA, 920 bp, Zea Mays
ctcttctttggctctgttgccgaagtggacagctaggatctgaaccatatcttatatgcgaaggaaagaaccaaagagagaggttctagccatacggttctgaaacggtcctgaatcctgacgacctgtaactgctcatctgtcaccggttattggcaatgggcatggaaattaggtaaggctgagatattagtctggtgattcgtcagccgaggaagccggatcggacgaagacgaggagtccgctcctccaaagccgcccccaagcttcgccgccgaccaaaccctaaggggggagatgccggcggcagcggcggggctccttgctgccctccgcgctggaggccttcgctgatgtctcgggaccaccagattttctgaggcacagggttgccgagccagaggaagggacggaggccctcggtgtactcgatcgccgtgggaaagaggggagcaaacagccgcctccagagtctggatgcaatttcagtttcgagttcccaagatatttgatggtgaaacttgaccaagaattaggaagaggcaaatttgatgtactgtgtattattcctttgcacgtagagtgatacagctacccttttagctagtatctgtgagctggaatgtgaatacgttttccagtctgaatgaaaaggcaaggatctatcttggccaccatgaagctctgctgttggagatatttgatcatataattgcattgctaattttctatggcatcagttttgtgttcatctgttttcaattgcatggcataaatctttgtacaatcaggtggtacacttctagagttggttttagtttgaaaatataaatgtgtagtctatagtctatagttgtgctgggggtgtctctggagctaaagtagtatttattggttctatacttctatttgttttgtt

SEQ ID NO: 26278 - DNA, 985 bp, Zea Mays
caaaatacagagctaatataaatcttgctcttcgctccatgtttttttttctaacgaagcatattcttacgtgaagtggaaagactcttctttggctctgttgccgaagtggacagctaggatctgaaccatatcttatatgcgaaggaaagaaccaaagagagaggttctagccatacggttctgaaacggtcctgaatcctgacgacctgtaactgctcatctgtcaccggttattggcaatgggcatggaaattaggtaaggctgagatattagtctggtgattcgtcagccgaggaagccggatcggacgaagacgaggagtccgctcctccaaagccgcccccaagcttcgccgccgaccaaaccctaaggggggagatgccggcggcagcggcggggctccttgctgccctccgcgctggaggccttcgctgatgtctcgggaccaccagattttctgaggcacagggttgccgagccagaggaagggacggaggccctcggtgtactcgatcgccgtgggaaagaggggagcaaacagccgcctccagtttcgagttcccaagatatttgatggtgaaacttgaccaagaattaggaagaggcaaatttgatgtactgtgtattattcctttgcacgtagagtgatacagctacccttttagctagtatctgtgagctggaatgtgaatacgttttccagtctgaatgaaaaggcaaggatctatcttggccaccatgaagctctgctgttggagatatttgatcatataattgcattgctaattttctatggcatcagttttgtgttcatctgttttcaattgcatggcataaatctttgtacaatcaggtggtacacttctagagttggttttagtttgaaaatataaatgtgtagtctatagtctatagttgtgctgggggtgtctctggagctaaagtagtatttattggttctatacttctatttgttttgtt

SEQ ID NO: 26279 - DNA, 3862 bp, Zea Mays
atggcagcggcggaggacgcagagggcgaccgcgtgattgaggtcgtgtcagcgggggcactctaccaccgcggcggcgactgggagcgcaaatactggagctgctcgaggggcaaggaccggtacccttacccagtgggttaccatgccgtccgccattttactggaatatcctatgctatggaaatccaacagggacctagaggtccaatattcctggttacatccaccgaaggagatacagcgatagggcagacccctgatatcgcttggaagaacttccagaaaaagactggggctaaagtgaagaactggcagaggagaaagagcttccctcaaaggattgatggtgctgagctttttgggttcaaaaatgcatctattcagagattgcttcgtgagcttatagtagattcaactggagcagttgaacttaacgagccttgtgaagtcacttctgaggctggtgcacatttagtttgtaaagatgcatctgatgtttctgaggctgaagatccatccgtttgcttaggcatggaaagtggaactcctaaaagaagtatagagcccagccaggtggaaaataccttggcagtccactacccggacatgttaacagcagttgataagtgcaatgtatccacacataaaaatacaaatgaaggagatactgtaggtagagcactgttgcaagatgtctctgattcaagatgcacacttccattgctggaagaagtccctaagaatgcacaatccacttctcttgatgataatttgggagagtcttctctagtttcatctcaacaagttggtttatcttctggttcttatttgaactctgaaaagtctgatatagaattggctgagaaggaagtagcaaagtctatgatgtctattttgcttccccaagctattccccttctcatgaaaagttacaaaaggaagaaattcaagcataaaaatagagaaaactctactgtttcagtgaaaacagtttcagcttacaatccatctgatagttgctgccgaggtgtgactgtaccaacaattgtgggtgaaggtacaaatggaaatagttctgaaatgtgtgaccatgggggatctcatcatgacaaggttaaaaatggctttgccaatgaggactgcagaaatgacgacttagtggttaaattagatgagatgaatgattatgttgcagatagttttgaggatgatgcacaaattttgggcgacaacacaacaaaatcaatgggtaaccatcatcattattctgagtatgtgctctctagggggcctaatgagaagtcaaagctgctaaatggtaaaagtgaagtttttgagtatcaggctagtgtgcataatggcaaaagggcacctgatgtggtatacaatcatgaaaatggacaatatatgttgtctgattcgcttgttgcttgtctagaggatgagttcggtggggaagatagttcccaccctgcaaactacaaccagtttaatggcgatgttaaacaattcgagcagcaatttaaggagcttacagctgttataaaaaatggctcatcagttccggtggatgtttcataccacaagaacactgataatggatcaattaatgtttgtgcacaagcttttgctagaaatggtccaggagtttcgaggaatgaggagtgtttagcaaatatcttgcctgctccagttcattctaatgcacataatgatgctgtaacgagtggtaagcatgatgtgagttcaactttgaatttgccacctgcatgtgaggcaaaatctactttgttggtcatgcgagatggacaacatcatactgaagtgccagcaattgatcagaaggaaaataggttccacagtgtaagctacaaatgcacaaaatctgatgataatactagttttcattctgagaatgttgagtttgttgacaaacatgttgcttttgagtcaccagacaatggcatgtattctagtgatggttcacaaagagcaatcaccactgaaggttggcctgctggtgatggagttaaagcagatgaagaaaatctgcttggcaaagtggaagaatgtcaaattagatataaaaatggtaataagaacacaatactatctgtctatggggaaggtaatgtttgtgaacacatacctacaaagggtgaaaatgatgtttttcatcaccaaccatctcatgccctttctacgactaattgtacacatggtttagtatctgaagacagaacacaagcaaggccagatcatcacctagagctggtgggatgctacctgcatccaatgcctgtcttgtctgtcatgttaaacactaaaaatcataacagcctctatatttatgtattgtgtggccttttggagagctgccaaaggttcctttatgtttactctatcaatcccaaagaccagaaagatgtgtcaccatgttttgttggttacactccccttgtactgcccaccttggaccattcttcaacaggaaattttctgtttggaagatctggtttgcattttacacctgatggccagtttctggtcctcctgagcagcatcaaaataccttcttgcaggatgcaaaacattgattgcttgtgcccagtctgcaacttgtgtcaatgtgaagataattctttaaaaattgtatctgttaactcgggctatgcttcacttgtaaccaatttgatgccttatgggacagtgtcgtgcattctgatatttgaaccaaattacattgtagctattgaagacagcagaaacctgcatatctgggaaatggttgatgggtggagtgagatatctgagcagtatatgattcctagtttgggtaacatgggtcctatactggagcttacaaggatgccaaaaaacacatctctcattattggccatgatggcgaaggcggtttttgtttgtgggacatctccaagcgcacactattggcgacttttgcagctccaggaaacactgtcttccagattctgccagttggcttatgtagtttgcaggaggatattattcatgctccagttgatgacatagataaaaatctacaagtgatcacagtcggtgacttgtacagaaaaaatgtcagggtgaactttgtgacgccgccaagacaagatatagcagtttgggtcctgatttcttgtgcttctgtggctgagtatcaacatgatcttcaagccaaggaaaacagtgcacgatggaggtttgctctgttagcgaagaagagagtttttatcggaaatgttttggatacaagaattactgctttagatgcctgcggtaactacggatacgctgggacacatggtggtctgctgtatctgtgggaattgtcttcggggagaaaagtgacgggaacacagtgtttcaacagtggacgagtctcctgtgtttctgttgattccaaatcaggtgcagtggcagtgactgatggtggatgccatgtattactctacacacaggacaaggtacaggcggctgatgacggagcagatgggcgcatacctgtttaagatgaataaaagtagtcattgtggcaagctaatagaagttctgcaattttgtatataatgcttacattttgctgtgtctatgaggttttggtctgttgcacttattttttcttatgcaacacagcaaggatagtttgctgtatgttgctccatctgcttgacctgttaagtacactgtagatgtctatgtcagcaggtatgtatcctctttgtgaatatagacgatagatgctgtaacaccagactcaagggccaggaagcatgattaaaaactcgccagaccttcgtgccttgctggtcctttcagctagagaggttggctttcttt

SEQ ID NO: 26280 - DNA, 3700 bp, Zea Mays
atggcagcggcggaggacgcagagggcgaccgcgtgattgaggtcgtgtcagcgggggcactctaccaccgcggcggcgactgggagcgcaaatactggagctgctcgagggttacatccaccgaaggagatacagcgatagggcagacccctgatatcgcttggaagaacttccagaaaaagactggggctaaactttttgggttcaaaaatgcatctattcagagattgcttcgtgagcttatagtagattcaactggagcagttgaacttaacgagccttgtgaagtcacttctgaggctggtgcacatttagtttgtaaagatgcatctgatgtttctgaggctgaagatccatccgtttgcttaggcatggaaagtggaactcctaaaagaagtatagagcccagccaggtggaaaataccttggcagtccactacccggacatgttaacagcagttgataagtgcaatgtatccacacataaaaatacaaatgaaggagatactgtaggtagagcactgttgcaagatgtctctgattcaagatgcacacttccattgctggaagaagtccctaagaatgcacaatccacttctcttgatgataatttgggagagtcttctctagtttcatctcaacaagttggtttatcttctggttcttatttgaactctgaaaagtctgatatagaattggctgagaaggaagtagcaaagtctatgatgtctattttgcttccccaagctattccccttctcatgaaaagttacaaaaggaagaaattcaagcataaaaatagagaaaactctactgtttcagtgaaaacagtttcagcttacaatccatctgatagttgctgccgaggtgtgactgtaccaacaattgtgggtgaaggtacaaatggaaatagttctgaaatgtgtgaccatgggggatctcatcatgacaaggttaaaaatggctttgccaatgaggactgcagaaatgacgacttagtggttaaattagatgagatgaatgattatgttgcagatagttttgaggatgatgcacaaattttgggcgacaacacaacaaaatcaatgggtaaccatcatcattattctgagtatgtgctctctagggggcctaatgagaagtcaaagctgctaaatggtaaaagtgaagtttttgagtatcaggctagtgtgcataatggcaaaagggcacctgatgtggtatacaatcatgaaaatggacaatatatgttgtctgattcgcttgttgcttgtctagaggatgagttcggtggggaagatagttcccaccctgcaaactacaaccagtttaatggcgatgttaaacaattcgagcagcaatttaaggagcttacagctgttataaaaaatggctcatcagttccggtggatgtttcataccacaagaacactgataatggatcaattaatgtttgtgcacaagcttttgctagaaatggtccaggagtttcgaggaatgaggagtgtttagcaaatatcttgcctgctccagttcattctaatgcacataatgatgctgtaacgagtggtaagcatgatgtgagttcaactttgaatttgccacctgcatgtgaggcaaaatctactttgttggtcatgcgagatggacaacatcatactgaagtgccagcaattgatcagaaggaaaataggttccacagtgtaagctacaaatgcacaaaatctgatgataatactagttttcattctgagaatgttgagtttgttgacaaacatgttgcttttgagtcaccagacaatggcatgtattctagtgatggttcacaaagagcaatcaccactgaaggttggcctgctggtgatggagttaaagcagatgaagaaaatctgcttggcaaagtggaagaatgtcaaattagatataaaaatggtaataagaacacaatactatctgtctatggggaaggtaatgtttgtgaacacatacctacaaagggtgaaaatgatgtttttcatcaccaaccatctcatgccctttctacgactaattgtacacatggtttagtatctgaagacagaacacaagcaaggccagatcatcacctagagctggtgggatgctacctgcatccaatgcctgtcttgtctgtcatgttaaacactaaaaatcataacagcctctatatttatgtattgtgtggccttttggagagctgccaaaggttcctttatgtttactctatcaatcccaaagaccagaaagatgtgtcaccatgttttgttggttacactccccttgtactgcccaccttggaccattcttcaacaggaaattttctgtttggaagatctggtttgcattttacacctgatggccagtttctggtcctcctgagcagcatcaaaataccttcttgcaggatgcaaaacattgattgcttgtgcccagtctgcaacttgtgtcaatgtgaagataattctttaaaaattgtatctgttaactcgggctatgcttcacttgtaaccaatttgatgccttatgggacagtgtcgtgcattctgatatttgaaccaaattacattgtagctattgaagacagcagaaacctgcatatctgggaaatggttgatgggtggagtgagatatctgagcagtatatgattcctagtttgggtaacatgggtcctatactggagcttacaaggatgccaaaaaacacatctctcattattggccatgatggcgaaggcggtttttgtttgtgggacatctccaagcgcacactattggcgacttttgcagctccaggaaacactgtcttccagattctgccagttggcttatgtagtttgcaggaggatattattcatgctccagttgatgacatagataaaaatctacaagtgatcacagtcggtgacttgtacagaaaaaatgtcagggtgaactttgtgacgccgccaagacaagatatagcagtttgggtcctgatttcttgtgcttctgtggctgagtatcaacatgatcttcaagccaaggaaaacagtgcacgatggaggtttgctctgttagcgaagaagagagtttttatcggaaatgttttggatacaagaattactgctttagatgcctgcggtaactacggatacgctgggacacatggtggtctgctgtatctgtgggaattgtcttcggggagaaaagtgacgggaacacagtgtttcaacagtggacgagtctcctgtgtttctgttgattccaaatcaggtgcagtggcagtgactgatggtggatgccatgtattactctacacacaggacaaggtacaggcggctgatgacggagcagatgggcgcatacctgtttaagatgaataaaagtagtcattgtggcaagctaatagaagttctgcaattttgtatataatgcttacattttgctgtgtctatgaggttttggtctgttgcacttattttttcttatgcaacacagcaaggatagtttgctgtatgttgctccatctgcttgacctgttaagtacactgtagatgtctatgtcagcaggtatgtatcctctttgtgaatatagacgatagatgctgtaacaccagactcaagggccaggaagcatgattaaaaactcgccagaccttcgtgccttgctggtcctttcagctagagaggttggctttcttt

SEQ ID NO: 26281 - DNA, 3682 bp, Zea Mays
atggcagcggcggaggacgcagagggcgaccgcgtgattgaggtcgtgtcagcgggggcactctaccaccgcggcggcgactgggagcgcaaatactggagctgctcgaggggcaaggaccggtacccttacccagtgggttaccatgccgtccgccattttactggaatatcctatgctatggaaatccaacagggacctagaggtccaatattcctggttacatccaccgaaggagatacagcgatagggcagacccctgatatcgcttggaagaacttccagaaaaagactggggctaaactttttgggttcaaaaatgcatctattcagagattgcttcgtgagcttatagtagattcaactggagcagttgaacttaacgagccttgtgaagtcacttctgaggctggtgcacatttagtttgtaaagatgcatctgatgtttctgaggctgaagatccatccgtttgcttaggcatggaaagtggaactcctaaaagaagtatagagcccagccaggtggaaaataccttggcagtccactacccggacatgttaacagcagttgataagtgcaatgtatccacacataaaaatacaaatgaaggagatactgtaggtagagcactgttgcaagatgtctctgattcaagatgcacacttccattgctggaagaagtccctaagaatgcacaatccacttctcttgatgataatttgggagagtcttctctagtttcatctcaacaagttggtttatcttctggttcttatttgaactctgaaaagtctgatatagaattggctgagaaggaagtagcaaagtctatgatgtctattttgcttccccaagctattccccttctcatgaaaagttacaaaaggaagaaattcaagcataaaaatagagaaaactctactgtttcagtgaaaacagtttcagcttacaatccatctgatagttgctgccgaggtgtgactgtaccaacaattgtgggtgaaggtacaaatggaaatagttctgaaatgtgtgaccatgggggatctcatcatgacaaggttaaaaatggctttgccaatgaggactgcagaaatgacgacttagtggttaaattagatgagatgaatgattatgttgcagatagttttgaggatgatgcacaaattttgggcgacaacacaacaaaatcaatgggtaaccatcatcattattctgagtatgtgctctctagggggcctaatgagaagtcaaagctgctaaatggtaaaagtgaagtttttgagtatcaggctagtgtgcataatggcaaaagggcacctgatgtggtatacaatcatgaaaatggacaatatatgttgtctgattcgcttgttgcttgtctagaggatgagttcggtggggaagatagttcccaccctgcaaactacaaccagtttaatggcgatgttaaacaattcgagcagcaatttaaggagcttacagctgttataaaaaatggctcatcagttccggtggatgtttcataccacaagaacactgataatggatcaattaatgtttgtgcacaagcttttgctagaaatggtccaggagtttcgaggaatgaggagtgtttagcaaatatcttgcctgctccagttcattctaatgcacataatgatgctgtaacgagtggtaagcatgatgtgagttcaactttgaatttgccacctgcatgtgaggcaaaatctactttgttggtcatgcgagatggacaacatcatactgaagtgccagcaattgatcagaaggaaaataggttccacagtgtaagctacaaatgcacaaaatctgatgataatactagttttcattctgagaatgttgagtttgttgacaaacatgttgcttttgagtcaccagacaatggcatgtattctagtgatggttcacaaagagcaatcaccactgaaggttggcctgctggtgatggagttaaagcagatgaagaaaatctgcttggcaaagtggaagaatgtcaaattagatataaaaatggtaataagaacacaatactatctgtctatggggaaggtaatgtttgtgaacacatacctacaaagggtgaaaatgatgtttttcatcaccaaccatctcatgccctttctacgactaattgtacacatggtttagtatctgaagacagaacacaagcaaggccagatcatcacctagagctggtgggatgctacctgcatccaatgcctgtcttgtctgtcatgttaaacactaaaaatcataacagcctctatatttatgtattgtgtggccttttggagagctgccaaaggttcctttatgtttactctatcaatcccaaagaccagaaagatgtgtcaccatgttttgttggttacactccccttgtactgcccaccttggaccattcttcaacaggaaattttctgtttggaagatctggtttgcattttacacctgatggccagtttctggtcctcctgagcagcatcaaaataccttcttgcaggatgcaaaacattgattgcttgtgcccagtctgcaacttgtgtcaatgtgaagataattctttaaaaattgtatctgttaactcgggctatgcttcacttgtaaccaatttgatgccttatgggacagtgtcgtgcattctgatatttgaaccaaattacattgtagctattgaagacagcagaaacctgcatatctgggaaatggttgatgggtggagggacatctccaagcgcacactattggcgacttttgcagctccaggaaacactgtcttccagattctgccagttggcttatgtagtttgcaggaggatattattcatgctccagttgatgacatagataaaaatctacaagtgatcacagtcggtgacttgtacagaaaaaatgtcagggtgaactttgtgacgccgccaagacaagatatagcagtttgggtcctgatttcttgtgcttctgtggctgagtatcaacatgatcttcaagccaaggaaaacagtgcacgatggaggtttgctctgttagcgaagaagagagtttttatcggaaatgttttggatacaagaattactgctttagatgcctgcggtaactacggatacgctgggacacatggtggtctgctgtatctgtgggaattgtcttcggggagaaaagtgacgggaacacagtgtttcaacagtggacgagtctcctgtgtttctgttgattccaaatcaggtgcagtggcagtgactgatggtggatgccatgtattactctacacacaggacaaggtacaggcggctgatgacggagcagatgggcgcatacctgtttaagatgaataaaagtagtcattgtggcaagctaatagaagttctgcaattttgtatataatgcttacattttgctgtgtctatgaggttttggtctgttgcacttattttttcttatgcaacacagcaaggatagtttgctgtatgttgctccatctgcttgacctgttaagtacactgtagatgtctatgtcagcaggtatgtatcctctttgtgaatatagacgatagatgctgtaacaccagactcaagggccaggaagcatgattaaaaactcgccagaccttcgtgccttgctggtcctttcagctagagaggttggctttcttt

SEQ ID NO: 26282 - DNA, 3847 bp, Zea Mays
gagagagactccacccggtcctctgcccacccgcgctacggccctcgtgctcggcggcgagaaggcgaaggatggcagcggcggaggacgcagagggcgaccgcgtgattgaggtcgtgtcagcgggggcactctaccaccgcggcggcgactgggagcgcaaatactggagctgctcgaggggcaaggaccggtacccttacccagtgggttaccatgccgtccgccattttactggaatatcctatgctatggaaatccaacagggacctagaggtccaatattcctggttacatccaccgaaggagatacagcgatagggcagacccctgatatcgcttggaagaacttccagaaaaagactggggctaaagtgaagaactggcagaggagaaagagcttccctcaaaggattgatggtgctgagctttttgggttcaaaaatgcatctattcagagattgcttcgtgagcttatagtagattcaactggagcagttgaacttaacgagccttgtgaagtcacttctgaggctggtgcacatttagtttgtaaagatgcatctgatgtttctgaggctgaagatccatccgtttgcttaggcatggaaagtggaactcctaaaagaagtatagagcccagccaggtggaaaataccttggcagtccactacccggacatgttaacagcagttgataagtgcaatgtatccacacataaaaatacaaatgaaggagatactgtaggtagagcactgttgcaagatgtctctgattcaagatgcacacttccattgctggaagaagtccctaagaatgcacaatccacttctcttgatgataatttgggagagtcttctctagtttcatctcaacaagttggtttatcttctggttcttatttgaactctgaaaagtctgatatagaattggctgagaaggaagtagcaaagtctatgatgtctattttgcttccccaagctattccccttctcatgaaaagttacaaaaggaagaaattcaagcataaaaatagagaaaactctactgtttcagtgaaaacagtttcagcttacaatccatctgatagttgctgccgaggtgtgactgtaccaacaattgtgggtgaaggtacaaatggaaatagttctgaaatgtgtgaccatgggggatctcatcatgacaaggttaaaaatggctttgccaatgaggactgcagaaatgacgacttagtggttaaattagatgagatgaatgattatgttgcagatagttttgaggatgatgcacaaattttgggcgacaacacaacaaaatcaatgggtaaccatcatcattattctgagtatgtgctctctagggggcctaatgagaagtcaaagctgctaaatggtaaaagtgaagtttttgagtatcaggctagtgtgcataatggcaaaagggcacctgatgtggtatacaatcatgaaaatggacaatatatgttgtctgattcgcttgttgcttgtctagaggatgagttcggtggggaagatagttcccaccctgcaaactacaaccagtttaatggcgatgttaaacaattcgagcagcaatttaaggagcttacagctgttataaaaaatggctcatcagttccggtggatgtttcataccacaagaacactgataatggatcaattaatgtttgtgcacaagcttttgctagaaatggtccaggagtttcgaggaatgaggagtgtttagcaaatatcttgcctgctccagttcattctaatgcacataatgatgctgtaacgagtggtaagcatgatgtgagttcaactttgaatttgccacctgcatgtgaggcaaaatctactttgttggtcatgcgagatggacaacatcatactgaagtgccagcaattgatcagaaggaaaataggttccacagtgtaagctacaaatgcacaaaatctgatgataatactagttttcattctgagaatgttgagtttgttgacaaacatgttgcttttgagtcaccagacaatggcatgtattctagtgatggttcacaaagagcaatcaccactgaaggttggcctgctggtgatggagttaaagcagatgaagaaaatctgcttggcaaagtggaagaatgtcaaattagatataaaaatggtaataagaacacaatactatctgtctatggggaaggtaatgtttgtgaacacatacctacaaagggtgaaaatgatgtttttcatcaccaaccatctcatgccctttctacgactaattgtacacatggtttagtatctgaagacagaacacaagcaaggccagatcatcacctagagctggtgggatgctacctgcatccaatgcctgtcttgtctgtcatgttaaacactaaaaatcataacagcctctatatttatgtattgtgtggccttttggagagctgccaaaggttcctttatgtttactctatcaatcccaaagaccagaaagatgtgtcaccatgttttgttggttacactccccttgtactgcccaccttggaccattcttcaacaggaaatgatgcaaaacattgattgcttgtgcccagtctgcaacttgtgtcaatgtgaagataattctttaaaaattgtatctgttaactcgggctatgcttcacttgtaaccaatttgatgccttatgggacagtgtcgtgcattctgatatttgaaccaaattacattgtagctattgaagacagcagaaacctgcatatctgggaaatggttgatgggtggagtgagatatctgagcagtatatgattcctagtttgggtaacatgggtcctatactggagcttacaaggatgccaaaaaacacatctctcattattggccatgatggcgaaggcggtttttgtttgtgggacatctccaagcgcacactattggcgacttttgcagctccaggaaacactgtcttccagattctgccagttggcttatgtagtttgcaggaggatattattcatgctccagttgatgacatagataaaaatctacaagtgatcacagtcggtgacttgtacagaaaaaatgtcagggtgaactttgtgacgccgccaagacaagatatagcagtttgggtcctgatttcttgtgcttctgtggctgagtatcaacatgatcttcaagccaaggaaaacagtgcacgatggaggtttgctctgttagcgaagaagagagtttttatcggaaatgttttggatacaagaattactgctttagatgcctgcggtaactacggatacgctgggacacatggtggtctgctgtatctgtgggaattgtcttcggggagaaaagtgacgggaacacagtgtttcaacagtggacgagtctcctgtgtttctgttgattccaaatcaggtgcagtggcagtgactgatggtggatgccatgtattactctacacacaggacaaggtacaggcggctgatgacggagcagatgggcgcatacctgtttaagatgaataaaagtagtcattgtggcaagctaatagaagttctgcaattttgtatataatgcttacattttgctgtgtctatgaggttttggtctgttgcacttattttttcttatgcaacacagcaaggatagtttgctgtatgttgctccatctgcttgacctgttaagtacactgtagatgtctatgtcagcaggtatgtatcctctttgtgaatatagacgatagatgctgtaacaccagactcaagggccaggaagcatgattaaaaactcgccagaccttcgtgccttgctggtcctttcagctagagaggttggctttcttt

SEQ ID NO: 26283 - DNA, 4192 bp, Zea Mays
ctcaacttgcgcgcgcttgctcgctcggagagggagagagagactccacccggtcctctgcccacccgcgctacggccctcgtgctcggcggcgagaaggcgaaggatggcagcggcggaggacgcagagggcgaccgcgtgattgaggtcgtgtcagcgggggcactctaccaccgcggcggcgactgggagcgcaaatactggagctgctcgaggggcaaggaccggtacccttacccagtgggttaccatgccgtccgccattttactggaatatcctatgctatggaaatccaacagggacctagaggtccaatattcctggttacatccaccgaaggagatacagcgatagggcagacccctgatatcgcttggaagaacttccagaaaaagactggggctaaagtgaagaactggcagaggagaaagagcttccctcaaaggattgatggtgctgagctttttgggttcaaaaatgcatctattcagagattgcttcgtgagcttatagtagattcaactggagcagttgaacttaacgagccttgtgaagtcacttctgaggctggtgcacatttagtttgtaaagatgcatctgatgtttctgaggctgaagatccatccgtttgcttaggcatggaaagtggaactcctaaaagaagtatagagcccagccaggtggaaaataccttggcagtccactacccggacatgttaacagcagttgataagtgcaatgtatccacacataaaaatacaaatgaaggagatactgtaggtagagcactgttgcaagatgtctctgattcaagatgcacacttccattgctggaagaagtccctaagaatgcacaatccacttctcttgatgataatttgggagagtcttctctagtttcatctcaacaagttggtttatcttctggttcttatttgaactctgaaaagtctgatatagaattggctgagaaggaagtagcaaagtctatgatgtctattttgcttccccaagctattccccttctcatgaaaagttacaaaaggaagaaattcaagcataaaaatagagaaaactctactgtttcagtgaaaacagtttcagcttacaatccatctgatagttgctgccgaggtgtgactgtaccaacaattgtgggtgaaggtacaaatggaaatagttctgaaatgtgtgaccatgggggatctcatcatgacaaggttaaaaatggctttgccaatgaggactgcagaaatgacgacttagtggttaaattagatgagatgaatgattatgttgcagatagttttgaggatgatgcacaaattttgggcgacaacacaacaaaatcaatgggtaaccatcatcattattctgagtatgtgctctctagggggcctaatgagaagtcaaagctgctaaatggtaaaagtgaagtttttgagtatcaggctagtgtgcataatggcaaaagggcacctgatgtggtatacaatcatgaaaatggacaatatatgttgtctgattcgcttgttgcttgtctagaggatgagttcggtggggaagatagttcccaccctgcaaactacaaccagtttaatggcgatgttaaacaattcgagcagcaatttaaggagcttacagctgttataaaaaatggctcatcagttccggtggatgtttcataccacaagaacactgataatggatcaattaatgtttgtgcacaagcttttgctagaaatggtccaggagtttcgaggaatgaggagtgtttagcaaatatcttgcctgctccagttcattctaatgcacataatgatgctgtaacgagtggtaagcatgatgtgagttcaactttgaatttgccacctgcatgtgaggcaaaatctactttgttggtcatgcgagatggacaacatcatactgaagtgccagcaattgatcagaaggaaaataggttccacagtgtaagctacaaatgcacaaaatctgatgataatactagttttcattctgagaatgttgagtttgttgacaaacatgttgcttttgagtcaccagacaatggcatgtattctagtgatggttcacaaagagcaatcaccactgaaggttggcctgctggtgatggagttaaagcagatgaagaaaatctgcttggcaaagtggaagaatgtcaaattagatataaaaatggtaataagaacacaatactatctgtctatggggaaggtaatgtttgtgaacacatacctacaaagggtgaaaatgatgtttttcatcaccaaccatctcatgccctttctacgactaattgtacacatggtttagtatctgaagacagaacacaagcaaggccagatcatcacctagagctggtgggatgctacctgcatccaatgcctgtcttgtctgtcatgttaaacactaaaaatcataacagcctctatatttatgtattgtgtggccttttggagagctgccaaaggttcctttatgtttactctatcaatcccaaagaccagaaagatgtgtcaccatgttttgttggttacactccccttgtactgcccaccttggaccattcttcaacaggaaattttctgtttggaagatctggtttgcattttacacctgatggccagtttctggtcctcctgagcagcatcaaaataccttcttgcaggttgtaatcataatcccagtgacatgcaggaaaatgttgtatatacttcctctgtccacaaaaggacgcaattctcacttttcgagaagtgaaatgattcgaagttcgactacagttatataaaagagtacaaacatttatgatataagataagtactgttaatctagttgatgacataattgttaatacttttcactatagacttggtcaaagttaatctagtttaacttgcacaaatcccgtagttgcatccttttatggacggagggagtataccttatgctggtgctgattaaatattcttattgacaggatgcaaaacattgattgcttgtgcccagtctgcaacttgtgtcaatgtgaagataattctttaaaaattgtatctgttaactcgggctatgcttcacttgtaaccaatttgatgccttatgggacagtgtcgtgcattctgatatttgaaccaaattacattgtagctattgaagacagcagaaacctgcatatctgggaaatggttgatgggtggagtgagatatctgagcagtatatgattcctagtttgggtaacatgggtcctatactggagcttacaaggatgccaaaaaacacatctctcattattggccatgatggcgaaggcggtttttgtttgtgggacatctccaagcgcacactattggcgacttttgcagctccaggaaacactgtcttccagattctgccagttggcttatgtagtttgcaggaggatattattcatgctccagttgatgacatagataaaaatctacaagtgatcacagtcggtgacttgtacagaaaaaatgtcagggtgaactttgtgacgccgccaagacaagatatagcagtttgggtcctgatttcttgtgcttctgtggctgagtatcaacatgatcttcaagccaaggaaaacagtgcacgatggaggtttgctctgttagcgaagaagagagtttttatcggaaatgttttggatacaagaattactgctttagatgcctgcggtaactacggatacgctgggacacatggtggtctgctgtatctgtgggaattgtcttcggggagaaaagtgacgggaacacagtgtttcaacagacaaggtacaggcggctgatgacggagcagatgggcgcatacctgtttaagatgaataaaagtagtcattgtggcaagctaatagaagttctgcaattttgtatataatgcttacattttgctgtgtctatgaggttttggtctgttgcacttattttttcttatgcaacacagcaaggatagtttgctgtatgttgctccatctgcttgacctgttaagtacactgtagatgtctatgtcagcaggtatgtatcctctttgtgaatatagacgatagatgctgtaacaccagactcaagggccaggaagcatgattaaaaactcgccagaccttcgtgccttgctggtcctttcagctagagaggttggctttcttt

SEQ ID NO: 26284 - DNA, 3238 bp, Zea Mays
atggcagcggcggaggacgcagagggcgaccgcgtgattgaggtcgtgtcagcgggggcactctaccaccgcggcggcgactgggagcgcaaatactggagctgctcgaggggcaaggaccggtacccttacccagtgggttaccatgccgtccgccattttactggaatatcctatgctatggaaatccaacagggacctagaggtccaatattcctggttacatccaccgaaggagatacagcgatagggcagacccctgatatcgcttggaagaacttccagaaaaagactggggctaaagtgaagaactggcagaggagaaagagcttccctcaaaggattgatggtgctgagctttttgggttcaaaaatgcatctattcagagattgcttcgtgagcttatagtagattcaactggagcagttgaacttaacgagccttgtgaagtcacttctgaggctggtgcacatttagtttgtaaagatgcatctgatgtttctgaggctgaagatccatccgtttgcttaggcatggaaagtggaactcctaaaagaagtatagagcccagccaggtggaaaataccttggcagtccactacccggacatgttaacagcagttgataagtgcaatgtatccacacataaaaatacaaatgaaggagatactgtaggtagagcactgttgcaagatgtctctgattcaagatgcacacttccattgctggaagaagtccctaagaatgcacaatccacttctcttgatgataatttgggagagtcttctctagtttcatctcaacaagttggtttatcttctggttcttatttgaactctgaaaagtctgatatagaattggctgagaaggaagtagcaaagtctatgatgtctattttgcttccccaagctattccccttctcatgaaaagttacaaaaggaagaaattcaagcataaaaatagagaaaactctactgtttcagtgaaaacagtttcagcttacaatccatctgatagttgctgccgaggtgtgactgtaccaacaattgtgggtgaaggtacaaatggaaatagttctgaaatgtgtgaccatgggggatctcatcatgacaaggttaaaaatggctttgccaatgaggactgcagaaatgacgacttagtggttaaattagatgagatgaatgattatgttgcagatagttttgaggatgatgcacaaattttgggcgacaacacaacaaaatcaatgggtaaccatcatcattattctgagtatgtgctctctagggggcctaatgagaagtcaaagctgctaaatggtaaaagtgaagtttttgagtatcaggctagtgtgcataatggcaaaagggcacctgatgtggtatacaatcatgaaaatggacaatatatgttgtctgattcgcttgttgcttgtctagaggatgagttcggtggggaagatagttcccaccctgcaaactacaaccagtttaatggcgatgttaaacaattcgagcagcaatttaaggagcttacagctgttataaaaaatggctcatcagttccggtggatgtttcataccacaagaacactgataatggatcaattaatgtttgtgcacaagcttttgctagaaatggtccaggagtttcgaggaatgaggagtgtttagcaaatatcttgcctgctccagttcattctaatgcacataatgatgctgtaacgagtggtaagcatgatgtgagttcaactttgaatttgccacctgcatgtgaggcaaaatctactttgttggtcatgcgagatggacaacatcatactgaagtgccagcaattgatcagaaggaaaataggttccacagtgtaagctacaaatgcacaaaatctgatgataatactagttttcattctgagaatgttgagtttgttgacaaacatgttgcttttgagtcaccagacaatggcatgtattctagtgatggttcacaaagagcaatcaccactgaaggttggcctgctggtgatggagttaaagcagatgaagaaaatctgcttggcaaagtggaagaatgtcaaattagatataaaaatggtaataagaacacaatactatctgtctatggggaaggtaatgtttgtgaacacatacctacaaagggtgaaaatgatgtttttcatcaccaaccatctcatgccctttctacgactaattgtacacatggtttagtatctgaagacagaacacaagcaaggccagatcatcacctagagctggtgggatgctacctgcatccaatgcctgtcttgtctgtcatgttaaacactaaaaatcataacagcctctatatttatgtattgtgtggccttttggagagctgccaaaggttcctttatgtttactctatcaatcccaaagaccagaaagatgtgtcaccatgttttgttggttacactccccttgtactgcccaccttggaccattcttcaacaggaaattttctgtttggaagatctggtttgcattttacacctgatggccagtttctggtcctcctgagcagcatcaaaataccttcttgcaggatgcaaaacattgattgcttgtgcccagtctgcaacttgtgtcaatgtgaagataattctttaaaaattgtatctgttaactcgggctatgcttcacttgtaaccaatttgatgccttatgggacagtgtcgtgcattctgatatttgaaccaaattacattgtagctattgaagacagcagaaacctgcatatctgggaaatggttgatgggtggagtgagatatctgagcagtatatgattcctagtttgggtaacatgggtcctatactggagcttacaaggatgccaaaaaacacatctctcattattggccatgatggcgaaggcggtttttgtttgtggtatgtctagcatctcagttgtcacttgtgtattgtgcagtgccagaggaaattattgctgttagcatgtttgtttatatttaatgcccgctgactgtattttatgtctgctggcttgcctgggatgcttcccttgcttgttgcctgggtttcccctctttcttagctacatctcggcttgttacctgagattcttcctctttcttaatatcagcttagtctctcttataaatccttgtaacctctcgaccttttcaataaataaaatacatagaagcatgtttatgctctttcatggtatcagataa

SEQ ID NO: 26285 - DNA, 2177 bp, Zea Mays
caacaatgcaagaacaggagctcaccaacaacgtatgtgtacacaatacctgttctgttgtacctgttgcagcttgcgcctccatgttaccatcatcgtctgccacactctcacaagaaaattgtgtcgggaacatgtctggtagtagagcaacaacatttacattgatgttgtttgtcgaggcctgcgggtagacggtagagacaccactctgtggtagccgcatcggacgaggagcaccatggactggagggcgggctttcggagatgcggatggcgggcactgcatattattgtggaaggtgagcgatagtgcgcgatagaagcgagagcgagatggggaatgctgtgagccaggcggcttgcgcggttcaggcgaggaagtccggcggggacgcacctacatgctactggcggcactcacggagacgagctccgggatgacgagtagctagcggtggagcttcgcagggaggccagccgcgcgtggcagcgaggccgctagagaggggagatcggggctacgcgcgctaggttggcggagcgcgtggagaggggagttgggggcggcgagcgccagaagagggagggcggcacagatgtttcgtcgcggcgggaaagaaaaaaaaaacagcgattgcggcctcgggagctctgcgtagttatgcgccagataacactcgttttcatccgcctatccaccggtatccacgcgttccccaatcgagcaaaaatcaatcccagatcccaatccctacacccacctcccaacaaaccctaactttacccctccaccgagcgcaaccggctgcgaccaaagatgccggcgacggcggggcgcgtccgcatgcccgcgaacaaccgcgtgcacagcagcgcggcattgcagacgcacggcatctggcagagcgccatcggatacgacccctacgcgcccgagaacaacaagcaacagccgggccgcccctcctcctccgtctccgccgccgctgccgccgcggccgccaacgacgccaacgcagccgccagcgccgcagcagcttccggatccggctcgagcgatggcaacgcctacaccagcttccagggcctcctcgcgctcgcccgcatcaccggctccaactccgatgagacacgcggcgcctgcaagaagtgcggccgcgttggccacctcaccttccagtgccgcaacttcctctccgtcaaggacctggacctggacgacgcccaggccgctgcacaggcagccgcgcaggccaagttcgacgaaataaaaaagaaggctgctgctggtggggacgcagatgaggcttctgatgacctcgaagaggaggaagaggacagcgattcctctgattcagacgtcgaccctgagctggagaagataattgctcagcgcgagcgtgccaggaatggaggacggaggcacaggcaggaagagaagtcgttgagccaccgctataggagcagcagcagcaagagaaaatcaaagcacacaaggagttggagaagtgatgatactgaggatgaagaggaggaaggcagaagaggcagggacaggaagaagaggtccagcagatcgaaaaagcatgaaagatcagatgaggctagcagtgatgactctgactcagataggcagagacacaggaagagcaggaagaacagatcagatgaggctagcagcgatgactctgactcagataggcataggcgcaggaagggcaggaaggacaggaagagaaggaggagggagacgccaatgtcaccgcaagcggagccatcaccaaagggatgcatctgactgtgacaaaggtggcagtgattatgcagatgaaaagaagcaatcgagcaggcggaggaggcaccgccagtcagaaagcagtgggttggatgaggatgagcggcgtgatccccgaggagcaaagcgatctgaggagaagaacagggaccgcaagaggagctaaagaggagcattgaattgtgctagatgcttaatcggagggaacgatggggtcacacgggtcacaccgaggccttctgagcattgccatcaataggcgccaggcgggagtgttttatcactttatgaacagtcagtctgccgatatctatctgatcgcatgctaccttttgacgagggatcccattgtgttctagtggatttcaccctagttgtg

SEQ ID NO: 26286 - DNA, 2181 bp, Zea Mays
gaacaaagttggacccagccttgcctctccccgtggagaattcaaagctccgccgtgtcctcttctggataccggaagtcgtcgccgtccttggaatggcttggcttccttcgctaggaggttttctttctttccggccgactctgtttcttcgaaccttgctcttccagtcagtcgtccttggctcctcttcttccccacacaaacacaacggaatagtcccgaccatactggaaaaccggcgaacttggaaagcaagtcaacaagagtatggcgtccatggagagcctgatcgggatgatgaaccgcatccagcgcgcctgcaccgccctcggagaccacggaggaggaagcgacttgcccaccctctgggagtcgctcccaaccatcgccgtcgtcggaggccagagctcgggcaagtcctctgtacttgagagcattgttggcaccgattttcttccccgaggatcgggaattgtcacgcgaaggcctttagtgttgcagctgcaacagacagaggatggatctcaggaatatgcagagttcttgcatatgccgaaaagaaggttttcagactttgcccttgttcgccaagaaattgctgatgagacggataggctgactggaaaaactaagcaaatatctcctgtccctattcatctcagcatctactcgcccaaggttgtgaacttaacaatgattgatcttcctgggttgacaaaagttgctgtagagggacaatctgaaagtattgtgcaagatatagagaatatggttcgctcatatgttgataagcccaactgtattattttggctatatctccagcaaatcaggatattgcaacttctgatgcaattaagctctcaaaagaagttgatccaacaggtgaaaggacgttcggtgtgttgacaaaactggacttaatggacaaaggaacaaatgctctcgatgttcttgagggaagagcctatcggctgcagaatccttgggttggaatcgtcaatcgctcacaagcagatattaataggaaggttgacatgatttcagcgagggaaaaagaaagggaatattttgaaacaagtcctgactatgctcatttatcaagtcgtatgggttctggatatcttgctaagcttctttctcagcatcttgaatctgttatcaaagcacacattcctagtatcacagcgacaatcaacaaaactatagacgaacttgaatcagagctggacatcatagggagagctgtggctgctgatccaggggctcaactgtacaccatactggacctctgccgtgcttttgaccgtgttttcaaggaacatcttgatggagggaggtcaggtggagatagaatatacggcgtgtttgaccataagctccctgctgcttttaagaagctttccttcgaccgctacctgtcggtgcaaaacgtgaagaaggtggtttcagaagcagatggctatcagccccatctcatggcacctgaacaagggtaccggcggcttattgagaagggcatcaactatttcagaggaccagctgaagccacggttgatgcggtccacgttgttctaaaagacttggtcaggaaatccataggggagacagagcaactcagaagatttccgacgcttcaagcagcgatcgcgaccgctgcaaacgaagccctggagcgattccgggaggacgggcgcagcacggcgcttcgtctggtggacatggaggctgcgtacgtgacggtggagttcttccggaagctccctcaggatcctcctgctgatgcgcctgctagcaaggctggaggcaagccttcagcggagccggcggctgcgccgcctcctgaccgctacggtgacgggcacttcaggagcatcgcctccaacgtgtcccagtacatccggatggttggagacgagctcctgcagaagatccccaaggcagctgtccactgccaggttcgcgaggccaagaggtctctgctcaaccatttctacgtgcagatggggaagaaagaggctggggagtttgggcatatgctggacgaggacccggcgatgatggagcgccggcagcagtgcttcaagaggctggagctgtacaaatctgccagggatgaggttgattctgtggcatgggggggcagcagcagataggaacggattaatcccagagctaag

SEQ ID NO: 26287 - DNA, 2219 bp, Zea Mays
gtccttggaatggcttggcttccttcgctaggaggttttctttctttccggccgactctgtttcttcgaaccttgctcttccagtcagtcgtccttggctcctcttcttccccacacaaacacaacggaatagtcccgaccatactggaaaaccggcgaacttggaaagcaagtcaacaagagtatggcgtccatggagagcctgatcgggatgatgaaccgcatccagcgcgcctgcaccgccctcggagaccacggaggaggaagcgacttgcccaccctctgggagtcgctcccaaccatcgccgtcgtcggaggccaggaattgtcacgcgaaggcctttagtgttgcagctgcaacagacagaggatggatctcaggaatatgcagagttcttgcatatgccgaaaagaaggttttcagactttgcccttgttcgccaagaaattgctgatgagacggataggctgactggaaaaactaagcaaatatctcctgtccctattcatctcagcatctactcgcccaaggattgaaatgtctttttccagttgtgaacttaacaatgattgatcttcctgggttgacaaaagttgctgtagagggacaatctgaaagtattgtgcaagatatagagaatatggttcgctcatatgttgataagcccaactgtattattttggctatatctccagcaaatcaggatattgcaacttctgatgcaattaagctctcaaaagaagttgatccaacaggtgaaaggacgttcggtgtgttgacaaaactggacttaatggacaaaggaacaaatgctctcgatgttcttgagggaagagcctatcggctgcagaatccttgggttggaatcgtcaatcgctcacaagcagatattaataggaaggttgacatgatttcagcgagggaaaaagaaagggaatattttgaaacaagtcctgactatgctcatttatcaagtcgtatgggttctggatatcttgctaagcttctttctcagcatcttgaatctgttatcaaagcacacattcctagtatcacagcgacaatcaacaaaactatagacgaacttgaatcagagctggacatcatagggagagctgtggctgctgatccaggggctcaactgtacaccatactggacctctgccgtgcttttgaccgtgttttcaaggaacatcttgatggagggttggcaccatcatccttatttcgcatcttgtatttgtttcgcgtcttgtgaactcttggttgcctaactcaggaggtcaggtggagatagaatatacggcgtgtttgaccataagctccctgctgcttttaagaagctttccttcgaccgctacctgtcggtgcaaaacgtgaagaaggtggtttcagaagcagatggctatcagccccatctcatggcacctgaacaagggtaccggcggcttattgagaagggcatcaactatttcagaggaccagctgaagccacggttgatgcggtccacgttgttctaaaagacttggtcaggaaatccataggggagacagagcaactcagaagatttccgacgcttcaagcagcgatcgcgaccgctgcaaacgaagccctggagcgattccgggaggacgggcgcagcacggcgcttcgtctggtggacatggaggctgcgtacgtgacggtggagttcttccggaagctccctcaggatcctcctgctgatgcgcctgctagcaaggctggaggcaagccttcagcggagccggcggctgcgccgcctcctgaccgctacggtgacgggcacttcaggagcatcgcctccaacgtgtcccagtacatccggatggttggagacgagctcctgcagaagatccccaaggcagctgtccactgccaggttcgcgaggccaagaggtctctgctcaaccatttctacgtgcagatggggaagaaagaggctggggagtttgggcatatgctggacgaggacccggcgatgatggagcgccggcagcagtgcttcaagaggctggagctgtacaaatctgccagggatgaggttgattctgtggcatgggggggcagcagcagataggtcagtggaagcattgtattcgtagggatattcttgttgtatatacaatacaattctatatatattacggtattacatactctaaaaacaaaaaatgatataatttataataaaaaata

SEQ ID NO: 26288 - DNA, 2195 bp, Zea Mays
gtccttggaatggcttggcttccttcgctaggaggttttctttctttccggccgactctgtttcttcgaaccttgctcttccagtcagtcgtccttggctcctcttcttccccacacaaacacaacggaatagtcccgaccatactggaaaaccggcgaacttggaaagcaagtcaacaagagtatggcgtccatggagagcctgatcgggatgatgaaccgcatccagcgcgcctgcaccgccctcggagaccacggaggaggaagcgacttgcccaccctctgggagtcgctcccaaccatcgccgtcgtcggaggccaggaattgtcacgcgaaggcctttagtgttgcagctgcaacagacagaggatggatctcaggaatatgcagagttcttgcatatgccgaaaagaaggttttcagactttgcccttgttcgccaagaaattgctgatgagacggataggctgactggaaaaactaagcaaatatctcctgtccctattcatctcagcatctactcgcccaaggttgtgaacttaacaatgattgatcttcctgggttgacaaaagttgctagggacaatctgaaagtattgtgcaagatatagagaatatggttcgctcatatgttgataagcccaactgtattattttggctatatctccagcaaatcaggatattgcaacttctgatgcaattaagctctcaaaagaagttgatccaacaggtgaaaggacgttcggtgtgttgacaaaactggacttaatggacaaaggaacaaatgctctcgatgttcttgagggaagagcctatcggctgcagaatccttgggttggaatcgtcaatcgctcacaagcagatattaataggaaggttgacatgatttcagcgagggaaaaagaaagggaatattttgaaacaagtcctgactatgctcatttatcaagtcgtatgggttctggatatcttgctaagcttctttctcagcatcttgaatctgttatcaaagcacacattcctagtatcacagcgacaatcaacaaaactatagacgaacttgaatcagagctggacatcatagggagagctgtggctgctgatccaggggctcaactgtacaccatactggacctctgccgtgcttttgaccgtgttttcaaggaacatcttgatggagggttggcaccatcatccttatttcgcatcttgtatttgtttcgcgtcttgtgaactcttggttgcctaactcaggaggtcaggtggagatagaatatacggcgtgtttgaccataagctccctgctgcttttaagaagctttccttcgaccgctacctgtcggtgcaaaacgtgaagaaggtggtttcagaagcagatggctatcagccccatctcatggcacctgaacaagggtaccggcggcttattgagaagggcatcaactatttcagaggaccagctgaagccacggttgatgcggtccacgttgttctaaaagacttggtcaggaaatccataggggagacagagcaactcagaagatttccgacgcttcaagcagcgatcgcgaccgctgcaaacgaagccctggagcgattccgggaggacgggcgcagcacggcgcttcgtctggtggacatggaggctgcgtacgtgacggtggagttcttccggaagctccctcaggatcctcctgctgatgcgcctgctagcaaggctggaggcaagccttcagcggagccggcggctgcgccgcctcctgaccgctacggtgacgggcacttcaggagcatcgcctccaacgtgtcccagtacatccggatggttggagacgagctcctgcagaagatccccaaggcagctgtccactgccaggttcgcgaggccaagaggtctctgctcaaccatttctacgtgcagatggggaagaaagaggctggggagtttgggcatatgctggacgaggacccggcgatgatggagcgccggcagcagtgcttcaagaggctggagctgtacaaatctgccagggatgaggttgattctgtggcatgggggggcagcagcagataggtcagtggaagcattgtattcgtagggatattcttgttgtatatacaatacaattctatatatattacggtattacatactctaaaaacaaaaaatgatataatttataataaaaaata

SEQ ID NO: 26289 - DNA, 2199 bp, Zea Mays
cccagccttgcctctccccgtggagaattcaaagctccgccgtgtcctcttctggataccggaagtcgtcgccgtccttggaatggcttggcttccttcgctaggaggttttctttctttccggccgactctgtttcttcgaaccttgctcttccagtcagtcgtccttggctcctcttcttccccacacaaacacaacggaatagtcccgaccatactggaaaaccggcgaacttggaaagcaagtcaacaagagtatggcgtccatggagagcctgatcgggatgatgaaccgcatccagcgcgcctgcaccgccctcggagaccacggaggaggaagcgacttgcccaccctctgggagtcgctcccaaccatcgccgtcgtcggaggccaggaattgtcacgcgaaggcctttagtgttgcagctgcaacagacagaggatggatctcaggaatatgcagagttcttgcatatgccgaaaagaaggttttcagactttgcccttgttcgccaagaaattgctgatgagacggataggctgactggaaaaactaagcaaatatctcctgtccctattcatctcagcatctactcgcccaaggttgtgaacttaacaatgattgatcttcctgggttgacaaaagttgctgtagagggacaatctgaaagtattgtgcaagatatagagaatatggttcgctcatatgttgataagcccaactgtattattttggctatatctccagcaaatcaggatattgcaacttctgatgcaattaagctctcaaaagaagttgatccaacaggtgaaaggacgttcggtgtgttgacaaaactggacttaatggacaaaggaacaaatgctctcgatgttcttgagggaagagcctatcggctgcagaatccttgggttggaatcgtcaatcgctcacaagcagatattaataggaaggttgacatgatttcagcgagggaaaaagaaagggaatattttgaaacaagtcctgactatgctcatttatcaagtcgtatgggttctggatatcttgctaagcttctttctcagcatcttgaatctgttatcaaagcacacattcctagtatcacagcgacaatcaacaaaactatagacgaacttgaatcagagctggacatcatagggagagctgtggctgctgatccaggggctcaactgtacaccatactggacctctgccgtgcttttgaccgtgttttcaaggaacatcttgatggagggaggtcaggtggagatagaatatacggcgtgtttgaccataagctccctgctgcttttaagaagctttccttcgaccgctacctgtcggtgcaaaacgtgaagaaggtggtttcagaagcagatggctatcagccccatctcatggcacctgaacaagggtaccggcggcttattgagaagggcatcaactatttcagaggaccagctgaagccacggttgatgcggtccacgttgttctaaaagacttggtcaggaaatccataggggagacagagcaactcagaagatttccgacgcttcaagcagcgatcgcgaccgctgcaaacgaagccctggagcgattccgggaggacgggcgcagcacggcgcttcgtctggtggacatggaggctgcgtacgtgacggtggagttcttccggaagctccctcaggatcctcctgctgatgcgcctgctagcaaggctggaggcaagccttcagcggagccggcggctgcgccgcctcctgaccgctacggtgacgggcacttcaggagcatcgcctccaacgtgtcccagtacatccggatggttggagacgagctcctgcagaagatccccaaggcagctgtccactgccaggttcgcgaggccaagaggtctctgctcaaccatttctacgtgcagatggggaagaaagaggctggggagtttgggcatatgctggacgaggacccggcgatgatggagcgccggcagcagtgcttcaagaggctggagctgtacaaatctgccagggatgaggttgattctgtggcatgggggggcagcagcagataggtcagtggaagcattgtattcgtagggatattcttgttgtatatacaatacaattctatatatattacggtattacatactctaaaaacaaaaaatgatataatttataataaaaaata

SEQ ID NO: 26290 - DNA, 2276 bp, Zea Mays
gaacaaagttggacccagccttgcctctccccgtggagaattcaaagctccgccgtgtcctcttctggataccggaagtcgtcgccgtccttggaatggcttggcttccttcgctaggaggttttctttctttccggccgactctgtttcttcgaaccttgctcttccagtcagtcgtccttggctcctcttcttccccacacaaacacaacggaatagtcccgaccatactggaaaaccggcgaacttggaaagcaagtcaacaagagtatggcgtccatggagagcctgatcgggatgatgaaccgcatccagcgcgcctgcaccgccctcggagaccacggaggaggaagcgacttgcccaccctctgggagtcgctcccaaccatcgccgtcgtcggaggccagagctcgggcaagtcctctgtacttgagagcattgttggcaccgattttcttccccgaggatcgggaattgtcacgcgaaggcctttagtgttgcagctgcaacagacagaggatggatctcaggaatatgcagagttcttgcatatgccgaaaagaaggttttcagactttgcccttgttcgccaagaaattgctgatgagacggataggctgactggaaaaactaagcaaatatctcctgtccctattcatctcagcatctactcgcccaaggttgtgaacttaacaatgattgatcttcctgggttgacaaaagttgctgtagagggacaatctgaaagtattgtgcaagatatagagaatatggttcgctcatatgttgataagcccaactgtattattttggctatatctccagcaaatcaggatattgcaacttctgatgcaattaagctctcaaaagaagttgatccaacaggtgaaaggacgttcggtgtgttgacaaaactggacttaatggacaaaggaacaaatgctctcgatgttcttgagggaagagcctatcggctgcagaatccttgggttggaatcgtcaatcgctcacaagcagatattaataggaaggttgacatgatttcagcgagggaaaaagaaagggaatattttgaaacaagtcctgactatgctcatttatcaagtcgtatgggttctggatatcttgctaagcttctttctcagcatcttgaatctgttatcaaagcacacattcctagtatcacagcgacaatcaacaaaactatagacgaacttgaatcagagctggacatcatagggagagctgtggctgctgatccaggggctcaactgtacaccatactggacctctgccgtgcttttgaccgtgttttcaaggaacatcttgatggagggaggtcaggtggagatagaatatacggcgtgtttgaccataagctccctgctgcttttaagaagctttccttcgaccgctacctgtcggtgcaaaacgtgaagaaggtggtttcagaagcagatggctatcagccccatctcatggcacctgaacaagggtaccggcggcttattgagaagggcatcaactatttcagaggaccagctgaagccacggttgatgcggtccacgttgttctaaaagacttggtcaggaaatccataggggagacagagcaactcagaagatttccgacgcttcaagcagcgatcgcgaccgctgcaaacgaagccctggagcgattccgggaggacgggcgcagcacggcgcttcgtctggtggacatggaggctgcgtacgtgacggtggagttcttccggaagctccctcaggatcctcctgctgatgcgcctgctagcaaggctggaggcaagccttcagcggagccggcggctgcgccgcctcctgaccgctacggtgacgggcacttcaggagcatcgcctccaacgtgtcccagtacatccggatggttggagacgagctcctgcagaagatccccaaggcagctgtccactgccaggttcgcgaggccaagaggtctctgctcaaccatttctacgtgcagatggggaagaaagaggctggggagtttgggcatatgctggacgaggacccggcgatgatggagcgccggcagcagtgcttcaagaggctggagctgtacaaatctgccagggatgaggttgattctgtggcatgggggggcagcagcagataggtcagtggaagcattgtattcgtagggatattcttgttgtatatacaatacaattctatatatattacggtattacatactctaaaaacaaaaaatgatataatttataataaaaaata

SEQ ID NO: 26291 - DNA, 1844 bp, Zea Mays
tcccctggcaagtggcacacgcgcacacagtaggcacaggtttggaagccgcgtggagactggaggggaaggtcccgtcgtctccaccttccccactggcaccgccccccagccgagccgccacagcccacagggcaggcagcccgtgcccggcgtcgttttcccggaccccgcgtgcgtgctaacattcgcacgtcaagtccgtatttataccggccgcctacctcccggtgttgctccagttcgtggagtggagtcaccacagaatcaaagaaaagctttcccccgatcctctcgcggacaccagcgatgggttcccgctacgaggtggaggtcaccgtcggctccgcccgggacctcaagaacgtcaactggcgcaacggcgacctcaagccctacgccgtggtgtggatcgactccggcagcaagtgctcgacccgcgtcgacctcgacaacggcgagagcccggcgtgggacgagaagctgctcgtcccgctcccgcccacctcccgcctcgacgacgccgtcctctacgtcgacgtcgtccacgccaacgccgcccagggcgtcaagccgctcgtcggctccgcgcgcctcccgctccgcgacgtcctcgacgacgccggggtcgggggcaaggcctcgcgcagcctccgcctcaagcgcccctcgggccgcccccacggccgcctcgacgtccgcgtcgccgtcaaggagccgtccaggtactacgaccccaacccctacccggcccccgcggcctacgccaacacgggcggcggcacccgtgacccctacggctcgtccgctgctgctgccggcggctactacggctccggaggcggatacggttccggtggtggcgcctacggtggcggcgcctacggcgccgcgcagccctacaccgcagcgcccccggcggggtacccttccacctacggcgccgcgccgccgcctcagccagcggcagcgtacggcgctcctcctgccgctgcatacggcgctcctcctgtcgccgccaccgccgcgtacggaaccggcgccgttgcttccgacgggaagaagaagaacaagatggggatggggacggggctggcagtgggcgcggcggcgggcgtgctcggagggctggcgctggccggcggggcgagctacctggaggacaagttcgaggagcgcgtgtcggagcgggtggaggacaacctggagagggaggagtcgtacggcggcggcggcggcggctacgggggtggctacgacgactatggcggcaacgacgactatggcggcgacgacgactactgatggtttcttttctcagttgtggtttatcgcggcggggttgatgttgagatttgagatcctcacctgaggaatggaaaaatgctcacctgaggaatggaaaaatggtaagggcttgttcggttattcctatcccatgtggattggatgggattggaaaaaattatgaaagattttaacttgtttgagattgaaatccatccaatcccacctaatccacatgaattaagagcaaaacgaatatgccctaaattgattaattcggttgctactccttcgtcttggcaagtttaggatgtatcaatttgtgcgaatagttgatgttaccaaaggttccacgctagggagacaccaggggagagcttcgcgcgtggaagccatttctctacagtaacttacggtgaccggtgtgtgcttagatggtgaataagcgtaaggtccgcgagcccggtacgaaacccgctgtttgggtccggtccgagccctgtgggctcggactggcccggcacaaataagtgggccagactcggacaggaaactag

SEQ ID NO: 26292 - DNA, 2727 bp, Zea Mays
gcagaaccaagcgaagcatggtgaggcagctgccacacatccgaaaagggcgtagcgccagcgacgtgagccgagtggagatcagatgcaattaaccgcggctggagatcgatgagggggaaggattagtgttggtgcgcggcgagggatttcgtcgaacactttggcagcggggcacgcggcctgccgcagatcttgctggtcactgttcccgcgatcgactggaaaggtgtgctagtacattttgtgggcctatgtggtctgttgaaagagaggggaggagacaacacaaccctcgcccctcgtcttcattcgctcgtccgatcaggaaggacggtggatgaaaaagcgccctgcacgcctgaacaatcggcattattgttcactatctccttttgttttccctctcccgttcatctctctcctctttggccttcctttccttgcgacgacgactgggacgagcgccccccgcgcttctgcaggcgagcaccccgccaccagtcggagatgaacgcgtccaggaaatccagccatctctccagcaaggacagtgcagagaccgcgagggatatcatcaccacgtccggccaaatccaacccctcaaaatcccggacgctgttgctgcgctcgcacaggctgctgcaaaggcaaatggtgagaccgagaaatatcttccagggtggccgttgttctcgcctcctaaggtgcagttggacaagtgtaccaagtgctccagagaattctgttctgcaatcaacttccggaggcacacacgtgttcatcgtagatccctcaagatagataggctcactgtggatgatgccagcaaaattttgtccttgacaggtgttgttattgagggtgtaactggttcatcaattttgacagcactgtcatcatggatgtgtaaaccagggtatgcttcgttgccagttgcatatgccagagctggcagtgagcttctggatctaattcaagcaaagccttcaatgcatctgcctgtttcatcggatgaactatttagtttgctcgatgaagcaagtgaaaaaacatttctttgcacaaatacagctgcttgtatacagaagtttttatttgatggagaggtagaaaaaattgcaactgagttgaaaaatgttgtttcgtgcgctagttacatgcttgaacaaaagctgcttgaagcatggtgtgctgataagactgctgaagcattaagatgccagaagttgctggaggatgaagaggaagctgctcagaaaaggcaagccgaactgatggaaaggaagcggatgaagaaacttaggcagaaagaacagaggttaaaaaacctcaaggatgaggatgcgacagttcagtcacctgaaatcatggatgatgcgacatgttctactgccattcaaagtgtgaattccatttatgatcctgactgttttgagcaagaagaatcgcagtatcttcaatttccagcactaattactttggaaactgacaatgattttaatgtggacctaccagtagaagatatcagttgtgatttggggcctgaaatggataaaggtgttgtattaaggcaacaagttgtttcaaggcatcatttaggcagaacggagaagcttgctgaaagtagcattttatctggttccgtagttacttcaaagcatgcagctttagcaaggccttcaaattacaaggatccaaatgtctgttctgcaccaagtagaaacaaaacttgtgaattgaaactacggtctgagattgaagaacagtgccaaaaacatgagttagatgtagatgaacgtggcattggtcctagcaaaaactctcgtgtgctaataggatctataattgtcgcaattaaagattgtagtgaacacttgctggacttaggttccaagaatgacccagtacctcccaatgtaaagacaaagaaacatgcatcagtcaaggtggtgcaacaagttacccatgagggaaacagaaatgaaggtgttcctgatagtgataaccgttctagcctcagtgttactacagatgaaatcagttattcaacctgctgcgatgcagatttggcagtggatgaacatttacaatgcaccacgttttccagtgaagaagcgacagcctttctttctcaaagatggaaagaagcaatagccgccgatcacgtgaaacttgttgtgtcctgaaaactaaaggaatggcagaataaagaaattctgttgagggcaacagcatggaagctccggccgacttgtcgccggatcccacagccctacaacataggtggttcttatctagcctgcagggtgctatgaaagtttggatgtcaagtttgtgttgcggcatgaatggttgtaaaatggcaggtgcattttgcagctgatttgagattgaagcagagggttctagttttacaaggggacagcttgtgtgatgggatctgtttttggtaaggaaaaaaaagagtgatttgaataatggtttggtcgcacaagttcctaatcttttgtactcgttagagtctgctaaacacgaaatgcatgtgtgttgaacatgttgtgcttgcgggttgcggctttcatattgtcccagttctttctgctgtcagttcacgtaactcgcgttcattttgtatcgcttcgtgctgtataacccgtactatttgcaatctattctggaagtctgcagaaactaagtaatttatagattgaactatttgatga

SEQ ID NO: 26293 - DNA, 2718 bp, Zea Mays
gcagaaccaagcgaagcatggtgaggcagctgccacacatccgaaaagggcgtagcgccagcgacgtgagccgagtggagatcagatgcaattaaccgcggctggagatcgatgagggggaaggattagtgttggtgcgcggcgagggatttcgtcgaacactttggcagcggggcacgcggcctgccgcagatcttgctggtcactgttcccgcgatcgactggaaaggtgtgctagtacattttgtgggcctatgtggtctgttgaaagagaggggaggagacaacacaaccctcgcccctcgtcttcattcgctcgtccgatcaggaaggacggtggatgaaaaagcgccctgcacgcctgaacaatcggcattattgttcactatctccttttgttttccctctcccgttcatctctctcctctttggccttcctttccttgcgacgacgactgggacgagcgccccccgcgcttctgcaggcgagcaccccgccaccagtcggagatgaacgcgtccaggaaatccagccatctctccagcaaggacagtgcagagaccgcgagggatatcatcaccacgtccggccaaatccaacccctcaaaatcccggacgctgttgctgcgctcgcacaggctgctgcaaaggcaaatggtgagaccgagaaatatcttccagggtggccgttgttctcgcctcctaaggtgcagttggacaagtgtaccaagtgctccagagaattctgttctgcaatcaacttccggaggcacacacgtgttcatcgtagatccctcaagatagatagggattttccaaagaatagagaccttctcgctgcattctggaataaaggtgtaactggttcatcaattttgacagcactgtcatcatggatgtgtaaaccagggtatgcttcgttgccagttgcatatgccagagctggcagtgagcttctggatctaattcaagcaaagccttcaatgcatctgcctgtttcatcggatgaactatttagtttgctcgatgaagcaagtgaaaaaacatttctttgcacaaatacagctgcttgtatacagaagtttttatttgatggagaggtagaaaaaattgcaactgagttgaaaaatgttgtttcgtgcgctagttacatgcttgaacaaaagctgcttgaagcatggtgtgctgataagactgctgaagcattaagatgccagaagttgctggaggatgaagaggaagctgctcagaaaaggcaagccgaactgatggaaaggaagcggatgaagaaacttaggcagaaagaacagaggttaaaaaacctcaaggatgaggatgcgacagttcagtcacctgaaatcatggatgatgcgacatgttctactgccattcaaagtgtgaattccatttatgatcctgactgttttgagcaagaagaatcgcagtatcttcaatttccagcactaattactttggaaactgacaatgattttaatgtggacctaccagtagaagatatcagttgtgatttggggcctgaaatggataaaggtgttgtattaaggcaacaagttgtttcaaggcatcatttaggcagaacggagaagcttgctgaaagtagcattttatctggttccgtagttacttcaaagcatgcagctttagcaaggccttcaaattacaaggatccaaatgtctgttctgcaccaagtagaaacaaaacttgtgaattgaaactacggtctgagattgaagaacagtgccaaaaacatgagttagatgtagatgaacgtggcattggtcctagcaaaaactctcgtgtgctaataggatctataattgtcgcaattaaagattgtagtgaacacttgctggacttaggttccaagaatgacccagtacctcccaatgtaaagacaaagaaacatgcatcagtcaaggtggtgcaacaagttacccatgagggaaacagaaatgaaggtgttcctgatagtgataaccgttctagcctcagtgttactacagatgaaatcagttattcaacctgctgcgatgcagatttggcagtggatgaacatttacaatgcaccacgttttccagtgaagaagcgacagcctttctttctcaaagatggaaagaagcaatagccgccgatcacgtgaaacttgttgtgtcctgaaaactaaaggaatggcagaataaagaaattctgttgagggcaacagcatggaagctccggccgacttgtcgccggatcccacagccctacaacataggtggttcttatctagcctgcagggtgctatgaaagtttggatgtcaagtttgtgttgcggcatgaatggttgtaaaatggcaggtgcattttgcagctgatttgagattgaagcagagggttctagttttacaaggggacagcttgtgtgatgggatctgtttttggtaaggaaaaaaaagagtgatttgaataatggtttggtcgcacaagttcctaatcttttgtactcgttagagtctgctaaacacgaaatgcatgtgtgttgaacatgttgtgcttgcgggttgcggctttcatattgtcccagttctttctgctgtcagttcacgtaactcgcgttcattttgtatcgcttcgtgctgtataacccgtactatttgcaatctattctggaagtctgcagaaactaagtaatttatagattgaactatttgatga

SEQ ID NO: 26294 - DNA, 3148 bp, Zea Mays
acctcagtgcatgagccatggcaaggcggcgcgcatgcagcagaaccaagcgaagcatggtgaggcagctgccacacatccgaaaagggcgtagcgccagcgacgtgagccgagtggagatcagatgcaattaaccgcggctggagatcgatgagggggaaggattagtgttggtgcgcggcgagggatttcgtcgaacactttggcagcggggcacgcggcctgccgcagatcttgctggtcactgttcccgcgatcgactggaaaggtgtgctagtacattttgtgggcctatgtggtctgttgaaagagaggggaggagacaacacaaccctcgcccctcgtcttcattcgctcgtccgatcaggaaggacggtggatgaaaaagcgccctgcacgcctgaacaatcggcattattgttcactatctccttttgttttccctctcccgttcatctctctcctctttggccttcctttccttgcgacgacgactgggacgagcgccccccgcgcttctgcaggcgagcaccccgccaccagtcggagatgaacgcgtccaggaaatccagccatctctccagcaaggacagtgcagagaccgcgagggatatcatcaccacgtccggccaaatccaacccctcaaaatcccggacgctgttgctgcgctcgcacaggctgctgcaaaggcaaatgatcttccagggtggccgttgttctcgcctcctaaggtgcagttggacaagtgtaccaagtgctccagagaattctgttctgcaatcaacttccggaggcacacacgtgttcatcgtagatccctcaagatagatagggattttccaaagaatagagaccttctcgctgcattctggaataaactcactgtggatgatgccagcaaaattttgtccttgacaggtgttgttattgagggtgtaactggttcatcaattttgacagcactgtcatcatggatgtgtaaaccagggtatgcttcgttgccagttgcatatgccagagctggcagtgagcttctggatctaattcaagcaaagccttcaatgcatctgcctgtttcatcggatgaactatttagtttgctcgatgaagcaagtgaaaaaacatttctttgcacaaatacagctgcttgtatacagaagtttttatttgatggagaggtagaaaaaattgcaactgagttgaaaaatgttgtttcgtgcgctagttacatgcttgaacaaaagctgcttgaagcatggtgtgctgataagactgctgaagcattaagatgccagaagttgctggaggatgaagaggaagctgctcagaaaaggcaagccgaactgatggaaaggaagcggatgaagaaacttaggcagaaagaacagaggttaaaaaacctcaaggatgaggatgcgacagttcagtcacctgaaatcatggatgatgcgacatgttctactgccattcaaagtgtgaattccatttatgatcctgactgttttgagcaagaagaatcgcagtatcttcaatttccagcactaattactttggaaactgacaatgattttaatgtggacctaccagtagaagatatcagttgtgatttggggcctgaaatggataaaggtgttgtattaaggcaacaagttgtttcaaggcatcatttaggcagaacggagaagcttgctgaaagtagcattttatctggttccgtagttacttcaaagcatgcagctttagcaaggccttcaaattacaaggatccaaatgtctgttctgcaccaagtagaaacaaaacttgtgaattgaaactacggtctgagattgaagaacagtgccaaaaacatgagttagatgtagatgaacgtggcattggtcctagcaaaaactctcgtgtgctaataggatctataattgtcgcaattaaagattgtagtgaacacttgctggacttaggttccaagaatgacccagtacctcccaatgtaaagacaaagaaacatgcatcagtcaaggtggtgcaacaagttacccatgagggaaacagaaatgaaggtgttcctgatagtgataaccgttctagcctcagtgttactacagatgaaatcagttattcaacctgctgcgatgcagatttggcagtggatgaacatttacaatgcaccacgttttccagtgaagaagcgacagcctttctttctcaaagtaaacatcttgccgctattattttcgaacttccatgaagcgtggttaaccaataaattctcctccacttaagcgagttcatttcactatattaacttgacctagcagttctttctttctttacttttttttaaagaatacaagtaacgatctgtctatgctacatgagagtctgaggaaaagaaagcaagtactcaaattaactgatgccattcaaaaagtagacagcattactttggcatattatgtttggcactagagtaaaataattattcatatctttttaatcaggaatttttattgtggttcttccatatttagctcagtagtgaagcttggttgtattttgcaggatggaaagaagcaatagccgccgatcacgtgaaacttgttgtgtcctgaaaactaaaggaatggcagaataaagaaattctgttgagggcaacagcatggaagctccggccgacttgtcgccggatcccacagccctacaacataggtggttcttatctagcctgcagggtgctatgaaagtttggatgtcaagtttgtgttgcggcatgaatggttgtaaaatggcaggtgcattttgcagctgatttgagattgaagcagagggttctagttttacaaggggacagcttgtgtgatgggatctgtttttggtaaggaaaaaaaagagtgatttgaataatggtttggtcgcacaagttcctaatcttttgtactcgttagagtctgctaaacacgaaatgcatgtgtgttgaacatgttgtgcttgcgggttgcggctttcatattgtcccagttctttctgctgtcagttcacgtaactcgcgttcattttgtatcgcttcgtgctgtataacccgtactatttgcaatctattctggaagtctgcagaaactaagtaatttatagattgaactatttgatga

SEQ ID NO: 26295 - DNA, 2787 bp, Zea Mays
gagcacctcagtgcatgagccatggcaaggcggcgcgcatgcagcagaaccaagcgaagcatggtgaggcagctgccacacatccgaaaagggcgtagcgccagcgacgtgagccgagtggagatcagatgcaattaaccgcggctggagatcgatgagggggaaggattagtgttggtgcgcggcgagggatttcgtcgaacactttggcagcggggcacgcggcctgccgcagatcttgctggtcactgttcccgcgatcgactggaaaggtgtgctagtacattttgtgggcctatgtggtctgttgaaagagaggggaggagacaacacaaccctcgcccctcgtcttcattcgctcgtccgatcaggaaggacggtggatgaaaaagcgccctgcacgcctgaacaatcggcattattgttcactatctccttttgttttccctctcccgttcatctctctcctctttggccttcctttccttgcgacgacgactgggacgagcgccccccgcgcttctgcaggcgagcaccccgccaccagtcggagatgaacgcgtccaggaaatccagccatctctccagcaaggacagtgcagagaccgcgagggatatcatcaccacgtccggccaaatccaacccctcaaaatcccggacgctgttgctgcgctcgcacaggctgctgcaaaggcaaatggtgagaccgagaaatatcttccagggtggccgttgttctcgcctcctaaggtgcagttggacaagtgtaccaagtgctccagagaattctgttctgcaatcaacttccggaggcacacacgtgttcatcgtagatccctcaagatagatagggattttccaaagaatagagaccttctcgctgcattctggaataaactcactgtggatgatgccagcaaaattttgtccttgacaggtgttgttattgagcactgtcatcatggatgtgtaaaccagggtatgcttcgttgccagttgcatatgccagagctggcagtgagcttctggatctaattcaagcaaagccttcaatgcatctgcctgtttcatcggatgaactatttagtttgctcgatgaagcaagtgaaaaaacatttctttgcacaaatacagctgcttgtatacagaagtttttatttgatggagaggtagaaaaaattgcaactgagttgaaaaatgttgtttcgtgcgctagttacatgcttgaacaaaagctgcttgaagcatggtgtgctgataagactgctgaagcattaagatgccagaagttgctggaggatgaagaggaagctgctcagaaaaggcaagccgaactgatggaaaggaagcggatgaagaaacttaggcagaaagaacagaggttaaaaaacctcaaggatgaggatgcgacagttcagtcacctgaaatcatggatgatgcgacatgttctactgccattcaaagtgtgaattccatttatgatcctgactgttttgagcaagaagaatcgcagtatcttcaatttccagcactaattactttggaaactgacaatgattttaatgtggacctaccagtagaagatatcagttgtgatttggggcctgaaatggataaaggtgttgtattaaggcaacaagttgtttcaaggcatcatttaggcagaacggagaagcttgctgaaagtagcattttatctggttccgtagttacttcaaagcatgcagctttagcaaggccttcaaattacaaggatccaaatgtctgttctgcaccaagtagaaacaaaacttgtgaattgaaactacggtctgagattgaagaacagtgccaaaaacatgagttagatgtagatgaacgtggcattggtcctagcaaaaactctcgtgtgctaataggatctataattgtcgcaattaaagattgtagtgaacacttgctggacttaggttccaagaatgacccagtacctcccaatgtaaagacaaagaaacatgcatcagtcaaggtggtgcaacaagttacccatgagggaaacagaaatgaaggtgttcctgatagtgataaccgttctagcctcagtgttactacagatgaaatcagttattcaacctgctgcgatgcagatttggcagtggatgaacatttacaatgcaccacgttttccagtgaagaagcgacagcctttctttctcaaagatggaaagaagcaatagccgccgatcacgtgaaacttgttgtgtcctgaaaactaaaggaatggcagaataaagaaattctgttgagggcaacagcatggaagctccggccgacttgtcgccggatcccacagccctacaacataggtggttcttatctagcctgcagggtgctatgaaagtttggatgtcaagtttgtgttgcggcatgaatggttgtaaaatggcaggtgcattttgcagctgatttgagattgaagcagagggttctagttttacaaggggacagcttgtgtgatgggatctgtttttggtaaggaaaaaaaagagtgatttgaataatggtttggtcgcacaagttcctaatcttttgtactcgttagagtctgctaaacacgaaatgcatgtgtgttgaacatgttgtgcttgcgggttgcggctttcatattgtcccagttctttctgctgtcagttcacgtaactcgcgttcattttgtatcgcttcgtgctgtataacccgtactatttgcaatctattctggaagtctgcagaaactaagtaatttatagattgaactatttgatga

SEQ ID NO: 26296 - DNA, 2401 bp, Zea Mays
gccacgcttccagcctcttgttgtcacttattagctatctctcagctaacctccctaggaagaataataagctgcaaaaggcacaagggcgacgccgataccgatgcaaataccatagcgttgatgtaaagtggcgccagaggagaaaaaaaggaagcgagccgagaaacatggacgaggaagaggtccatatcgcagttgggaagaactcaagaaaggagaaagccaacatactgtgggccgccgccaatttccccagggccaccatcgttcttgtccatgttcactggccctccaagtggatgcctttcatgggtggcaaagtgctatacaagttcgctgatgagaaggagaaggagatgcatagaggcagagaaatgaaagtaatggtcaatatgttatcacagtacaaaaaaatgtgcgggacgagaaaggttagtgcacattaccttacacatgatgacactgttgccggtgttgtgaacctcataaagaagctcaaaattaaaagaatagtcatcggttcaaggaacatgtcaaggcaagttgtggttcgccagtgctgtcaggtttggctggtactcaacggcaaacacatctccaccagcaatgatcacctggaatatagtgaaaatataggatatggaggggggagctcaggtattttggcatctatacatgagctaggtgaggaatctgacggctacgtgacaccacgaagtgatcttgtagacgaaaccatggatgaggagtcggctgaaatgaatgattctgatcaattagtaacggaagatgaaacattgactgaacaaggcacagaggaatcagtcacttctgaagacatggaaaacttttttcaagagaatgctgatcagtctgatgagatacagaatttcagaaacatagctgacaaggctgaaaaaatcatggaggaaatagaccggctgcaaaagaaactgaaacagctgcaaggagaggagcgtaatcacgacgagaggagcttgtcacctagacaaatggctgcgtcactgaagcgaaagagtctatcagagcctagatatccagagctgcagattccagagaacattgaacaattctcgatgtcgcaaatcgaaaaggcgaccgacaacttccactcaagaaatttcatcggaggaggaggttatggcccagtctacaagggaaaagtgggcagcacatcagtggctattaagctgctgaagcctcgtggtagacaaggtttctcagagtatcagcaagaggtggtggtgctgagcaaattggagcacccacacatcgtgaggctgattggcgtgtgcccggagtcgtgcggcctggtgtacgagcacctccccaacggcacgctcaaggacaggctctccaagggcctcctgtggaaggaccgcgtcaggatcctcggcgagctgcgctctgcgctggcgtacctccactccaggcggccccacgccatcatccacgccgacgtgaagctgaccaacatcctcctggacgccggcaacgcgagccggctgggagacttcgggacggcgcgggcggtgcacgtgaaaccgctggaggaggagaccatcggccgccgcacgaacccgatgggcacggcggggtacatggaccccgtgttcttcatgaccggcgagctcacaacggagtcggacgtgtacgcgttcggcatggtgattctgcagatgctcacggggctgctggatctcaacgtcgcggagcaggcgcgcgaggcggtgaagatggacgccgtgcacagcgtgctggacgcgtccgccgggccctggccggaggtgcaggccgagaagctcatgaagctggcgctcaggtgctgcagcctggagaggaggcggcgaccggcgatcacgtccgatgccgagtggagatcgctcgacatcctacgggctatggtaaacccagctagtaaatcctggaaatggaattcccatgccagctgaatttactgtatgtatgcacctcccagtacatgccttgctgtagcctgcagatgccatgaaacacagtaggggtagctagtgattcttcttgtgattagatatagataagcaaaaatctaagaattgatgtgcattactagaatataagtattcaggggtagtacagtagagaaacaagagatggagcagacagaaatcatgctacatatgaagcagcaattggttagccaagatgatgatggtgcacggttattttttgggaaatctgcacctactcatgttcagtgtcccttgcaggatgcagaaatattatgtgtatattggtagacggtaatataaatctgactatgcacgttttgttcaagatttattacacgaaacggtactgctgatgcatgttccttgaattaatggtgtgagaaaga

SEQ ID NO: 26297 - DNA, 1661 bp, Zea Mays
ccttaaactgaagccgccagcgacttctctaatcgaatcatacactccgggcccgtagtctgacactgacctgacgtgctggatgatgctgtacctatactacgcagcacaccagcataagtacaagtcgaccagatccgaagccacgcttccagcctcttgttgtcacttattagctatctctcagctaacctccctaggaagaataataagctgcaaaaggcacaagggcgacgccgataccgatgcaaataccatagcgttgatgtaaagtggcgccagaggagaaaaaaaggaagcgagccgagaaacatggacgaggaagaggtccatatcgcagttgggaagaactcaagaaaggagaaagccaacatactgtgggccgccgccaatttccccagggccaccatcgttcttgtccatgttcactggccctccaagtggatgcctttcatgggtggcaaagtgctatacaagttcgctgatgagaaggagaaggagatgcatagaggcagagaaatgaaagtaatggtcaatatgttatcacagtacaaaaaaatgtgcgggacgagaaaggttagtgcacattaccttacacatgatgacactgttgccggtgttgtgaacctcataaagaagctcaaaattaaaagaatagtcatcggttcaaggaacatgtcaaggcaagttgtggttcgccagtgctgtcaggtttggctggtactcaacggcaaacacatctccaccagcaatgatcacctggaatatagtgaaaatataggatatggaggggggagctcaggtattttggcatctatacatgagctaggtgaggaatctgacggctacgtgacaccacgaagtgatcttgtagacgaaaccatggatgaggagtcggctgaaatgaatgattctgatcaattagtaacggaagatgaaacattgactgaacaaggcacagaggaatcagtcacttctgaagacatggaaaacttttttcaagagaatgctgatcagtctgatgagatacagaatttcagaaacatagctgacaaggctgaaaaaatcatggtgcaggccgagaagctcatgaagctggcgctcaggtgctgcagcctggagaggaggcggcgaccggcgatcacgtccgatgccgagtggagatcgctcgacatcctacgggctatggtaaacccagctagtaaatcctggaaatggaattcccatgccagctgaatttactgtatgtatgcacctcccagtacatgccttgctgtagcctgcagatgccatgaaacacagtaggggtagctagtgattcttcttgtgattagatatagataagcaaaaatctaagaattgatgtgcattactagaatataagtattcaggggtagtacagtagagaaacaagagatggagcagacagaaatcatgctacatatgaagcagcaattggttagccaagatgatgatggtgcacggttattttttgggaaatctgcacctactcatgttcagtgtcccttgcaggatgcagaaatattatgtgtatattggtagacggtaatataaatctgactatgcacgttttgttcaagatttattacacgaaacggtactgctgatgcatgttccttgaattaatggtgtgagaaaga

SEQ ID NO: 26298 - DNA, 780 bp, Zea Mays
atggacgaggaagaggtccatatcgcagttgggaagaactcaagaaaggagaaagccaacatactgtgggccgccgccaatttccccagggccaccatcgttcttgtccatgttcactggccctccaagtggatgcctttcatgggtggcaaagtgctatacaagttcgctgatgagaaggagaaggagatgcatagaggcagagaaatgaaagtaatggtcaatatgttatcacagtacaaaaaaatgtgcgggacgagaaaggttagtgcacattaccttacacatgatgacactgttgccggtgttgtgaacctcataaagaagctcaaaattaaaagaatagtcatcggttcaaggaacatgtcaaggcaagttgtggttcgccagtgctgtcaggtttggctggtactcaacggcaaacacatctccaccagcaatgatcacctggaatatagtgaaaatataggatatggaggggggagctcaggtattttggcatctatacatgagctaggtgaggaatctgacggctacgtgacaccacgaagtgatcttgtagacgaaaccatggatgaggagtcggctgaaatgaatgattctgatcaattagtaacggaagatgaaacattgactgaacaaggcacagaggaatcagtcacttctgaagacatggaaaacttttttcaagagaatgctgatcagtctgatgagatacagaatttcagaaacatagctgacaaggctgaaaaaatcatggtgcaatccgatacaaacgaa

SEQ ID NO: 26299 - DNA, 941 bp, Zea Mays
cgaagccacgcttccagcctcttgttgtcacttattagctatctctcagctaacctccctaggaagaataataagctgcaaaaggcacaagggcgacgccgataccgatgcaaataccatagcgttgatgtaaagtggcgccagaggagaaaaaaaggaagcgagccgagaaacatggacgaggaagaggtccatatcgcagttgggaagaactcaagaaaggagaaagccaacatactgtgggccgccgccaatttccccagggccaccatcgttcttgtccatgttcactggccctccaagtggatgcctttcatgggtggcaaagtgctatacaagttcgctgatgagaaggagaaggagatgcatagaggcagagaaatgaaagtaatggtcaatatgttatcacagtacaaaaaaatgtgcgggacgagaaaggttagtgcacattaccttacacatgatgacactgttgccggtgttgtgaacctcataaagaagctcaaaattaaaagaatagtcatcggttcaaggaacatgtcaaggcaagttgtggttcgccagtgctgtcaggtttggctggtactcaacggcaaacacatctccaccagcaatgatcacctggaatatagtgaaaatataggatatggaggggggagctcaggtattttggcatctatacatgagctaggtgaggaatctgacggctacgtgacaccacgaagtgatcttgtagacgaaaccatggatgaggagtcggctgaaatgaatgattctgatcaattagtaacggaagatgaaacattgactgaacaaggcacagaggaatcagtcacttctgaagacatggaaaacttttttcaagagaatgctgatcagtctgatgagatacagaatttcagaaacatagctgacaaggctgaaaaaatcatgctggaacg

SEQ ID NO: 26300 - DNA, 1707 bp, Zea Mays
ctccttgcctcgtccgcttcccctttcctctctttcccccacccaatcattgatctcggcttgagcttcaactacggattgattgattgattgggttcctggcgttagtttggtagccgtgcccttcctcttgcttcgcgattccggcagaggagtagacggttccagcaaatttggtccaacaattctttgtttggccgcttgggctccggtctctcgattcttcgtagcttggtgggagggcgccggatccagcggccatcatggttgtcgacacggtcagcgcgagcacctccataatagccccccacctgttcgaccacaggtccaggggcgccggcgcttcccaccaccacctccgccggacgttccatgtcgtcgcctgccgacccctgcccaccgccttcgccggccgccgcctcgtggcccgggtcaccaggcagccgtcgtcgcgcctcgccgattggccggtcagggcgctggctatgggggtcacgaaggaggtcagggccagccctcgcagggagtaccgggggatccccggggatggtggagacatgggggacgttggggtcaccagccccacgccgtcatggcctccgcggaacagggcagatgaccccaagctgcataacccgctgctccgcctcgagcgcatgggctgcgggtggctcggcgtcatcttcgagtgggagggggtcatcgttgaggatgatgccgaattggaaaggcaggcgtggttgaccctggcacaggaggagggcaagtcgccgcctcccgcttttctgttgcggagagtcgaagggatgaagaacgagcaggcgatttctgaggttctctgctggtctcgggatccctccgagcttaggagattggccctgaggaaggacgagatccacagcagccttcgaggtggctcctaccaccagatgaggaacggttccagggagttcatgagcacgctcgccaattacaagatccctatcgctgtggtgaccacacgcccacggaaggttattgaggaagccattgaagctgtaggcgtgcgcagcttcttcgatgcggttgtgacagcagaagacgtgtaccggggcaagcctgacccagaaatgttcctgtacgctgctcagcttctcagtttcatcccggagaggtgcatcgtgtttgggaactccaattcggcggtggaagctgcgcatgacgcacgtatgaagtgtgtcgcggtcgcaagcaagcacaagatctacgagcttagcgctgcagaccttgtggtgaagcaactagacgagctatccgtcgttgacttgaagaaccttgctgatattgagtccccggagtttggcatggaacctgaaccagagatggaggaggaggaagtgcccccaccatcgacgtctgtgggtatagatgatctattctggtaagagaccaaattgtacatttgattgattcctctccagaacacagatgtattgttgtcaactgtcatagtgatcagaaagaagggcttatcatccttctgtaatcagtagaatgtgatatgtaaaaaatgttgtctagagctcacacactgtatatacatactcagaaagaaagctgggaactgaatatatgaatcagaacatttgaatctgcagttcctgaaacaatgtaacaccacaaggtttctgtcgccgaatcaaaacgacaatatatataataaaatta

SEQ ID NO: 26301 - DNA, 1153 bp, Zea Mays
ccaattaaaaccctagacttcctggcgtgctataaaagcaggtggccgccgcctttgccttgctcaccctgcccttctgtgtacgaagccgacgagcagccgacgctaaagcttggtccggtgagcttcagagaaggggcgggtacgtcaagatgcagatcttcgtgaagaccctgacgggaaagaccatcaccctcgaggtcgagagcagcgatacaatcgacaatgtcaaggccaagatccaggacaaggaaggtatcccgccggaccagcagcgactaatcttcgcggggaagcagctcgaagacggccgcaccttggccgactacaacatccagaaggagtccacccttcaccttgttcttcgccttcgcggtggcatcattgaaccttccctccaggcgctcgcccgcaagtacaaccaggacaagatgatctgccgtgctatgcacggctgcaccccagggctgttaactgccgcaagaagaagtgtggccacagcaaccagctgagggcaaagaagaagatcaagaactgaagcttgccaaatcggttccttgcatggtttgcgtcaacaagacgaagtttcaaagcttttgtagctgcataggctgctgcaacgtttttcagtcgtaactcgtgtgttcctgttcagggtcttcagcatgacataaatcgtttcagaagtctagtaatattattactatatggtgtcatgtcgtattgtggctcttcctttttgttgctgttgtgctgcagtagagggaaacgttccataattttctccaccgccaatttaatcagctagaaaacagagggaaacgcatgacataaatcgtttcagctggaaatttcgaagcgaaacatggtttaatactatggtcatgactcatgagtgtctaaataaagcaccacaaaactttccaacagctactacaaattttccttgaagtcaagaccttccaagagcatacatcattcaaagtgtttagggcactaaaaataaactgtgttaaatcatgtatttttgaggtgaattacattattagaaaagagaagtgtgagaatgatgtagaaaagtgtttagggcactaaaaataaactgtgttaaatcatgtatttttgaggtgaattacattattagaaaagaaaa

SEQ ID NO: 26302 - DNA, 1205 bp, Zea Mays
cagaaaaagcccagcccaattaaaaccctagacttcctggcgtgctataaaagcaggtggccgccgcctttgccttgctcaccctgcccttctgtgtacgaagccgacgagcagccgacgctaaagcttggtccggtgagcttcagagaaggggcgggtacgtcaagatgcagatcttcgtgaagaccctgacgggaaagaccatcaccctcgaggtcgagagcagcgatacaatcgacaatgtcaaggccaagatccaggacaaggaaggtatcccgccggaccagcagcgactaatcttcgcggggaagcagctcgaagacggccgcaccttggccgactacaacatccagaaggagtccacccttcaccttgttcttcgccttcgcggtggcatcattgaaccttccctccaggcgctcgcccgcaagtacaaccaggacaagatgatctgccgtgctatgcacggctgcaccccagggctgttaactgccgcaagaagaagtgtggccacagcaaccagatttgtatataagcaagatggtgcgagtcagctttagctgagggcaaagaagaagatcaagaactgaagcttgccaaatcggttccttgcatggtttgcgtcaacaagacgaagtttcaaagcttttgtagctgcataggctgctgcaacgtttttcagtcgtaactcgtgtgttcctgttcagggtcttcagcatgacataaatcgtttcagaagtctagtaatattattactatatggtgtcatgtcgtattgtggctcttcctttttgttgctgttgtgctgcagtagagggaaacgttccataattttctccaccgccaatttaatcagctagaaaacagagggaaacgcatgacataaatcgtttcagctggaaatttcgaagcgaaacatggtttaatactatggtcatgactcatgagtgtctaaataaagcaccacaaaactttccaacagctactacaaattttccttgaagtcaagaccttccaagagcatacatcattcaaagtgtttagggcactaaaaataaactgtgttaaatcatgtatttttgaggtgaattacattattagaaaagagaagtgtgagaatgatgtagaaaagtgtttagggcactaaaaataaactgtgttaaatcatgtatttttgaggtgaattacattattagaaaagaaaa

SEQ ID NO: 26303 - DNA, 1220 bp, Zea Mays
ctggagtagaatataaaaggtccggcccattgagaatcctgggagccttcatggcttcatgcgggggtcaagcagaaaaagcccagcccaattaaaaccctagacttcctggcgtgctataaaagcaggtggccgccgcctttgccttgctcaccctgcccttctgtgtacgaagccgacgagcagccgacgctaaagcttggtccggtgagcttcagagaaggggcgggtacgtcaagatgcagatcttcgtgaagaccctgacgggaaagaccatcaccctcgaggtcgagagcagcgatacaatcgacaatgtcaaggccaagatccaggacaaggaaggtatcccgccggaccagcagcgactaatcttcgcggggaagcagctcgaagacggccgcaccttggccgactacaacatccagaaggagtccacccttcaccttgttcttcgccttcgcggtggcatcattgaaccttccctccaggcgctcgcccgcaagtacaaccaggacaagatgatctgccgcaaggctgttaactgccgcaagaagaagtgtggccacagcaaccagctgagggcaaagaagaagatcaagaactgaagcttgccaaatcggttccttgcatggtttgcgtcaacaagacgaagtttcaaagcttttgtagctgcataggctgctgcaacgtttttcagtcgtaactcgtgtgttcctgttcagggtcttcagcatgacataaatcgtttcagaagtctagtaatattattactatatggtgtcatgtcgtattgtggctcttcctttttgttgctgttgtgctgcagtagagggaaacgttccataattttctccaccgccaatttaatcagctagaaaacagagggaaacgcatgacataaatcgtttcagctggaaatttcgaagcgaaacatggtttaatactatggtcatgactcatgagtgtctaaataaagcaccacaaaactttccaacagctactacaaattttccttgaagtcaagaccttccaagagcatacatcattcaaagtgtttagggcactaaaaataaactgtgttaaatcatgtatttttgaggtgaattacattattagaaaagagaagtgtgagaatgatgtagaaaagtgtttagggcactaaaaataaactgtgttaaatcatgtatttttgaggtgaattacattattagaaaagaaaa

SEQ ID NO: 26304 - DNA, 1336 bp, Zea Mays
caacatttccatttgcgcgaaatttgctaacaagggtgaaggggcgccaaataatctggagtagaatataaaaggtccggcccattgagaatcctgggagccttcatggcttcatgcgggggtcaagcagaaaaagcccagcccaattaaaaccctagacttcctggcgtgctataaaagcaggtggccgccgcctttgccttgctcaccctgcccttctgtgtacgaagccgacgagcagccgacgctaaagcttggtccggtgagcttcagagaaggggcgggtacgtcaagatgcagatcttcgtgaagaccctgacgggaaagaccatcaccctcgaggtcgagagcagcgatacaatcgacaatgtcaaggccaagatccaggacaaggaaggtatcccgccggaccagcagcgactaatcttcgcggggaagcagctcgaagacggccgcaccttggccgactacaacatccagaaggagtccacccttcaccttgttcttcgccttcgcggtggcatcattgaaccttccctccaggcgctcgcccgcaagtacaaccaggacaagatgatctgccgcaagtgctatgcacggctgcaccccagggctgttaactgccgcaagaagaagtgtggccacagcaaccagatttgtatataagcaagatggtgcgagtcagctttagctgagggcaaagaagaagatcaagaactgaagcttgccaaatcggttccttgcatggtttgcgtcaacaagacgaagtttcaaagcttttgtagctgcataggctgctgcaacgtttttcagtcgtaactcgtgtgttcctgttcagggtcttcagcatgacataaatcgtttcagaagtctagtaatattattactatatggtgtcatgtcgtattgtggctcttcctttttgttgctgttgtgctgcagtagagggaaacgttccataattttctccaccgccaatttaatcagctagaaaacagagggaaacgcatgacataaatcgtttcagctggaaatttcgaagcgaaacatggtttaatactatggtcatgactcatgagtgtctaaataaagcaccacaaaactttccaacagctactacaaattttccttgaagtcaagaccttccaagagcatacatcattcaaagtgtttagggcactaaaaataaactgtgttaaatcatgtatttttgaggtgaattacattattagaaaagagaagtgtgagaatgatgtagaaaagtgtttagggcactaaaaataaactgtgttaaatcatgtatttttgaggtgaattacattattagaaaagaaaa

SEQ ID NO: 26305 - DNA, 2323 bp, Zea Mays
cgtaacttcactgcacaccctatcctccctcgccttcgcctagattcctatctccaccgcgttcgggttcctcccaacacctgcaccgcagaaccaaaccctagctgcgcttcctcctccagatcccggcgccccggccccatggccgccctcgtttctagctccagcttctccgcccgccgtccctccgctctctagctccggatcgcacgcgcacgtaaagacatggagcccgcagccgaggacgccgcagccgctgcgccggactcgtgggagacggccgacatagacgggcccatgagtcggctcatcctctccgcgcgacgcgtgtcctcttcgccggacttcgctgacgaccaggacccgccccagccgccgcccacactgcagccgcagggcgcgccttcggctccctcagatgcgcgcgaggatgtggtagcccaggtcgatcagttcctacgagaggccctcgagaagccaagggagaggctttctgtgctaagaatggagcaagaaattttgaagttcattcatgaccctagtcgtacagagtatgaattcaatggccttccaacttcgtatctgcgtcttgctgcacatcgcctggcgcagcattacttcctgcagtccattgccataccagacaacagtttgcctgatggaactggttcacgtatcatcctccgtaagacaacattcgactgccgactgcctgctgtccgccttgcagatattccagttaacctgccacaagaagacatctctgtggcgaaagtagctattaaacagaggcctcaaaagaatttacatggcatgaacagctcaagtgctcactcttctagagacaacctccaaaaaagcgtcgaagaaagaaaagaggaatacaacaaggcacgagcgcggatatttaacaacagcaatagcagtactgctactgatgagagatcagctgaggaagtgactttacccagtactcttcacaggtccacttccttggagttgaactcaagcaatagaataggtcaaggggctgaaattactcttgagaggagcttgactaccacttcagctagcagcaggtcaaatagaagcaagattgataaggagcctgcagtcaatagaaacaagcagaacaatagggttgcaattttcagagatcgtgagtcagagcgcaaggatcctgattatgacagaagctatgacaggtatatgcaaagatttgatcctggatttggatttagtggaggcccatacacaattcaacccctctatgcccctgctgttaactacaacaccgaattcccccagcttgggtcagcacaccgatcacctgttgctgtcgaacagcaacctcgtccaatagctcagcacatgcctgcatcatggtcagtggctcaagcatctaatgcaattggctatgggccagatggtgtcatgggaccttacagccctggtgcacctgtgagatcgtctgttttcatgcatgcttcacagcaatatgctataccttctcgccctggagtcccatttgcacatccacaggaatcaatgggaccatttgcacagtgagcgggtgattggcaaggggaaagattgggatggtccagtatgtgaacaggcgacagggatgtggccttaagccccgttgcccatgggatgcttgccgggttgagctgaggtggcatgatgacgatgctggttcttgctttgcctagtgcaatcgtggcaccattcttggtcaggtttagaagcagaggcatctctgtgcagctgctgttcacggagctggtgtttttaagttctttgtagtcagtgttgtgttgtaaatcaatcagtgttagtttgagtgaacaaacctatttcttgtaccatgtgcatgacaagcaacgactatagttgctaaagatgatgacgaatcgtgtatgcctcacaggcctatttactacagaagtgtttggtgttggaacaatctgatggagtgatgatcttggatttgtgcgtttatgcgatggatgtgttttacctcaaccgtaaggttaacttcaatggagcaaggtgaggataagcactgcagtgacatctatacggctatggccctgtttggcacagctgctgcttgttgaaaaagcaacttatctggctatgaccctgtttggcacagctgctgcttgttgaaaaaataacttatctgataagctggaaacagcttctgcttgttggctgcttttagtgtattatgagaagcagctgaactgataagctgctgcagaagctagctgtttgacagaatttctgcttaaatttgtgaagaagctgaaaataa

SEQ ID NO: 26306 - DNA, 2416 bp, Zea Mays
cgtaacttcactgcacaccctatcctccctcgccttcgcctagattcctatctccaccgcgttcgggttcctcccaacacctgcaccgcagaaccaaaccctagctgcgcttcctcctccagatcccggcgccccggccccatggccgccctcgtttctagctccagcttctccgcccgccgtccctccgctctctagctccggatcgcacgcgcacgtaaagacatggagcccgcagccgaggacgccgcagccgctgcgccggactcgtgggagacggccgacatagacgggcccatgagtcggctcatcctctccgcgcgacgcgtgtcctcttcgccggacttcgctgacgaccaggacccgccccagccgccgcccacactgcagccgcagggcgcgccttcggctccctcagatgcgcgcgaggatgtggtagcccaggtcgatcagttcctacgagaggccctcgagaagccaagggagaggctttctgtgctaagaatggagcaagaaattttgaagttcattcatgaccctagtcgtacagagtatgaattcaatggccttccaacttcgtatctgcgtcttgctgcacatcgcctggcgcagcattacttcctgcagtccattgccataccagacaacagtttgcctgatggaactggttcacgtatcatcctccgtaagacaacattcgactgccgactgcctgctgtccgccttgcagatattccagttaacctgccacaagaagacatctctgtggcgaaagtagctattaaacagaggcctcaaaagaatttacatggcatgaacagctcaagtgctcactcttctagagacaacctccaaaaaagcgtcgaagaaagaaaagaggaatacaacaaggcacgagcgcggatatttaacaacagcaatagcagtactgctactgatgagagatcagctgaggaagtgactttacccagtactcttcacaggtccacttccttggagttgaactcaagcaatagaataggtcaaggggctgaaattactcttgagaggagcttgactaccacttcagctagcagcaggtcaaatagaagcaagattgataaggagcctgcagtcaatagaaacaagcagaacaatagggttgcaattttcagagatcgtgagtcagagcgcaaggatcctgattatgacagaagctatgacaggtatatgcaaagatttgatcctggatttggatttagtggaggcccatacacaattcaacccctctatgcccctgctgttaactacaacaccgaattcccccagcttgggtcagcacaccgatcacctgttgctgtcgaacagcaacctcgtccaatagctcagcacatgcctgcatcatggtcagtggctcaagcatctaatgcaattggctatgggccagatggtgtcatgggaccttacagccctggtgcacctgtgagatcgtctgttttcatgcatgcttcacagcaatatgctataccttctcgccctggagtcccatttgcacatccacaggaatcaatgggaccatttgcacagattgagatgctggaggagcacatcttgccctcgttgaatgggctctgttgttgaaggactgatagtgttggtaaaaaaaatgggattgcgcagtgagcgggtgattggcaaggggaaagattgggatggtccagtatgtgaacaggcgacagggatgtggccttaagccccgttgcccatgggatgcttgccgggttgagctgaggtggcatgatgacgatgctggttcttgctttgcctagtgcaatcgtggcaccattcttggtcaggtttagaagcagaggcatctctgtgcagctgctgttcacggagctggtgtttttaagttctttgtagtcagtgttgtgttgtaaatcaatcagtgttagtttgagtgaacaaacctatttcttgtaccatgtgcatgacaagcaacgactatagttgctaaagatgatgacgaatcgtgtatgcctcacaggcctatttactacagaagtgtttggtgttggaacaatctgatggagtgatgatcttggatttgtgcgtttatgcgatggatgtgttttacctcaaccgtaaggttaacttcaatggagcaaggtgaggataagcactgcagtgacatctatacggctatggccctgtttggcacagctgctgcttgttgaaaaagcaacttatctggctatgaccctgtttggcacagctgctgcttgttgaaaaaataacttatctgataagctggaaacagcttctgcttgttggctgcttttagtgtattatgagaagcagctgaactgataagctgctgcagaagctagctgtttgacagaatttctgcttaaatttgtgaagaagctgaaaataa

SEQ ID NO: 26307 - DNA, 1584 bp, Zea Mays
cgtaacttcactgcacaccctatcctccctcgccttcgcctagattcctatctccaccgcgttcgggttcctcccaacacctgcaccgcagaaccaaaccctagctgcgcttcctcctccagatcccggcgccccggccccatggccgccctcgtttctagctccagcttctccgcccgccgtccctccgctctctagctccggatcgcacgcgcacgtaaagacatggagcccgcagccgaggacgccgcagccgctgcgccggactcgtgggagacggccgacatagacgggcccatgagtcggctcatcctctccgcgcgacgcgtgtcctcttcgccggacttcgctgacgaccaggacccgccccagccgccgcccacactgcagccgcagggcgcgccttcggctccctcagatgcgcgcgaggatgtggtagcccaggtcgatcagttcctacgagaggccctcgagaagccaagggagaggctttctgtgctaagaatggagcaagaaattttgaagttcattcatgaccctagtcgtacagagtatgaattcaatggccttccaacttcgtatctgcgtcttgctgcacatcgcctggcgcagcattacttcctgcagtccattgccataccagacaacagtttgcctgatggaactggttcacgtatcatcctccgtaagacaacattcgactgccgactgcctgctgtccgccttgcagatattccagttaacctgccacaagaagacatctctgtggcgaaagtagctattaaacagaggcctcaaaagaatttacatggcatgaacagctcaagtgctcactcttctagagacaacctccaaaaaagcgtcgaagaaagaaaagaggaatacaacaaggcacgagcgcggatatttaacaacagcaatagcagtactgctactgatgagagatcagctgaggaagtgactttacccagtactcttcacaggtccacttccttggagttgaactcaagcaatagaataggtcaaggggctgaaattactcttgagaggagcttgactaccacttcagctagcagcaggtcaaatagaagcaagattgataaggagcctgcagtcaatagaaacaagcagaacaatagggttgcaattttcagagatcgtgagtcagagcgcaaggatcctgattatgacagaagctatgacaggtatatgcaaagatttgatcctggatttggatttagtggaggcccatacacaattcaacccctctatgcccctgctgttaactacaacaccgaattcccccagcttgggtcagcacaccgatcacctgttgctgtcgaacagcaacctcgtccaatagctcagcacatgcctgcatcatggtcagtggctcaagcatctaatgcaattggctatgggccagatggtgtcatgggaccttacagccctggtgcacctgtgagatcgtctgttttcatgcatgcttcacagcaatatgctataccttctcgccctggagtcccatttgcacatccacaggaatcaatgggaccatttgcacagatttttttgttggtacag

SEQ ID NO: 26308 - DNA, 507 bp, Zea Mays
gtttatgtcataccatgattttaatccccattctctgtgttgtttaatttttcatacatgtgactgggcctactagccgatcttgtcttgcatggtgcatcatggcattggctgttgtgagaaatgagttctatgatctgcgcaataaattccagactatgcttcagcttgagcagcaaatccaggctcaacaataaatcgaagcagaaagcgtagctgcatgtggcctcacatgataagtgtatctttaaagatgtagaccatgttctctgtgttcctacaattgtgacaaaatcatcgtcgttgaggtcggctcacatgcatgtaactgttagctataacaattattgtctaacgttgtccttgttactccacccgtttgtgttggattgccatcgaccatcatatgaaaactttttttttccaatcccctccaatccatgtgggatgagaataaccggtttcctggtaaacctgcaagtgaatttctgcgctgtggaaacatac

SEQ ID NO: 26309 - DNA, 1680 bp, Zea Mays
ctgatgtcattcttgtttgcttgtacccagcgattcctccaaactgtttttgggtacgcggcgcgggagttcgccaagcagggagttaagcctggggagcttgcaatcatctccaaggaggctgtggctccttacgagcgtcctgccctaagcaaaggttacctctttcctacgaatgctgcaagactcccaggattttatgtatgtgtgggaagtggtggagagaagctattgcctgagtggtactcagagaaaggcattgagctgatccttagtacagaaattgtcaaagctgatctttccaccaagactctgactagtgcagctggagcaaactttacatatgagatcttgctcattgctactggctcctcggtcataaagctcaccgattttggcacacaaggagctgattctaacaacattctatatctaagggaaattgatgatgctgacaagctggttgcagctatccaggcaaagaagggtggcaaggcagtggttgttggaggaggttatatcggcctcgaactgagtgcagccctgaagatcaatgactttgatgtcactatggtgtttcctgaaccttggtgcatgcctcgcctcttcactgccgatattgctgctttctatgaggcttactatactaacaaaggtgtaaagatcttgaagggcacgctagctgttggttttgatgctgatgccaatggtgatgtcactgcagttaagctaaaggatggcacagtacttgaagccgatattgttgttgtcggtgttggaggcagaccattgactactctcttcaagggtcaagttgctgaggagaagggtggaatcaagactgacgcttcctttgaaacaagcgttcctggagtatatgccattggtgatgtggctaccttccctttgaagatgtacaatgagttgaggagagtggaacatgttgaccattctagaaagtctgcagagcaggctgtaaaggcgatcaagggcaaagagtccggtgaaccagttccggagtatgactacctgccatacttctactcccgatcattcgacctggcgtggcaattctacggcgacaacgtgggcgaaaccatcctgtttggcgacagtgaccccacctccagcaagcccaagttcggctcgtactggattaaggacggcaaggtcttgggcgccttcctggagggcgggtcaccggacgagaacaaggtcattgccaaggtggcgaaaacccagccgccggtcgctaacctcgaggagctcaagaaggatggcctccagttcgccagcaagatctgagacgctcccgttccatgtaaaattccgtgtcatcgtgaaggttcttctggagctctggtcatgattgagaaatgttctgctacagatgttatactacatacgtgactacactacatgatatattcggttttctgattgtgatatctgtacgtggctacactcacatgtgagatttgaataagtcctgcagcctcagggctcagctagcacagcacagaccacagataccctttttttttattattattgttctcgcccggtcgctcgcgtcctggcaggcactgaaatggcggcggccaccagctgcctcgcttcatcgcctcgcctataggctacgctggccgcgagctccaggcggaggagttggcatcccag

SEQ ID NO: 26310 - DNA, 1866 bp, Zea Mays
ccgcctacctcgaggaaaccagccaatggacagccaccacattttccgtgttcgcttcctagtttctattgatccaccgacatctgggcccggagcttctcgggcccccgtggcagccgttcgatcaagcacagagctggtgcttactagtatcgccactagagacgcctccacccgctcccactcgtcttctccctccctagtcgctccccaaatcggatctccaggccggcagaagttgagcggactgactggtcactgtagttcgatcgaatccgagtagggctgatacagttcgattcggcgggaggcatggcgtccgaaaagcacttcaagtacgtcatcctcggcggcggcgtcgcggcggggtacgcggcgcgggagttcgccaagcagggagttaagcctggggagcttgcaatcatctccaaggaggctgtggctccttacgagcgtcctgccctaagcaaaggttacctctttcctacgaatgctgcaagactcccaggattttatgtatgtgtgggaagtggtggagagaagctattgcctgagtggtactcagagaaaggcattgagctgatccttagtacagaaattgtcaaagctgatctttccaccaagactctgactagtgcagctggagcaaactttacatatgagatcttgctcattgctactggctcctcggtcataaagctcaccgattttggcacacaaggagctgattctaacaacattctatatctaagggaaattgatgatgctgacaagctggttgcagctatccaggcaaagaagggtggcaaggcagtggttgttggaggaggttatatcggcctcgaactgagtgcagccctgaagatcaatgactttgatgtcactatggtgtttcctgaaccttggtgcattaagctaaaggatggcacagtacttgaagccgatattgttgttgtcggtgttggaggcagaccattgactactctcttcaagggtcaagttgctgaggagaagggtggaatcaagactgacgcttcctttgaaacaagcgttcctggagtatatgccattggtgatgtggctaccttccctttgaagatgtacaatgagttgaggagagtggaacatgttgaccattctagaaagtctgcagagcaggctgtaaaggcgatcaagggcaaagagtccggtgaaccagttccggagtatgactacctgccatacttctactcccgatcattcgacctggcgtggcaattctacggcgacaacgtgggcgaaaccatcctgtttggcgacagtgaccccacctccagcaagcccaagttcggctcgtactggattaaggacggcaaggtcttgggcgccttcctggagggcgggtcaccggacgagaacaaggtcattgccaaggtggcgaaaacccagccgccggtcgctaacctcgaggagctcaagaaggatggcctccagttcgccagcaagatctgagacgctcccgttccatgtaaaattccgtgtcatcgtgaaggttcttctggagctctggtcatgattgagaaatgttctgctacagatgttatactacatacgtgactacactacatgatatattcggttttctgattgtgatatctgtacgtggctacactcacatgtgagatttgaataagtcctgcagcctcagggctcagctagcacagcacagaccacagataccctttttttttattattattgttctcgcccggtcgctcgcgtcctggcaggcactgaaatggcggcggccaccagctgcctcgcttcatcgcctcgcctataggctacgctggccgcgagctccaggcggaggagttggcatcccag

SEQ ID NO: 26311 - DNA, 366 bp, Zea Mays
aaatgaaatcatacagtaaatggttcgctatcatacaacagcacaataccagatggattttacttgattcatgggatggacccctttgtatggtcactatgcactgatgtacaggaagagaaccacataccctccatggaatcactcaagtctgtccgtcctgatgatccttccattcaagccattcttatcgatcgaagaactgattttgaattaggtatgttggagagttatgcttccagcattctttccagttctgctgatgccaaagatgtggtaatccaactggccaaactcatatcttcaagaatggggggtacaacttccaatgaagagaacttgctaacgaataaaagcatttattca

SEQ ID NO: 26312 - DNA, 1125 bp, Zea Mays
tgtcactctgtgtggccactgctcctatccgcagccacgcgcgttgtcgcctccacggcccacgcggacacgcccaccgctcgaagcagcgtagcgactagcgagcattcgcacagcggctctctttcctcgcgcagtcgcgctagacaagcggctgcctccttgcaagttgctactgctaccctcaccctactaccgacgagacgtcgacggcgacttggtctaagccccgcccacccgccaattgccaccaaaaactaaccgcctgctctttcaggggagcggacccggacgacgagccacgccgacgctagggtttggtttcgccggcctgcccggccatggacctgcccccgggcgccggccgtcgcaccacctactccctcctcccacagttccccgacgacgccgccgcacctgctcccgcccccgccaacatcctgcagcgccagtccagcggcagcagctacggcgccggcagctctatctccacctccagcgactacccattccacttacaaccccccgcctcggccgcgggggtcgcgccgcccggatcggcagcggcgcctcccggggcggctggctcgccctgcaagagctgggcgcagcaggccgaggagacctaccagctgcagctcgcgctcgcgctccgcctctgcgccgatgctgcgtgcgctgccgacccgggcttcctcgacccaggcgattcaggaagcgggaggggcagcggtaacgggagagccttcccgctcgcgcagcccgcgccctctgcggagtcgctctcgcatcgcttctggcacaataccagatggattttacttgattcatgggatggacccctttgtatggtcactatgcactgatgtacaggaagagaaccacataccctccatggaatcactcaagtctgtccgtcctgatgatccttccattcaagccattcttatcgatcgaagaactgattttgaattaggtatgttggagagttatgcttccagcattctttccagttctgctgatgccaaagatgtggtaatccaactggccaaactcatatcttcaagaatggggggtacaacttccaatgaagagaacttgctaacgaataaaagcatttattca

SEQ ID NO: 26313 - DNA, 1067 bp, Zea Mays
ctcggctgctgtttgtcactctgtgtggccactgctcctatccgcagccacgcgcgttgtcgcctccacggcccacgcggacacgcccaccgctcgaagcagcgtagcgactagcgagcattcgcacagcggctctctttcctcgcgcagtcgcgctagacaagcggctgcctccttgcaagttgctactgctaccctcaccctactaccgacgagacgtcgacggcgacttggtctaagccccgcccacccgccaattgccaccaaaaactaaccgcctgctctttcaggggagcggacccggacgacgagccacgccgacgctagggtttggtttcgccggcctgcccggccatggacctgcccccgggcgccggccgtcgcaccacctactccctcctcccacagttccccgacgacgccgccgcacctgctcccgcccccgccaacatcctgcagcgccagtccagcggcagcagctacggcgccggcagctctatctccacctccagcgactacccattccacttacaaccccccgcctcggccgcgggggtcgcgccgcccggatcggcagcggcgcctcccggggcggctggctcgccctgcaagagctgggcgcagcaggccgaggagacctaccagctgcagctcgcgctcgcgctccgcctctgcgccgatgctgcgtgcgctgccgacccgggcttcctcgacccaggcgattcaggaagcgggaggggcagcggtaacgggagagccttcccgctcgcgcagcccgcgccctctgcggagtcgctctcgcatcgcttctgggtaaatggttcgctatcatacaacagcacaataccagatggattttacttgattcatgggatggacccctttgtatggtcactatgcactgatgtacaggaagagaaccacataccctccatggaatcactcaagtctgtccgtcctgatgatccttccattcaagccattcttatcgatcgaagaactgattttgaattaggggtacaacttccaatgaagagaacttgctaacgaataaaagcatttattca

SEQ ID NO: 26314 - DNA, 1266 bp, Zea Mays
cgaccagtggtcggagacggccacacccgccaccaatcctcctgctgcaatacgtgccatttctttcttcgcttgtctcccgcgaaaaaatatctacagcggctggacctacatgtcacagactctaatgcagtgcgggaggctacatataattagctgatgcagaaaataagaggagattgttcatcgagctgtcttgtccccctcttggcctcttctttccggcgatgggcgccggcgtcctcctcggcgacgccgccggcctgggggcccacctcgccgtacgccgccggaggacgcgcctctaccttcgcaactgggcctccaagcccctgcgcccctcggtctggctcggcgtggccgcctgtgtttcacagaatcgcgaccgccgtggccacgtgaccaggttctccgcctccgcctcgagcggcagtgacgagcccggggagctgtccgaggatgaggcgcagagggagtgggaagcggagctgaatcgccgactgaaggaggccgaggagatggaggagttggagcgcaccgccgagcagctgcaaagccaggccgccgccgaggcccccgaggagtcggaggaggagaagcgcgagcgtgtccgccgcgagctccagaaggtagcgaaggagcaagcggagaggagggagacggcgaagcaaatgtttgagttgggtcaaaaggcgtacgggaaaggaatgtatggacgatcaattgaattcttggaggctgcgctcactatcatacgtccctcctctctactcggtggcgaggtatgctggaacatggagtgacaaaatcaaggaacaagaggacaagaaaaggaagatgagtgctgctagcaaccaagttcaaccttctccaaacatctttggagacctctctttcttgcgaccgccaaatgaatggaagaagagtgcatgggtggttgttaccttgtggatccttttgataggaacagcaatctatctgcaatcatgaatggctcctgcagctctgaaacaagccattcacatctctgcgaggcactggtccatggttcaacagaacccagagatgtcgctaatatggccgtgtctcagactgttgcatttgttgtttttttttgctgcagtgtaaatactaactactgtaactagcaatacaagcagatgccatctagttcaattgattagaaatcaatctgtctgctcatatacacttgatgatattgcatctggagttgatttgatattaccgtggtaggagtttattcta

SEQ ID NO: 26315 - DNA, 1537 bp, Zea Mays
gaggacgtccgccttgcagcagcgaccagtggtcggagacggccacacccgccaccaatcctcctgctgcaatacgtgccatttctttcttcgcttgtctcccgcgaaaaaatatctacagcggctggacctacatgtcacagactctaatgcagtgcgggaggctacatataattagctgatgcagaaaataagaggagattgttcatcgagctgtcttgtccccctcttggcctcttctttccggcgatgggcgccggcgtcctcctcggcgacgccgccggcctgggggcccacctcgccgtacgccgccggaggacgcgcctctaccttcgcaactgggcctccaagcccctgcgcccctcggtctggctcggcgtggccgcctgtgtttcacagaatcgcgaccgccgtggccacgtgaccaggttctccgcctccgcctcgagcggcagtgacgagcccggggagctgtccgaggatgaggcgcagagggagtgggaagcggagctgaatcgccgactgaaggaggccgaggagatggaggagttggagcgcaccgccgagcagctgcaaagccaggccgccgccgaggcccccgaggagtcggaggaggagaagcgcgagcgtgtccgccgcgagctccagaaggtcctactcctacccttaacctttagtaaccagagctcgccttccttcacacactcactagtcattcacttcacacgccaattcttcctcaccaaacacaaataccactactacacactcctcctccttcaagttccacatgttctctaccatttgtgacgcacatgcacctggttctagttttagcgctgtttgcaggagggtgagggtagagtgagacaaaatcattttgttgcgcgagctttgcaggtagcgaaggagcaagcggagaggagggagacggcgaagcaaatgtttgagttgggtcaaaaggcgtacgggaaaggaatgtatggacgatcaattgaattcttggaggctgcgctcactatcatacgtccctcctctctactcggtggcgaggtatgctggaacatggagtgacaaaatcaaggaacaagaggacaagaaaaggaagatgagtgctgctagcaaccaagttcaaccttctccaaacatctttggagacctctctttcttgcgaccgccaaatgaatggaagaagagtgcatgggtggttgttaccttgtggatccttttgataggaacagcaatctatctgcaatcatgaatggctcctgcagctctgaaacaagccattcacatctctgcgaggcactggtccatggttcaacagaacccagagatgtcgctaatatggccgtgtctcagactgttgcatttgttgtttttttttgctgcagtgtaaatactaactactgtaactagcaatacaagcagatgccatctagttcaattgattagaaatcaatctgtctgctcatatacacttgatgatattgcatctggagttgatttgatattaccgtggtaggagtttattcta

SEQ ID NO: 26316 - DNA, 1755 bp, Zea Mays
ctgaaggaggaagaggacgtccgccttgcagcagcgaccagtggtcggagacggccacacccgccaccaatcctcctgctgcaatacgtgccatttctttcttcgcttgtctcccgcgaaaaaatatctacagcggctggacctacatgtcacagactctaatgcagtgcgggaggctacatataattagctgatgcagaaaataagaggagattgttcatcgagctgtcttgtccccctcttggcctcttctttccggcgatgggcgccggcgtcctcctcggcgacgccgccggcctgggggcccacctcgccgtacgccgccggaggacgcgcctctaccttcgcaactgggcctccaagcccctgcgcccctcggtctggctcggcgtggccgcctgtgtttcacagaatcgcgaccgccgtggccacgtgaccaggttctccgcctccgcctcgagcggcagtgacgagcccggggagctgtccgaggatgaggcgcagagggagtgggaagcggagctgaatcgccgactgaaggaggccgaggagatggaggagttggagcgcaccgccgagcagctgcaaagccaggccgccgccgaggcccccgaggagtcggaggaggagaagcgcgagcgtgtccgccgcgagctccagaaggtcctactcctacccttaacctttagtaaccagagctcgccttccttcacacactcactagtcattcacttcacacgccaattcttcctcaccaaacacaaataccactactacacactcctcctccttcaagttccacatgttctctaccatttgtgacgcacatgcacctggttctagttttagcgctgtttgcaggagggtgagggtagagtgagacaaaatcattttgttgcgcgagctttgcaggtagcgaaggagcaagcggagaggagggagacggcgaagcaaatgtttgagttgggtcaaaaggcgtacgggaaaggaatgtatggacgatcaattgaattcttggaggctgcgctcactatcatacgtccctcctctctactcggtggcgagatccaaatttggcttgcaatggcatatgaagccaataggaggcacaaggattgcattgcattgtacaaagagttggagagtagccaccccatgatcaacatcaggcgccaggcagctgagcttagatacattttagaggcacccaagttgaagatatcaaatgacgaggtggtcacaataccacaaattgggagcagctgggattggtatgctggaacatggagtgacaaaatcaaggaacaagaggacaagaaaaggaagatgagtgctgctagcaaccaagttcaaccttctccaaacatctttggagacctctctttcttgcgaccgccaaatgaatggaagaagagtgcatgggtggttgttaccttgtggatccttttgataggaacagcaatctatctgcaatcatgaatggctcctgcagctctgaaacaagccattcacatctctgcgaggcactggtccatggttcaacagaacccagagatgtcgctaatatggccgtgtctcagactgttgcatttgttgtttttttttgctgcagtgtaaatactaactactgtaactagcaatacaagcagatgccatctagttcaattgattagaaatcaatctgtctgctcatatacacttgatgatattgcatctggagttgatttgatattaccgtggtaggagtttattcta

SEQ ID NO: 26317 - DNA, 702 bp, Zea Mays
ggacctacatgtcacagactctaatgcagtgcgggaggctacatataattagctgatgcagaaaataagaggagattgttcatcgagctgtcttgtccccctcttggcctcttctttccggcgatgggcgccggcgtcctcctcggcgacgccgccggcctgggggcccacctcgccgtacgccgccggaggacgcgcctctaccttcgcaactgggcctccaagcccctgcgcccctcggtctggctcggcgtggccgcctgtgtttcacagaatcgcgaccgccgtggccacgtgaccaggttctccgcctccgcctcgagcggcagtgacgagcccggggagctgtccgaggatgaggcgcagagggagtgggaagcggagctgaatcgccgactgaaggaggccgaggagatggaggagttggagcgcaccgccgagcagctgcaaagccaggccgccgccgaggcccccgaggagtcggaggaggagaagcgcgagcgtgtccgccgcgagctccagaaggtagcgaaggagcaagcggagaggagggagacggcgaagcaaatgtttgagttgggtcaaaaggcgtacgggaaaggaatgtatggacgatcaattgaattcttggaggctgcgctcactatcatacgtccctcctctctactcggtggcgaggtatctttgtgatgtagtctatgg

SEQ ID NO: 26318 - DNA, 1504 bp, Zea Mays
ctttgttgtactctgtcagtgatggatttattccaagatagacaagggatatatttctccatacttcatcacaaatcaagacaaatcaattgttgaattcgaaaatactagagtgcttttaactgatcagcgtgtgaatgatgttcaagagatacttcccttgctggagaagacaacacagttgagtgtccctttattaattattgccgaggatgtgtcgcatgaggtatattcaacactggttcttaacaaactgaatggattgctaaatgttgcggttgttaaatgtcctggtttgggagatgaaaagaaggccattctccaagacattgctattatgacaggtgcagatttctttgctagtgaccttggctggggtcttcatggcattacttctgatcagcttggtatggctcagaagatcacaataactagtgaatccacaactatcatagcacatccttcaatgagaccagagattgaggccagaatcatgcaactgaaaaaagatctagaggagacaacgagttcctatctaaaagaaaggttctctgcaagaatcgctaaactttcaagaggtgttggagtcatcaaggttggggcagccactgaagctgaactcgaggataggaaactgagagtagaggatgcaaagaacgcaacttttgcagccatcagtgaaggcataactcctggtggtggggtgacatatgttcatttatcaaagcatattcccagcatcatggaccttgtggacgacacagaggagaaaatgggtgtaaatatagttgggaaggcacttcttgtccctgctatgacgatagctcgcaatgccggggcagacggtccagctgtcgtggagaagcttctcgccagcgagtggcgggttggttacaatgcgatgactgacgagtttgaagaccttgtcgctgctggtgtggtggacccgtgcagggtcgcgagatgcgtgctccagaactctgcttctatcgcagggctgattcttatgactcaggctatgatgtttgacaagatcaagaagaagaagtctcccatccccgagattcctggtattccaccgcttcagataagccaaaaagctaaggcttgagctgttggatgctgccctggtgttgttggctggatgagttgtgttgacctaggaagcagcagaatgcccagtgagctgcccaaaccaggtagaacagtgagcacttggaatgcccatgttacactcgttatataatttggtggtcggtgcagtattacttgtcatgtctgcataaattttgcattggcgggtgagtcggcaaccaatttatgtctgacttgggaacgtaaacgaacgaatggttgatttgttgctacatagagggccccctttgggcatcatctcgagcaaagctattttgccttgtatctccctttgaaagcagatctgtttcatcaattaacatacgaggtaacacagtagcttgtaggaaaagaaatagatcgttctgtc

SEQ ID NO: 26319 - DNA, 1687 bp, Zea Mays
cctgcatatgctcaaatgatggaaaaatacgagccgtctttttttggttacttctaaaaaaacattactttgagctgttgcgtcaatatcatctggcaatgatgaatatgttggtaatctcattgctgatgcattggagaagataggtcctgatggtataatcaaaattgagtcatcatcttcaatatacactacagttgaggtgcaggaaggaatgaagatagacaagggatatatttctccatacttcatcacaaatcaagacaaatcaattgttgaattcgaaaatactagagtgcttttaactgatcagcgtgtgaatgatgttcaagagatacttcccttgctggagaagacaacacagttgagtgtccctttattaattattgccgaggatgtgtcgcatgaggtatattcaacactggttcttaacaaactgaatggattgctaaatgttgcggttgttaaatgtcctggtttgggagatgaaaagaaggccattctccaagacattgctattatgacaggtgcagatttctttgctagtgaccttggctggggtcttcatggcattacttctgatcagcttggtatggctcagaagatcacaataactagtgaatccacaactatcatagcacatccttcaatgagaccagagattgaggccagaatcatgcaactgaaaaaagatctagaggagacaacgagttcctatctaaaagaaaggttctctgcaagaatcgctaaactttcaagaggtgttggagtcatcaaggttggggcagccactgaagctgaactcgaggataggaaactgagagtagaggatgcaaagaacgcaacttttgcagccatcagtgaaggcataactcctggtggtggggtgacatatgttcatttatcaaagcatattcccagcatcatggaccttgtggacgacacagaggagaaaatgggtgtaaatatagttgggaaggcacttcttgtccctgctatgacgatagctcgcaatgccggggcagacggtccagctgtcgtggagaagcttctcgccagcgagtggcgggttggttacaatgcgatgactgacgagtttgaagaccttgtcgctgctggtgtggtggacccgtgcagggtcgcgagatgcgtgctccagaactctgcttctatcgcagggctgattcttatgactcaggctatgatgtttgacaagatcaagaagaagaagtctcccatccccgagattcctggtattccaccgcttcagataagccaaaaagctaaggcttgagctgttggatgctgccctggtgttgttggctggatgagttgtgttgacctaggaagcagcagaatgcccagtgagctgcccaaaccaggtagaacagtgagcacttggaatgcccatgttacactcgttatataatttggtggtcggtgcagtattacttgtcatgtctgcataaattttgcattggcgggtgagtcggcaaccaatttatgtctgacttgggaacgtaaacgaacgaatggttgatttgttgctacatagagggccccctttgggcatcatctcgagcaaagctattttgccttgtatctccctttgaaagcagatctgtttcatcaattaacatacgaggtaacacagtagcttgtaggaaaagaaatagatcgttctgtc

SEQ ID NO: 26320 - DNA, 4602 bp, Zea Mays
gaactaccaccgggtgcgggtagctagcgggtagggtaccaaaacggcggcgctagaaaggaaaacctgccgtactgtcccctcttcccttttactgccgcctgccggccgcgagggagggagggacggaggtgctcatctgtgcggcggcttcggtgtcggtcccaggggaggcggggagccatggcgcggaagcacggctggcagctcccagcccacaccctgcagatcgttgcaattacagttttcttccttctggtggttgcgttttatgccttctttgtgccgtttttgggaaagcaagtagttgagtatattgcaattggcgtttatactcctgtggcacttgcagttttcatcctttacattcgatgcaccagtataaaccctgcggatcctgggatcatgtcaaagtttgaggatggccttatcaatataccaaccaatggctctggaatagaaggcatgaatttgccccagaaagtaaacaatgctacaggaacaaactctccaatgtctacttgcagaagttctctagatgggcattctaatcaaagaggttcatccataggggaggcaaacatgaatctaggatcacaactgccaaagaaaagatcaagctgttggttgctaggtgggcttctatgtgctacatttgtcaaggaagactgccgaaaaactgatgactcggagcagcaagcaaatggggaggaggctctgttttgcacattatgtaatgctgagtggctaaataactgtgttgggcggaagaattatttcacattccttgctctgatggcaatcagtcttatctggcttgcaattgaatttggagtgggaattgctgttattgtactatgttttgtcgataagaatgcatcaagaaatattcaagacaagttggggaatggcttgactcgtgctccatttgctgttatcgtgggcatatttaccttactttcattggtggcatgcatacctttgggcgaacttctctttttccacataatattgataagaaaggggattacaacttatgattatgttgttgcaatgagagctatgagtgaggcagctccagaggacgaggaaggagaaaatatcatttactcgccatcaaattcagcaacaactgggttcagtgtaggaagttcacttggtattcaccacaaaggtgcttggtgtactcctccaaggatatttatcgatcaggatgaagtgatcccacatctggagcctggaatggtgccttcaaccgtggaccctgatggtgctggatatccggaaagagcaaatagagccaagaaggcagtcaaaatcagtgctcgcagcctcgcaaagctcgataagaatgaggtaatgaaagctgctgcaaaagctcgggcatcatcctcggttctgcgaccaatagatgcccgccatggtcatgaagctgatgtcatctccagcggcagtgccagtgtcaggagcagcatgagtgttgactacagtggcacaaaggaatcaaacagcgagatgaaactttctccgcttcataactcatacccccaaagccttgcaagccaggatgaatacgataccggcacaccaaccgcaagcagtttaagcagtctggtcaacatccacaagcttgcatcccactctcagttcagtgctgcgcctcgccctgcacctccggaaagacctgtgccggcgatggtgcggccacctgttcccaccacacaaataaccaacccagggataccgcggccagctgttcccacaacacaaacaaccaacccgatgttccaatcagccacatcttatgttcgagagaaccgaagggcctctgtcgtctgggatcaagaggctggtcggtacgtgtcagttcctgcacagacaagaacgggaactggagccgacctgccagcaagaaacccacggttcttggcgaacccaagtggcgagccaagcagccatgtgaggggtgttgcacccggcaacacatcgtcctcagcaatgccgtcagggcagccttcggagaggctgacctactctgggcagtcgatattcttcggtggccccatgctgaacacccctagcctgggcgcccagaggaacgaggcaggcgcaagagcgcgtccggagggaagcagagatcctaatgcccagcagcgtgacatccggggtgagaaagcgaggacaggctccttgccagtatttgctcctgggacgatattgcagaggcagaaggggcaagcagataaaacctcgcgggctttgctagtttgcttcaccccttcccttctccccaccgcccccgtccccgtcccccaccactggcactcaggtgaagggattcctgtgccgccgcctgccctcgccttctgcctcccggcgcccactcggccttgcggataatttgcggctcggtcccgggcgtgctcagtctcggttccagtggccgcttcgatgtacctgaccgccgtttccttcccccccgcagccgccttctcgtcctcatcccagaagctgctgcctaggtcggccggggtcggccggcgtctggtggtgcgggcagacgtcaaggtcatatcgacgggcgaggcctgccgccgcgggctcgccgccggcattgacaagctcgccgacgccgtcagcgtcaccctcggccccaaagggaggaatgttgttattgaccaagatgatgtacctaaagtaattaatgatggtgtcacaattgccaaggctatagagctcccaaatgcacttgagcatgcaggtgccacgctacttcaagaaatagcatccaagacaaatagcgctgttggtgatggaactacaacggcaattgttttggctcgggaaatcatcaatcttgggttgttggcagttgccactggtgctaacccagttgcattgagaaggggtattgacaaagccgttcatgagctaattaagatcttgaagagtaaatgtatccctgtgagtacaaaggaggacataaaagctgttgcgtcaatatcatctggcaatgatgaatatgttggtaatctcattgctgatgcattggagaagataggtcctgatggtataatcaaaattgagtcatcatcttcaatatacactacagttgaggtgcaggaaggaatgaagatagacaagggatatatttctccatacttcatcacaaatcaagacaaatcaattgttgaattcgaaaatactagagtgcttttaactgatcagcgtgtgaatgatgttcaagagatacttcccttgctggagaagacaacacagttgagtgtccctttattaattattgccgaggatgtgtcgcatgaggtatattcaacactggttcttaacaaactgaatggattgctaaatgttgcggttgttaaatgtcctggtttgggagatgaaaagaaggccattctccaagacattgctattatgacaggtgcagatttctttgctagtgaccttggctggggtcttcatggcattacttctgatcagcttggtatggctcagaagatcacaataactagtgaatccacaactatcatagcacatccttcaatgagaccagagattgaggccagaatcatgcaactgaaaaaagatctagaggagacaacgagttcctatctaaaagaaaggttctctgcaagaatcgctaaactttcaagaggtgttggagtcatcaaggttggggcagccactgaagctgaactcgaggataggaaactgagagtagaggatgcaaagaacgcaacttttgcagccatcagtgaaggcataactcctggtggtggggtgacatatgttcatttatcaaagcatattcccagcatcatggaccttgtggacgacacagaggagaaaatgggtgtaaatatagttgggaaggcacttcttgtccctgctatgacgatagctcgcaatgccggggcagacggtccagctgtcgtggagaagcttctcgccagcgagtggcgggttggttacaatgcgatgactgacgagtttgaagaccttgtcgctgctggtgtggtggacccgtgcagggtcgcgagatgcgtgctccagaactctgcttctatcgcagggctgattcttatgactcaggctatgatgtttgacaagatcaagaagaagaagtctcccatccccgagattcctggtattccaccgcttcagataagccaaaaagctaaggcttgagctgttggatgctgccctggtgttgttggctggatgagttgtgttgacctaggaagcagcagaatgcccagtgagctgcccaaaccaggtagaacagtgagcacttggaatgcccatgttacactcgttatataatttggtggtcggtgcagtattacttgtcatgtctgcataaattttgcattggcgggtgagtcggcaaccaatttatgtctgacttgggaacgtaaacgaacgaatggttgatttgttgctacatagagggccccctttgggcatcatctcgagcaaagctattttgccttgtatctccctttgaaagcagatctgtttcatcaattaacatacgaggtaacacagtagcttgtaggaaaagaaatagatcgttctgtc

SEQ ID NO: 26321 - DNA, 4684 bp, Zea Mays
gaactaccaccgggtgcgggtagctagcgggtagggtaccaaaacggcggcgctagaaaggaaaacctgccgtactgtcccctcttcccttttactgccgcctgccggccgcgagggagggagggacggaggtgctcatctgtgcggcggcttcggtgtcggtcccaggggaggcggggagccatggcgcggaagcacggctggcagctcccagcccacaccctgcagatcgttgcaattacagttttcttccttctggtggttgcgttttatgccttctttgtgccgtttttgggaaagcaagtagttgagtatattgcaattggcgtttatactcctgtggcacttgcagttttcatcctttacattcgatgcaccagtataaaccctgcggatcctgggatcatgtcaaagtttgaggatggccttatcaatataccaaccaatggctctggaatagaaggcatgaatttgccccagaaagtaaacaatgctacaggaacaaactctccaatgtctacttgcagaagttctctagatgggcattctaatcaaagaggttcatccataggggaggcaaacatgaatctaggatcacaactgccaaagaaaagatcaagctgttggttgctaggtgggcttctatgtgctacatttgtcaaggaagactgccgaaaaactgatgactcggagcagcaagcaaatggggaggaggctctgttttgcacattatgtaatgctgaggttcgcaaattcagcaaacactgcaggagttgtgacaagtgtgtggatggatttgatcatcattgtcggtggctaaataactgtgttgggcggaagaattatttcacattccttgctctgatggcaatcagtcttatctggcttgcaattgaatttggagtgggaattgctgttattgtactatgttttgtcgataagaatgcatcaagaaatattcaagacaagttggggaatggcttgactcgtgctccatttgctgttatcgtgggcatatttaccttactttcattggtggcatgcatacctttgggcgaacttctctttttccacataatattgataagaaaggggattacaacttatgattatgttgttgcaatgagagctatgagtgaggcagctccagaggacgaggaaggagaaaatatcatttactcgccatcaaattcagcaacaactgggttcagtgtaggaagttcacttggtattcaccacaaaggtgcttggtgtactcctccaaggatatttatcgatcaggatgaagtgatcccacatctggagcctggaatggtgccttcaaccgtggaccctgatggtgctggatatccggaaagagcaaatagagccaagaaggcagtcaaaatcagtgctcgcagcctcgcaaagctcgataagaatgaggtaatgaaagctgctgcaaaagctcgggcatcatcctcggttctgcgaccaatagatgcccgccatggtcatgaagctgatgtcatctccagcggcagtgccagtgtcaggagcagcatgagtgttgactacagtggcacaaaggaatcaaacagcgagatgaaactttctccgcttcataactcatacccccaaagccttgcaagccaggatgaatacgataccggcacaccaaccgcaagcagtttaagcagtctggtcaacatccacaagcttgcatcccactctcagttcagtgctgcgcctcgccctgcacctccggaaagacctgtgccggcgatggtgcggccacctgttcccaccacacaaataaccaacccagggataccgcggccagctgttcccacaacacaaacaaccaacccgatgttccaatcagccacatcttatgttcgagagaaccgaagggcctctgtcgtctgggatcaagaggctggtcggtacgtgtcagttcctgcacagacaagaacgggaactggagccgacctgccagcaagaaacccacggttcttggcgaacccaagtggcgagccaagcagccatgtgaggggtgttgcacccggcaacacatcgtcctcagcaatgccgtcagggcagccttcggagaggctgacctactctgggcagtcgatattcttcggtggccccatgctgaacacccctagcctgggcgcccagaggaacgaggcaggcgcaagagcgcgtccggagggaagcagagatcctaatgcccagcagcgtgacatccggggtgagaaagcgaggacaggctccttgccagtatttgctcctgggacgatattgcagaggcagaaggggcaagcagataaaacctcgcgggctttgctagtttgcttcaccccttcccttctccccaccgcccccgtccccgtcccccaccactggcactcaggtgaagggattcctgtgccgccgcctgccctcgccttctgcctcccggcgcccactcggccttgcggataatttgcggctcggtcccgggcgtgctcagtctcggttccagtggccgcttcgatgtacctgaccgccgtttccttcccccccgcagccgccttctcgtcctcatcccagaagctgctgcctaggtcggccggggtcggccggcgtctggtggtgcgggcagacgtcaaggtcatatcgacgggcgaggcctgccgccgcgggctcgccgccggcattgacaagctcgccgacgccgtcagcgtcaccctcggccccaaagatgttcattgcagggaggaatgttgttattgaccaagatgatgtacctaaagtaattaatgatggtgtcacaattgccaaggctatagagctcccaaatgcacttgagcatgcaggtgccacgctacttcaagaaatagcatccaagacaaatagcgctgttggtgatggaactacaacggcaattgttttggctcgggaaatcatcaatcttgggttgttggcagttgccactggtgctaacccagttgcattgagaaggggtattgacaaagccgttcatgagctaattaagatcttgaagagtaaatgtatccctgtgagtacaaaggaggacataaaagctgttgcgtcaatatcatctggcaatgatgaatatgttggtaatctcattgctgatgcattggagaagataggtcctgatggtataatcaaaattgagtcatcatcttcaatatacactacagttgaggtgcaggaaggaatgaagatagacaagggatatatttctccatacttcatcacaaatcaagacaaatcaattgttgaattcgaaaatactagagtgcttttaactgatcagcgtgtgaatgatgttcaagagatacttcccttgctggagaagacaacacagttgagtgtccctttattaattattgccgaggatgtgtcgcatgaggtatattcaacactggttcttaacaaactgaatggattgctaaatgttgcggttgttaaatgtcctggtttgggagatgaaaagaaggccattctccaagacattgctattatgacaggtgcagatttctttgctagtgaccttggctggggtcttcatggcattacttctgatcagcttggtatggctcagaagatcacaataactagtgaatccacaactatcatagcacatccttcaatgagaccagagattgaggccagaatcatgcaactgaaaaaagatctagaggagacaacgagttcctatctaaaagaaaggttctctgcaagaatcgctaaactttcaagaggtgttggagtcatcaaggttggggcagccactgaagctgaactcgaggataggaaactgagagtagaggatgcaaagaacgcaacttttgcagccatcagtgaaggcataactcctggtggtggggtgacatatgttcatttatcaaagcatattcccagcatcatggaccttgtggacgacacagaggagaaaatgggtgtaaatatagttgggaaggcacttcttgtccctgctatgacgatagctcgcaatgccggggcagacggtccagctgtcgtggagaagcttctcgccagcgagtggcgggttggttacaatgcgatgactgacgagtttgaagaccttgtcgctgctggtgtggtggacccgtgcagggtcgcgagatgcgtgctccagaactctgcttctatcgcagggctgattcttatgactcaggctatgatgtttgacaagatcaagaagaagaagtctcccatccccgagattcctggtattccaccgcttcagataagccaaaaagctaaggcttgagctgttggatgctgccctggtgttgttggctggatgagttgtgttgacctaggaagcagcagaatgcccagtgagctgcccaaaccaggtagaacagtgagcacttggaatgcccatgttacactcgttatataatttggtggtcggtgcagtattacttgtcatgtctgcataaattttgcattggcgggtgagtcggcaaccaatttatgtctgacttgggaacgtaaacgaacgaatggttgatttgttgctacatagagggccccctttgggcatcatctcgagcaaagctattttgccttgtatctccctttgaaagcagatctgtttcatcaattaacatacgaggtaacacagtagcttgtaggaaaagaaatagatcgttctgtc

SEQ ID NO: 26322 - DNA, 4671 bp, Zea Mays
tgctgaactaccaccgggtgcgggtagctagcgggtagggtaccaaaacggcggcgctagaaaggaaaacctgccgtactgtcccctcttcccttttactgccgcctgccggccgcgagggagggagggacggaggtgctcatctgtgcggcggcttcggtgtcggtcccaggggaggcggggagccatggcgcggaagcacggctggcagctcccagcccacaccctgcagatcgttgcaattacagttttcttccttctggtggttgcgttttatgccttctttgtgccgtttttgggaaagcaagtagttgagtatattgcaattggcgtttatactcctgtggcacttgcagttttcatcctttacattcgatgcaccagtataaaccctgcggatcctgggatcatgtcaaagtttgaggatggccttatcaatataccaaccaatggctctggaatagaaggcatgaatttgccccagaaagtaaacaatgctacaggaacaaactctccaatgtctacttgcagaagttctctagatgggcattctaatcaaagaggttcatccataggggaggcaaacatgaatctaggatcacaactgccaaagaaaagatcaagctgttggttgctaggtgggcttctatgtgctacatttgtcaaggaagactgccgaaaaactgatgactcggagcagcaagcaaatggggaggaggctctgttttgcacattatgtaatgctgaggttcgcaaattcagcaaacactgcaggagttgtgacaagtgtgtggatggatttgatcatcattgtcggtggctaaataactgtgttgggcggaagaattatttcacattccttgctctgatggcaatcagtcttatctggcttgcaattgaatttggagtgggaattgctgttattgtactatgttttgtcgataagaatgcatcaagaaatattcaagacaagttggggaatggcttgactcgtgctccatttgctgttatcgtgggcatatttaccttactttcattggtggcatgcatacctttgggcgaacttctctttttccacataatattgataagaaaggggattacaacttatgattatgttgttgcaatgagagctatgagtgaggcagctccagaggacgaggaaggagaaaatatcatttactcgccatcaaattcagcaacaactgggttcagtgtaggaagttcacttggtattcaccacaaaggtgcttggtgtactcctccaaggatatttatcgatcaggatgaagtgatcccacatctggagcctggaatggtgccttcaaccgtggaccctgatggtgctggatatccggaaagagcaaatagagccaagaaggcagtcaaaatcagtgctcgcagcctcgcaaagctcgataagaatgaggtaatgaaagctgctgcaaaagctcgggcatcatcctcggttctgcgaccaatagatgcccgccatggtcatgaagctgatgtcatctccagcggcagtgccagtgtcaggagcagcatgagtgttgactacagtggcacaaaggaatcaaacagcgagatgaaactttctccgcttcataactcatacccccaaagccttgcaagccaggatgaatacgataccggcacaccaaccgcaagcagtttaagcagtctggtcaacatccacaagcttgcatcccactctcagttcagtgctgcgcctcgccctgcacctccggaaagacctgtgccggcgatggtgcggccacctgttcccaccacacaaataaccaacccagggataccgcggccagctgttcccacaacacaaacaaccaacccgatgttccaatcagccacatcttatgttcgagagaaccgaagggcctctgtcgtctgggatcaagaggctggtcggtacgtgtcagttcctgcacagacaagaacgggaactggagccgacctgccagcaagaaacccacggttcttggcgaacccaagtggcgagccaagcagccatgtgaggggtgttgcacccggcaacacatcgtcctcagcaatgccgtcagggcagccttcggagaggctgacctactctgggcagtcgatattcttcggtggccccatgctgaacacccctagcctgggcgcccagaggaacgaggcaggcgcaagagcgcgtccggagggaagcagagatcctaatgcccagcagcgtgacatccggggtgagaaagcgaggacaggctccttgccagtatttgctcctgggacgatattgcagaggcagaaggggcaagcagataaaacctcgcgggctttgctagtttgcttcaccccttcccttctccccaccgcccccgtccccgtcccccaccactggcactcaggtgaagggattcctgtgccgccgcctgccctcgccttctgcctcccggcgcccactcggccttgcggataatttgcggctcggtcccgggcgtgctcagtctcggttccagtggccgcttcgatgtacctgaccgccgtttccttcccccccgcagccgccttctcgtcctcatcccagaagctgctgcctaggtcggccggggtcggccggcgtctggtggtgcgggcagacgtcaaggtcatatcgacgggcgaggcctgccgccgcgggctcgccgccggcattgacaagctcgccgacgccgtcagcgtcaccctcggccccaaagggaggaatgttgttattgaccaagatgatgtacctaaagtaattaatgatggtgtcacaattgccaaggctatagagctcccaaatgcacttgagcatgcaggtgccacgctacttcaagaacatccaagacaaatagcgctgttggtgatggaactacaacggcaattgttttggctcgggaaatcatcaatcttgggttgttggcagttgccactggtgctaacccagttgcattgagaaggggtattgacaaagccgttcatgagctaattaagatcttgaagagtaaatgtatccctgtgagtacaaaggaggacataaaagctgttgcgtcaatatcatctggcaatgatgaatatgttggtaatctcattgctgatgcattggagaagataggtcctgatggtataatcaaaattgagtcatcatcttcaatatacactacagttgaggtgcaggaaggaatgaagatagacaagggatatatttctccatacttcatcacaaatcaagacaaatcaattgttgaattcgaaaatactagagtgcttttaactgatcagcgtgtgaatgatgttcaagagatacttcccttgctggagaagacaacacagttgagtgtccctttattaattattgccgaggatgtgtcgcatgaggtatattcaacactggttcttaacaaactgaatggattgctaaatgttgcggttgttaaatgtcctggtttgggagatgaaaagaaggccattctccaagacattgctattatgacaggtgcagatttctttgctagtgaccttggctggggtcttcatggcattacttctgatcagcttggtatggctcagaagatcacaataactagtgaatccacaactatcatagcacatccttcaatgagaccagagattgaggccagaatcatgcaactgaaaaaagatctagaggagacaacgagttcctatctaaaagaaaggttctctgcaagaatcgctaaactttcaagaggtgttggagtcatcaaggttggggcagccactgaagctgaactcgaggataggaaactgagagtagaggatgcaaagaacgcaacttttgcagccatcagtgaaggcataactcctggtggtggggtgacatatgttcatttatcaaagcatattcccagcatcatggaccttgtggacgacacagaggagaaaatgggtgtaaatatagttgggaaggcacttcttgtccctgctatgacgatagctcgcaatgccggggcagacggtccagctgtcgtggagaagcttctcgccagcgagtggcgggttggttacaatgcgatgactgacgagtttgaagaccttgtcgctgctggtgtggtggacccgtgcagggtcgcgagatgcgtgctccagaactctgcttctatcgcagggctgattcttatgactcaggctatgatgtttgacaagatcaagaagaagaagtctcccatccccgagattcctggtattccaccgcttcagataagccaaaaagctaaggcttgagctgttggatgctgccctggtgttgttggctggatgagttgtgttgacctaggaagcagcagaatgcccagtgagctgcccaaaccaggtagaacagtgagcacttggaatgcccatgttacactcgttatataatttggtggtcggtgcagtattacttgtcatgtctgcataaattttgcattggcgggtgagtcggcaaccaatttatgtctgacttgggaacgtaaacgaacgaatggttgatttgttgctacatagagggccccctttgggcatcatctcgagcaaagctattttgccttgtatctccctttgaaagcagatctgtttcatcaattaacatacgaggtaacacagtagcttgtaggaaaagaaatagatcgttctgtc

SEQ ID NO: 26323 - DNA, 4491 bp, Zea Mays
aaaacgtagctacagtaaaactatgaggagagagaaggggtcgtcattactgttggctgctgctgaactaccaccgggtgcgggtagctagcgggtagggtaccaaaacggcggcgctagaaaggaaaacctgccgtactgtcccctcttcccttttactgccgcctgccggccgcgagggagggagggacggaggtgctcatctgtgcggcggcttcggtgtcggtcccaggggaggcggggagccatggcgcggaagcacggctggcagctcccagcccacaccctgcagatcgttgcaattacagttttcttccttctggtggttgcgttttatgccttctttgtgccgtttttgggaaagcaagtagttgagtatattgcaattggcgtttatactcctgtggcacttgcagttttcatcctttacattcgatgcaccagtataaaccctgcggatcctgggatcatgtcaaagtttgaggatggccttatcaatataccaaccaatggctctggaatagaaggcatgaatttgccccagaaagggaggcaaacatgaatctaggatcacaactgccaaagaaaagatcaagctgttggttgctaggtgggcttctatgtgctacatttgtcaaggaagactgccgaaaaactgatgactcggagcagcaagcaaatggggaggaggctctgttttgcacattatgtaatgctgaggttcgcaaattcagcaaacactgcaggagttgtgacaagtgtgtggatggatttgatcatcattgtcggtggctaaataactgtgttgggcggaagaattatttcacattccttgctctgatggcaatcagtcttatctggcttgcaattgaatttggagtgggaattgctgttattgtactatgttttgtcgataagaatgcatcaagaaatattcaagacaagttggggaatggcttgactcgtgctccatttgctgttatcgtgggcatatttaccttactttcattggtggcatgcatacctttgggcgaacttctctttttccacataatattgataagaaaggggattacaacttatgattatgttgttgcaatgagagctatgagtgaggcagctccagaggacgaggaaggagaaaatatcatttactcgccatcaaattcagcaacaactgggttcagtgtaggaagttcacttggtattcaccacaaaggtgcttggtgtactcctccaaggatatttatcgatcaggatgaagtgatcccacatctggagcctggaatggtgccttcaaccgtggaccctgatggtgctggatatccggaaagagcaaatagagccaagaaggcagtcaaaatcagtgctcgcagcctcgcaaagctcgataagaatgaggtaatgaaagctgctgcaaaagctcgggcatcatcctcggttctgcgaccaatagatgcccgccatggtcatgaagctgatgtcatctccagcggcagtgccagtgtcaggagcagcatgagtgttgactacagtggcacaaaggaatcaaacagcgagatgaaactttctccgcttcataactcatacccccaaagccttgcaagccaggatgaatacgataccggcacaccaaccgcaagcagtttaagcagtctggtcaacatccacaagcttgcatcccactctcagttcagtgctgcgcctcgccctgcacctccggaaagacctgtgccggcgatggtgcggccacctgttcccaccacacaaataaccaacccagggataccgcggccagctgttcccacaacacaaacaaccaacccgatgttccaatcagccacatcttatgttcgagagaaccgaagggcctctgtcgtctgggatcaagaggctggtcggtacgtgtcagttcctgcacagacaagaacgggaactggagccgacctgccagcaagaaacccacggttcttggcgaacccaagtggcgagccaagcagccatgtgaggggtgttgcacccggcaacacatcgtcctcagcaatgccgtcagggcagccttcggagaggctgacctactctgggcagtcgatattcttcggtggccccatgctgaacacccctagcctgggcgcccagaggaacgaggcaggcgcaagagcgcgtccggagggaagcagagatcctaatgcccagcagcgtgacatccggggtgagaaagcgaggacaggctccttgccagtatttgctcctgggacgatattgcagaggcagaaggggcaagcagataaaacctcgcgggctttgctagtttgcttcaccccttcccttctccccaccgcccccgtccccgtcccccaccactggcactcagccgccttctcgtcctcatcccagaagctgctgcctaggtcggccggggtcggccggcgtctggtggtgcgggcagacgtcaaggtcatatcgacgggcgaggcctgccgccgcgggctcgccgccggcattgacaagctcgccgacgccgtcagcgtcaccctcggccccaaagggaggaatgttgttattgaccaagatgatgtacctaaagtaattaatgatggtgtcacaattgccaaggctatagagctcccaaatgcacttgagcatgcaggtgccacgctacttcaagaaatagcatccaagacaaatagcgctgttggtgatggaactacaacggcaattgttttggctcgggaaatcatcaatcttgggttgttggcagttgccactggtgctaacccagttgcattgagaaggggtattgacaaagccgttcatgagctaattaagatcttgaagagtaaatgtatccctgtgagtacaaaggaggacataaaagctgttgcgtcaatatcatctggcaatgatgaatatgttggtaatctcattgctgatgcattggagaagataggtcctgatggtataatcaaaattgagtcatcatcttcaatatacactacagttgaggtgcaggaaggaatgaagatagacaagggatatatttctccatacttcatcacaaatcaagacaaatcaattgttgaattcgaaaatactagagtgcttttaactgatcagcgtgtgaatgatgttcaagagatacttcccttgctggagaagacaacacagttgagtgtccctttattaattattgccgaggatgtgtcgcatgaggtatattcaacactggttcttaacaaactgaatggattgctaaatgttgcggttgttaaatgtcctggtttgggagatgaaaagaaggccattctccaagacattgctattatgacaggtgcagatttctttgctagtgaccttggctggggtcttcatggcattacttctgatcagcttggtatggctcagaagatcacaataactagtgaatccacaactatcatagcacatccttcaatgagaccagagattgaggccagaatcatgcaactgaaaaaagatctagaggagacaacgagttcctatctaaaagaaaggttctctgcaagaatcgctaaactttcaagaggtgttggagtcatcaaggttggggcagccactgaagctgaactcgaggataggaaactgagagtagaggatgcaaagaacgcaacttttgcagccatcagtgaaggcataactcctggtggtggggtgacatatgttcatttatcaaagcatattcccagcatcatggaccttgtggacgacacagaggagaaaatgggtgtaaatatagttgggaaggcacttcttgtccctgctatgacgatagctcgcaatgccggggcagacggtccagctgtcgtggagaagcttctcgccagcgagtggcgggttggttacaatgcgatgactgacgagtttgaagaccttgtcgctgctggtgtggtggacccgtgcagggtcgcgagatgcgtgctccagaactctgcttctatcgcagggctgattcttatgactcaggctatgatgtttgacaagatcaagaagaagaagtctcccatccccgagattcctggtattccaccgcttcagataagccaaaaagctaaggcttgagctgttggatgctgccctggtgttgttggctggatgagttgtgttgacctaggaagcagcagaatgcccagtgagctgcccaaaccaggtagaacagtgagcacttggaatgcccatgttacactcgttatataatttggtggtcggtgcagtattacttgtcatgtctgcataaattttgcattggcgggtgagtcggcaaccaatttatgtctgacttgggaacgtaaacgaacgaatggttgatttgttgctacatagagggccccctttgggcatcatctcgagcaaagctattttgccttgtatctccctttgaaagcagatctgtttcatcaattaacatacgaggtaacacagtagcttgtaggaaaagaaatagatcgttctgtc

SEQ ID NO: 26324 - DNA, 2705 bp, Zea Mays
gaactaccaccgggtgcgggtagctagcgggtagggtaccaaaacggcggcgctagaaaggaaaacctgccgtactgtcccctcttcccttttactgccgcctgccggccgcgagggagggagggacggaggtgctcatctgtgcggcggcttcggtgtcggtcccaggggaggcggggagccatggcgcggaagcacggctggcagctcccagcccacaccctgcagatcgttgcaattacagttttcttccttctggtggttgcgttttatgccttctttgtgccgtttttgggaaagcaagtagttgagtatattgcaattggcgtttatactcctgtggcacttgcagttttcatcctttacattcgatgcaccagtataaaccctgcggatcctgggatcatgtcaaagtttgaggatggccttatcaatataccaaccaatggctctggaatagaaggcatgaatttgccccagaaagtaaacaatgctacaggaacaaactctccaatgtctacttgcagaagttctctagatgggcattctaatcaaagaggttcatccataggggaggcaaacatgaatctaggatcacaactgccaaagaaaagatcaagctgttggttgctaggtgggcttctatgtgctacatttgtcaaggaagactgccgaaaaactgatgactcggagcagcaagcaaatggggaggaggctctgttttgcacattatgtaatgctgagtggctaaataactgtgttgggcggaagaattatttcacattccttgctctgatggcaatcagtcttatctggcttgcaattgaatttggagtgggaattgctgttattgtactatgttttgtcgataagaatgcatcaagaaatattcaagacaagttggggaatggcttgactcgtgctccatttgctgttatcgtggggattacaacttatgattatgttgttgcaatgagagctatgagtgaggcagctccagaggacgaggaaggagaaaatatcatttactcgccatcaaattcagcaacaactgggttcagtgtaggaagttcacttggtattcaccacaaaggtgcttggtgtactcctccaaggatatttatcgatcaggatgaagtgatcccacatctggagcctggaatggtgccttcaaccgtggaccctgatggtgctggatatccggaaagagcaaatagagccaagaaggcagtcaaaatcagtgctcgcagcctcgcaaagctcgataagaatgaggtaatgaaagctgctgcaaaagctcgggcatcatcctcggttctgcgaccaatagatgcccgccatggtcatgaagctgatgtcatctccagcggcagtgccagtgtcaggagcagcatgagtgttgactacagtggcacaaaggaatcaaacagcgagatgaaactttctccgcttcataactcatacccccaaagccttgcaagccaggatgaatacgataccggcacaccaaccgcaagcagtttaagcagtctggtcaacatccacaagcttgcatcccactctcagttcagtgctgcgcctcgccctgcacctccggaaagacctgtgccggcgatggtgcggccacctgttcccaccacacaaataaccaacccagggataccgcggccagctgttcccacaacacaaacaaccaacccgatgttccaatcagccacatcttatgttcgagagaaccgaagggcctctgtcgtctgggatcaagaggctggtcggtacgtgtcagttcctgcacagacaagaacgggaactggagccgacctgccagcaagaaacccacggttcttggcgaacccaagtggcgagccaagcagccatgtgaggggtgttgcacccggcaacacatcgtcctcagcaatgccgtcagggcagccttcggagaggctgacctactctgggcagtcgatattcttcggtggccccatgctgaacacccctagcctgggcgcccagaggaacgaggcaggcgcaagagcgcgtccggagggaagcagagatcctaatgcccagcagcgtgacatccggggtgagaaagcgaggacaggctccttgccagtatttgctcctgggacggtccagaggaacccgccctttgacaaatgacctgctcctgctcatgaagtttatctgaagtgcgatgatgccgttacgctggaacacccccagcctgaagagttggcagatagttagggctgctctactggggttgccagacgggcggacaaggcagccgttggattgaaggctgctgccctgctggcactaggcaggtgctaacgagaaccacaaatattgctcgcagtcagtgctgacatttttcagtgttgcgggggcgatggagtgactgacgcacactgtgtttgtgttaggagttcatcagatacttgatgcgcgacagataggaagagctaatttctggcgatgtcaaacgctgatttgcagctgactttgtagcgtcgattgtggtcactgtgtggtgtgtgtgtgccatgggatactagtagacatgtgtaaaatggttagtcgaggtgcactttcggacactgctcgtgcgtacttgcttgcttgctagtaacaggtcttgagtttattcttgtagcatctccctttgtatggtgcgaaccatctctgcattttgttgtgct

SEQ ID NO: 26325 - DNA, 1457 bp, Zea Mays
cagcacttgacttgtccgtcccctctccaatcacagttctacctaccacagggctgggccaaccagtcccgatcgatcagccagcatggcgtcctcctccaaagggtcgctgccatgcgtgctcctcctcctcgctgtcttccaccacggctgctcgtcggcgagggcccacagacgtgccggcgacatggagaggagcatgagcaccgacgacagctcgatgatagagcggttccagcggtggaaggcggcgtacaacaagtcctacgccacggtcgccgaggagcggcggcggttccgggtgtgcgcgcgcaacatggcgtacatcgaggccaccaacgccgaggccgaggcggcggggctcacgtacgagctcggcgagacggcctacaccgacctcaccaaccaggagttcatggccatgtacacggcgcccgcgccggcgcagctgcccgcggacgagtcggtgatcaccacgcgcgcggggccggttgacgccgtcgggggcgcgccgggccagctgccggtgtacgtgaacctgtccacctccgcgccggcgagcgtggactggcgagccagcggcgccgtgacgccggtgaagaaccaaggccgatgtgggtcatgctgggccttctcgacggtggcggtggtcgaaggcatctaccagatccggacggggaagctggtgtccctgtcggagcaggagctggtggactgcgacacgctggacgacggctgcgacggcggcatcagctaccgcgctctgcggtggatcgcctccaacggcggcatcaccacggagaccgactacccgtacacgggcaccacggacgcttgcaacagggccaagctctcccacaacgcggtcagcatcgccgggctccggcgcgttgccacccggagcgaggcgtcgctggccaacgccgtggcggggcagcccgtggccgtgtccatcgaggccggcggcgacaacttccagcactacaagaagggagtgtacaacgggccctgcgggaccaacctcaaccacggcgtcaccgtcgtcggctacggccaggaggcggccggcggcgacaggtactggatcgtcaagaactcgtgggggcaggggtggggcgacgacggatacatcaggatgaagaaagacgtcgccggcaagccggaggggctctgcggcatcgccatccgcccgtcctatccactaatgtgacatggtgtggtgtacatctgttttcgttttaattatcattttattttattaaacaataaataagtagtcaacatatggatcgactcaaacttttgcagttacgtgtaccagtacacttgttgtaaataataatccatggcatctcgcgtgtaaactttattctggtgcgaaaacgacttcttcaaatgaaggtttgtacgtgtaaaattttgtggtcactatcaagcaaaacaatcgtcatttactc

SEQ ID NO: 26326 - DNA, 950 bp, Zea Mays
tttgcttaaaaaatgtgcatatggggatggtggaagtttgatttattgtgaagcacttggagtctgcaaacacgatgttttcctttatttggtggatccttgggttctattgggtgtctgcaggaggagggagcatctgaagatgacgtaaacaacctttccaaattcaaatttcggacaatgagtgatgcagacaagctagctgccggcattgcagcacctgtgggtggagtgatgacagagtgcggtaccaatcctcctgtcgaacatattctttcggctgaggatgcagagtgctgtatctgcctatgcccgtacgaagatggcgtggaactgcgtgagctcccttgcaaccaccattttcactgcagctgtatagacaagtggcttcacataaatgctacatgcccattgtgcaagttcaacatcgtcaagagcaatctccacagagaagaggtctaggtcaataaggaaaaaaataataatcatggcagcacatttcggcatgtcccatcccagctgtgctcgtcagtattgccacatttgccaactggagttgtgattacctgtcttgtagtcaagtcataaaagtcactggtgatgcgcaggtggttgcaatgtcggttctcgtgaatattccttgtaacagtttgctgcaggggctgtacattctcgttctgctcgatctgattgcattgcgatttatttgtacatgaacacgtgaccatgttggatcatgaaagcagtcagtcatttgtaaaatgattcatgaatcggaggctagtatgcaggctgctattagccaaatcctctctatctcttgtctcttatcatgctctgctctacgtgcttgcttcaaaccatatagaccattgttcaacttgtacaaatgattgtctccttatatcttcaaatccttggagttgctccataaagataagctcattgat

SEQ ID NO: 26327 - DNA, 1091 bp, Zea Mays
cttgtgatgtcctttgcttaaaaaatgtgcatatggggatggtggaagtttgatttattgtgaagcacttggagtctgcaaacacgatgttttcctttatttggtggatccttgggttctattgggtgtctgcaggtggtcaagctttatcacatgatgctcctcagctttattggctgacaattgtttttctggcatttgatgttttctttgtggtcttctgtattgctttggcttgtgtgattggaatcgctgtttgttgctgccttccgtgcattattggtatcttgtatgctgtaactgatcaggaggagggagcatctgaagatgacgtaaacaacctttccaaattcaaatttcggacaatgagtgatgcagacaagctagctgccggcattgcagcacctgtgggtggagtgatgacagagtgcggagtgctgtatctgcctatgcccgtacgaagatggcgtggaactgcgtgagctcccttgcaaccaccattttcactgcagctgtatagacaagtggcttcacataaatgctacatgcccattgtgcaagttcaacatcgtcaagagcaatctccacagagaagaggtctaggtcaataaggaaaaaaataataatcatggcagcacatttcggcatgtcccatcccagctgtgctcgtcagtattgccacatttgccaactggagttgtgattacctgtcttgtagtcaagtcataaaagtcactggtgatgcgcaggtggttgcaatgtcggttctcgtgaatattccttgtaacagtttgctgcaggggctgtacattctcgttctgctcgatctgattgcattgcgatttatttgtacatgaacacgtgaccatgttggatcatgaaagcagtcagtcatttgtaaaatgattcatgaatcggaggctagtatgcaggctgctattagccaaatcctctctatctcttgtctcttatcatgctctgctctacgtgcttgcttcaaaccatatagaccattgttcaacttgtacaaatgattgtctccttatatcttcaaatccttggagttgctccataaagataagctcattgat

SEQ ID NO: 26328 - DNA, 1138 bp, Zea Mays
  misc_feature (1)..(2): n is a, c, g, or t
nnacttgtgatgtcctttgcttaaaaaatgtgcatatggggatggtggaagtttgatttattgtgaagcacttggagtctgcaaacacgatgttttcctttatttggtggatccttgggttctattgggtgtctgcaggtggtcaagctttatcacatgatgctcctcagctttattggctgacaattgtttttctggcatttgatgttttctttgtggtcttctgtattgctttggcttgtgtgattggaatcgctgtttgttgctgccttccgtgcattattggtatcttgtatgctgtaactgatcaggaggagggagcatctgaagatgacgtaaacaacctttccaaattcaaatttcggacaatgagtgatgcagacaagctagctgccggcattgcagcacctgtgggtggagtgatgacagagtgcggtaccaatcctcctgtcgaacatattctttcggctgaggatgcagagtgctgtatctgcctatgcccgtacgaagatggcgtggaactgcgtgagctcccttgcaaccaccattttcactgcagctgtatagacaagtggcttcacataaatgctacatgcccattgtgcaagttcaacatcgtcaagagcaatctccacagagaagaggtctaggtcaataaggaaaaaaataataatcatggcagcacatttcggcatgtcccatcccagctgtgctcgtcagtattgccacatttgccaactggagttgtgattacctgtcttgtagtcaagtcataaaagtcactggtgatgcgcaggtggttgcaatgtcggttctcgtgaatattccttgtaacagtttgctgcaggggctgtacattctcgttctgctcgatctgattgcattgcgatttatttgtacatgaacacgtgaccatgttggatcatgaaagcagtcagtcatttgtaaaatgattcatgaatcggaggctagtatgcaggctgctattagccaaatcctctctatctcttgtctcttatcatgctctgctctacgtgcttgcttcaaaccatatagaccattgttcaacttgtacaaatgattgtctccttatatcttcaaatccttggagttgctccataaagataagctcattgat

SEQ ID NO: 26329 - DNA, 4100 bp, Zea Mays
ggaaatttaagtgccagtaaataaatgctacctagtcatgtagtaaagaaaccaatataggcacattcattatatatggatacaagcatgcattacaatagcaaaatcacaatgaaaaggaaatattacctaaactagtcttgcaggaaaatgaacatatagtaggaaaatcacaatggatataataggaaaaatgcaagccttgcaggcttgtaccagtgaagaaaattgcagttgagaatattcaccaaattgcttatatcaatgttatcaggttgtttgattaatcgcgactaattgccctgatcagtacccagcattcaattaggcacactgactggatcagagcaatcagaaaccttgtcggtcgattaattgtcgattagttgcgattaatcagactaggtaccctgaccgactagacatcaaataagcagatgggctgcttcagcttactgtgctacctttgtttgggccaagcccattatggtctctcccccactctttccctcacctcctcacccgtgaaacattcagccgtcggctacaaagttgctgtgcgcgtgcaacagctgcatctcttcccctcctgcccttctggttcccagctgcctgttaaagcaacttgtctgctgcttcctcctccctcctgctgtagagcagcaggggttaaaggaaggtctcaggtgcgcaagacacaaggaagctcgtcgattctcttcctcatctgcaggtccaagggggtacaaagatgagctcatccgttgcatcagctgctggtggttcagcatcctcagcttctccagatgttgtatcccttatgaaaaagttattgcagcacaagaatatggagttctggacactttactaacgagaaaaatagtattaaagctcggtttctactatataagcataatatagtatatgggatatataccctacatatatgtcctggtatatacatgacaaattaaagatggcaatggggacccgttacccgttacctggcaggtaattactccattagggtacgggtttggtcgcaattttatacccgcgggtctgttaacgggagaaaaagaggacccaacggatagaacaagtatgggtacatactcattaaactcacacccgtgtacccataggtattttataatcgaaatatagccaacaattctctaaaattttagcctagctcaatgatttgtcttgggcttctggctcatgagtataactatatgctacataggccttgggacacatggtagcagtatgcagataaccagccaaaacagcgtgtccaaggctccaagcttctgagatgcgactcctcgttaatgtgcattcgaagcgaccaagccacatgcaggcacacgacacgcccagacctagaagatggaagacggaaggtcggatgttgcctctcggtgcctagcattcaccataaactaagttgggcagacagacacaactccactctagacgggtatgggtacccatcgggtatggaatacctggcgggtccgggtatgagtgtggaattgtacccgcccacgggtacagccgtacaggtattgaagcagggagtttttagtctagcggggccgggcctgggctaacaaaacctggcgggtcttcactcattgccatctgtaggtcaaatatatagacgactagaccgaccagggtcaactagtcgtcctggttgtcgactaatcatcctggtcagtagtcgtcgatttaataaccttgcttatatgtaccatgtttgggatagctccaactccggaaaacttggcggagcacgtcaataggtgctccagaaaatcgtggagctggagctgtaagcctttagaagacattcagataagtcatttcatttattatttagattaaaaatatttctccacattggagctagaacttggagccatcccaaacacccatgtaataataatttgaagctgcttgagttaagcacttagagagagaagtggatacatcatattcaacaaactttcagagggataattaaacataaccaaaatggaatgcgcactctcactgccatttccaattttccatgcatcatctatttaaacataatggggctagcataaaaaataccacaacatggacttgaacagtggcacaaatattcacaaggcatgcatcaaatagtcctaggatgtttatggctacaaaagttgagtaatcatactgctaccttttatactaaaaagacgctaaattagaatacttctatgtgaactagatccttgaaatagaagaagaaatgaaactaggatagcagagttagcccctttaactttcttaacattactgttagcacaacagtacttcatatcatgtacagtaactacactctttaatatatggtgaaaggagtcaactttaccaagttaataatactcataagcggtaccctataacagctacaaatgcaaaaaaaatcatggttatcaatgtgttgccatggcgtcctggagcttttcaaagctgggtgtctgcctttccatgacctggcatgatatggtgtccaccctacatcaaaaggcatcctctaggcgcagcttggcgtcttctccgtgcagacttgccccaggcaggtgctgcatgggtgcgcagccgggaaaccaaaggcgcagaagcacagctgacagaactatggcaagtccattttacatcaccagtgattatgatccgaagactgatctagctcagaagggaaattttgaggaaccaggatggaagtatgcctactggccaaaccttcaaaacaatgtgatatgtcattagggatttctaaaaccgtgccattagttaaccaccactgttcagttttacccctctttaatagtaatggatgaggtgtttttactactagagagggacaaaactacagttttgggtaaaccatggtatttaaaactgagttttgactgtacaaaccaaacaccttttgagctccaatactatagtatcatcaaataccatagtattgtttcaaaactacaaaaatactacaattccaaacagggcctaagcggtgatgatgaaccaagggcatggattgaaaaatccctatttattgtggtattatattatatgatttgtttctgctttctacaggcatatatattaagatgtttgtatgctatcatcttgccgcacgccttaaacgcctcaccgcgctgcgccttacagccttaataaccacacaaaagtttttttctggtctagcctcaagtggggcattccttttgcctacgtgttgctggaatgctaagttaaacaatgatcctttaaaaacaaattcatttccaacatcatttcctttccttatttttgttcattattaggtactacacacattaagtaatagataattctagctgcggaggacaaactcagttgattagttcattcaaataacactgtaacaataaaaggaattgtgtcaaaaggtgtcaattaaactagaccttgaccaacaccaatacaccattaatatatgttcaaccagataaccagaacattcaaaaaaatcaaattttcagataatatgatcttttaaaactaaaaaagttaaatgacaaagcagaatatattccactcgaagagaaatattatccaagggtgtgcttgagacaagctagatgaaatggaatgaactggcagggacatttattttttctttgaggaaaactagcagggatgtcagcatggcccctgatgcctggataaatgccatcaatgctaagtgttgcaattggtgccaacttcactttagcaataaaataaaaatatatatatatacattagattcttagcacctagtatagaagtagcttggaactacaaaaggtgttatagatgtacaagcactaaagtactacattgaatccaacatatttcatatttcctaacagtgtagtctcctacagtaccacggcttgacaaacagggtcttgtaccacatatcgacctctagattccaaattgccaactgtacctgatttcacgtccattaatctaaaatccaggaaagaaacaatccaagaaagcctatctagtct

SEQ ID NO: 26330 - DNA, 1254 bp, Zea Mays
atgacatccaattatccaattcgctctctggctcgcagtgcatacaacaggaatgacttccatacatccaaaattctatgggaatctgcattgtcgttgaactctttgattccagatggctggtttgcatatggcacagctgcatggaaggacaaggatcttgacaaagctgtggatgcgtttagtcgtgctgtacagatagatcctgagaatggagaagcatggaacaacatagcctgcctgcacatgattagaggaaaaagccaagcagcagtccaagcattcagggaagctgtaaagttcaagaggaatagctgggaaatttgggaaaattacagtaaagttgctttggacacagggaatattagactgacacttgaagctttgaaaactgtattgaatttatcctcaaacaagcagtttagtgttggtatattggacaaggtgatgacaatgcttgaagaacaatctccagattttgttgatactcacgaagcatcagatgatgcaaataaagatacaagacaatccaatcaattattagatattactggtgatatcctccagcagattgtgcgaagtggaggcagcaatgcagccatatggggtttgtatgcaagatggcataagaccaagggtaacctcatagcatgttctgaagctttgttgaagcaagttcgatcccttcagtcaggattattgcatgaccaaatgaagttcgcaaagtatgctcaagcttccttaaagctttgcaaggtgtacatggaaatttcttcctcaactggaagccgacgagaattattaacagctgagatgcaccttaaaagtaccttgaaacagacgatggacttctcagacactgaggagtacaaagctcttgataactgtcttgaagaaataaagaacctgattgccgctactgcctagatcacattatcggactctgttagcacacacaaggatgccaagacaagtgaacctgcgccagagactggaagcgaagatggtgtgctgctacagccaagattaaaaaggaagcttaagcccaatagcaaggtgtccggcctagagtgggttcgttgactgtaatagtgtggcccagtcgttgtgccatatgtatggcttcagtctgtaaactgggacatcgaaaaaaagaacagaaaacactactgcctatcttcttcccctcttccaagtcttctccttccctgccgccgtcttgctttccccttcctcctggaagctaacagtggt

SEQ ID NO: 26331 - DNA, 2026 bp, Zea Mays
atgctgccgccacgctccctccccggcgcggcattgccgaccctcctcttggcttcagtcgtgcgaatgccatcgactcccttcttccatgcggcgcggacgtcggcaatgtgcctcctcttctgcctggcggagcgcacgccgcttctccccaccgtggcggtgcagaggcattctaggcggctgcagagggacgacgacgcgagatggagatgcggcggccgcacctgcgctgtggagggcggcgtcagcagcggggatggcggcagggaggatggggtcgacgcaatggagagaggaggcggcggcctgggcagcatcgacgcctgtccccgagcgcgcgaggttgaagatatcagcaaagaattccctgctgccccacaaagagttaaaatggtttttgcggttcatatgccaactcttcctgcattgaggaaagaatatggtgaacttttgatcagttgtggcatagttggagaagcactggagatatttaaagatcttgaattgtgggacaatttaatatattgctatcgattgttaggtaaagtggctgatgcagttagtctaataaatgctcgactttctgttacaccaaatgacccaaggttatggtgttcacttggtgatgttacaaataatgatgaccattataaaaaagcattggaagtttcaaataataaatctgcgcgagctatgcgctctctggctcgcagtgcatacaacaggaatgacttccatacatccaaaattctatgggaatctgcattgtcgttgaactctttgattccagatggctggtttgcatatggcacagctgcatggaaggacaaggatcttgacaaagctgtggatgcgtttagtcgtgctgtacagatagatcctgagaatggagaagcatggaacaacatagcctgcctgcacatgattagaggaaaaagccaagcagcagtccaagcattcagggaagctgtaaagttcaagaggaatagctgggaaatttgggaaaattacagtaaagttgctttggacacagggaatattagactgacacttgaagctttgaaaactgtattgaatttatcctcaaacaagcagtttagtgttggtatattggacaaggtgatgacaatgcttgaagaacaatctccagattttgttgatactcacgaagcatcagatgatgcaaataaagatacaagacaatccaatcaattattagatattactggtgatatcctccagcagattgtgcgaagtggaggcagcaatgcagccatatggggtttgtatgcaagatggcataagaccaagggtaacctcatagcatgttctgaagctttgttgaagcaagttcgatcccttcagggctcaggattattgcatgaccaaatgaagttcgcaaagtatgctcaagcttccttaaagctttgcaaggtgtacatggaaatttcttcctcaactggaagccgacgagaattattaacagctgagatgcaccttaaaagtaccttgaaacagacgatggacttctcagacactgaggagtacaaagctcttgataactgtcttgaagaaataaagaacctgattgccgctactgcctaggttgttgcatccaagttttggacgctggttatgataatgtattgtccgtttctaattaagcatttctattgttgtcttgttgggaatcaagatcacattatcggactctgttagcacacacaaggatgccaagacaagtgaacctgcgccagagactggaagcgaagatggtgtgctgctacagccaagattaaaaaggaagcttaagcccaatagcaaggtgtccggcctagagtgggttcgttgactgtaatagtgtggcccagtcgttgtgccatatgtatggcttcagtctgtaaactgggacatcgaaaaaaagaacagaaaacactactgcctatcttcttcccctcttccaagtcttctccttccctgccgccgtcttgctttccccttcctcctggaagctaacagtggt

SEQ ID NO: 26332 - DNA, 3166 bp, Zea Mays
atgacttgcgccacccggagccccggcttcctccgcgaggccgagctccgcctcctccgctgcactctcccctcgctgccctcttccccgcccccacccgcttcccctccccctgcgcatccgctcggtcccgccgcggcctctgcgatcgctgccgttgaggccggcgactacgaggctgcgctcgccaccgccgcgccgcacttctttccggcattcgccccctctaggcctcctggctcagccgcgcagttctacgccgacctaggtgccgcagctcgggcgttcctgctggtcgatggggacggggcagcggcgggagaggggttcgattgcaggtgcgcagttgtgctttccgctgcagtggccgcgctgctcgcgttcacgcaacagaacgtgactggtcagatggatgtagttgagggaacaggcaactgtgttgacttggcttctattattacaactgacatgactatcaaatctgatttaccttttcatgttaacctaaacctgttggattttttagggagatgctatagtaatcttggagacacatgggatgcatgggcttctgacaatttagcttcttttggctctcatgttcatgggaaattttcactcttgcagttcattgtatttgcaaggcttttgtttaccagcgtacagagtctggatctctctgattgctggagcgtgtcatggtggttgtttagaatatcaatgttgcagcagaacatcttggatgagttatcatcgtctctgtttgatcaagtgcaagtgtacaagaataagatgttggatcattttggtgaactggaaaaggtttctacctactgggattgtttactgtctgatggagaaggttcttattttgtttcagctgctttcttagaggctggaatcgtggaatacaaatatggtcgggttgatgcttcaaggttgcatctcaatagcgcacaagaagcatgtggtctgcacctttcccttacagggatccttggtttccgaacaatataccaggtggatgcgaagtctcaaatggtgcttgttgcgaagaccaataagtcaggccctgatgaaggacaagtgacagaacccacagtagctcagaatgacaatgcagctttgaaaaatgcaaggagcttcgttcctgttgaagacgatgaattctgtgacatactaagaatgcccagactggtgcaagatgggagtaattctgccagtgaagacgccacgaaccccagtgcaaaaatatcactatcggctatacagcaggctgctgtacttgcacaatgcttgtatgtgagccggaggagtcgtgttgatgaaatgtctgggtgggagatggcaccatacatagagtcgattgattctcaggatgaatcttactttgtggtcaggagtttgtgcgatatactgcgtgttagatgggagtcaacccgcagtcggacaaagcagcgggcattactaatgatggagaatttggttgaagatatcagcaaagaattccctgctgccccacaaagagttaaaatggtttttgcggttcatatgccaactcttcctgcattgaggaaagaatatggtgaacttttgatcagttgtggcatagttggagaagcactggagatatttaaagatcttgaattgtgggacaatttaatatattgctatcgattgttaggtaaagtggctgatgcagttagtctaataaatgctcgactttctgttacaccaaatgacccaaggttatggtgttcacttggtgatgttacaaataatgatgaccattataaaaaagcattggaagtttcaaataataaatctgcgcgagctatgcgctctctggctcgcagtgcatacaacaggaatgacttccatacatccaaaattctatgggaatctgcattgtcgttgaactctttgattccagatggctggtttgcatatggcacagctgcatggaaggacaaggatcttgacaaagctgtggatgcgtttagtcgtgctgtacagatagatcctgagaatggagaagcatggaacaacatagcctgcctgcacatgattagaggaaaaagccaagcagcagtccaagcattcagggaagctgtaaagttcaagaggaatagctgggaaatttgggaaaattacagtaaagttgctttggacacagggaatattagactgacacttgaagctttgaaaactgtattgaatttatcctcaaacaagcagtttagtgttggtatattggacaaggtgatgacaatgcttgaagaacaatctccagattttgttgatactcacgaagcatcagatgatgcaaataaagatacaagacaatccaatcaattattagatattactggtgatatcctccagcagattgtgcgaagtggaggcagcaatgcagccatatggggtttgtatgcaagatggcataagaccaagggtaacctcatagcatgttctgaagctttgttgaagcaagttcgatcccttcagggctcaggattattgcatgaccaaatgaagttcgcaaagtatgctcaagcttccttaaagctttgcaaggtgtacatggaaatttcttcctcaactggaagccgacgagaattattaacagctgagatgcaccttaaaagtaccttgaaacagacgatggacttctcagacactgaggagtacaaagctcttgataactgtcttgaagaaataaagaacctgattgccgctactgcctaggttgttgcatccaagttttggacgctggttatgataatgtattgtccgtttctaattaagcatttctattgttgtcttgttgggaatcaagatcacattatcggactctgttagcacacacaaggatgccaagacaagtgaacctgcgccagagactggaagcgaagatggtgtgctgctacagccaagattaaaaaggaagcttaagcccaatagcaaggtgtccggcctagagtgggttcgttgactgtaatagtgtggcccagtcgttgtgccatatgtatggcttcagtctgtaaactgggacatcgaaaaaaagaacagaaaacactactgcctatcttcttcccctcttccaagtcttctccttccctgccgccgtcttgctttccccttcctcctggaagctaacagtggt

SEQ ID NO: 26333 - DNA, 3112 bp, Zea Mays
gtcacagccgccagcgacatgacttgcgccacccggagccccggcttcctccgcgaggccgagctccgcctcctccgctgcactctcccctcgctgccctcttccccgcccccacccgcttcccctccccctgcgcatccgctcggtcccgccgcggcctctgcgatcgctgccgttgaggccggcgactacgaggctgcgctcgccaccgccgcgccgcacttctttccggcattcgccccctctaggcctcctggctcagccgcgcagttctacgccgacctaggtgccgcagctcgggcgttcctgctggtcgatggggacggggcagcggcgggagaggggttcgattgcaggtgcgcagttgtgctttccgctgcagtggccgcgctgctcgcgttcacgcaacagaacgtgactgggcctccaaggaagtttcccacttttcctttttcaatgtcatcttttgatgaaagatgctatagtaatcttggagacacatgggatgcatgggcttctgacaatttagcttcttttggctctcatgttcatgggaaattttcactcttgcagttcattgtatttgcaaggcttttgtttaccagcgtacagagtctggatctctctgattgctggagcgtgtcatggtggttgtttagaatatcaatgttgcagcagaacatcttggatgagttatcatcgtctctgtttgatcaagtgcaagtgtacaagaataagatgttggatcattttggtgaactggaaaaggtttctacctactgggattgtttactgtctgatggagaaggttcttattttgtttcagctgctttcttagaggctggaatcgtggaatacaaatatggtcgggttgatgcttcaaggttgcatctcaatagcgcacaagaagcatgtggtctgcacctttcccttacagggatccttggtttccgaacaatataccaggtggatgcgaagtctcaaatggtgcttgttgcgaagaccaataagtcaggccctgatgaaggacaagtgacagaacccacagtagctcagaatgacaatgcagctttgaaaaatgcaaggagcttcgttcctgttgaagacgatgaattctgtgacatactaagaatgcccagactggtgcaagatgggagtaattctgccagtgaagacgccacgaaccccagtgcaaaaatatcactatcggctatacagcaggctgctgtacttgcacaatgcttgtatgtgagccggaggagtcgtgttgatgaaatgtctgggtgggagatggcaccatacatagagtcgattgattctcaggatgaatcttactttgtggtcaggagtttgtgcgatatactgcgtgttagatgggagtcaacccgcagtcggacaaagcagcgggcattactaatgatggagaatttggttgaagatatcagcaaagaattccctgctgccccacaaagagttaaaatggtttttgcggttcatatgccaactcttcctgcattgaggaaagaatatggtgaacttttgatcagttgtggcatagttggagaagcactggagatatttaaagatcttgaattgtgggacaatttaatatattgctatcgattgttaggtaaagtggctgatgcagttagtctaataaatgctcgactttctgttacaccaaatgacccaaggttatggtgttcacttggtgatgttacaaataatgatgaccattataaaaaagcattggaagtttcaaataataaatctgcgcgagctatgcgctctctggctcgcagtgcatacaacaggaatgacttccatacatccaaaattctatgggaatctgcattgtcgttgaactctttgattccagatggctggtttgcatatggcacagctgcatggaaggacaaggatcttgacaaagctgtggatgcgtttagtcgtgctgtacagatagatcctgagaatggagaagcatggaacaacatagcctgcctgcacatgattagaggaaaaagccaagcagcagtccaagcattcagggaagctgtaaagttcaagaggaatagctgggaaatttgggaaaattacagtaaagttgctttggacacagggaatattagactgacacttgaagctttgaaaactgtattgaatttatcctcaaacaagcagtttagtgttggtatattggacaaggtgatgacaatgcttgaagaacaatctccagattttgttgatactcacgaagcatcagatgatgcaaataaagatacaagacaatccaatcaattattagatattactggtgatatcctccagcagattgtgcgaagtggaggcagcaatgcagccatatggggtttgtatgcaagatggcataagaccaagggtaacctcatagcatgttctgaagctttgttgaagcaagttcgatcccttcagggctcaggattattgcatgaccaaatgaagttcgcaaagtatgctcaagcttccttaaagctttgcaaggtgtacatggaaatttcttcctcaactggaagccgacgagaattattaacagctgagatgcaccttaaaagtaccttgaaacagacgatggacttctcagacactgaggagtacaaagctcttgataactgtcttgaagaaataaagaacctgattgccgctactgcctaggttgttgcatccaagttttggacgctggttatgataatgtattgtccgtttctaattaagcatttctattgttgtcttgttgggaatcaagatcacattatcggactctgttagcacacacaaggatgccaagacaagtgaacctgcgccagagactggaagcgaagatggtgtgctgctacagccaagattaaaaaggaagcttaagcccaatagcaaggtgtccggcctagagtgggttcgttgactgtaatagtgtggcccagtcgttgtgccatatgtatggcttcagtctgtaaactgggacatcgaaaaaaagaacagaaaacactactgcctatcttcttcccctcttccaagtcttctccttccctgccgccgtcttgctttccccttcctcctggaagctaacagtggt

SEQ ID NO: 26334 - DNA, 1765 bp, Zea Mays
gcgcagtcttctcaattcttcttcctgaccctcacaagtcacagccgccagcgacatgacttgcgccacccggagccccggcttcctccgcgaggccgagctccgcctcctccgctgcactctcccctcgctgccctcttccccgcccccacccgcttcccctccccctgcgcatccgctcggtcccgccgcggcctctgcgatcgctgccgttgaggccggcgactacgaggctgcgctcgccaccgccgcgccgcacttctttccggcattcgccccctctaggcctcctggctcagccgcgcagttctacgccgacctaggtgccgcagctcgggcgttcctgctggtcgatggggacggggcagcggcgggagaggggttcgattgcaggtgcgcagttgtgctttccgctgcagtggccgcgctgctcgcgttcacgcaacagaacgtgactgggcctccaaggaagtttcccacttttcctttttcaatgtcatcttttgatgaaagatgctatagtaatcttggagacacatgggatgcatgggcttctgacaatttagcttcttttggctctcatgttcatgggaaattttcactcttgcagttcattgtatttgcaaggcttttgtttaccagcgtacagagtctggatctctctgattgctggagcgtgtcatggtggttgtttagaatatcaatgttgcagcagaacatcttggatgagttatcatcgtctctgtttgatcaagtgcaagtgtacaagaataagatgttggatcattttggtgaactggaaaaggtttctacctactgggattgtttactgtctgatggagaaggttcttattttgtttcagctgctttcttagaggctggaatcgtggaatacaaatatggtcgggttgatgcttcaaggttgcatctcaatagcgcacaagaagcatgtggtctgcacctttcccttacagggatccttggtttccgaacaatataccaggtggatgcgaagtctcaaatggtgcttgttgcgaagaccaataagtcaggccctgatgaaggacaagtgacagaacccacagtagctcagaatgacaatgcagctttgaaaaatgcaaggagcttcgttcctgttgaagacgatgaattctgtgacatactaagaatgcccagactggtgcaagatgggagtaattctgccagtgaagacgccacgaaccccagtgcaaaaatatcactatcggctatacagcaggctgctgtacttgcacaatgcttgtatgtgagccggaggagtcgtgttgatgaaatgtctgggtgggagatggcaccatacatagagtcgattgattctcaggatgaatcttactttgtggtcaggagtttgtgcgatatactgcgtgttagatgggagtcaacccgcagtcggacaaagcagcgggcattactaatgatggagaatttggttgaagatatcagcaaagaattccctgctgccccacaaagagttaaaatggtttttgcggttcatatgccaactcttcctgcattgaggaaagaatatggtgaacttttgatcagttgtggcatagttggagaagcactggagatatttaaagatcttgaattgtgggacaatttaatatattgctatcgattgttaggtaaagtggctgatgcagttagtctaataaatgctcgactttctgttacaccaaatgacccaaggttatggcatagtgtatatctaagtgcacaatga

SEQ ID NO: 26335 - DNA, 1543 bp, Zea Mays
cgcggggcgcagtcttctcaattcttcttcctgaccctcacaagtcacagccgccagcgacatgacttgcgccacccggagccccggcttcctccgcgaggccgagctccgcctcctccgctgcactctcccctcgctgccctcttccccgcccccacccgcttcccctccccctgcgcatccgctcggtcccgccgcggcctctgcgatcgctgccgttgaggccggcgactacgaggctgcgctcgccaccgccgcgccgcacttctttccggcattcgccccctctaggcctcctggctcagccgcgcagttctacgccgacctaggtgccgcagctcgggcgttcctgctggtcgatggggacggggcagcggcgggagaggggttcgattgcaggtgcgcagttgtgctttccgctgcagtggccgcgctgctcgcgttcacgcaacagaacgtgactgggcctccaaggaagtttcccacttttcctttttcaatgtcatcttttgatgaaagatgctatagtaatcttggagacacatgggatgcatgggcttctgacaatttagcttcttttggctctcatgttcatgggaaattttcactcttgcagttcattgtatttgcaaggcttttgtttaccagcgtacagagtctggatctctctgattgctggagcgtgtcatggtggttgtttagaatatcaatgttgcagcagaacatcttggatgagttatcatcgtctctgtttgatcaagtgcaagtgtacaagaataagatgttggatcattttggtgaactggaaaaggtttctacctactgggattgtttactgtctgatggagaaggttcttattttgtttcagctgctttcttagaggctggaatcgtggaatacaaatatggtcgggttgatgcttcaaggttgcatctcaatagcgcacaagaagcatgtggtctgcacctttcccttacagggatccttggtttccgaacaatataccaggtggatgcgaagtctcaaatggtgcttgttgcgaagaccaataagtcaggccctgatgaaggacaagtgacagaacccacagtagctcagaatgacaatgcagctttgaaaaatgcaaggagcttcgttcctgttgaagacgatgaattctgtgacatactaagaatgcccagactggtgcaagatgggagtaattctgccagtgaagacgccacgaaccccagtgcaaaaatatcactatcggctatacagcaggctgctgtacttgcacaatgcttgtatgtgagccggaggagtcgtgttgatgaaatgtctgggtgggagatggcaccatacatagagtcgattgattctcaggatgaatcttactttgtggtcaggagtttgtgcgatatactgcgtgttagatgggagtcaacccgcagtcggacaaagcagcgggcattactaatgatggagaatttgtttcactacatttttagcttccccatcactggagtatttgcagttccaggcttttctcttgagctttaa

SEQ ID NO: 26336 - DNA, 2319 bp, Zea Mays
ctcacacgatatgatactcgaataatattcatacggagttacggaccataccgtttacaccgagggttctctctttgtctgttcactgttctactgggacgaccccaaatccccaaatcgaaaggggccgtccggctcagggtttctcgacggctccttgccctctccgccatggacgcacagcgagccctccttgacgagctcatgggcacagctcgcaacctaacggaggaggagaagaaggggcacaaagagctgaagtgggacgatccggacgtgtgcggcccttacatggttcggttctgtcctcacgaccttttcgtcaacaccaagagcaatatcgggccgtgctcgaggatccacgatccgaagctcaaggaaagctttgagaagtctcctaggcacgatacttatatgcaaaggtttgaggcagagcttgcacaacaatgtgagaaattggtaatggacttagatagaaagataaggcgtggtcgagaaaggctggctcacgattctgctgtgccaatgccaatccctggaaaattagctgagctgctttcagtgcgaaaagaacaggtgaagaagctgctggagcaaattgaggagcttggtgaggctggtaaagtggatgaagctgaggcacttatgagaagggttgacattttaaacgctgagaagacagctttagctaacgaagcagacaacaaagtagctatgcttgagaagaagatggaactttgtgaaacatgtggatcattcttagttgctgatgatgctcttgagagaacgcagtcccatgtgactgggaaacaacacattggttatggcatggttagggatttcctggcagaatacaaggcagcaaaagagaagacaaaagaggaagagcggcttgcaagggagcagaaagcagaggagcatcggaaacagaggggaaaagagtatgatagtgggggcagggatagagataccagaagggagaggtctggggagcgtgactttgaccgtgatcgtcagtatgagcgaagcagaggaagagatagggtttatgattacagggacagaggatcagaacaccgaagcaatcgctacagaaatgggagggattctgaaagaggtggacacagatacaggagtggtggtatgacaaatgaccgagggagaatgaggagcagatcacgttctccaaccaggcatggctatggaagatctagaagtccagatcattagctgcctagctggacatttagatagttttattcacagttgggactcatgagctctgttggaaccctacagtctccctattttgcatggggaaaaattcccagttaaatttagtaaggccggtactggatttcatatatggatgatgatgtttacagcttatagcaggtaaaccttgaacatcgatgtttcatgttacacactttttatctcccttaataactctgctagaaaccttagttctgctgtttggcttagatttttacactactcaggccaggtatctttttctaccaaaacttatgtgcataattatgattaatgtggctttagtagttgatccatgaaaattgtcaatcatcaaccatttcttttcctggaaccgttgtagtgtacaagagatcaagctttggtttgtagacaatggtgccctggctagaaccgcgaggattgggcctatttcctgactgtctagttattgtctcagaagtctggtttagataaggttctgtttccgcggcaaactattagatacctttgcagttgcggagttctgtaattgatgtattatttatgcagatagtgtagtctaactatgcaaactaatatatgatctgtttcagagttttgagatattccgtatgattggttgtctgcaccgtctcattttggatcactccatatcctgtcccgcatcgcgcgagcctgcacctctgcgagcagccatctaatcagccggattatgttttggatcaattggcaccacaatcttgttggagcagcgtctactgaagttatgttgtttgcatgacatttctgattcctgtgccttttttcacttacagcctgtttggatgcctagaaatgaatctttttcaagaaataaattccaagaaatgaattatatagaattcaatcgactagaaagtgattgaattccattatttttatttggttgtacaagcaattgaattcctagaagtaaattctagatgttgtttggatactttgcacacagaatttgaatacaaacaaagatctcttgactttgcatctgcttaaaaatgagcatgaacaatttacaactatcag

SEQ ID NO: 26337 - DNA, 2141 bp, Zea Mays
tcgtgctacacatatataaaaaaattttccgaccagataattgttctcacacgatatgatactcgaataatattcatacggagttacggaccataccgtttacaccgagggttctctctttgtctgttcactgttctactgggacgaccccaaatccccaaatcgaaaggggccgtccggctcagggtttctcgacggctccttgccctctccgccatggacgcacagcgagccctccttgacgagctcatgggcacagctcgcaacctaacggaggaggagaagaaggggcacaaagagctgaagtgggacgatccggacgtgtgcggcccttacatggttcggttctgtcctcacgaccttttcgtcaacaccaagagcaatatcgggccgtgctcgaggatccacgatccgaagctcaaggaaagctttgagaagtctcctaggcacgatacttatatgcaaaggtttgaggcagagcttgcacaacaatgtgagaaattggtaatggacttagatagaaagataaggcgtggtcgagaaaggctggctcacgattctgctgtgccaatgccaatccctggaaaattagctgagctgctttcagtgcgaaaagaacaggtgaagaagctgctggagcaaattgaggagcttggtgaggctggtaaagtggatgaagctgaggcacttatgagaagggttgacattttaaacgctgagaagacagctttagctaacgaagcagacaacaaagtagctatgcttgagaagaagatggaactttgtgaaacatgtggatcattcttagttgctgatgatgctcttgagagaacgcagtcccatgtgactgggaaacaacacattggttatggcatggttagggatttcctggcagaatacaaggcagcaaaagagaagacaaaagaggaagagcggcttgcaagggagcagaaagcagaggagcatcggaaacagaggggaaaagagtatgatagtgggggcagggatagagataccagaagggagaggtctggggagcgtgactttgaccgtgatcgtcagtatgagcgaagcagaggaagagatagggtttatgattacagggacagaggatcagaacaccgaagcaatcgctacagaaatgggagggattctgaaagaggtggacacagatacaggagtggtggtatgacaaatgaccgagggagaatgaggagcagatcacgttctccaaccaggcatggctatggaagatctagaagtccagatcattagctgcctagctggacatttagatagttttattcacagttgggactcatgagctctgttggaaccctacagtctccctattttgcatggggaaaaattcccagttaaatttagtaaggccggtactggatttcatatatggatgatgatgtttacagcttatagcagtgtacaagagatcaagctttggtttgtagacaatggtgccctggctagaaccgcgaggattgggcctatttcctgactgtctagttattgtctcagaagtctggtttagataaggttctgtttccgcggcaaactattagatacctttgcagttgcggagttctgtaattgatgtattatttatgcagatagtgtagtctaactatgcaaactaatatatgatctgtttcagagttttgagatattccgtatgattggttgtctgcaccgtctcattttggatcactccatatcctgtcccgcatcgcgcgagcctgcacctctgcgagcagccatctaatcagccggattatgttttggatcaattggcaccacaatcttgttggagcagcgtctactgaagttatgttgtttgcatgacatttctgattcctgtgccttttttcacttacagcctgtttggatgcctagaaatgaatctttttcaagaaataaattccaagaaatgaattatatagaattcaatcgactagaaagtgattgaattccattatttttatttggttgtacaagcaattgaattcctagaagtaaattctagatgttgtttggatactttgcacacagaatttgaatacaaacaaagatctcttgactttgcatctgcttaaaaatgagcatgaacaatttacaactatcag

SEQ ID NO: 26338 - DNA, 1647 bp, Zea Mays
gtttacaccgagggttctctctttgtctgttcactgttctactgggacgaccccaaatccccaaatcgaaaggggccgtccggctcagggtttctcgacggctccttgccctctccgccatggacgcacagcgagccctccttgacgagctcatgggcacagctcgcaacctaacggaggaggagaagaaggggcacaaagagctgaagtgggacgatccggacgtgtgcggcccttacatggttcggttctgtcctcacgaccttttcgtcaacaccaagagcaatatcgggccgtgctcgaggatccacgatccgaagctcaaggaaagctttgagaagtctcctaggcacgatacttatatgcaaaggtttgaggcagagcttgcacaacaatgtgagaaattggtgaagaagctgctggagcaaattgaggagcttggtgaggctggtaaagtggatgaagctgaggcacttatgagaagggttgacattttaaacgctgagaagacagctttagctaacgaagcagacaacaaagtagctatgcttgagaagaagatggaactttgtgaaacatgtggatcattcttagttgctgatgatgctcttgagagaacgcagtcccatgtgactgggaaacaacacattggttatggcatggttagggatttcctggcagaatacaaggcagcaaaagagaagacaaaagaggaagagcggcttgcaagggagcagaaagcagaggagcatcggaaacagaggggaaaagagtatgatagtgggggcagggatagagataccagaagggagaggtctggggagcgtgactttgaccgtgatcgtcagtatgagcgaagcagaggaagagatagggtttatgattacagggacagaggatcagaacaccgaagcaatcgctacagaaatgggagggattctgaaagaggtggacacagatacaggagtggtggtatgacaaatgaccgagggagaatgaggagcagatcacgttctccaaccaggcatggctatggaagatctagaagtccagatcattagctgcctagctggacatttagatagttttattcacagttgggactcatgaggtagacagttcccttctgctatttattactgtacaatgggttttattgaagtgtcgcacttttttaagtctctgatctgttgtaacagctctgttggaaccctacagtctccctattttgcatggggaaaaattcccaggtcggtatcgattgccatccccacattttttgtgtttctggcattctatatgcgctaaagctttgtttcaatatttggaatcggaagttaaatttagtaaggccggtactggatttcatatatggatgatgatgtttacagcttatagcagtgtacaagagatcaagctttggtttgtagacaatggtgccctggctagaaccgcgaggattgggcctatttcctgactgtctagttattgtctcagaagtctggtttagataaggttctgtttccgcggcaaactattagatacctttgcagttgcggagttctgtaattgatgtattatttatgcagatagtgtagtctaactatgcaaactaatatatgatctgtttcagagttttgagatatt

SEQ ID NO: 26339 - DNA, 1676 bp, Zea Mays
tcgtgctacacatatataaaaaaattttccgaccagataattgttctcacacgatatgatactcgaataatattcatacggagttacggaccataccgtttacaccgagggttctctctttgtctgttcactgttctactgggacgaccccaaatccccaaatcgaaaggggccgtccggctcagggtttctcgacggctccttgccctctccgccatggacgcacagcgagccctccttgacgagctcatgggcacagctcgcaacctaacggaggaggagaagaaggggcacaaagagctgaagtgggacgatccggacgtgtgcggcccttacatggttcggttctgtcctcacgaccttttcgtcaacaccaagagcaatatcgggccgtgctcgaggatccacgatccgaagctcaaggaaagctttgagaagtctcctaggcacgatacttatatgcaaaggtttgaggcagagcttgcacaacaatgtgagaaattggtaatggacttagatagaaagataaggcgtggtcgagaaaggctggctcacgattctgctgtgccaatgccaatccctggaaaattagctgagctgctttcagtgcgaaaagaacaggtgaagaagctgctggagcaaattgaggagcttggtgaggctggtaaagtggatgaagctgaggcacttatgagaagggttgacattttaaacgctgagaagacagctttagctaacgaagcagacaacaaagtagctatgcttgagaagaagatggaactttgtgaaacatgtggatcattcttagttgctgatgatgctcttgagagaacgcagtcccatgtgactgggaaacaacacattggttatggcatggttagggatttcctggcagaatacaaggcagcaaaagagaagacaaaagaggaagagcggcttgcaagggagcagaaagcagaggagcatcggaaacagaggggaaaagagtatgatagtgggggcagggatagagataccagaagggagaggtctggggagcgtgactttgaccgtgatcgtcagtatgagcgaagcagaggaagagatagggtttatgattacagggacagaggatcagaacaccgaagcaatcgctacagaaatgggagggattctgaaagaggtggacacagatacaggagtggtggtatgacaaatgaccgagggagaatgaggagcagatcacgttctccaaccaggcatggctatggaagatctagaagtccagatcattagctgcctagctggacatttagatagttttattcacagttgggactcatgagctctgttggaaccctacagtctccctattttgcatggggaaaaattcccagtaaggccggtactggatttcatatatggatgatgatgtttacagcttatagcagtgtacaagagatcaagctttggtttgtagacaatggtgccctggctagaaccgcgaggattgggcctatttcctgactgtctagttattgtctcagaagtctggtttagataaggttctgtttccgcggcaaactattagatacctttgcagttgcggagttctgtaattgatgtattatttatgcagatagtgtagtctaactatgcaaactaatatatgatctgtttcagagttttgagatatt

SEQ ID NO: 26340 - DNA, 706 bp, Zea Mays
cttgtctctttaatcacatagagatgtttcagataaaagcaccctacaaccacccacatggttcatattatcaccatagattacattgaaccatctcaaatatcctccattgtcaagtgcccagtcggcatcagttacccctcccagttcccctatgtacatagtgttttctgcatacaaatcattagaaattgaggcggggaggactaagctcctcagcagccatatgaccacgatcagctgcaccttcgagaaacacagccatctcttgaagtctcgacgacacttcattcaaattcattgtccatagcgagttaataatcttcctcatctctctagcgcagtattgcatttccgaaactgcagaaagcagtccatccttgacttgcttaaacctacataactaaaacgacaactaatggttagttagaaaaaaacaatgatgaagcgaaatgaatatgagccggcattatgatgatacaatagggataacaatgatacaacagaaattgcagatagcttgttcagaagtttaacagatacaattgttgcacaaaagcgctagccttgtgtttccgtgaaccgcaattctacaacaatgctacctgcgtcatattgaaaagtgtgtatatatactaaggaaacaagaaacaagggatacataagctacttaattctgtttgtcaaattggaggcctaaaattag

SEQ ID NO: 26341 - DNA, 2451 bp, Zea Mays
catcactactcagtactgttctttctcaatctctcgtgcccactctacccaccccgccgccgccgtcacgccccagctggagcgccgctcgacactgccaagcccctgagcccccgccccggagcaccctcacactcccgcgctccttccctggagtgtcgtcgcacccctgtgccccttccccggagcgccgcgccgccatcggaggctcggagcctaggtgcccagccccatgcggccagcgagcactcgccgttgatcggcatgccccacgtgaccataacctcgctcctaggcgcccagcacggcgcagcggcaccagtgcccatgtcgtggccagcgaccgtcgcctccgagcggccagcccagccaagcgcccagccatcatgtttgtaaatgttctgtggcaacttcttttcctgtataatcagaagaattgttgatctgtgccaagcccggccaagcgcttcagcctccaggtttttgggtaaggaattggaaatcctcctccctccgttgtgacacattattgatagaaacatgaaggatgaagagtcttggacattgagatcatttttcactctaacgctaacaccggttattccagcataatcagaagaaaatattgacatagatcttgatacccagcaatcagtacaaacaggtgccttgataaggctaacgaaacacatgaaggatgaatagtatcgccaaacatgtaaattcctgtttggtgaagaacaggatgcactaggagatcctcatgaaggagaacaactggaattgatatcaacagcatattattgagtccgcaagaggtaagaaaggttattactccgattatttcaaccaaaataggaattagaagaaaaggtaaaatgattgtttttccattgtacctgcacctgaatacataaatagtagaattatgattttgttatctctaactaaaatggtgcttcggtaggtatttgtaacatctatcttccataacttagcaacattagtaacttatgaatcataattgcaatttcgtatttctttgaatatagttgcagaggcgacgtgggccatacccactcagtgatgtaatgtatcaatcttcttaggtattaaggaatctagagtgtaagacacaagggaatggatttaacgatcggtcaggaccaagtttctaaatagtagtttcttttgcccaagccctggcgccatctaatttttgccattggttgctgtcattgattgttgtcttgcgaatccttggttgttgtcttgctgtcttgagaatcctgtagacagtggggctagaattaaacaacttgaacatctgattgtacaagtaacctcttgtaattttcttttaacacaaaaggaatgatactctagagaaagatattgttgtccattcatgtctgttatgtttccctttcttaacttataaaattaccgtattcttatttttctgtaaaagctgcagcaaatggtaaataattaatgtggtagattttgttatggacggttagtgctagttttattttgaatctaaattaatgttccagtcaaagaaccttaactcatggataaggtatacattatagttccagaggtattcactatagtcattgggtttactaaaccaccatatgcatcattttttgtttgcatttttcttttaacttttagatacagtgtttggccttgttactacaacttgccaggtatatgatattgatgctcagcatgttgtgagtggtgccatgcaatgaattaatggtaagccagatgtcttattttttagtaatataaatggtgttactgcatgcctattagaagattgagtgggataggattctagtaacctattacttattggtgtcagttcctatgctagctagtagacacatctaatgagctttgtaaacaacagatatgggcaatggaggatgtggaaaaggtttattgaagaatggacattgctaggacatgtaaacaaaataggggagctttccctccagtttcagggagcaagaagccagctgaagatggtcaattggtcattcttgctgcagggagcaagaccccattgacgtcacaacgacgaagccaactatatcttaagttctctaattagttagataagggcgtctcataccaccctcatggttgtactgttttcccgggtggtcatccaacaaacagatccttacagagaggtatttagtgccacaagctcatcatcatatccagaataaaacatcgtatcataaacaagttcttatcatgttcattgattaaagtaaagcactagcataaagctaaccataatagcctaaaaggtaatcaaggacaaagtaaatagaaagctagtcaatccttagtttttaattatgtaatgcggggaaattaattataaatgaatatgacatgaatatgtcagaggatacttgtctt

SEQ ID NO: 26342 - DNA, 2782 bp, Zea Mays
catcactactcagtactgttctttctcaatctctcgtgcccactctacccaccccgccgccgccgtcacgccccagctggagcgccgctcgacactgccaagcccctgagcccccgccccggagcaccctcacactcccgcgctccttccctggagtgtcgtcgcacccctgtgccccttccccggagcgccgcgccgccatcggaggctcggagcctaggtgcccagccccatgcggccagcgagcactcgccgttgatcggcatgccccacgtgaccataacctcgctcctaggcgcccagcacggcgcagcggcaccagtgcccatgtcgtggccagcgaccgtcgcctccgagcggccagcccagccaagcgcccagccatcatgtttgtaaatgttctgtggcaacttcttttcctgtataatcagaagaattgttgatctgtgccaagcccggccaagcgcttcagcctccaggtttttggcataatcagaagaaaatattgacatagatcttgatacccagcaatcagtacaaacaggtgccttgataaggctaacgaaacacatgaaggatgaatagtatcgccaaacatgtaaattcctgtttggtgaagaacaggatgcactaggagatcctcatgaaggagaacaactggaattgatatcaacagcatattattgagtccgcaagaggtaagaaaggttattactccgattatttcaaccaaaataggaattagaagaaaaggtaaaatgattgtttttccattgtacctgcacctgaatacataaatagtagaattatgattttgttatctctaactaaaatggtgcttcggtaggtatttgtaacatctatcttccataacttagcaacattagtaacttatgaatcataattgcaatttcgtatttctttgaatatagttgcagaggcgacgtgggccatacccactcagtgatgtaatgtatcaatcttcttaggtattaaggaatctagagtgtaagacacaagggaatggatttaacgatcggtcaggaccaagtttctaaatagtagtttcttttgcccaagccctggcgccatctaatttttgccattggttgctgtcattgattgttgtcttgcgaatccttggttgttgtcttgctgtcttgagaatcctgtagacagtggggctagaattaaacaacttgaacatctgattgtacaagtaacctcttgtaattttcttttaacacaaaaggaatgatactctagagaaagatattgttgtccattcatgtctgttatgtttccctttcttaacttataaaattaccgtattcttatttttctgtaaaagctgcagcaaatggtaaataattaatgtggtagattttgttatggacggttagtgctagttttattttgaatctaaattaatgttccagtcaaagaaccttaactcatggataaggtatacattatagttccagaggtattcactatagtcattgggtttactaaaccaccatatgcatcattttttgtttgcatttttcttttaacttttagatacagtgtttggccttgttactacaacttgccaggtatatgatattgatgctcagcatgttgtgagtggtgccatgcaatgaattaatggtaagccagatgtcttattttttagtaatataaatggtgttactgcatgcctattagaagattgagtgggataggattctagtaacctattacttattggtgtcagttcctatgctagctagtagacacatctaatgagctttgtaaacaacagatatgggcaatggaggatgtggaaaaggtttattgaagaatggacattgctagggtcagtgacccttctcattgatatgggcaaaatggattggtctttcccaattcataataaatgaagggcgctaaggccatttgatctatttttctcaatccttgtgcacaaatctaaacgaattacatttggaattaatgggagtatttcaggcatattaagtctgttaattgtattggactattgacgagaatataagatataaaatatttaggatgacacatgaattgtataactaggtttgtcatcaaggaacactgttgatgaagcttgcctacaagcttactggaatttatatttctggacagtgacacaacacattagcagatttatccaccatcgcttataaatccctatctatcacaaaattaatgtgttaatttttaattttatctatgtgtgtctactaaagtttgcttactgatggtcttcttgtatagtattgttgcagacatgtaaacaaaataggggagctttccctccagtttcagggagcaagaagccagctgaagatggtcaattggtcattcttgctgcagggagcaagaccccattgacgtcacaacgacgaagccaactatatcttaagttctctaattagttagataagggcgtctcataccaccctcatggttgtactgttttcccgggtggtcatccaacaaacagatccttacagagaggtatttagtgccacaagctcatcatcatatccagaataaaacatcgtatcataaacaagttcttatcatgttcattgattaaagtaaagcactagcataaagctaaccataatagcctaaaaggtaatcaaggacaaagtaaatagaaagctagtcaatccttagtttttaattatgtaatgcggggaaattaattataaatgaatatgacatgaatatgtcagaggatacttgtctt

SEQ ID NO: 26343 - DNA, 1793 bp, Zea Mays
catcactactcagtactgttctttctcaatctctcgtgcccactctacccaccccgccgccgccgtcacgccccagctggagcgccgctcgacactgccaagcccctgagcccccgccccggagcaccctcacactcccgcgctccttccctggagtgtcgtcgcacccctgtgccccttccccggagcgccgcgccgccatcggaggctcggagcctaggtgcccagccccatgcggccagcgagcactcgccgttgatcggcatgccccacgtgaccataacctcgctcctaggcgcccagcacggcgcagcggcaccagtgcccatgtcgtggccagcgaccgtcgcctccgagcggccagcccagccaagcgcccagccatcatgtttgtaaatgttctgtggcaacttcttttcctgtataatcagaagaattgttgatctgtgccaagcccggccaagcgcttcagcctccaggtttttgggtaaggaattggaaatcctcctccctccgttgtgacacattattgatagaaacatgaaggatgaagagtcttggacattgagatcatttttcactctaacgctaacaccggttattccagcataatcagaagaaaatattgacatagatcttgatacccagcaatcagtacaaacaggtgccttgataaggctaacgaaacacatgaaggatgaatagtatcgccaaacatgtaaattcctgtttggtgaagaacaggatgcactaggagatcctcatgaaggagaacaactggaattgatatcaacagcatattattgagtccgcaagagatatgggcaatggaggatgtggaaaaggtttattgaagaatggacattgctagggtcagtgacccttctcattgatatgggcaaaatggattggtctttcccaattcataataaatgaagggcgctaaggccatttgatctatttttctcaatccttgtgcacaaatctaaacgaattacatttggaattaatgggagtatttcaggcatattaagtctgttaattgtattggactattgacgagaatataagatataaaatatttaggatgacacatgaattgtataactaggtttgtcatcaaggaacactgttgatgaagcttgcctacaagcttactggaatttatatttctggacagtgacacaacacattagcagatttatccaccatcgcttataaatccctatctatcacaaaattaatgtgttaatttttaattttatctatgtgtgtctactaaagtttgcttactgatggtcttcttgtatagtattgttgcagacatgtaaacaaaataggggagctttccctccagtttcagggagcaagaagccagctgaagatggtcaattggtcattcttgctgcagggagcaagaccccattgacgtcacaacgacgaagccaactatatcttaagttctctaattagttagataagggcgtctcataccaccctcatggttgtactgttttcccgggtggtcatccaacaaacagatccttacagagaggtatttagtgccacaagctcatcatcatatccagaataaaacatcgtatcataaacaagttcttatcatgttcattgattaaagtaaagcactagcataaagctaaccataatagcctaaaaggtaatcaaggacaaagtaaatagaaagctagtcaatccttagtttttaattatgtaatgcggggaaattaattataaatgaatatgacatgaatatgtcagaggatacttgtctt

SEQ ID NO: 26344 - DNA, 2188 bp, Zea Mays
catcactactcagtactgttctttctcaatctctcgtgcccactctacccaccccgccgccgccgtcacgccccagctggagcgccgctcgacactgccaagcccctgagcccccgccccggagcaccctcacactcccgcgctccttccctggagtgtcgtcgcacccctgtgccccttccccggagcgccgcgccgccatcggaggctcggagcctaggtgcccagccccatgcggccagcgagcactcgccgttgatcggcatgccccacgtgaccataacctcgctcctaggcgcccagcacggcgcagcggcaccagtgcccatgtcgtggccagcgaccgtcgcctccgagcggccagcccagccaagcgcccagccatcatgtttgtaaatgttctgtggcaacttcttttcctgtataatcagaagaattgttgatctgtgccaagcccggccaagcgcttcagcctccaggtttttggcataatcagaagaaaatattgacatagatcttgatacccagcaatcagtacaaacaggtgccttgataaggctaacgaaacacatgaaggatgaatagtatcgccaaacatgtaaattcctgtttggtgaagaacaggatgcactaggagatcctcatgaaggagaacaactggaattgatatcaacagcatattattgagtccgcaagaggtaagaaaggttattactccgattatttcaaccaaaataggaattagaagaaaaggtaaaatgattgtttttccattgtacctgcacctgaatacataaatagtagaattatgattttgttatctctaactaaaatggtgcttcggtaggtatttgtaacatctatcttccataacttagcaacattagtaacttatgaatcataattgcaatttcgtatttctttgaatatagttgcagaggcgacgtgggccatacccactcagtgatgtaatgtatcaatcttcttaggtattaaggaatctagagtgtaagacacaagggaatggatttaacgatcggtcaggaccaagtttctaaatagtagtttcttttgcccaagccctggcgccatctaatttttgccattggttgctgtcattgattgttgtcttgcgaatccttggttgttgtcttgctgtcttgagaatcctgtagacagtggggctagaattaaacaacttgaacatctgattgtacaagtaacctcttgtaattttcttttaacacaaaaggaatgatactctagagaaagatattgttgtccattcatgtctgttatgtttccctttcttaacttataaaattaccgtattcttatttttctgtaaaagctgcagcaaatggtaaataattaatgtggtagattttgttatggacggttagtgctagttttattttgaatctaaattaatgttccagtcaaagaaccttaactcatggataaggtatacattatagttccagaggtattcactatagtcattgggtttactaaaccaccatatgcatcattttttgtttgcatttttcttttaacttttagatacagtgtttggccttgttactacaacttgccaggtatatgatattgatgctcagcatgttgtgagtggtgccatgcaatgaattaatgatatgggcaatggaggatgtggaaaaggtttattgaagaatggacattgctaggtattgttgcagacatgtaaacaaaataggggagctttccctccagtttcagggagcaagaagccagctgaagatggtcaattggtcattcttgctgcagggagcaagaccccattgacgtcacaacgacgaagccaactatatcttaagttctctaattagttagataagggcgtctcataccaccctcatggttgtactgttttcccgggtggtcatccaacaaacagatccttacagagaggtatttagtgccacaagctcatcatcatatccagaataaaacatcgtatcataaacaagttcttatcatgttcattgattaaagtaaagcactagcataaagctaaccataatagcctaaaaggtaatcaaggacaaagtaaatagaaagctagtcaatccttagtttttaattatgtaatgcggggaaattaattataaatgaatatgacatgaatatgtcagaggatacttgtctt

SEQ ID NO: 26345 - DNA, 855 bp, Zea Mays
ggcttttctacagcaaaaccggctgagctggtatttggaccgactgaaccggtttttgacagaatggtcagccagtagacgcctttttcctctcttctccactcttcttctctcactcctcagtctttctcttagccgagcgcccctcttcttctttctcggtttctttcactctccactcaaatccactcaaaatactctcaagtttgccaattttttgggagaaaatttatggggctgctccccttaagctcctccacactttccctccatctttttgagatttgactggatgaatctctagatcgaggatggtttgtcgccgaaatccttcagtcattgaatctgactctaatgaagactccctagagattcatgaggaggtacccacaaggtctaggtccaagcgaggaagaggctctagaaatgttgtgatgggagctgaggcctctgggtctcagagtggtcgcgggcgtatgactcgaactcctagtcgctctcgccctactgcaaatccacaggcctgggaaccttcaagcaatgatgaaggtggtaaagacgatgttactgatcttcctcttctagatgctcccattgtcaggggtctagttctgcataaggcccaagccagaagatctgcgaatgaggagatcactgattttagtgccagtggaggctcgacacctcttcatgacatgcgcttccaaaatccagcttgtaatacctactttgtaataaaaatctaaaaagagaaatttcatttctttatatatttgtgagtcatctatattcatcatttcatgtggacacctcacttacaccaataaataatcaacaaaagacacgcaactaaat

SEQ ID NO: 26346 - DNA, 1340 bp, Zea Mays
tttttcttacgtatctagacatactacatatctaagcgtataacaaaagctatgtatctagaaaagtcaaaacgtcttatggaattgaggtattaaaatctgtgcacattattgttttgtgcttttactttatctttgcacttacatgttgtttcttgccataatattgtactatttattctttttcatgagtcattcgatccactttagattcagatatttgtcttttttggcatgtttcatccgaacccatgtttgtccagtatatggtgattgtttcatgcatataattaattcctggatgtttcctgtgctgatttatgttattaggatgaagctatgtgcgtcatcaggtgtttttctccatgtttgcataattaacttgaataacagtttgcccctagttcgtaaagttgagctaactacacaattgtggttgctcttggctgttaactagtcttttaaaactcgtaaaatttatggcatcccttagggcttgtttggataatcttggattgaagtggattgaggtggtataaggtgtattgaagtgtaatatgaactaattttactttcaatccctaaaatacacttcaatccactttaatccctctttatccaaacaaggccttattgtttcagtccaacaatggaggtttccaactagcataataatgtttctctgctgttgacagaaacttgcatgaggatgaccaagctacaactcattgtcatctacacttctacagtacatcagccatccattgtatatgttgcctgataacctaggtgcctcggccaattttctagatgaactcgcttttgagattatctagctggaagcgtgtccacttttgttggaaaatgttgatccatatgttgtaaagttatttgcactccttgtgcaattgaagattcactctctggctgtgggtagaatctggctgtagaaagagtctaagtatcatgtgaattacgtgctgaggaagataaagttcagacggtttaggatttagacagtcatgtatttctactatcgcgatgacttgaccgattctgtgtctatgtttattttggatgatttttactaaagtaattctcatagaaatgggatgagaagttaggcgtttagtagtttgcaccaccttttggtagctagaagatgaaaaaagttaaaacaaacaaggcacaagtctattgcgcaaaattattcccaaaattattctcatcccttgtgcagggctccgcattgcgtcgtgtaatcagtcagacattgatgacttatttcatctcgcgttagcgacctctttggaacagatatgcagtgatggatgtggcat

SEQ ID NO: 26347 - DNA, 2961 bp, Zea Mays
gctctattttggggagattttgcaacctctccctgactgcgccatttttttttctcgcctccaccaacgtcagctctccagtcaccagttggacaagcgggacgggacaacatcctcaccagccgcaatcctccactcctccccgcagccctcgaccctcgtcagcctctccagttcacctcgccgtctccgtcatgccccgcgagggtttggggaattttggagcggaggaggaggcgagggatggtggacaggaaggtttggttacggaaatggatgtggaggaatcctcgccgtcttcgtcgccgatgtcgtctccggccgggtcgtcagattccatagacctcaacttcctgccgtttctcaagagggagcccaaatcggagccgtcgtcaccagagctcgggcccctgccgctgcctgtctccctcacccagacgccgccgcagcagcatgcagcggcggcggctccagcaactgaggcctcggtgcctccgcctccggcgactcctgacctctcgtccgcgtcgatgatgaccccgctgcagtcgctgccgcctaacccagacgaggactcgctccttcgggagtactaccgccttgcgagactatatctctcgtctgcggggtccggggcgatcgtcccgacaccggcaccggaggcggccgcaccggcggtggtacagtccggggccgggtccgtcgtgaaaaagcgccggccgcggtcatcggagctcgtgcgggtctcctcgctcggtgtgcaggatcagatctacttccgcgacctcgtgcgccgggcgcgcatcactttcgagtgcctccgcgggctgctactcagggacgacgagcgtgctgagtccctcggcctcgctggtgccgccgggtttggcgttgccagggaccggcgccgcgcccgcgcagacatgcgtgccgcagcgctcatggcagaccacgacctctggctcaatcgcgaccgccgcatcgtggggccgatgcctgggatctcggttggtgacgctttcttcttccgcatggagctctgcgtgcttggcctccatggccaggtacaggcaggaattgattatgtcagtgcagggaggtcggcctctggggagcctatagccacatctataattgtatctggtgggtatgaggatgatgacgatcatggcgacgtacttgtgtacactgggcatggcggccgggatcccaacctccacaagcattgcgtcgatcagaagctggagggtggcaatcttgccctcgagcgcagcatggcttatggtattgagattcgtgtaatccgtgccgtcaaatcaagacgaagccctattggtaaggtatacttctatgatggcctctacaaagttgttgactactggctcgaccgtgggaaatctgggtttggtgtttataagtataaaatgctgcgcattgagggccaagaacccatgggtactgtgaattatcgagcagctgaacaacttaaggtggatgtgtttgctgtaaggccaacaggttatttcagctttgatatctccatgggccgagagaccttgccagttgcactctataatgatgttgacgatgatcaggacccactcttatttgagtatctaacacggccaatttttcctacctctgctgtccaggggaaatttgctgagggtggtggtggtggtggttgtgattgtgctgagatttgctcaattggatgtaactgtgcaggaaggaatggtggcgagtttgcatataataagactggaaccctgctacgaggcaagccactagtatatgagtgtgggccatattgcaggtgcccacctagttgtcctaacagggttagtcagaaggggcttcaacataggcttgaggtattccggtcaagggagactgggtggggagttcgttctttggatctcattaaggctggcacattcatttgtgagttcagtgggattgtccttactcaccagcagtcagaggtcatggcagcgaatggtgattgcttggtgcgtccaaataggttccctccaaggtggttggattggggtgatatatctgatgtgtaccctgattatgtggcgccagaccatcctgttattcctgagttaaactttgcaattgacgtgtcaagggcaaggaatgtggcatgctatttcagccacagttgcagtccaaacgtgtttatccagtttgtgctgtttgatcattacaatgtgtcttacccccacctaatgatctttgccatggaaaacattccaccattgagggaactaagcatcgactatgggatggttgatgaatggactggacaattaaccatgtagctggagtaacctatttaaaaggcagtgttctctttctttcttttccctttatttttggaattctcataatgcttcacctggggatcatcaagccaactggactaaaattcctcagctgattatctagctggaagcgtgtccacttttgttggaaaatgttgatccatatgttgtaaagttatttgcactccttgtgcaattgaagattcactctctggctgtgggtagaatctggctgtagaaagagtctaagtatcatgtgaattacgtgctgaggaagataaagttcagacggtttaggatttagacagtcatgtatttctactatcgcgatgacttgaccgattctgtgtctatgtttattttggatgatttttactaaagtaattctcatagaaatgggatgagaagttaggcgtttagtagtttgcaccaccttttggtagctagaagatgaaaaaagttaaaacaaacaaggcacaagtctattgcgcaaaattattcccaaaattattctcatcccttgtgcagggctccgcattgcgtcgtgtaatcagtcagacattgatgacttatttcatctcgcgttagcgacctctttggaacagatatgcagtgatggatgtggcat

SEQ ID NO: 26348 - DNA, 3270 bp, Zea Mays
gtagagaagaagaaaaatagaagagaagattttttggttgtccttatctatttgttaggcgagaagtaagagaaaataatgtacctacgtgttttgttcgtgaagtatggataccaagtaccaacggtagaaaattatttataggagtgagattccgttggagctcgtctggaggacgctctattttggggagattttgcaacctctccctgactgcgccatttttttttctcgcctccaccaacgtcagctctccagtcaccagttggacaagcgggacgggacaacatcctcaccagccgcaatcctccactcctccccgcagccctcgaccctcgtcagcctctccagttcacctcgccgtctccgtcatgccccgcgagggtttggggaattttggagcggaggaggaggcgagggatggtggacaggaaggtttggttacggaaatggatgtggaggaatcctcgccgtcttcgtcgccgatgtcgtctccggccgggtcgtcagattccatagacctcaacttcctgccgtttctcaagagggagcccaaatcggagccgtcgtcaccagagctcgggcccctgccgctgcctgtctccctcacccagacgccgccgcagcagcatgcagcggcggcggctccagcaactgaggcctcggtgcctccgcctccggcgactcctgacctctcgtccgcgtcgatgatgaccccgctgcagtcgctgccgcctaacccagacgaggactcgctccttcgggagtactaccgccttgcgagactatatctctcgtctgcggggtccggggcgatcgtcccgacaccggcaccggaggcggccgcaccggcggtggtacagtccggggccgggtccgtcgtgaaaaagcgccggccgcggtcatcggagctcgtgcgggtctcctcgctcggtgtgcaggatcagatctacttccgcgacctcgtgcgccgggcgcgcatcactttcgagtgcctccgcgggctgctactcagggacgacgagcgtgctgagtccctcggcctcgctggtgccgccgggtttggcgttgccagggaccggcgccgcgcccgcgcagacatgcgtgccgcagcgctcatggcagaccacgacctctggctcaatcgcgaccgccgcatcgtggggccgatgcctgggatctcggttggtgacgctttcttcttccgcatggagctctgcgtgcttggcctccatggccaggtacaggcaggaattgattatgtcagtgcagggaggtcggcctctggggagcctatagccacatctataattgtatctggtgggtatgaggatgatgacgatcatggcgacgtacttgtgtacactgggcatggcggccgggatcccaacctccacaagcattgcgtcgatcagaagctggagggtggcaatcttgccctcgagcgcagcatggcttatggtattgagattcgtgtaatccgtgccgtcaaatcaagacgaagccctattggtaaggtatacttctatgatggcctctacaaagttgttgactactggctcgaccgtgggaaatctgggtttggtgtttataagtataaaatgctgcgcattgagggccaagaacccatgggtactgtgaattatcgagcagctgaacaacttaaggtggatgtgtttgctgtaaggccaacaggttatttcagctttgatatctccatgggccgagagaccttgccagttgcactctataatgatgttgacgatgatcaggacccactcttatttgagtatctaacacggccaatttttcctacctctgctgtccaggggaaatttgctgagggtggtggtggtggtggttgtgattgtgctgagatttgctcaattggatgtaactgtgcaggaaggaatggtggcgagtttgcatataataagactggaaccctgctacgaggcaagccactagtatatgagtgtgggccatattgcaggtgcccacctagttgtcctaacagggttagtcagaaggggcttcaacataggcttgaggtattccggtcaagggagactgggtggggagttcgttctttggatctcattaaggctggcacattcatttgtgagttcagtgggattgtccttactcaccagcagtcagaggtcatggcagcgaatggtgattgcttggtgcgtccaaataggttccctccaaggtggttggattggggtgatatatctgatgtgtaccctgattatgtggcgccagaccatcctgttattcctgagttaaactttgcaattgacgtgtcaagggcaaggaatgtggcatgctatttcagccacagttgcagtccaaacgtgtttatccagtttgtgctgtttgatcattacaatgtgtcttacccccacctaatgatctttgccatggaaaacattccaccattgagggaactaagcatcgactatgggatggttgatgaatggactggacaattaaccatgtagctggagtaacctatttaaaaggcagtgttctctttctttcttttccctttatttttggaattctcataatgcttcacctggggatcatcaagccaactggactaaaattcctcagctgaaacttgcatgaggatgaccaagctacaactcattgtcatctacacttctacagtacatcagccatccattgtatatgttgcctgataacctaggtgcctcggccaattttctagatgaactcgcttttgagattatctagctggaagcgtgtccacttttgttggaaaatgttgatccatatgttgtaaagttatttgcactccttgtgcaattgaagattcactctctggctgtgggtagaatctggctgtagaaagagtctaagtatcatgtgaattacgtgctgaggaagataaagttcagacggtttaggatttagacagtcatgtatttctactatcgcgatgacttgaccgattctgtgtctatgtttattttggatgatttttactaaagtaattctcatagaaatgggatgagaagttaggcgtttagtagtttgcaccaccttttggtagctagaagatgaaaaaagttaaaacaaacaaggcacaagtctattgcgcaaaattattcccaaaattattctcatcccttgtgcagggctccgcattgcgtcgtgtaatcagtcagacattgatgacttatttcatctcgcgttagcgacctctttggaacagatatgcagtgatggatgtggcat

SEQ ID NO: 26349 - DNA, 2573 bp, Zea Mays
gctctattttggggagattttgcaacctctccctgactgcgccatttttttttctcgcctccaccaacgtcagctctccagtcaccagttggacaagcgggacgggacaacatcctcaccagccgcaatcctccactcctccccgcagccctcgaccctcgtcagcctctccagttcacctcgccgtctccgtcatgccccgcgagggtttggggaattttggagcggaggaggaggcgagggatggtggacaggaaggtttggttacggaaatggatgtggaggaatcctcgccgtcttcgtcgccgatgtcgtctccggccgggtcgtcagattccatagacctcaacttcctgccgtttctcaagagggagcccaaatcggagccgtcgtcaccagagctcgggcccctgccgctgcctgtctccctcacccagacgccgccgcagcagcatgcagcggcggcggctccagcaactgaggcctcggtgcctccgcctccggcgactcctgacctctcgtccgcgtcgatgatgaccccgctgcagtcgctgccgcctaacccagacgaggactcgctccttcgggagtactaccgccttgcgagactatatctctcgtctgcggggtccggggcgatcgtcccgacaccggcaccggaggcggccgcaccggcggtggtacagtccggggccgggtccgtcgtgaaaaagcgccggccgcggtcatcggagctcgtgcgggtctcctcgctcggtgtgcaggatcagatctacttccgcgacctcgtgcgccgggcgcgcatcactttcgagtgcctccgcgggctgctactcagggacgacgagcgtgctgagtccctcggcctcgctggtgccgccgggtttggcgttgccagggaccggcgccgcgcccgcgcagacatgcgtgccgcagcgctcatggcagaccacgacctctggctcaatcgcgaccgccgcatcgtggggccgatgcctgggatctcggttggtgacgctttcttcttccgcatggagctctgcgtgcttggcctccatggccaggtacaggcaggaattgattatgtcagtgcagggaggtcggcctctggggagcctatagccacatctataattgtatctggtgggtatgaggatgatgacgatcatggcgacgtacttgtgtacactgggcatggcggccgggatcccaacctccacaagcattgcgtcgatcagaagctggagggtggcaatcttgccctcgagcgcagcatggcttatggtattgagattcgtgtaatccgtgccgtcaaatcaagacgaagccctattggtaaggtatacttctatgatggcctctacaaagttgttgactactggctcgaccgtgggaaatctgggtttggtgtttataagtataaaatgctgcgcattgagggccaagaacccatgggtactgtgaattatcgagcagctgaacaacttaaggtggatgtgtttgctgtaaggccaacaggttatttcagctttgatatctccatgggccgagagaccttgccagttgcactctataatgatgttgacgatgatcaggacccactcttatttgagtatctaacacggccaatttttcctacctctgctgtccaggggaaatttgctgagggtggtggtggtggtggttgtgattgtgctgagatttgctcaattggatgtaactgtgcaggaaggaatggtggcgagtttgcatataataagactggaaccctgctacgaggcaagccactagtatatgagtgtgggccatattgcaggtgcccacctagttgtcctaacagggttagtcagaaggggcttcaacataggcttgaggtattccggtcaagggagactgggtggggagttcgttctttggatctcattaaggctggcacattcatttgtgagttcagtgggattgtccttactcaccagcagtcagaggtcatggcagcgaatggtgattgcttggtgcgtccaaataggttccctccaaggtggttggattggggtgatatatctgatgtgtaccctgattatgtggcgccagaccatcctgttattcctgagttaaactttgcaattgacgtgtcaagggcaaggaatgtggcatgctatttcagccacagttgcagtccaaacgtgtttatccagtttgtgctgtttgatcattacaatgtgtcttacccccacctaatgatctttgccatggaaaacattccaccattgagggaactaagcatcgactatgggatggttgatgaatggactggacaattaaccatgtagctggagtaacctatttaaaaggcagtgttctctttctttcttttccctttatttttggaattctcataatgcttcacctggggatcatcaagccaactggactaaaattcctcagctgaattacaagtggttgtcaattttagtggaggctgggaatgcaagctattacaggggttttgtacgaaggatacaagaatatgaagttaaggaggcgctaaaaaggatgaaggtaggaaaggcgat

SEQ ID NO: 26350 - DNA, 2471 bp, Zea Mays
gctctattttggggagattttgcaacctctccctgactgcgccatttttttttctcgcctccaccaacgtcagctctccagtcaccagttggacaagcgggacgggacaacatcctcaccagccgcaatcctccactcctccccgcagccctcgaccctcgtcagcctctccagttcacctcgccgtctccgtcatgccccgcgagggtttggggaattttggagcggaggaggaggcgagggatggtggacaggaaggtttggttacggaaatggatgtggaggaatcctcgccgtcttcgtcgccgatgtcgtctccggccgggtcgtcagattccatagacctcaacttcctgccgtttctcaagagggagcccaaatcggagccgtcgtcaccagagctcgggcccctgccgctgcctgtctccctcacccagacgccgccgcagcagcatgcagcggcggcggctccagcaactgaggcctcggtgcctccgcctccggcgactcctgacctctcgtccgcgtcgatgatgaccccgctgcagtcgctgccgcctaacccagacgaggactcgctccttcgggagtactaccgccttgcgagactatatctctcgtctgcggggtccggggcgatcgtcccgacaccggcaccggaggcggccgcaccggcggtggtacagtccggggccgggtccgtcgtgaaaaagcgccggccgcggtcatcggagctcgtgcgggtctcctcgctcggtgtgcaggatcagatctacttccgcgacctcgtgcgccgggcgcgcatcactttcgagtgcctccgcgggctgctactcagggacgacgagcgtgctgagtccctcggcctcgctggtgccgccgggtttggcgttgccagggaccggcgccgcgcccgcgcagacatgcgtgccgcagcgctcatggcagaccacgacctctggctcaatcgcgaccgccgcatcgtggggccgatgcctgggatctcggttggtgacgctttcttcttccgcatggagctctgcgtgcttggcctccatggccaggtacaggcaggaattgattatgtcagtgcagggaggtcggcctctggggagcctatagccacatctataattgtatctggtgggtatgaggatgatgacgatcatggcgacgtacttgtgtacactgggcatggcggccgggatcccaacctccacaagcattgcgtcgatcagaagctggagggtggcaatcttgccctcgagcgcagcatggcttatggtattgagattcgtgtaatccgtgccgtcaaatcaagacgaagccctattggtaaggtatacttctatgatggcctctacaaagttgttgactactggctcgaccgtgggaaatctgggtttggtgtttataagtataaaatgctgcgcattgagggccaagaacccatgggtactgtgaattatcgagcagctgaacaacttaaggtggatgtgtttgctgtaaggccaacaggttatttcagctttgatatctccatgggccgagagaccttgccagttgcactctataatgatgttgacgatgatcaggacccactcttatttgagtatctaacacggccaatttttcctacctctgctgtccaggggaaatttgctgagggtggtggtggtggtggttgtgattgtgctgagatttgctcaattggatgtaactgtgcaggaaggaatggtggcgagtttgcatataataagactggaaccctgctacgaggcaagccactagtatatgagtgtgggccatattgcaggtgcccacctagttgtcctaacagggttagtcagaaggggcttcaacataggcttgaggtattccggtcaagggagactgggtggggagttcgttctttggatctcattaaggctggcacattcatttgtgagttcagtgggattgtccttactcaccagcagtcagaggtcatggcagcgaatggtgattgcttggtgcgtccaaataggttccctccaaggtggttggattggggtgatatatctgatgtgtaccctgattatgtggcgccagaccatcctgttattcctgagttaaactttgcaattgacgtgtcaagggcaaggaatgtggcatgctatttcagccacagttgcagtccaaacgtgtttatccagtttgtgctgtttgatcattacaatgtgtcttacccccacctaatgatctttgccatggaaaacattccaccattgagggaactaagcatcgactatgggatggttgatgaatggactggacaattaaccatgtagctggagtaacctatttaaaaggcagtgttctctttctttcttttccctttatttttggaattctcataatgcttcacctggggatcatcaagccaactggactaaaattcctcagctggattttgcaagtgacttgactag

SEQ ID NO: 26351 - DNA, 978 bp, Zea Mays
ctttttctttaaaaatacttgctctaagccattttcttgcctttcctatttgtacatgttagtggtagcagcatcacaactggtctgtaaaaccttgcatttgtgcttttagtgtggtcactgttttacaccaatgtaagattgtaagttaagagacaactctaagctacacaattcatatcagaaacaaatagagatgaagcttttttcattcttattcttatagtagcaacaaaagtaggctcgggaagggtaggtgacaattatagagaacgaaatggactggaaccctcaaagggagaaggtaattttttccattactacgccagatactccaacgaaaagcaagtttcgctaggaggcacggtagccgtgagaatcaattgagtattttgaacgcatactaatttcaacataatgatgaaactcaaagataattagtcaatgcaggggtcaggaacttggaccctctcaatcgatgcagaggtcaggaacttggaccctctccttcctcacctgcaagtttctaatggcagtgaatctgaagctccttgccgcattcgtgtcgtcgtctcagcctcaacgactctcctgctgatcaggaatctgaagcgcccattcgtcgtcggtggtggggcgagggtgccatcggggatggagaggagctccttggcaatgctcagatgaggagccctgaactcttgcggtggcccaaacgcggaggtggaggcgacgacagtgttcagctgggccctaacggggagagatgcggccccggcggcgtgtgcgatggtactcagggcgatggtgcggtgggggaggagaagcggcggcggcggtgcagcgtgttgggtgtggcgggcgaggcgccgagatggatgtggccacaggccgggatgccatgtgggccagcaatggtccgtgggtacgctagggttttcctgctctgcggtgggatggcctaggctgcgtggggca

SEQ ID NO: 26352 - DNA, 1241 bp, Zea Mays
aaattgggaatcttatggtgcaatgtcactcataatagctaagtgttttttaaagaccacatcttgatcagataagtagaggccaagcttagcaactgagaataatttacagagaaccaaatcgcttgagaagatcttcaaactctagtatagaaaaaagattagcaacaaggaataacatcgtatcataagaatcaacaagacaacacaagatagcagtacaatacctgagtggcgagccggtagagggcgctggcatggccgatgccacgatggtgccgtgaggagagaacctagcgacatgtgtgctcaaccattgcaaccatctcccatcctatccctttgcacctacctaggggctcgcctccacccctttctctttgtcacatcggggccagggtcaaggcattgggtgggggcgaggcggaggcgacgcacgcgaggttgaggtgagtagcagctccattgaatggctagagtcgagatgtcgggcgggagcgaggccgagtgtaggcgaggcgcttgaggtggaggtcggcgatgctcccgtttgattggggctagggtcgagccttcgggcgagggtgaggcggtggtgggggcgaggcggaggtggaggagaggcatgcgaggtggagttcggcagcgaaggtggagcgttttggggaggcaggggtgaggtcgtggtgcacgtttgcgagatgcgactgacggattgcgaggaggccagaggtgggggcacggacgcacgatgggcgccgtggatgggaggaggcgtcgaggttggaaggggcgcggtgatgggggcgaggcacgcgaggagaggatggaggcgcggcaccgctgcaatcgcgcgattcggaagccggatccctggcgcggaggtaatttgggagcggggcgcggctgccatgggcgattcgcgtcggatctctagcgcggaggtaatttgggagcggggcacggctgccatgaagcacgtgcgccatttaagggcgcggatagaggctgccatagatggcggtggactgcagagaggagagcgggggcgcagagatggcgggcgagagagacagcagagaggagagcagggtcggaccttccatggaaccacgcggaccttccctagatgtgttgattctccttccatgatagcggacgagagagcgggggcgcaagagaggagagagggcgacggatggcagaaccgtgcaccaaaaaaatgtggacgtctacactaa

SEQ ID NO: 26353 - DNA, 850 bp, Zea Mays
ttgacatacaccacaaacactcatactacaagttgtgtaacacaaaaaagagtagggaacccttgccctatgtatgtatttttcacgttcctcttatttcttttgcagctttgctctagaacgatgactggctcccttgggagcctgttaaaaacaatatttgtaaacaaaaacacatggcaaatggctctcagtaaacaatagcgccgacgttatttgcttattagaggtctccaccgaatctcttgtattcctttctatcctttacccctatcccttaaatagaaaaatgtaccagctacaccagatctcctaacacacctaccgtttctatatttttaggagatctcctatatacaccaccatctctcttggacaaagggtatgtctagggtgacaacaggttttaaattttacactctaaaatgtaagaatcagatcgggttaggatcgtaccctatttctattcatttttgaactaaaaacaatttagagccctagcaatttgtgaagaaacatttagatcatgatccattaccacccctaggtatgcctttctatctcctaaatctggatgaggttttggtaatccacttgagtaatggtctctcgaaccctatacttgcttttacgaactcacttaggggataagtaatcgaagatctggtggagatgctcttatcacacccactctcatataagagttgcacggtattatagtgaatcataatacctggatatggcgtagaacatcttggagttccataataatctccaaaaaaagtcagacacacatcatgatcttcatcccaacaccgtcgaatcagtttggtcacacgctgcccagaat

SEQ ID NO: 26354 - DNA, 1696 bp, Zea Mays
gttcgtatacttcatccaagttctccaaacctggggctaagtgctgcagtccaactattgttagcactgaaaacaacacactccttgcgaacacacaagtgagcgaaccacacgcttctgctacgatctacataacaaggagagatgccgaagcaccactcagcatggcttctgtcgccacaacaagctgtgacctgctggtaaagctgaaggtgttctctttgaagatgcaggagatggatatgcattcacacagggagactatcttttgacatattatattgctgaactccactcatcagtggttactgtcaaaatcttaaaatctgaagggtcatggaagagaccaaaacgaaatctgaaaataaatatattgcttggtggaggtgctatgataagtacagatggtgttgatggtgaagtaatacaccttacaatgccttctgaatctgtagtgtcaagcttagttgcaaccagcgaatttgagcacaagaaacgaatggagatgattcagcctatacctgatatagaagagccatcggggcaggaaggtgctgagctatcaaaaatacctgttgatttgaaaagtggagactggttccttaagattgtaccatggattggaggccgtattatatcgatggcccatattccttctgattcccagtggcttcacagcagaattgagataaatggttatgaagaatacagtggggctgaatataggtctgctggttgcacagaagagtacaaagtcatcaggaggcaccttgaacaatctggagaggaggaatctatttgtatggaaggagacattggtggtggtctggttctccagcgccagatatccattttgaaggacaacccaaagattgttcagatcgactccagcattcaggcaagaagtgtaggagctggttctggtgggttttcaaggttggtctgtttacgagttcatcctacattcaccctgctgcacccaactgaggtagtagttgctttcacggccatcaatggttcaaagcaagagatctccccggaggcaggagaaataacattcgagggagacctcaaacccaacggagaatggatgctagtggacaagtgtgtcgggctgagcttggtgaaccggtttaatcccagggaggttagcaaatgctttgtgcactggggaactggtgatgtgaacatggagctctggtcagaggaaagaccggtgtctaatgagacgccgttgaggatttgccaccagtatgaggtgcagcaaacaacctaaacacctgcccgaagagcagaaataaaaataccaatttggaggatacttcagttgcttgcacttgttttacggtctctgtattgacggtcgcgcaccataacttccatggtattttggagtcgtgtcgttagtcattaccctcttggaggactttgggtctgctgaaaacatggttactcagcaatatctgctactgttcacgactgacattcaaagggttactcagcaatatatggataaaatttgtgttaaagataagttgtgtcgtgtgggttgagttatgtgtgttgtgttgtgctgtaccttcttctatctattaatggaaagatacgtagatctcctgcgtattcgagaaaaaaaactatatggataaaattttatgaaacatcgtaagtgtgaaagaaaaaattaagaatgacg

SEQ ID NO: 26355 - DNA, 1544 bp, Zea Mays
ataccttgtcattttctgaggaccagatgttcgtatacttcatccaaggtaaagctgaaggtgttctctttgaagatgcaggagatggatatgcattcacacagggagactatcttttgacatattatattgctgaactccactcatcagtggttactgtcaaaatcttaaaatctgaagggtcatggaagagaccaaaacgaaatctgaaaataaatatattgcttggtggaggtgctatgataagtacagatggtgttgatggtgaagtaatacaccttacaatgccttctgaatctgtagtgtcaagcttagttgcaaccagcgaatttgagcacaagaaacgaatggagatgattcagcctatacctgatatagaagagccatcggggcaggaaggtgctgagctatcaaaaatacctgttgatttgaaaagtggagactggttccttaagattgtaccatggattggaggccgtattatatcgatggcccatattccttctgattcccagtggcttcacagcagaattgagataaatggttatgaagaatacagtggggctgaatataggtctgctggttgcacagaagagtacaaagtcatcaggaggcaccttgaacaatctggagaggaggaatctatttgtatggaaggagacattggtggtggtctggttctccagcgccagatatccattttgaaggacaacccaaagattgttcagatcgactccagcattcaggcaagaagtgtaggagctggttctggtgggttttcaaggttggtctgtttacgagttcatcctacattcaccctgctgcacccaactgaggtagtagttgctttcacggccatcaatggttcaaagcaagagatctccccggaggcaggagaaataacattcgagggagacctcaaacccaacggagaatggatgctagtggacaagtgtgtcgggctgagcttggtgaaccggtttaatcccagggaggttagcaaatgctttgtgcactggggaactggtgatgtgaacatggagctctggtcagaggaaagaccggtgtctaatgagacgccgttgaggatttgccaccagtatgaggtgcagcaaacaacctaaacacctgcccgaagagcagaaataaaaataccaatttggaggatacttcagttgcttgcacttgttttacggtctctgtattgacggtcgcgcaccataacttccatggtattttggagtcgtgtcgttagtcattaccctcttggaggactttgggtctgctgaaaacatggttactcagcaatatctgctactgttcacgactgacattcaaagggttactcagcaatatatggataaaatttgtgttaaagataagttgtgtcgtgtgggttgagttatgtgtgttgtgttgtgctgtaccttcttctatctattaatggaaagatacgtagatctcctgcgtattcgagaaaaaaaactatatggataaaattttatgaaacatcgtaagtgtgaaagaaaaaattaagaatgacg

SEQ ID NO: 26356 - DNA, 2102 bp, Zea Mays
gtcacatttctatcgttcttccagaaagttttaaggagggtctcagtggtcaaccattgtcaggtcctgatattggtggttttgctggaaatgctactccaaaactttttggaagatggatgggtgtgggtgcattgtttccattttcacgtggccatacagaaactggaagcattgaccacgaaccatggtcctttggtaaagagtgtgaggaagtctgtcgccttgcgctactaagacggtaccggctactgccacatatctacactcttttttaccactcacatacaaagggtattccagttgctactccagttttctttgctgatacacaagaccctgaactgaggaaagttgagacttcctttctccttggaccactcttagtttgtgcaagcactttacctaataaaggagctcatgaatatgcacataagttaccgaagggcatatggttgtcttttgattttgcggattcacaccctgatctgccggtgctgtatctacaaggtggagcaattcttcctgtaggtcttcctattaagcatgttagtgaagcaagtttggaggatgacctgtcactaattatcgcattgaatgaaaatggtaaagctgaaggtgttctctttgaagatgcaggagatggatatgcattcacacagggagactatcttttgacatattatattgctgaactccactcatcagtggttactgtcaaaatcttaaaatctgaagggtcatggaagagaccaaaacgaaatctgaaaataaatatattgcttggtggaggtgctatgataagtacagatggtgttgatggtgaagtaatacaccttacaatgccttctgaatctgtagtgtcaagcttagttgcaaccagcgaatttgagcacaagaaacgaatggagatgattcagcctatacctgatatagaagagccatcggggcaggaaggtgctgagctatcaaaaatacctgttgatttgaaaagtggagactggttccttaagattgtaccatggattggaggccgtattatatcgatggcccatattccttctgattcccagtggcttcacagcagaattgagataaatggttatgaagaatacagtggggctgaatataggtctgctggttgcacagaagagtacaaagtcatcaggaggcaccttgaacaatctggagaggaggaatctatttgtatggaaggagacattggtggtggtctggttctccagcgccagatatccattttgaaggacaacccaaagattgttcagatcgactccagcattcaggcaagaagtgtaggagctggttctggtgggttttcaaggttggtctgtttacgagttcatcctacattcaccctgctgcacccaactgaggtagtagttgctttcacggccatcaatggttcaaagcaagagatctccccggaggcaggagaaataacattcgagggagacctcaaacccaacggagaatggatgctagtggacaagtgtgtcgggctgagcttggtgaaccggtttaatcccagggaggttagcaaatgctttgtgcactggggaactggtgatgtgaacatggagctctggtcagaggaaagaccggtgtctaatgagacgccgttgaggatttgccaccagtatgaggtgcagcaaacaacctaaacacctgcccgaagagcagaaataaaaataccaatttggaggatacttcagttgcttgcacttgttttacggtctctgtattgacggtcgcgcaccataacttccatggtattttggagtcgtgtcgttagtcattaccctcttggaggactttgggtctgctgaaaacatggttactcagcaatatctgctactgttcacgactgacattcaaagggttactcagcaatatatggataaaatttgtgttaaagataagttgtgtcgtgtgggttgagttatgtgtgttgtgttgtgctgtaccttcttctatctattaatggaaagatacgtagatctcctgcgtattcgagaaaaaaaactatatggataaaattttatgaaacatcgtaagtgtgaaagaaaaaattaagaatgacg

SEQ ID NO: 26357 - DNA, 2100 bp, Zea Mays
ggcaactaagtttgtcaggacacaaaaatgctagggggtctcagtggtcaaccattgtcaggtcctgatattggtggttttgctggaaatgctactccaaaactttttggaagatggatgggtgtgggtgcattgtttccattttcacgtggccatacagaaactggaagcattgaccacgaaccatggtcctttggtaaagagtgtgaggaagtctgtcgccttgcgctactaagacggtaccggctactgccacatatctacactcttttttaccactcacatacaaagggtattccagttgctactccagttttctttgctgatacacaagaccctgaactgaggaaagttgagacttcctttctccttggaccactcttagtttgtgcaagcactttacctaataaaggagctcatgaatatgcacataagttaccgaagggcatatggttgtcttttgattttgcggattcacaccctgatctgccggtgctgtatctacaaggtggagcaattcttcctgtaggtcttcctattaagcatgttagtgaagcaagtttggaggatgacctgtcactaattatcgcattgaatgaaaatggtaaagctgaaggtgttctctttgaagatgcaggagatggatatgcattcacacagggagactatcttttgacatattatattgctgaactccactcatcagtggttactgtcaaaatcttaaaatctgaagggtcatggaagagaccaaaacgaaatctgaaaataaatatattgcttggtggaggtgctatgataagtacagatggtgttgatggtgaagtaatacaccttacaatgccttctgaatctgtagtgtcaagcttagttgcaaccagcgaatttgagcacaagaaacgaatggagatgattcagcctatacctgatatagaagagccatcggggcaggaaggtgctgagctatcaaaaatacctgttgatttgaaaagtggagactggttccttaagattgtaccatggattggaggccgtattatatcgatggcccatattccttctgattcccagtggcttcacagcagaattgagataaatggttatgaagaatacagtggggctgaatataggtctgctggttgcacagaagagtacaaagtcatcaggaggcaccttgaacaatctggagaggaggaatctatttgtatggaaggagacattggtggtggtctggttctccagcgccagatatccattttgaaggacaacccaaagattgttcagatcgactccagcattcaggcaagaagtgtaggagctggttctggtgggttttcaaggttggtctgtttacgagttcatcctacattcaccctgctgcacccaactgaggtagtagttgctttcacggccatcaatggttcaaagcaagagatctccccggaggcaggagaaataacattcgagggagacctcaaacccaacggagaatggatgctagtggacaagtgtgtcgggctgagcttggtgaaccggtttaatcccagggaggttagcaaatgctttgtgcactggggaactggtgatgtgaacatggagctctggtcagaggaaagaccggtgtctaatgagacgccgttgaggatttgccaccagtatgaggtgcagcaaacaacctaaacacctgcccgaagagcagaaataaaaataccaatttggaggatacttcagttgcttgcacttgttttacggtctctgtattgacggtcgcgcaccataacttccatggtattttggagtcgtgtcgttagtcattaccctcttggaggactttgggtctgctgaaaacatggttactcagcaatatctgctactgttcacgactgacattcaaagggttactcagcaatatatggataaaatttgtgttaaagataagttgtgtcgtgtgggttgagttatgtgtgttgtgttgtgctgtaccttcttctatctattaatggaaagatacgtagatctcctgcgtattcgagaaaaaaaactatatggataaaattttatgaaacatcgtaagtgtgaaagaaaaaattaagaatgacg

SEQ ID NO: 26358 - DNA, 2095 bp, Zea Mays
ctgtcatcctgtgatgtgaaggcaactaagtttgtcaggacacaaaaatgctaggggtcctgatattggtggttttgctggaaatgctactccaaaactttttggaagatggatgggtgtgggtgcattgtttccattttcacgtggccatacagaaactggaagcattgaccacgaaccatggtcctttggtaaagagtgtgaggaagtctgtcgccttgcgctactaagacggtaccggctactgccacatatctacactcttttttaccactcacatacaaagggtattccagttgctactccagttttctttgctgatacacaagaccctgaactgaggaaagttgagacttcctttctccttggaccactcttagtttgtgcaagcactttacctaataaaggagctcatgaatatgcacataagttaccgaagggcatatggttgtcttttgattttgcggattcacaccctgatctgccggtgctgtatctacaaggtggagcaattcttcctgtaggtcttcctattaagcatgttagtgaagcaagtttggaggatgacctgtcactaattatcgcattgaatgaaaatggtaaagctgaaggtgttctctttgaagatgcaggagatggatatgcattcacacagggagactatcttttgacatattatattgctgaactccactcatcagtggttactgtcaaaatcttaaaatctgaagggtcatggaagagaccaaaacgaaatctgaaaataaatatattgcttggtggaggtgctatgataagtacagatggtgttgatggtgaagtaatacaccttacaatgccttctgaatctgtagtgtcaagcttagttgcaaccagcgaatttgagcacaagaaacgaatggagatgattcagcctatacctgatatagaagagccatcggggcaggaaggtgctgagctatcaaaaatacctgttgatttgaaaagtggagactggttccttaagattgtaccatggattggaggccgtattatatcgatggcccatattccttctgattcccagtggcttcacagcagaattgagataaatggttatgaagaatacagtggggctgaatataggtctgctggttgcacagaagagtacaaagtcatcaggaggcaccttgaacaatctggagaggaggaatctatttgtatggaaggagacattggtggtggtctggttctccagcgccagatatccattttgaaggacaacccaaagattgttcagatcgactccagcattcaggcaagaagtgtaggagctggttctggtgggttttcaaggttggtctgtttacgagttcatcctacattcaccctgctgcacccaactgaggtagtagttgctttcacggccatcaatggttcaaagcaagagatctccccggaggcaggagaaataacattcgagggagacctcaaacccaacggagaatggatgctagtggacaagtgtgtcgggctgagcttggtgaaccggtttaatcccagggaggttagcaaatgctttgtgcactggggaactggtgatgtgaacatggagctctggtcagaggaaagaccggtgtctaatgagacgccgttgaggatttgccaccagtatgaggtgcagcaaacaacctaaacacctgcccgaagagcagaaataaaaataccaatttggaggatacttcagttgcttgcacttgttttacggtctctgtattgacggtcgcgcaccataacttccatggtattttggagtcgtgtcgttagtcattaccctcttggaggactttgggtctgctgaaaacatggttactcagcaatatctgctactgttcacgactgacattcaaagggttactcagcaatatatggataaaatttgtgttaaagataagttgtgtcgtgtgggttgagttatgtgtgttgtgttgtgctgtaccttcttctatctattaatggaaagatacgtagatctcctgcgtattcgagaaaaaaaactatatggataaaattttatgaaacatcgtaagtgtgaaagaaaaaattaagaatgacg

SEQ ID NO: 26359 - DNA, 2691 bp, Zea Mays
caaggcaccaacatgctgcgttgcctccttttctaggcttcgatccgattccctgatccaatatcaatggtagatgatctccattccattggttgcaaagcaatctggatgcttgacccagggatcaagaaggaggagggttactttgtttatgatagtggctcaaaaagcgatgtttggattcaaaaggcagatggcagtccattcgttggggaggtgtggcctggtgattgtgttttccctgactatacatctgaaaaaacacgagcttggtgggctagtttggtaaaggacttcatctctattggtgttgatggaatatggaatgatatgaatgaacctgctgttttcaaaactaccacgaagacaatgcctgaaagcaatattcataggggagatgctgatattggtggtgttcaaaatcattcatactatcacaatgtctacggaatgctaatggcaagatctacttataaaggaatggaaatgggcaatgcagctaaacgaccatttgttcttacacgagctggttttattggaagtcagcgttatgctgcaacatggactggtgataatctttcaaattgggagcatctgcacatgagtctaccaatggttcttcagttgggtctcagtggtcaaccattgtcaggtcctgatattggtggttttgctggaaatgctactccaaaactttttggaagatggatgggtgtgggtgcattgtttccattttcacgtggccatacagaaactggaagcattgaccacgaaccatggtcctttggtaaagagtgtgaggaagtctgtcgccttgcgctactaagacggtaccggctactgccacatatctacactcttttttaccactcacatacaaagggtattccagttgctactccagttttctttgctgatacacaagaccctgaactgaggaaagttgagacttcctttctccttggaccactcttagtttgtgcaagcactttacctaataaaggagctcatgaatatgcacataagttaccgaagggcatatggttgtcttttgattttgcggattcacaccctgatctgccggtgctgtatctacaaggtggagcaattcttcctgtaggtcttcctattaagcatgttagtgaagcaagtttggaggatgacctgtcactaattatcgcattgaatgaaaatggtaaagctgaaggtgttctctttgaagatgcaggagatggatatgcattcacacagggagactatcttttgacatattatattgctgaactccactcatcagtggttactgtcaaaatcttaaaatctgaagggtcatggaagagaccaaaacgaaatctgaaaataaatatattgcttggtggaggtgctatgataagtacagatggtgttgatggtgaagtaatacaccttacaatgccttctgaatctgtagtgtcaagcttagttgcaaccagcgaatttgagcacaagaaacgaatggagatgattcagcctatacctgatatagaagagccatcggggcaggaaggtgctgagctatcaaaaatacctgttgatttgaaaagtggagactggttccttaagattgtaccatggattggaggccgtattatatcgatggcccatattccttctgattcccagtggcttcacagcagaattgagataaatggttatgaagaatacagtggggctgaatataggtctgctggttgcacagaagagtacaaagtcatcaggaggcaccttgaacaatctggagaggaggaatctatttgtatggaaggagacattggtggtggtctggttctccagcgccagatatccattttgaaggacaacccaaagattgttcagatcgactccagcattcaggcaagaagtgtaggagctggttctggtgggttttcaaggttggtctgtttacgagttcatcctacattcaccctgctgcacccaactgaggtagtagttgctttcacggccatcaatggttcaaagcaagagatctccccggaggcaggagaaataacattcgagggagacctcaaacccaacggagaatggatgctagtggacaagtgtgtcgggctgagcttggtgaaccggtttaatcccagggaggttagcaaatgctttgtgcactggggaactggtgatgtgaacatggagctctggtcagaggaaagaccggtgtctaatgagacgccgttgaggatttgccaccagtatgaggtgcagcaaacaacctaaacacctgcccgaagagcagaaataaaaataccaatttggaggatacttcagttgcttgcacttgttttacggtctctgtattgacggtcgcgcaccataacttccatggtattttggagtcgtgtcgttagtcattaccctcttggaggactttgggtctgctgaaaacatggttactcagcaatatctgctactgttcacgactgacattcaaagggttactcagcaatatatggataaaatttgtgttaaagataagttgtgtcgtgtgggttgagttatgtgtgttgtgttgtgctgtaccttcttctatctattaatggaaagatacgtagatctcctgcgtattcgagaaaaaaaactatatggataaaattttatgaaacatcgtaagtgtgaaagaaaaaattaagaatgacg

SEQ ID NO: 26360 - DNA, 2925 bp, Zea Mays
ttcagcattgcaccagatggcaaatactcggcaaaatctgtatatgatggtcttttctaggatcagtttcttttggacattataaaagacttgagaacatgggccatgccaaagtgttgtttcttcatctggcttgttgctcaaaagcatgctggacagctgatagattagcaaaaataggttgttaggacatttagggagaaagacattccttgtgatgttgtctggatggatattgactatatggatggttttaggtgcttcacgtttgatagtatccgattccctgatccaatatcaatggtagatgatctccattccattggttgcaaagcaatctggatgcttgacccagggatcaagaaggaggagggttactttgtttatgatagtggctcaaaaagcgatgtttggattcaaaaggcagatggcagtccattcgttggggaggtgtggcctggtgattgtgttttccctgactatacatctgaaaaaacacgagcttggtgggctagtttggtaaaggacttcatctctattggtgttgatggaatatggaatgatatgaatgaacctgctgttttcaaaactaccacgaagacaatgcctgaaagcaatattcataggggagatgctgatattggtggtgttcaaaatcattcatactatcacaatgtctacggaatgctaatggcaagatctacttataaaggaatggaaatgggcaatgcagctaaacgaccatttgttcttacacgagctggttttattggaagtcagcgttatgctgcaacatggactggtgataatctttcaaattgggagcatctgcacatgagtctaccaatggttcttcagttgggtctcagtggtcaaccattgtcaggtcctgatattggtggttttgctggaaatgctactccaaaactttttggaagatggatgggtgtgggtgcattgtttccattttcacgtggccatacagaaactggaagcattgaccacgaaccatggtcctttggtaaagagtgtgaggaagtctgtcgccttgcgctactaagacggtaccggctactgccacatatctacactcttttttaccactcacatacaaagggtattccagttgctactccagttttctttgctgatacacaagaccctgaactgaggaaagttgagacttcctttctccttggaccactcttagtttgtgcaagcactttacctaataaaggagctcatgaatatgcacataagttaccgaagggcatatggttgtcttttgattttgcggattcacaccctgatctgccggtgctgtatctacaaggtggagcaattcttcctgtaggtcttcctattaagcatgttagtgaagcaagtttggaggatgacctgtcactaattatcgcattgaatgaaaatggtaaagctgaaggtgttctctttgaagatgcaggagatggatatgcattcacacagggagactatcttttgacatattatattgctgaactccactcatcagtggttactgtcaaaatcttaaaatctgaagggtcatggaagagaccaaaacgaaatctgaaaataaatatattgcttggtggaggtgctatgataagtacagatggtgttgatggtgaagtaatacaccttacaatgccttctgaatctgtagtgtcaagcttagttgcaaccagcgaatttgagcacaagaaacgaatggagatgattcagcctatacctgatatagaagagccatcggggcaggaaggtgctgagctatcaaaaatacctgttgatttgaaaagtggagactggttccttaagattgtaccatggattggaggccgtattatatcgatggcccatattccttctgattcccagtggcttcacagcagaattgagataaatggttatgaagaatacagtggggctgaatataggtctgctggttgcacagaagagtacaaagtcatcaggaggcaccttgaacaatctggagaggaggaatctatttgtatggaaggagacattggtggtggtctggttctccagcgccagatatccattttgaaggacaacccaaagattgttcagatcgactccagcattcaggcaagaagtgtaggagctggttctggtgggttttcaaggttggtctgtttacgagttcatcctacattcaccctgctgcacccaactgaggtagtagttgctttcacggccatcaatggttcaaagcaagagatctccccggaggcaggagaaataacattcgagggagacctcaaacccaacggagaatggatgctagtggacaagtgtgtcgggctgagcttggtgaaccggtttaatcccagggaggttagcaaatgctttgtgcactggggaactggtgatgtgaacatggagctctggtcagaggaaagaccggtgtctaatgagacgccgttgaggatttgccaccagtatgaggtgcagcaaacaacctaaacacctgcccgaagagcagaaataaaaataccaatttggaggatacttcagttgcttgcacttgttttacggtctctgtattgacggtcgcgcaccataacttccatggtattttggagtcgtgtcgttagtcattaccctcttggaggactttgggtctgctgaaaacatggttactcagcaatatctgctactgttcacgactgacattcaaagggttactcagcaatatatggataaaatttgtgttaaagataagttgtgtcgtgtgggttgagttatgtgtgttgtgttgtgctgtaccttcttctatctattaatggaaagatacgtagatctcctgcgtattcgagaaaaaaaactatatggataaaattttatgaaacatcgtaagtgtgaaagaaaaaattaagaatgacg

SEQ ID NO: 26361 - DNA, 3151 bp, Zea Mays
taagaaactatatattatatatttgagtcgatttctcaagacagcaaccattaacatcataacaaaggttttcacatggaatacagatgcatggggttttgggccaggaaccacttcgttgtaccagtcacacccttgggttttggctgtcctccctgatggaaaagcattgggtgtccttgctgataccactcggcgttgtgagattgatttgcgacaagaatcaactataaagttctctgccttatctgcctaccctgtcatcacttttgggccatttaatactccagctgatgtcatgacatctttgtcgcatgcaattggtactgtgtccatgccgccaaaatggtcacttggctatcatcaatgtcgttggagctatgattcttctgagaaagtactcaaggttgttaggacatttagggagaaagacattccttgtgatgttgtctggatggatattgactatatggatggttttaggtgcttcacgtttgatagtatccgattccctgatccaatatcaatggtagatgatctccattccattggttgcaaagcaatctggatgcttgacccagggatcaagaaggaggagggttactttgtttatgatagtggctcaaaaagcgatgtttggattcaaaaggcagatggcagtccattcgttggggaggtgtggcctggtgattgtgttttccctgactatacatctgaaaaaacacgagcttggtgggctagtttggtaaaggacttcatctctattggtgttgatggaatatggaatgatatgaatgaacctgctgttttcaaaactaccacgaagacaatgcctgaaagcaatattcataggggagatgctgatattggtggtgttcaaaatcattcatactatcacaatgtctacggaatgctaatggcaagatctacttataaaggaatggaaatgggcaatgcagctaaacgaccatttgttcttacacgagctggttttattggaagtcagcgttatgctgcaacatggactggtgataatctttcaaattgggagcatctgcacatgagtctaccaatggttcttcagttgggtctcagtggtcaaccattgtcaggtcctgatattggtggttttgctggaaatgctactccaaaactttttggaagatggatgggtgtgggtgcattgtttccattttcacgtggccatacagaaactggaagcattgaccacgaaccatggtcctttggtaaagagtgtgaggaagtctgtcgccttgcgctactaagacggtaccggctactgccacatatctacactcttttttaccactcacatacaaagggtattccagttgctactccagttttctttgctgatacacaagaccctgaactgaggaaagttgagacttcctttctccttggaccactcttagtttgtgcaagcactttacctaataaaggagctcatgaatatgcacataagttaccgaagggcatatggttgtcttttgattttgcggattcacaccctgatctgccggtgctgtatctacaaggtggagcaattcttcctgtaggtcttcctattaagcatgttagtgaagcaagtttggaggatgacctgtcactaattatcgcattgaatgaaaatggtaaagctgaaggtgttctctttgaagatgcaggagatggatatgcattcacacagggagactatcttttgacatattatattgctgaactccactcatcagtggttactgtcaaaatcttaaaatctgaagggtcatggaagagaccaaaacgaaatctgaaaataaatatattgcttggtggaggtgctatgataagtacagatggtgttgatggtgaagtaatacaccttacaatgccttctgaatctgtagtgtcaagcttagttgcaaccagcgaatttgagcacaagaaacgaatggagatgattcagcctatacctgatatagaagagccatcggggcaggaaggtgctgagctatcaaaaatacctgttgatttgaaaagtggagactggttccttaagattgtaccatggattggaggccgtattatatcgatggcccatattccttctgattcccagtggcttcacagcagaattgagataaatggttatgaagaatacagtggggctgaatataggtctgctggttgcacagaagagtacaaagtcatcaggaggcaccttgaacaatctggagaggaggaatctatttgtatggaaggagacattggtggtggtctggttctccagcgccagatatccattttgaaggacaacccaaagattgttcagatcgactccagcattcaggcaagaagtgtaggagctggttctggtgggttttcaaggttggtctgtttacgagttcatcctacattcaccctgctgcacccaactgaggtagtagttgctttcacggccatcaatggttcaaagcaagagatctccccggaggcaggagaaataacattcgagggagacctcaaacccaacggagaatggatgctagtggacaagtgtgtcgggctgagcttggtgaaccggtttaatcccagggaggttagcaaatgctttgtgcactggggaactggtgatgtgaacatggagctctggtcagaggaaagaccggtgtctaatgagacgccgttgaggatttgccaccagtatgaggtgcagcaaacaacctaaacacctgcccgaagagcagaaataaaaataccaatttggaggatacttcagttgcttgcacttgttttacggtctctgtattgacggtcgcgcaccataacttccatggtattttggagtcgtgtcgttagtcattaccctcttggaggactttgggtctgctgaaaacatggttactcagcaatatctgctactgttcacgactgacattcaaagggttactcagcaatatatggataaaatttgtgttaaagataagttgtgtcgtgtgggttgagttatgtgtgttgtgttgtgctgtaccttcttctatctattaatggaaagatacgtagatctcctgcgtattcgagaaaaaaaactatatggataaaattttatgaaacatcgtaagtgtgaaagaaaaaattaagaatgacg

SEQ ID NO: 26362 - DNA, 3610 bp, Zea Mays
cgcatcactccgcctcgtcccccacttctcgcacttccgcttcagcttccaccgtgcccaagagtcacgaggcggcggcgggtcacgccgacgtactctcaggtgctgcggtgggactgcccctgctgctgccgcgggggcggcggaggggaggatggccgcggcgacggcggcggacatggtgtgggtgagggtgcttgaggatggcgtgttccggttcgacgcgtcggaggcggcgcgcgccgccgcggggcccagcctctcgttcgcggacccgcggcggcgggaggcgccgcatgacggggccgacatgcccgccgttgtcccggtatgcgaggtcgcggcggggggatcccagaaggtcgtgataaagcttcctcctgggacatctttctatggtactggagaagcgagtggcccacttgaacggactgggaaacgagttttcacatggaatacagatgcatggggttttgggccaggaaccacttcgttgtaccagtcacacccttgggttttggctgtcctccctgatggaaaagcattgggtgtccttgctgataccactcggcgttgtgagattgatttgcgacaagaatcaactataaagttctctgccttatctgcctaccctgtcatcacttttgggccatttaatactccagctgatgtcatgacatctttgtcgcatgcaattggtactgtgtccatgccgccaaaatggtcacttggctatcatcaatgtcgttggagctatgattcttctgagaaagtactcaagatccgattccctgatccaatatcaatggtagatgatctccattccattggttgcaaagcaatctggatgcttgacccagggatcaagaaggaggagggttactttgtttatgatagtggctcaaaaagcgatgtttggattcaaaaggcagatggcagtccattcgttggggaggtgtggcctggtgattgtgttttccctgactatacatctgaaaaaacacgagcttggtgggctagtttggtaaaggacttcatctctattggtgttgatggaatatggaatgatatgaatgaacctgctgttttcaaaactaccacgaagacaatgcctgaaagcaatattcataggggagatgctgatattggtggtgttcaaaatcattcatactatcacaatgtctacggaatgctaatggcaagatctacttataaaggaatggaaatgggcaatgcagctaaacgaccatttgttcttacacgagctggttttattggaagtcagcgttatgctgcaacatggactggtgataatctttcaaattgggagcatctgcacatgagtctaccaatggttcttcagttgggtctcagtggtcaaccattgtcaggtcctgatattggtggttttgctggaaatgctactccaaaactttttggaagatggatgggtgtgggtgcattgtttccattttcacgtggccatacagaaactggaagcattgaccacgaaccatggtcctttggtaaagagtgtgaggaagtctgtcgccttgcgctactaagacggtaccggctactgccacatatctacactcttttttaccactcacatacaaagggtattccagttgctactccagttttctttgctgatacacaagaccctgaactgaggaaagttgagacttcctttctccttggaccactcttagtttgtgcaagcactttacctaataaaggagctcatgaatatgcacataagttaccgaagggcatatggttgtcttttgattttgcggattcacaccctgatctgccggtgctgtatctacaaggtggagcaattcttcctgtaggtcttcctattaagcatgttagtgaagcaagtttggaggatgacctgtcactaattatcgcattgaatgaaaatgttctccaaacctggggctaagtgctgcagtccaactattgttagcactgaaaacaacacactccttgcgaacacacaagtgagcgaaccacacgcttctgctacgatctacataacaaggagagatgccgaagcaccactcagcatggcttctgtcgccacaacaagctgtgacctgctggtaaagctgaaggtgttctctttgaagatgcaggagatggatatgcattcacacagggagactatcttttgacatattatattgctgaactccactcatcagtggttactgtcaaaatcttaaaatctgaagggtcatggaagagaccaaaacgaaatctgaaaataaatatattgcttggtggaggtgctatgataagtacagatggtgttgatggtgaagtaatacaccttacaatgccttctgaatctgtagtgtcaagcttagttgcaaccagcgaatttgagcacaagaaacgaatggagatgattcagcctatacctgatatagaagagccatcggggcaggaaggtgctgagctatcaaaaatacctgttgatttgaaaagtggagactggttccttaagattgtaccatggattggaggccgtattatatcgatggcccatattccttctgattcccagtggcttcacagcagaattgagataaatggttatgaagaatacagtggggctgaatataggtctgctggttgcacagaagagtacaaagtcatcaggaggcaccttgaacaatctggagaggaggaatctatttgtatggaaggagacattggtggtggtctggttctccagcgccagatatccattttgaaggacaacccaaagattgttcagatcgactccagcattcaggcaagaagtgtaggagctggttctggtgggttttcaaggttggtctgtttacgagttcatcctacattcaccctgctgcacccaactgaggtagtagttgctttcacggccatcaatggttcaaagcaagagatctccccggaggcaggagaaataacattcgagggagacctcaaacccaacggagaatggatgctagtggacaagtgtgtcgggctgagcttggtgaaccggtttaatcccagggaggttagcaaatgctttgtgcactggggaactggtgatgtgaacatggagctctggtcagaggaaagaccggtgtctaatgagacgccgttgaggatttgccaccagtatgaggtgcagcaaacaacctaaacacctgcccgaagagcagaaataaaaataccaatttggaggatacttcagttgcttgcacttgttttacggtctctgtattgacggtcgcgcaccataacttccatggtattttggagtcgtgtcgttagtcattaccctcttggaggactttgggtctgctgaaaacatggttactcagcaatatctgctactgttcacgactgacattcaaagggttactcagcaatatatggataaaatttgtgttaaagataagttgtgtcgtgtgggttgagttatgtgtgttgtgttgtgctgtaccttcttctatctattaatggaaagatacgtagatctcctgcgtattcgagaaaaaaaactatatggataaaattttatgaaacatcgtaagtgtgaaagaaaaaattaagaatgacg

SEQ ID NO: 26363 - DNA, 3372 bp, Zea Mays
cgcatcactccgcctcgtcccccacttctcgcacttccgcttcagcttccaccgtgcccaagagtcacgaggcggcggcgggtcacgccgacgtactctcaggtgctgcggtgggactgcccctgctgctgccgcgggggcggcggaggggaggatggccgcggcgacggcggcggacatggtgtgggtgagggtgcttgaggatggcgtgttccggttcgacgcgtcggaggcggcgcgcgccgccgcggggcccagcctctcgttcgcggacccgcggcggcgggaggcgccgcatgacggggccgacatgcccgccgttgtcccggtatgcgaggtcgcggcggggggatcccagaaggtcgtgataaagcttcctcctgggacatctttctatggtactggagaagcgagtggcccacttgaacggactgggaaacgagttttcacatggaatacagatgcatggggttttgggccaggaaccacttcgttgtaccagtcacacccttgggttttggctgtcctccctgatggaaaagcattgggtgtccttgctgataccactcggcgttgtgagattgatttgcgacaagaatcaactataaagttctctgccttatctgcctaccctgtcatcacttttgggccatttaatactccagctgatgtcatgacatctttgtcgcatgcaattggtactgtgtccatgccgccaaaatggtcacttggctatcatcaatgtcgttggagctatgattcttctgagaaagtactcaagatccgattccctgatccaatatcaatggtagatgatctccattccattggttgcaaagcaatctggatgcttgacccagggatcaagaaggaggagggttactttgtttatgatagtggctcaaaaagcgatgtttggattcaaaaggcagatggcagtccattcgttggggaggtgtggcctggtgattgtgttttccctgactatacatctgaaaaaacacgagcttggtgggctagtttggtaaaggacttcatctctattggtgttgatggaatatggaatgatatgaatgaacctgctgttttcaaaactaccacgaagacaatgcctgaaagcaatattcataggggagatgctgatattggtggtgttcaaaatcattcatactatcacaatgtctacggaatgctaatggcaagatctacttataaaggaatggaaatgggcaatgcagctaaacgaccatttgttcttacacgagctggttttattggaagtcagcgttatgctgcaacatggactggtgataatctttcaaattgggagcatctgcacatgagtctaccaatggttcttcagttgggtctcagtggtcaaccattgtcaggtcctgatattggtggttttgctggaaatgctactccaaaactttttggaagatggatgggtgtgggtgcattgtttccattttcacgtggccatacagaaactggaagcattgaccacgaaccatggtcctttggtaaagagtgtgaggaagtctgtcgccttgcgctactaagacggtaccggctactgccacatatctacactcttttttaccactcacatacaaagggtattccagttgctactccagttttctttgctgatacacaagaccctgaactgaggaaagttgagacttcctttctccttggaccactcttagtttgtgcaagcactttacctaataaaggagctcatgaatatgcacataagttaccgaagggcatatggttgtcttttgattttgcggattcacaccctgatctgccggtgctgtatctacaaggtggagcaattcttcctgtaggtcttcctattaagcatgtaaagctgaaggtgttctctttgaagatgcaggagatggatatgcattcacacagggagactatcttttgacatattatattgctgaactccactcatcagtggttactgtcaaaatcttaaaatctgaagggtcatggaagagaccaaaacgaaatctgaaaataaatatattgcttggtggaggtgctatgataagtacagatggtgttgatggtgaagtaatacaccttacaatgccttctgaatctgtagtgtcaagcttagttgcaaccagcgaatttgagcacaagaaacgaatggagatgattcagcctatacctgatatagaagagccatcggggcaggaaggtgctgagctatcaaaaatacctgttgatttgaaaagtggagactggttccttaagattgtaccatggattggaggccgtattatatcgatggcccatattccttctgattcccagtggcttcacagcagaattgagataaatggttatgaagaatacagtggggctgaatataggtctgctggttgcacagaagagtacaaagtcatcaggaggcaccttgaacaatctggagaggaggaatctatttgtatggaaggagacattggtggtggtctggttctccagcgccagatatccattttgaaggacaacccaaagattgttcagatcgactccagcattcaggcaagaagtgtaggagctggttctggtgggttttcaaggttggtctgtttacgagttcatcctacattcaccctgctgcacccaactgaggtagtagttgctttcacggccatcaatggttcaaagcaagagatctccccggaggcaggagaaataacattcgagggagacctcaaacccaacggagaatggatgctagtggacaagtgtgtcgggctgagcttggtgaaccggtttaatcccagggaggttagcaaatgctttgtgcactggggaactggtgatgtgaacatggagctctggtcagaggaaagaccggtgtctaatgagacgccgttgaggatttgccaccagtatgaggtgcagcaaacaacctaaacacctgcccgaagagcagaaataaaaataccaatttggaggatacttcagttgcttgcacttgttttacggtctctgtattgacggtcgcgcaccataacttccatggtattttggagtcgtgtcgttagtcattaccctcttggaggactttgggtctgctgaaaacatggttactcagcaatatctgctactgttcacgactgacattcaaagggttactcagcaatatatggataaaatttgtgttaaagataagttgtgtcgtgtgggttgagttatgtgtgttgtgttgtgctgtaccttcttctatctattaatggaaagatacgtagatctcctgcgtattcgagaaaaaaaactatatggataaaattttatgaaacatcgtaagtgtgaaagaaaaaattaagaatgacg

SEQ ID NO: 26364 - DNA, 3597 bp, Zea Mays
tttgtacaagaggagatgggatggtcgccacggcccccgcccatcacccgcagcaccgcatcactccgcctcgtcccccacttctcgcacttccgcttcagcttccaccgtgcccaagagtcacgaggcggcggcgggtcacgccgacgtactctcaggtgctgcggtgggactgcccctgctgctgccgcgggggcggcggaggggaggatggccgcggcgacggcggcggacatggtgtgggtgagggtgcttgaggatggcgtgttccggttcgacgcgtcggaggcggcgcgcgccgccgcggggcccagcctctcgttcgcggacccgcggcggcgggaggcgccgcatgacggggccgacatgcccgccgttgtcccggtatgcgaggtcgcggcggggggatcccagaaggtcgtgataaagcttcctcctgggacatctttctatggtactggagaagcgagtggcccacttgaacggactgggaaacgaatgtatttttatcaggttttcacatggaatacagatgcatggggttttgggccaggaaccacttcgttgtaccagtcacacccttgggttttggctgtcctccctgatggaaaagcattgggtgtccttgctgataccactcggcgttgtgagattgatttgcgacaagaatcaactataaagttctctgccttatctgcctaccctgtcatcacttttgggccatttaatactccagctgatgtcatgacatctttgtcgcatgcaattggtactgtgtccatgccgccaaaatggtcacttggctatcatcaatgtcgttggagctatgattcttctgagaaagtactcaaggttgttaggacatttagggagaaagacattccttgtgatgttgtctggatggatattgactatatggatggttttaggtgcttcacgtttgatagtatccgattccctgatccaatatcaatggtagatgatctccattccattggttgcaaagcaatctggatgcttgacccagggatcaagaaggaggagggttactttgtttatgatagtggctcaaaaagcgatgtttggattcaaaaggcagatggcagtccattcgttggggaggtgtggcctggtgattgtgttttccctgactatacatctgaaaaaacacgagcttggtgggctagtttggtaaaggacttcatctctattggtgttgatggaatatggaatgatatgaatgaacctgctgttttcaaaactaccacgaagacaatgcctgaaagcaatattcataggggagatgctgatattggtggtgttcaaaatcattcatactatcacaatgtctacggaatgctaatggcaagatctacttataaaggaatggaaatgggcaatgcagctaaacgaccatttgttcttacacgagctggttttattggaagtcagcgttatgctgcaacatggactggtgataatctttcaaattgggagcatctgcacatgagtctaccaatggttcttcagttgggtctcagtggtcaaccattgtcaggtcctgatattggtggttttgctggaaatgctactccaaaactttttggaagatggatgggtgtgggtgcattgtttccattttcacgtggccatacagaaactggaagcattgaccacgaaccatggtcctttggtaaagagtgtgaggaagtctgtcgccttgcgctactaagacggtaccggctactgccacatatctacactcttttttaccactcacatacaaagggtattccagttgctactccagttttctttgctgatacacaagaccctgaactgaggaaagttgagacttcctttctccttggaccactcttagtttgtgcaagcactttacctaataaaggagctcatgaatatgcacataagttaccgaagggcatatggttgtcttttgattttgcggattcacaccctgatctgccggtgctgtatctacaaggtggagcaattcttcctgtaggtcttcctattaagcatgttagtgaagcaagtttggaggatgacctgtcactaattatcgcattgaatgaaaatggtaaagctgaaggtgttctctttgaagatgcaggagatggatatgcattcacacagggagactatcttttgacatattatattgctgaactccactcatcagtggttactgtcaaaatcttaaaatctgaagggtcatggaagagaccaaaacgaaatctgaaaataaatatattgcttggtggaggtgctatgataagtacagatggtgttgatggtgaagtaatacaccttacaatgccttctgaatctgtagtgtcaagcttagttgcaaccagcgaatttgagcacaagaaacgaatggagatgattcagcctatacctgatatagaagagccatcggggcaggaaggtgctgagctatcaaaaatacctgttgatttgaaaagtggagactggttccttaagattgtaccatggattggaggccgtattatatcgatggcccatattccttctgattcccagtggcttcacagcagaattgagataaatggttatgaagaatacagtggggctgaatataggtctgctggttgcacagaagagtacaaagtcatcaggaggcaccttgaacaatctggagaggaggaatctatttgtatggaaggagacattggtggtggtctggttctccagcgccagatatccattttgaaggacaacccaaagattgttcagatcgactccagcattcaggcaagaagtgtaggagctggttctggtgggttttcaaggttggtctgtttacgagttcatcctacattcaccctgctgcacccaactgaggtagtagttgctttcacggccatcaatggttcaaagcaagagatctccccggaggcaggagaaataacattcgagggagacctcaaacccaacggagaatggatgctagtggacaagtgtgtcgggctgagcttggtgaaccggtttaatcccagggaggttagcaaatgctttgtgcactggggaactggtgatgtgaacatggagctctggtcagaggaaagaccggtgtctaatgagacgccgttgaggatttgccaccagtatgaggtgcagcaaacaacctaaacacctgcccgaagagcagaaataaaaataccaatttggaggatacttcagttgcttgcacttgttttacggtctctgtattgacggtcgcgcaccataacttccatggtattttggagtcgtgtcgttagtcattaccctcttggaggactttgggtctgctgaaaacatggttactcagcaatatctgctactgttcacgactgacattcaaagggttactcagcaatatatggataaaatttgtgttaaagataagttgtgtcgtgtgggttgagttatgtgtgttgtgttgtgctgtaccttcttctatctattaatggaaagatacgtagatctcctgcgtattcgagaaaaaaaactatatggataaaattttatgaaacatcgtaagtgtgaaagaaaaaattaagaatgacg

SEQ ID NO: 26365 - DNA, 3572 bp, Zea Mays
aggatttcttcccctcgggatccccggtcaccaaatcagccctaaacaatcccgaatccacgcccgcacggccggccgcgctgtcctttgtacaagaggagatgggatggtcgccacggcccccgcccatcacccgcagcaccgcatcactccgcctcgtcccccacttctcgcacttccgcttcagcttccaccgtgcccaagagtcacgaggcggcggcgggtcacgccgacgtactctcaggtgctgcggtgggactgcccctgctgctgccgcgggggcggcggaggggaggatggccgcggcgacggcggcggacatggtgtgggtgagggtgcttgaggatggcgtgttccggttcgacgcgtcggaggcggcgcgcgccgccgcggggcccagcctctcgttcgcggacccgcggcggcgggaggcgccgcatgacggggccgacatgcccgccgttgtcccggtatgcgaggtcgcggcggggggatcccagaaggtcgtgataaagcttcctcctgggacatctttctatggtactggagaagcgagtggcccacttgaacggactgggaaacgagttttcacatggaatacagatgcatggggttttgggccaggaaccacttcgttgtaccagtcacacccttgggttttggctgtcctccctgatggaaaagcattgggtgtccttgctgataccactcggcgttgtgagattgatttgcgacaagaatcaactataaagttctctgccttatctgcctaccctgtcatcacttttgggccatttaatactccagctgatgtcatgacatctttgtcgcatgcaattggtactgtgtccatgccgccaaaatggtcacttggctatcatcaatgtcgttggagctatgattcttctgagaaagtactcaaggttgttaggacatttagggagaaagacattccttgtgatgttgtctggatggatattgactatatggatggttttaggtgcttcacgtttgatagtatccgattccctgatccaatatcaatggtagatgatctccattccattggttgcaaagcaatctggatgcttgacccagggatcaagaaggaggagggttactttgtttatgatagtggctcaaaaagcgatgtttggattcaaaaggcagatggcagtccattcgttggggaggtgtggcctggtgattgtgttttccctgactatacatctgaaaaaacacgagcttggtgggctagtttggtaaaggacttcatctctattggtgttgatggaatatggaatgatatgaatgaacctgctgttttcaaaactaccacgaagacaatgcctgaaagcaatattcataggggagatgctgatattggtggtgttcaaaatcattcatactatcacaatgtctacggaatgctaatggcaagatctacttataaaggaatggaaatgggcaatgcagctaaacgaccatttgttcttacacgagctggttttattggaagtcagcgttatgctgcaacatggactggtgataatctttcaaattgggagcatctgcacatgagtctaccaatggttcttcagttgggtctcagtggtcaaccattgtcaggtcctgatattggtggttttgctggaaatgctactccaaaactttttggaagatggatgggtgtgggtgcattgtttccattttcacgtggccatacagaaactggaagcattgaccacgaaccatggtcctttggtaaagagtgtgaggaagtctgtcgccttgcgctactaagacggtaccggctactgccacatatctacactcttttttaccactcacatacaaagggtattccagttgctactccagttttctttgctgatacacaagaccctgaactgaggaaagttgagacttcctttctccttggaccactcttagtttgtgcaagcactttacctaataaaggagctcatgaatatgcacataagttaccgaagggcatatggttgtcttttgattttgcggattcacaccctgatctgccggtgctgtatctacaaggtaaagctgaaggtgttctctttgaagatgcaggagatggatatgcattcacacagggagactatcttttgacatattatattgctgaactccactcatcagtggttactgtcaaaatcttaaaatctgaagggtcatggaagagaccaaaacgaaatctgaaaataaatatattgcttggtggaggtgctatgataagtacagatggtgttgatggtgaagtaatacaccttacaatgccttctgaatctgtagtgtcaagcttagttgcaaccagcgaatttgagcacaagaaacgaatggagatgattcagcctatacctgatatagaagagccatcggggcaggaaggtgctgagctatcaaaaatacctgttgatttgaaaagtggagactggttccttaagattgtaccatggattggaggccgtattatatcgatggcccatattccttctgattcccagtggcttcacagcagaattgagataaatggttatgaagaatacagtggggctgaatataggtctgctggttgcacagaagagtacaaagtcatcaggaggcaccttgaacaatctggagaggaggaatctatttgtatggaaggagacattggtggtggtctggttctccagcgccagatatccattttgaaggacaacccaaagattgttcagatcgactccagcattcaggcaagaagtgtaggagctggttctggtgggttttcaaggttggtctgtttacgagttcatcctacattcaccctgctgcacccaactgaggtagtagttgctttcacggccatcaatggttcaaagcaagagatctccccggaggcaggagaaataacattcgagggagacctcaaacccaacggagaatggatgctagtggacaagtgtgtcgggctgagcttggtgaaccggtttaatcccagggaggttagcaaatgctttgtgcactggggaactggtgatgtgaacatggagctctggtcagaggaaagaccggtgtctaatgagacgccgttgaggatttgccaccagtatgaggtgcagcaaacaacctaaacacctgcccgaagagcagaaataaaaataccaatttggaggatacttcagttgcttgcacttgttttacggtctctgtattgacggtcgcgcaccataacttccatggtattttggagtcgtgtcgttagtcattaccctcttggaggactttgggtctgctgaaaacatggttactcagcaatatctgctactgttcacgactgacattcaaagggttactcagcaatatatggataaaatttgtgttaaagataagttgtgtcgtgtgggttgagttatgtgtgttgtgttgtgctgtaccttcttctatctattaatggaaagatacgtagatctcctgcgtattcgagaaaaaaaactatatggataaaattttatgaaacatcgtaagtgtgaaagaaaaaattaagaatgacg

SEQ ID NO: 26366 - DNA, 4053 bp, Zea Mays
gtttaaaaaaatgtttgatagagcttgagctgtagctttttttttccagataaaagcgagagccaaattccagccaaatcggtgtagaaccaaataccccctaatcaaccatggcccttcgcattaagagctaatttggtgattagggatccctaggggatccatggggaagtaattccctcgcaattcaattttgaatagcaagaggatttcttcccctcgggatccccggtcaccaaatcagccctaaacaatcccgaatccacgcccgcacggccggccgcgctgtcctttgtacaagaggagatgggatggtcgccacggcccccgcccatcacccgcagcaccgcatcactccgcctcgtcccccacttctcgcacttccgcttcagcttccaccgtgcccaagagtcacgaggcggcggcgggtcacgccgacgtactctcaggtgctgcggtgggactgcccctgctgctgccgcgggggcggcggaggggaggatggccgcggcgacggcggcggacatggtgtgggtgagggtgcttgaggatggcgtgttccggttcgacgcgtcggaggcggcgcgcgccgccgcggggcccagcctctcgttcgcggacccgcggcggcgggaggcgccgcatgacggggccgacatgcccgccgttgtcccggtatgcgaggtcgcggcggggggatcccagaaggtcgtgataaagcttcctcctgggacatctttctatggtactggagaagcgagtggcccacttgaacggactgggaaacgagttttcacatggaatacagatgcatggggttttgggccaggaaccacttcgttgtaccagtcacacccttgggttttggctgtcctccctgatggaaaagcattgggtgtccttgctgataccactcggcgttgtgagattgatttgcgacaagaatcaactataaagttctctgccttatctgcctaccctgtcatcacttttgggccatttaatactccagctgatgtcatgacatctttgtcgcatgcaattggtactgtgtccatgccgccaaaatggtcacttggctatcatcaatgtcgttggagctatgattcttctgagaaagtactcaaggttgttaggacatttagggagaaagacattccttgtgatgttgtctggatggatattgactatatggatggttttaggtgcttcacgtttgatagtatccgattccctgatccaatatcaatggtagatgatctccattccattggttgcaaagcaatctggatgcttgacccagggatcaagaaggaggagggttactttgtttatgatagtggctcaaaaagcgatgtttggattcaaaaggcagatggcagtccattcgttggggaggtgtggcctggtgattgtgttttccctgactatacatctgaaaaaacacgagcttggtgggctagtttggtaaaggacttcatctctattggtgttgatggaatatggaatgatatgaatgaacctgctgttttcaaaactaccacgaagacaatgcctgaaagcaatattcataggggagatgctgatattggtggtgttcaaaatcattcatactatcacaatgtctacggaatgctaatggcaagatctacttataaaggaatggaaatgggcaatgcagctaaacgaccatttgttcttacacgagctggttttattggaagtcagcgttatgctgcaacatggactggtgataatctttcaaattgggagcatctgcacatgagtctaccaatggttcttcagttgggtctcagtggtcaaccattgtcaggtcctgatattggtggttttgctggaaatgctactccaaaactttttggaagatggatgggtgtgggtgcattgtttccattttcacgtggccatacagaaactggaagcattgaccacgaaccatggtcctttggtaaagagtgtgaggaagtctgtcgccttgcgctactaagacggtaccggctactgccacatatctacactcttttttaccactcacatacaaagggtattccagttgctactccagttttctttgctgatacacaagaccctgaactgaggaaagttgagacttcctttctccttggaccactcttagtttgtgcaagcactttacctaataaaggagctcatgaatatgcacataagttaccgaagggcatatggttgtcttttgattttgcggattcacaccctgatctgccggtgctgtatctacaaggtggagcaattcttcctgtaggtcttcctattaagcatgttagtgaagcaagtttggaggatgacctgtcactaattatcgcattgaatgaaaatgttctccaaacctggggctaagtgctgcagtccaactattgttagcactgaaaacaacacactccttgcgaacacacaagtgagcgaaccacacgcttctgctacgatctacataacaaggagagatgccgaagcaccactcagcatggcttctgtcgccacaacaagctgtgacctgctggtaaagctgaaggtgttctctttgaagatgcaggagatggatatgcattcacacagggagactatcttttgacatattatattgctgaactccactcatcagtggttactgtcaaaatcttaaaatctgaagggtcatggaagagaccaaaacgaaatctgaaaataaatatattgcttggtggaggtgctatgataagtacagatggtgttgatggtgaagtaatacaccttacaatgccttctgaatctgtagtgtcaagcttagttgcaaccagcgaatttgagcacaagaaacgaatggagatgattcagcctatacctgatatagaagagccatcggggcaggaaggtgctgagctatcaaaaatacctgttgatttgaaaagtggagactggttccttaagattgtaccatggattggaggccgtattatatcgatggcccatattccttctgattcccagtggcttcacagcagaattgagataaatggttatgaagaatacagtggggctgaatataggtctgctggttgcacagaagagtacaaagtcatcaggaggcaccttgaacaatctggagaggaggaatctatttgtatggaaggagacattggtggtggtctggttctccagcgccagatatccattttgaaggacaacccaaagattgttcagatcgactccagcattcaggcaagaagtgtaggagctggttctggtgggttttcaaggttggtctgtttacgagttcatcctacattcaccctgctgcacccaactgaggtagtagttgctttcacggccatcaatggttcaaagcaagagatctccccggaggcaggagaaataacattcgagggagacctcaaacccaacggagaatggatgctagtggacaagtgtgtcgggctgagcttggtgaaccggtttaatcccagggaggttagcaaatgctttgtgcactggggaactggtgatgtgaacatggagctctggtcagaggaaagaccggtgtctaatgagacgccgttgaggatttgccaccagtatgaggtgcagcaaacaacctaaacacctgcccgaagagcagaaataaaaataccaatttggaggatacttcagttgcttgcacttgttttacggtctctgtattgacggtcgcgcaccataacttccatggtattttggagtcgtgtcgttagtcattaccctcttggaggactttgggtctgctgaaaacatggttactcagcaatatctgctactgttcacgactgacattcaaagggttactcagcaatatatggataaaatttgtgttaaagataagttgtgtcgtgtgggttgagttatgtgtgttgtgttgtgctgtaccttcttctatctattaatggaaagatacgtagatctcctgcgtattcgagaaaaaaaactatatggataaaattttatgaaacatcgtaagtgtgaaagaaaaaattaagaatgacg

SEQ ID NO: 26367 - DNA, 835 bp, Zea Mays
ggcttctgtcgccacaacaagctgtgacctgctggtaaagctgaaggtgttctctttgaagatgcaggagatggatatgcattcacacagggagactatcttttgacatattatattgctgaactccactcatcagtggttactgtcaaaatcttaaaatctgaagggtcatggaagagaccaaaacgaaatctgaaaataaatatattgcttggtggaggtgctatgataagtacagatggtgttgatggtgaagtaatacaccttacaatgccttctgaatctgtagtgtcaagcttagttgcaaccagcgaatttgagcacaagaaacgaatggagatgattcagcctatacctgatatagaagagccatcggggcaggaaggtgctgagctatcaaaaatacctgttgatttgaaaagtggagactggttccttaagattgtaccatggattggaggccgtattatatcgatggcccatattccttctgattcccagtggcttcacagcagaattgagataaatggttatgaagaatacagtggggctgaatataggtctgctggttgcacagaagagtacaaagtcatcaggaggcaccttgaacaatctggagaggaggaatctatttgtatggaaggagacattggtggtggtctggttctccagcgccagatatccattttgaaggacaacccaaagattgttcagatcgactccagcattcaggcaagaagtgtaggagctggttctggtgggttttcaaggaattgactgtcaaagttttaatgtgtttgagtgtttgcaactcaaaatgatactcttctgtatt

SEQ ID NO: 26368 - DNA, 832 bp, Zea Mays
gaggaccagatgttcgtatacttcatccaaggtaaagctgaaggtgttctctttgaagatgcaggagatggatatgcattcacacagggagactatcttttgacatattatattgctgaactccactcatcagtggttactgtcaaaatcttaaaatctgaagggtcatggaagagaccaaaacgaaatctgaaaataaatatattgcttggtggaggtgctatgataagtacagatggtgttgatggtgaagtaatacaccttacaatgccttctgaatctgtagtgtcaagcttagttgcaaccagcgaatttgagcacaagaaacgaatggagatgattcagcctatacctgatatagaagagccatcggggcaggaaggtgctgagctatcaaaaatacctgttgatttgaaaagtggagactggttccttaagattgtaccatggattggaggccgtattatatcgatggcccatattccttctgattcccagtggcttcacagcagaattgagataaatggttatgaagaatacagtggggctgaatataggtctgctggttgcacagaagagtacaaagtcatcaggaggcaccttgaacaatctggagaggaggaatctatttgtatggaaggagacattggtggtggtctggttctccagcgccagatatccattttgaaggacaacccaaagattgttcagatcgactccagcattcaggcaagaagtgtaggagctggttctggtgggttttcaaggaattgactgtcaaagttttaatgtgtttgagtgtttgcaactcaaaatgatactcttctgtatt

SEQ ID NO: 26369 - DNA, 2379 bp, Zea Mays
cttcccctcgggatccccggtcaccaaatcagccctaaacaatcccgaatccacgcccgcacggccggccgcgctgtcctttgtacaagaggagatgggatggtcgccacggcccccgcccatcacccgcagcaccgcatcactccgcctcgtcccccacttctcgcacttccgcttcagcttccaccgtgcccaagagtcacgaggcggcggcgggtcacgccgacgtactctcaggtgctgcggtgggactgcccctgctgctgccgcgggggcggcggaggggaggatggccgcggcgacggcggcggacatggtgtgggtgagggtgcttgaggatggcgtgttccggttcgacgcgtcggaggcggcgcgcgccgccgcggggcccagcctctcgttcgcggacccgcggcggcgggaggcgccgcatgacggggccgacatgcccgccgttgtcccggtatgcgaggtcgcggcggggggatcccagaaggtcgtgataaagcttcctcctgggacatctttctatggtactggagaagcgagtggcccacttgaacggactgggaaacgagttttcacatggaatacagatgcatggggttttgggccaggaaccacttcgttgtaccagtcacacccttgggttttggctgtcctccctgatggaaaagcattgggtgtccttgctgataccactcggcgttgtgagattgatttgcgacaagaatcaactataaagttctctgccttatctgcctaccctgtcatcacttttgggccatttaatactccagctgatgtcatgacatctttgtcgcatgcaattggtactgtgtccatgccgccaaaatggtcacttggctatcatcaatgtcgttggagctatgattcttctgagaaagtactcaaggttgttaggacatttagggagaaagacattccttgtgatgttgtctggatggatattgactatatggatggttttaggtgcttcacgtttgatagtatccgattccctgatccaatatcaatggtagatgatctccattccattggttgcaaagcaatctggatgcttgacccagggatcaagaaggaggagggttactttgtttatgatagtggctcaaaaagcgatgtttggattcaaaaggcagatggcagtccattcgttggagaatatgcctcacatagtctacattcaggggaggtgtggcctggtgattgtgttttccctgactatacatctgaaaaaacacgagcttggtgggctagtttggtaaaggacttcatctctattggtgttgatggaatatggaatgatatgaatgaacctgctgttttcaaaactaccacgaagacaatgcctgaaagcaatattcataggggagatgctgatattggtggtgttcaaaatcattcatactatcacaatgtctacggaatgctaatggcaagatctacttataaaggaatggaaatgggcaatgcagctaaacgaccatttgttcttacacgagctggttttattggaagtcagcgttatgctgcaacatggactggtgataatctttcaaattgggagcatctgcacatgagtctaccaatggttcttcagttggtaattgaaacatttgttctaatatccaaagttgttccttgaaacttcgagggtgtctagtttttcctactgaaaatatgttccatgtggcccctaaaagaagattgttctagctgttgggttgatggtgcaaatgcttattcatgacattttttgtgactagttattttaacatttaatttattatttgatattcggtttcactgtacgtgctgtcctgtcatcctgtgatgtgaaggcaactaagtttgtcaggacacaaaaatgctaggggtaaggaccaagatcttctgtattagttaaatttggtttctcaattagttgtgctaatttggttcctcatttagttgtgctaatttggttcctcaattagttgtgctctgtcacatttctatcgttcttccagaaagttttaaggaggttgttcttgagatattcatgtttataaactcaaattgttagtggccaaattttattctcagagtggttcatctgacaagatgtgagatttaagcatgcactttcacgtgtctaatgatctaacaatatggttatctgatcagggtctcagtggtcaaccattgtcaggtcctgatattggtggttttgctggaaatgctactccaaaactttttggaagatggatgggtgtgggtgcattgtttccattttcacgtggccatacagaaactggaagcattgaccacgaaccatggtcctttggtaaagaggctagatacgttcataggtag

SEQ ID NO: 26370 - DNA, 1936 bp, Zea Mays
ccaaattccagccaaatcggtgtagaaccaaataccccctaatcaaccatggcccttcgcattaagagctaatttggtgattagggatccctaggggatccatggggaagtaattccctcgcaattcaattttgaatagcaagaggatttcttcccctcgggatccccggtcaccaaatcagccctaaacaatcccgaatccacgcccgcacggccggccgcgctgtcctttgtacaagaggagatgggatggtcgccacggcccccgcccatcacccgcagcaccgcatcactccgcctcgtcccccacttctcgcacttccgcttcagcttccaccgtgcccaagagtcacgaggcggcggcgggtcacgccgacgtactctcaggtgctgcggtgggactgcccctgctgctgccgcgggggcggcggaggggaggatggccgcggcgacggcggcggacatggtgtgggtgagggtgcttgaggatggcgtgttccggttcgacgcgtcggaggcggcgcgcgccgccgcggggcccagcctctcgttcgcggacccgcggcggcgggaggcgccgcatgacggggccgacatgcccgccgttgtcccggtatgcgaggtcgcggcggggggatcccagaaggtcgtgataaagcttcctcctgggacatctttctatggtactggagaagcgagtggcccacttgaacggactgggaaacgagttttcacatggaatacagatgcatggggttttgggccaggaaccacttcgttgtaccagtcacacccttgggttttggctgtcctccctgatggaaaagcattgggtgtccttgctgataccactcggcgttgtgagattgatttgcgacaagaatcaactataaagttctctgccttatctgcctaccctgtcatcacttttgggccatttaatactccagctgatgtcatgacatctttgtcgcatgcaattggtactgtgtccatgccgccaaaatggtcacttggctatcatcaatgtcgttggagctatgattcttctgagaaagtactcaaggttgttaggacatttagggagaaagacattccttgtgatgttgtctggatggatattgactatatggatggttttaggtgcttcacgtttgatagtatccgattccctgatccaatatcaatggtagatgatctccattccattggttgcaaagcaatctggatgcttgacccagggatcaagaaggaggagggttactttgtttatgatagtggctcaaaaagcgatgtttggattcaaaaggcagatggcagtccattcgttggggaggtgtggcctggtgattgtgttttccctgactatacatctgaaaaaacacgagcttggtgggctagtttggtaaaggacttcatctctattggtgttgatggaatatggaatgatatgaatgaacctgctgttttcaaaactaccacgaagacaatgcctgaaagcaatattcataggggagatgctgatattggtggtgttcaaaatcattcatactatcacaatgtctacggaatgctaatggcaagatctacttataaaggaatggaaatgggcaatgcagctaaacgaccatttgttcttacacgagctggttttattggaagtcagcgttatgctgcaacatggactggtgataatctttcaaattgggagcatctgcacatgagtctaccaatggttcttcagttgggtctcagtggtcaaccattgtcaggtcctgatattggtggttttgctggaaatgctactccaaaactttttggaagatggatgggtgtgggtgcattgtttccattttcacgtggccatacagaaactggaagcattgaccacgaaccatggtcctttggtaaagaggctagatacgttcataggtag

SEQ ID NO: 26371 - DNA, 842 bp, Zea Mays
cgccgccgccgtgcccgattccgcgttcgcctgctcatcttcgatgcaggccacgaacgcccgcttcttccccattgcgatgacgtgtcctctccccttcctcttctttagtgagttggcagtttcctctcttccccagcgccattaatggctaccgagctcttactctcccctgtcgatccgtctccccgccgtctccattaatagcgtattcaagcttccgtttctgtcaattacatgctgtaatagccttaatttcctcccccgcctataaatggagcccatgacggagcctcctcctgctctccccttcgctgccgtcgtgccaaaaatttcgccacgccgaatctccactcgccctactgctcaaggcccccacagttctctgctagtgctgttcgtcgtgcacctcagtgctcgccgccgattccctgtctgcatcgaactcgtcccctgccgagcccctgctgctgcgccatcctgtacgcccacgctcgcgtcgtgctgccacgctcgactgcgttattcgccgtcgatctggttgctcgccgatgtcccactagagctcgcaccctcgtcgtgtcgtgcctcgccgagcctctacgccctcagtcgtcctctgctcgcgtcgtcaatcgtcacagcgaagctgtccagtttccgacgcccatattgattttctgaagccgcaatccagttccctagcggcgaggattctgcccctgctcctcttctctacaaacgacagtaagtgattgatctagtagttaagaatcaagatctattcctatccgtggaagaacctcaagttttcaataagcaaggcaagtggacttctccct

SEQ ID NO: 26372 - DNA, 1102 bp, Zea Mays
cttcccctcgggatccccggtcaccaaatcagccctaaacaatcccgaatccacgcccgcacggccggccgcgctgtcctttgtacaagaggagatgggatggtcgccacggcccccgcccatcacccgcagcaccgcatcactccgcctcgtcccccacttctcgcacttccgcttcagcttccaccgtgcccaagagtcacgaggcggcggcgggtcacgccgacgtactctcaggtgctgcggtgggactgcccctgctgctgccgcgggggcggcggaggggaggatggccgcggcgacggcggcggacatggtgtgggtgagggtgcttgaggatggcgtgttccggttcgacgcgtcggaggcggcgcgcgccgccgcggggcccagcctctcgttcgcggacccgcggcggcgggaggcgccgcatgacggggccgacatgcccgccgttgtcccggtatgcgaggtcgcggcggggggatcccagaaggtcgtgataaagcttcctcctgggacatctttctatggtactggagaagcgagtggcccacttgaacggactgggaaacgagttttcacatggaatacagatgcatggggttttgggccaggaaccacttcgttgtaccagtcacacccttgggttttggctgtcctccctgatggaaaagcattgggtgtccttgctgataccactcggcgttgtgagattgatttgcgacaagaatcaactataaagttctctgccttatctgcctaccctgtcatcacttttgggccatttaatactccagctgatgtcatgacatctttgtcgcatgcaattggtactgtgtccatgccgccaaaatggtcacttggctatcatcaatgtcgttggagctatgattcttctgagaaagtactcaaggttgttaggacatttagggagaaagacattccttgtgatgttgtctggatggatattgactatatggatggttttaggtgcttcacgtttgatagttgattgatctagtagttaagaatcaagatctattcctatccgtggaagaacctcaagttttcaataagcaaggcaagtggacttctccct

SEQ ID NO: 26373 - DNA, 1561 bp, Zea Mays
ctccgtggcggcgccctccctggcggccgtgaccctccctctgttggttttccattccggcgacgctcactctcatccttggtgctgatcctcagcatcctgctataccagcggatctcgtgtttccttgacgaacttgtgaacaaggcagcagcatggttcagtttggaaacatgtcatcaaagaagatagagttggatcacaaggacatggtccatgattctgctatcgactactatggcaagcgccttgccactgcctcctcagactctaccgtgaagatcatcaacattggcgcggcaaatgccccatcccaggtccttgcaacgcttagtggccactatggtcctgtgtggcgtgttgcttgggcccatccaaagtatggcgctatccttgcttcgtgcagttatgatggccgtgtcattatttggaaagaggatgcacgaggcaattggtctcaagtccatgtgttcagtgacaacaagtcatctgtcaactccattgcatgggctccgtatgaggttgggctttgccttgcctgtgcatcttcaggtggaagaatatccatcttgacgatgcgagctgatgggggttgggatactgcaaccattgagcgagcacatcctgttggtgcgactgccatatcctgggctcctgcaacagattcaatagctggcacaggggagtttgtttacaagcttgtctcaggagggtttgactcggttgttaaggtctggggattcaacaatggtagctggaagctggagagtgctcttatctctgacatgcacacagattgtgtgagggatgtcgcgtgggcaccagttttgggattggccaaatcgaccattgccagcgcttcacaagacgggaaggttgtcatctggaccaggggaaaggatggagacaagtgggagcggaagctcatgcgtgactttggttcccctgtctggagggtgtcctggtccttgactgggaacatattatccatagctgctggtgggaacaatataaccctctggaaggaagggtcagatgggcaatgggaggaggtgatgaaggttgaaacataggatgtccgtcaagttttctgaagataaagtgtgttttactagtgtttcctgcagatccatgtttcgacgtggacaaagtttgccgttgtgcttcgacagaacatccaattcacttattttggtactttctgacgaggcaattatactcttggatggatcccgtgcgctttagagtggtaatttcagatcggtgagcctgtttagttctgtatatcctcaacttcttttttggtggaacatcagagctgctgcaagtaatgttatctaataagcactgtagcaatttctattgctgtttgtgctgcggctactgtagcgctgctctggtgcgcgccatcgtttgagttttattgatttgttgtgcaagcataacatagcaagattctataattcgttccgcgtgtcattccggtgatagatttatgacatttgaggaagggatatgtttgtaataaaaaagtaattcaatctagaacatataaaaaaca

SEQ ID NO: 26374 - DNA, 1805 bp, Zea Mays
ggagggaatcaaccaaccagaagcagccacggtccacggggggacggaacgggaagctgaaccaaacgtgcaaacagaacggaacctctcggctccttcctcctctggtttgctgctgtcgcccgccacggcgcctcctccacttccagatcttcccgccgcccccaaaatagcgcccaccaaaaccctaccctgcccgcccgttccctctcatccctcgcggcccccgcccccgtccttccgccgccggactaataaaccctagccccaccgccgccgccatggcgggcccgtccggcgcctcttcctcctcgcgcggcgccggcgtcgtcgtcgaccgcttctacagcccgccccacgtgcgccgccagcagcaggaggagcagctgcagcggctcaagggcctggcccaggggcagcgcccgtcgtccccagcggcggggacgctcacgcccagggccgccaagcagaagacgccaccggctgagatgcctgtcccggtcaaggagtccgagaggcgggccgacgcgtcctccaagcccgtgtcagccccggcctacaccgccaaggcggctgcgacggctgacggggtgacgaccccgccgccgtcgcccgcgggactggatgaggctgggaatctcgacaggttcctcagctccaccacgccatctgtgcccgtgcactacttgcccaagcatgaggggatggaggatgggtgatgttacaaattctcgaccatatttctgccttggagatctctgggaggctttcaaggagtggagcttttacggggctggtgtcccccttgtcttaagtggaggtgaatctgtgattcaatactatgtgccatacctttccgctatacagctgtacgcagacccttcaaagtttcaatcgaagatcagcgaaggtagcagtgaaactgatgttaaccgattaagaagctcaaccgtggaaactctatgtcgattggagggtggctttcaaagggatggtgatgaaatgcactcaccatcgactcgcccaattttcgaatatcttgagacagatccaccatttggtagagagcctttaacagataaggtatcagttcttgcaagtaaatttccagatttgaagacattcagcagttgtgacctgctgccaaccagttggatgtctgttgcatggtaccctatctatagaatcccaactggaccaacactcaaggatttggatgcatgtttcttgacatttcattacttatcaacacctaccaaggatactgatcccagtacaccagcatgccccagatttgggggccttaattgcaatatggacgccgctggtaaactaacattgcccgtctttggactggcgtcatacaaattgaacagctctatttggtcgtcaaataggcctgaggagcatcagctcgtagcttcgttgatgcagacagcagatgactggcttcgccatcgccaagtgtaccacccagacttccgattctttcttacccattacaacacagcattgagatgacatgagatgatcgcatctcgctgtaaattgtctttattagtgtgttattatatgtggttggctgagccgggctacctgtaacactatgttgttgatcgcgtaacgtagcgcttctctgaacttttttggtatggttcagtagttcaagccagacagctaatttgtaacttctccaataattcttttgatgtaggtaatcttgtgggagtcacattatggagatctgtaaaacagaaactgatggttataatttttagaaacttatagactttacattgtttatc

SEQ ID NO: 26375 - DNA, 2035 bp, Zea Mays
ttttttcatgcaaattttgggctttaaatattggtacaaagatatcttacaatatatttaccatgcaccatctcatttatccactttacttttttttggactttacacagttttattaaaagaaatagataaaaccggtgtctcaacactcataggtcatagcacgaggcatgagcacgcgtttttccgttcatgcgacttcgcttggtgcctgtagcagcagggatttgtagtcttgtagacagacacgcacacggggtggccagtgcagacgtgaagtggtgcatggagctatggagggaatcaaccaaccagaagcagccacggtccacggggggacggaacgggaagctgaaccaaacgtgcaaacagaacggaacctctcggctccttcctcctctggtttgctgctgtcgcccgccacggcgcctcctccacttccagatcttcccgccgcccccaaaatagcgcccaccaaaaccctaccctgcccgcccgttccctctcatccctcgcggcccccgcccccgtccttccgccgccggactaataaaccctagccccaccgccgccgccatggcgggcccgtccggcgcctcttcctcctcgcgcggcgccggcgtcgtcgtcgaccgcttctacagcccgccccacgtgcgccgccagcagcaggaggagcagctgcagcggctcaagggcctggcccaggggcagcgcccgtcgtccccagcggcggggacgctcacgcccagggccgccaagcagaagacgccaccggctgagatgcctgtcccggtcaaggagtccgagaggcgggccgacgcgtcctccaagcccgtgtcagccccggcctacaccgccaaggcggctgcgacggctgacggggtgacgaccccgccgccgtcgcccgcgggactggatgaggctgggaatctcgacaggttcctcagctccaccacgccatctgtgcccgtgcactacttgcccaagaccagcatgaggggatggaggatgggtgatgttacaaattctcgaccatatttctgccttggagatctctgggaggctttcaaggagtggagcttttacggggctggtgtcccccttgtcttaagtggaggtgaatctgtgattcaatactatgtgccatacctttccgctatacagctgtacgcagacccttcaaagtttcaatcgaagatcagcgaaggtagcagtgaaactgatgttaaccgattaagaagctcaaccgtggaaactctatgtcgattggagggtggctttcaaagggatggtgatgaaatgcactcaccatcgactcgcccaattttcgaatatcttgagacagatccaccatttggtagagagcctttaacagataaggtatcagttcttgcaagtaaatttccagatttgaagacattcagcagttgtgacctgctgccaaccagttggatgtctgttgcatggtaccctatctatagaatcccaactggaccaacactcaaggatttggatgcatgtttcttgacatttcattacttatcaacacctaccaaggatactgatcccagtacaccagcatgccccagatttgggggccttaattgcaatatggacgccgctggcctgaggagcatcagctcgtagcttcgttgatgcagacagcagatgactggcttcgccatcgccaagtgtaccacccagacttccgattctttcttacccattacaacacagcattgagatgacatgagatgatcgcatctcgctgtaaattgtctttattagtgtgttattatatgtggttggctgagccgggctacctgtaacactatgttgttgatcgcgtaacgtagcgcttctctgaacttttttggtatggttcagtagttcaagccagacagctaatttgtaacttctccaataattcttttgatgtaggtaatcttgtgggagtcacattatggagatctgtaaaacagaaactgatggttataatttttagaaacttatagactttacattgtttatc

SEQ ID NO: 26376 - DNA, 1678 bp, Zea Mays
aaaaaatgacacgatcgcaggagaaaccaaagaaaagttcctttttctttattttcttcgtcctcttgttctcgactcgctgcccactgcgtcacccgaatcccttcgatccaatctccaaaccctaggcagcccgccatcagattgttaggtcctccttccttaaaccgcggcggccggccatgtcccacggcggcggcggcgggagggcgaaagtgacgccgaacctggcggtggacggcgagggcacgcggacgctcaatctcaccgtgctgcagcgcctcgaccacgccgttgaggacatcctcatcaccgcggctcacgtcacgctctacgacttcgacaccgacatcaaccagtggagccggaaggacgtggaggggtcgctctttgtcgtcaagaggaatgctcaacccagattccagttcattgtcatgaatcgcaggaatacagataatctagttgaagatcttttgggagattttgaataccaactacaagctccttatataatgtaccgcaatgctgctcaagaagttataggaatctggttttacaattcccaggagtgtcaacaggattctgaatgctttctcaaaggtggcaccaaagccgaaaattccttctgtccaaagtgaatttgaagagctggaagcagcaccttcgttggttgatggtcctctggaagcgcaaacgtcaaatatcatgtcaactactactcacgttcaagaggatcctttatctgcatttttcagtgcagctgcaaatgttggtggcaactctgctgtagctgttgcaaggcaaccaattcagccttttggtgctactccggtggctgcacatgcagctactagtatcactacaacacaatcgccaggcttgcattatttgcttccttcacaagcctcatcggtttctgggaggcctgctgatgctcatggtggcactggttctataggaaggtccacaagccttgtatatccgtcacttttctcaccattgacatcttcacagacgaaaatggtgcacactaattctgcagtaccaactgctccacctcaacatcctcggattgctcagcagccgcaaagtgctcccttgcttcagccttttccgttacctacggcttcatctccaccatatgggactccattacttcaaccgtttccgccacctaatccgtcgccatctcttgcatctgcaccagtcttgagcccagcgctgactagagacaaagtcagagatgcattattgagacttgtggagaatgatgaattcgtcgatttagtctaccgcgagatcatgaacagacagtaatggatttacaaggtcttcaacgattacagttggaggtttgcatgatcgacttgtttgcaggctcgtgcatgaagaagggcgaagatcgttccctctggccgcagactgctgatctgtgcggtcagtgaatgctgctgcttttgcatagaactgcaagatgttagtcagtcatttaaccaaatatgcagggcaaagtaacagggaaatcatatatctgggttagggatacaagaggttaacctagtgtttctttctttttgtggaccgagatcacaatccagtatctgtgttagtgagcctatgaccctatataatcaatgttatgtgggctgtcgcattgttgacccccgccaattaagcg

SEQ ID NO: 26377 - DNA, 1687 bp, Zea Mays
aaaaaatgacacgatcgcaggagaaaccaaagaaaagttcctttttctttattttcttcgtcctcttgttctcgactcgctgcccactgcgtcacccgaatcccttcgatccaatctccaaaccctaggcagcccgccatcagattgttaggtcctccttccttaaaccgcggcggccggccatgtcccacggcggcggcggcgggagggcgaaagtgacgccgaacctggcggtggacggcgagggcacgcggacgctcaatctcaccgtgctgcagcgcctcgaccacgccgttgaggacatcctcatcaccgcggctcacgtcacgctctacgacttcgacaccgacatcaaccagtggagccggaaggacgtggaggggtcgctctttgtcgtcaagaggaatgctcaacccagattccagttcattgtcatgaatcgcaggaatacagataatctagttgaagatcttttgggagattttgaataccaactacaagctccttatataatgtaccgcaatgctgctcaagaagttataggaatctggttttacaattcccaggagtgtcaacaggttgcaaatcttttcagcaggattctgaatgctttctcaaaggtggcaccaaagccgaaaattccttctgtccaaagagctggaagcagcaccttcgttggttgatggtcctctggaagcgcaaacgtcaaatatcatgtcaactactactcacgttcaagaggatcctttatctgcatttttcagtgcagctgcaaatgttggtggcaactctgctgtagctgttgcaaggcaaccaattcagccttttggtgctactccggtggctgcacatgcagctactagtatcactacaacacaatcgccaggcttgcattatttgcttccttcacaagcctcatcggtttctgggaggcctgctgatgctcatggtggcactggttctataggaaggtccacaagccttgtatatccgtcacttttctcaccattgacatcttcacagacgaaaatggtgcacactaattctgcagtaccaactgctccacctcaacatcctcggattgctcagcagccgcaaagtgctcccttgcttcagccttttccgttacctacggcttcatctccaccatatgggactccattacttcaaccgtttccgccacctaatccgtcgccatctcttgcatctgcaccagtcttgagcccagcgctgactagagacaaagtcagagatgcattattgagacttgtggagaatgatgaattcgtcgatttagtctaccgcgagatcatgaacagacagtaatggatttacaaggtcttcaacgattacagttggaggtttgcatgatcgacttgtttgcaggctcgtgcatgaagaagggcgaagatcgttccctctggccgcagactgctgatctgtgcggtcagtgaatgctgctgcttttgcatagaactgcaagatgttagtcagtcatttaaccaaatatgcagggcaaagtaacagggaaatcatatatctgggttagggatacaagaggttaacctagtgtttctttctttttgtggaccgagatcacaatccagtatctgtgttagtgagcctatgaccctatataatcaatgttatgtgggctgtcgcattgttgacccccgccaattaagcg

SEQ ID NO: 26378 - DNA, 1273 bp, Zea Mays
ctcgccttctccatcgccatctcgccttcgccttcgccttcttccccacacctttgttctgtgatttaggcagctggaccacacgagcaacaacaaccggggcccgggggtggacacatgatggccgatcccgctgcgaaggttctctaattccctgtcaagctacacatgcaatgccaacccacatggagacgagcctcctcgatcgggcaacccttttccttgaccgactcgtgctgtagacactgtagtgtgtgtgggttattaggtttagctagcactgttactacaaacttttactgagtcaacgggacagaccgatcccctccttttgttaatagccggtaatcaatcagtagcactagcacctaccatcttcaattgaccgtgcatccagggctcgcgggccggttgccatcgccgtcatattcggaggtgaaaacacctgcctccaggaagcactatcagcatatcacatagaaaaatgatcgtcattggtaatcagtaataagattctgataacatgagcacaggcacataacaagtgacattaatgaggaccacatcactgatagtgatgactagtgtaatgttgttcctaacccatcagttaacctttctccatgtaaccaggaatcttctcaactaatcatgtatccaatacaccattatatccagtactttatatttctgaatatatatatttttagaaagcgcaggagagctgtgtttcattgatcaaagaattccaaaaaaaaacatctttacatgaagtaagtttgtaacagatagatgaacaaattatacaattttgaagcaaaacaacaaaaatactcctttgctattatagtactgcttttgagcaggtttctccatactcacaaattaatctcacactgatagtatttataagtgattttatctttctaaatagtaccctaactttttatttttattttttcttaactcctaacgtgaccgtccttgcttgttggatttcttgggatgctccatttggtcatcaaggatattgtcggcaggatcaaagtcaaactgatgctgaaaactgatgtgtgaactgctgcttggtagcagttttttgtctgaaaactgatgctgaaaaactaaaagccacttctctgcctgataggattaaatacaactgctctctttctgtaagcagtattttttttgtttgtcaaaactgaaagcatgcaagcaacttatttgtttgtcaaaacagctgctatatttgtttgtcaaaaatggctgg

SEQ ID NO: 26379 - DNA, 2313 bp, Zea Mays
cggaaacgcatgcgccggcaccggcagtttcaaatggccgtggcctgccaaaccgagcgagcggaggcagccgcgccgacaggcagctggaccacacgagcaacaacaaccggggcccgggggtggacacatgatggccgatcccgctgcgaaggttctctaattccctgtcaagctacacatgcaatgccaacccacatggagacgagcctcctcgatcgggcaacccttttccttgaccgactcgtgctgtagacactgtagtgtgtgtgggttattaggtttagctagcactgttactacaaacttttactgagtcaacgggacagaccgatcccctccttttgttaatagccggtaatcaatcagtagcactagcacctaccatcttcaattgaccgtgcatccagggctcgcgggccggttgccatcgccgtcatattcggaggtgtgtttggtttcctaagtcaatgtttaaatatctactaggtatatggccgtgcgttgcgacggcatacaaattatttgatccaaagttagtatataatgattacatgaaaataaacaatacatattatcatcaactacaaacttatctattggcacgaacactaagcatgacattaataatctcaaacaaatatgatgaataatatacacatttgatatttctagtttgccttagattcataagtcttctcagagccttcgaataagcatcaacaccatatttctgtgtcgcagcagaaacaaacccttgccaaatactcatgccatgacacagcttatgacatctccaccattgagcaacatttggatcggaatgcattgatgctgcagaaacccacatgaactttggaacactatagatggtaaaatactccatacaccgatcaagccacaccactggatcccctcccagatagacaggaaatgaccacttaggtaatacctgtcgatgctcttctgtttgtaccctactctccccctggaactcctactgcttcccctccatacctcaatggtgatcaaatctcttctgatggtctccatcccacatcaaacagagacctaaaacatccaactcatacccccattcacttgctctagaagaagtggcatgcatcttcgctttaacaaagtagtggcatgcatattaactgcattttagctgagaactcattactcctaaatgatatattaactgcagacatattgaagacaggctgtgcgatttacctgactattacaatgtgatttaagtccatttatatcaccattagctctgaaaatttctgctgcattccggtcatctctgtacctgaagaagtattcattctgcaatccaaaacaaatgcgaaggaacttgttcaacttttagagaactaatgagcaaattttaaacactacagaccacatgcttccctataagaaatttgactgtgtaagtgatgacactacttttttgctcgcaggtgaaaacacctgcctccaggaagcactatcagcatatcacatagaaaaatgatcgtcattggtaatcagtaataagattctgataacatgagcacaggcacataacaagtgacattaatgaggaccacatcactgatagtgatgactagtgtaatgttgttcctaacccatcagttaacctttctccatgtaaccaggaatcttctcaactaatcatgtatccaatacaccattatatccagtactttatatttctgaatatatatatttttagaaagcgcaggagagctgtgtttcattgatcaaagaattccaaaaaaaaacatctttacatgaagtaagtttgtaacagatagatgaacaaattatacaattttgaagcaaaacaacaaaaatactcctttgctattatagtactgcttttgagcaggtttctccatactcacaaattaatctcacactgatagtatttataagtgattttatctttctaaatagtaccctaactttttatttttattttttcttaactcctaacgtgaccgtccttgcttgttggatttcttgggatgctccatttggtcatcaaggatattgtcggcaggatcaaagtcaaactgatgctgaaaactgatgtgtgaactgctgcttggtagcagttttttgtctgaaaactgatgctgaaaaactaaaagccacttctctgcctgataggattaaatacaactgctctctttctgtaagcagtattttttttgtttgtcaaaactgaaagcatgcaagcaacttatttgtttgtcaaaacagctgctatatttgtttgtcaaaaatggctgg

SEQ ID NO: 26380 - DNA, 1631 bp, Zea Mays
gtctttttgcaaatacagatctaagttatatatttgaattagatttgtgtcgaaccatggaactataattgtatgctcctctatcatgttcagcaagggaatcaaatcatgtttgacatacatagaagctgttccctggaatgaaaacgaagaggagaagctgaagaacctctttgcaagattcacttttgacgaagcaatgtcccaggatatactggcaagattgcgtccgcacaactggaaaagctcagatgacctcactatacagcttattcaatctgtcactggaagcaccagcactgtggcaagaaaagacatgcaatctttggtaaatggtcttctaagcaaaagttcagtctatcaaaaggactcttcagggctaaacaaggagagtctgtaccagatatgttattcatgtcttgagtcactggttgatctctttgaagaggccagagaaccaacagattatacaggtcagattcttgtagttagagggagtaaaccactgattgagcgagtctctaggcaaacagagaacctcagttggctcttggatattctagtaaacaatgacattgcagaagaatttgtagaactgtgggcgaagcaagacaggctcattaggatgcacgaacaagcgtcagcgatggtcaggtatgagctaagccgaatatcagccgctgtgttcattgcacttggtaaaggaaaagttcagtgtcgtggcaatgtacgaagcctcgtctttcgtggatggttcagcacgatgttgttggattttggctggcttcagcgctgccccaaaggtctagacctaagatcactggaggagaatctagggcgaggcattttaaccctccctctgaggcagcagcaatgtttgtttgaagaatggttccagttctattcgaccaaaggtgctgagtgtccgaaccttattagggctttccaggtatggtggagaaggtctttcgttagatcgtcggtagaacctcaaagacaataatcgatgcaccagaaggtggaacaactgtaccgatgcaatgatgacgaggcggcccgcaccgctggatccgccgatgatggcgacgattaagcttggtataatggcaatgctgcgagtcatcaggttcctcagccactgtctcatcttgatgtccaagaaaccctgagcaaggagccaaacacatgcaaaccgtgcttcaagtataacaatctgtgtacaagtatgtaaatgttggaaagaatatgatattataatctgttagtttaacgatgattgctggctaggacaaatacagatcctctatgcatcttcaacaggccaagaagcgctacctgcatgatgtattgcccagcgtaagtaccagtgatggaagagcttattccacaagccaagagagccacaccatacacaaccgcactgctgttgcctagcacattctgaaatgaaaaataagctggcaattaattaaaactctctggtagtaaacagagccccagagctagtgagtagtgaccaggcagtaaaatcagtaataccctcaggaggaaggacgaggagtccaaggtgatgtcactgcattttgcagagtcatctggtgagacgttgctggagttacagacagttccag

SEQ ID NO: 26381 - DNA, 2881 bp, Zea Mays
atggagcaggagctgctgcagatcctgcggggcctgaaatcgccacgccacctgctgcagacccacgcccagctcctcgcccgcggcctctccgcgagcccgcgcctactcccggtcctcgtctccgccgcgttctccgtctccccctcgtccccgcgccaggccgccgccgcggcgatccttggcgctgccggctccggcgcctccaccgtagcgcacaacaccctcatcgagcgcctcgcagggatcggcggcggcggcggcggcggcggtcgtggttgctccgcggcggacgcgttggcggcctacgctgcgatgcgtgccgcaggggtgtaccccaacgggttcaccttcaccttcctgcttcgcgcgtgcgaatccttgaggcggctgttcctgtgccggtgcgtccatggacagatcgtgaggtgtgggttcgggtccgatgtggtcgtgcagaacgctctcctgaacgtgtactacaagtgcagcgacccgggtgatgttggaatcgctcgccaggtgttcgatgaaatggctaatagagacgtggtttcgtggaactccatagttggtgtgtacatgtcgaatggagacgcagcaggggccatggagttgttcgaggcgatgccagagaggaatgttgtctcctggaacactattgtcgctgcattcacgagggcgggggacatggtgtcagcacgtgctgtgtttgataggatgccgatcagagatgccatctcttggaatctcatgatctcagggtatgcaacaagtggcaatgttgaatctgcatggtcactttttgatattatggatcggaaggatgtagtttcctggactgctatggtctctgcttatgcaaagattggggaactagattcagctagagtgctatttgatcagatgcctgataagaatttggtttcgtggaatgcaatgattacagggtacaaccacaacttgaggtatgatgatgcactgtgcacatttcagcagatgatgcttgagggaagattcatgcctgatgaagcaacattagtaagtgttgtctcagcctgcgctcagctaggcagtgttgaatactgcaactggatcagttcttacattagtaaaagcaacactcatataaccgttgcattaggaaatgcactcgtagatatgtttgcaaaatgtggagatgtaggaagagcacatttagtttttaataaaatgaaaacaagatgtaccattacatggacaacaatgatatctggttttgcttataatggacagtttagagaagccctattggtctacaatgatatgtgcagagaaggagtcacactggatgatacagtctttgttgctgcacttggtgcttgtgctcatggaggtttgttgcaagaaggttggagcatctttaatcaaatggttgagtactgtcgcattgttccaagaatggagcactatggatgcatagtggacctacttggtcgagctgagttgtcagagtatgtcagcacaaagatagttgaaatggaaccttttaattctagttatcaagtgttggtttcaaattgtagtgccctagagggaaggtgggacagtgtgatggatgctcgcagaacaatgcgtgattgcggagttgagaaaacacctggtagtagcttgattcaggtaggaaatgaggtacatgagtttttggctaaagacacaaggcacaagaaaaggaaagaggtatataaaactttggatggtttaatagccctcatcagacatacagatcacacccccttggataagttattgcagccacttgaataacgaagaattctttgagtagctgcaaccttactatgtgaacaataagttccggactaattcctgtgggaggccttttgtctaataggcagtcaagggcagatgggctttgtagccaagattgtgattagatcaacaattatgatttaatggcatccatggccagtagaggatactctaggataggttgagttattcactatcttgccaggttggttgtgtgcagtgcacttgacatgtgaatgaaagctgattcagttgtcaattatgatctagaatgtgaaatggggggccatcaaatgaattgcagttgcagctggggaattgcattcgtctctcaggactcgtgtttgcagttttgatatatttaacatgcttccctcaaaaaattgtagcaacttcgatagaattgagtcccttatgctgcagctattgagcatatcttattttggtaaagttaaacgagtttgtttgcaacgtgctttgatctttaaagtctagaatttttccggaacaaacttataaatcctccatgtgcccagttcttcagttgacatgctagatttctgaatgcagttgctatcttctggtcccataaataatagtactcacatcacatatgctggaacccagaagcatcacatatgccccaaccacccaagagtactacagtgctgggtgctcctcaactaagtgcggtggtacttcttctgtttctcatgtgcgcctaggaccatgcatggacagccttcagagcaactggcggtgaccacaagagagagaactgcctccgtgcatagttgatggctcgacgtcctaaaggggaggaaagcgtggttgatgtctctaaattttggtaagacaagcttggcctcttgttgccatggttgagttgcctacctgcctggacaagaggcgtcaacgagtgtgtcaactgtcaactcttccatgtgaatccctctgtttcctggccagtccttggatccagaaggacactggctcttcaattatcttaatggattatgattgcatttccgttcgttgcaattatccctttgtttcacaaagctgaagcagc

SEQ ID NO: 26382 - DNA, 2525 bp, Zea Mays
ctcgcccgcgccagcccgccgatggagcaggagctgctgcagatcctgcggggcctgaaatcgccacgccacctgctgcagacccacgcccagctcctcgcccgcggcctctccgcgagcccgcgcctactcccggtcctcgtctccgccgcgttctccgtctccccctcgtccccgcgccaggccgccgccgcggcgatccttggcgctgccggctccggcgcctccaccgtagcgcacaacaccctcatcgagcgcctcgcagggatcggcggcggcggcggcggcggcggtcgtggttgctccgcggcggacgcgttggcggcctacgctgcgatgcgtgccgcaggggtgtaccccaacgggttcaccttcaccttcctgcttcgcgcgtgcgaatccttgaggcggctgttcctgtgccggtgcgtccatggacagatcgtgaggtgtgggttcgggtccgatgtggtcgtgcagaacgctctcctgaacgtgtactacaagtgcagcgacccgggtgatgttggaatcgctcgccaggtgttcgatgaaatggctaatagagacgtggtttcgtggaactccatagttggtgtgtacatgtcgaatggagacgcagcaggggccatggagttgttcgaggcgatgccagagaggaatgttgtctcctggaacactattgtcgctgcattcacgagggcgggggacatggtgtcagcacgtgctgtgtttgataggatgccgatcagagatgccatctcttggaatctcatgatctcagggtatgcaacaagtggcaatgttgaatctgcatggtcactttttgatattatggatcggaaggatgtagtttcctggactgctatggtctctgcttatgcaaagattggggaactagattcagctagagtgctatttgatcagatgcctgataagaatttggtttcgtggaatgcaatgattacagggtacaaccacaacttgaggtatgatgatgcactgtgcacatttcagcagatgatgcttgagggaagattcatgcctgatgaagcaacattagtaagtgttgtctcagcctgcgctcagctaggcagtgttgaatactgcaactggatcagttcttacattagtaaaagcaacactcatataaccgttgcattaggaaatgcactcgtagatatgtttgcaaaatgtggagatgtaggaagagcacatttagtttttaataaaatgaaaacaagatgtaccattacatggacaacaatgatatctggttttgcttataatggacagtttagagaagccctattggtctacaatgatatgtgcagagaaggagtcacactggatgatacagtctttgttgctgcacttggtgcttgtgctcatggaggtttgttgcaagaaggttggagcatctttaatcaaatggttgagtactgtcgcattgttccaagaatggagcactatggatgcatagtggacctacttggtcgagctgagttgtcagagtatgtcagcacaaagatagttgaaatggaaccttttaattctagttatcaagtgttggtttcaaattgtagtgccctagagggaaggtgggacagtgtgatggatgctcgcagaacaatgcgtgattgcggagttgagaaaacacctggtagtagcttgattcaggtaggaaatgaggtacatgagtttttggctaaagacacaaggcacaagaaaaggaaagagaaaatgaactgtattttatttaagattgatggggccaccattgacaccagctgagcatgtgccaatcttaaagaggaacaacctactttgcatctcagatgtttcattcagataactgatataaagttttccttattataaattcatgctggggaattgcattcgtctctcaggactcgtgtttgcagttttgatatatttaacatgcttccctcaaaaaattgtagcaacttcgatagaattgagtcccttatgctgcagctattgagcatatcttattttgttgctatcttctggtcccataaataatagtactcacatcacatatgctggaacccagaagcatcacatatgccccaaccacccaagagtactacagtgctgggtgctcctcaactaagtgcggtggtacttcttctgtttctcatgtgcgcctaggaccatgcatggacagccttcagagcaactggcggtgaccacaagagagagaactgcctccgtgcatagttgatggctcgacgtcctaaaggggaggaaagcgtggttgatgtctctaaattttggtaagacaagcttggcctcttgttgccatggttgagttgcctacctgcctggacaagaggcgtcaacgagtgtgtcaactgtcaactcttccatgtgaatccctctgtttcctggccagtccttggatccagaaggacactggctcttcaattatcttaatggattatgattgcatttccgttcgttgcaattatccctttgtttcacaaagctgaagcagc

SEQ ID NO: 26383 - DNA, 3085 bp, Zea Mays
gtctctagaggtttttgtgacgaatgtcaacttgttatttctgaacaaaatacgaaacaatcaatatttgtagtttgaggactcccatacgagaatcgcctttcaaaaaacggcgcgaatcagaaagccctcgcccgcgccagcccgccgatggagcaggagctgctgcagatcctgcggggcctgaaatcgccacgccacctgctgcagacccacgcccagctcctcgcccgcggcctctccgcgagcccgcgcctactcccggtcctcgtctccgccgcgttctccgtctccccctcgtccccgcgccaggccgccgccgcggcgatccttggcgctgccggctccggcgcctccaccgtagcgcacaacaccctcatcgagcgcctcgcagggatcggcggcggcggcggcggcggcggtcgtggttgctccgcggcggacgcgttggcggcctacgctgcgatgcgtgccgcaggggtgtaccccaacgggttcaccttcaccttcctgcttcgcgcgtgcgaatccttgaggcggctgttcctgtgccggtgcgtccatggacagatcgtgaggtgtgggttcgggtccgatgtggtcgtgcagaacgctctcctgaacgtgtactacaagtgcagcgacccgggtgatgttggaatcgctcgccaggtgttcgatgaaatggctaatagagacgtggtttcgtggaactccatagttggtgtgtacatgtcgaatggagacgcagcaggggccatggagttgttcgaggcgatgccagagaggaatgttgtctcctggaacactattgtcgctgcattcacgagggcgggggacatggtgtcagcacgtgctgtgtttgataggatgccgatcagagatgccatctcttggaatctcatgatctcagggtatgcaacaagtggcaatgttgaatctgcatggtcactttttgatattatggatcggaaggatgtagtttcctggactgctatggtctctgcttatgcaaagattggggaactagattcagctagagtgctatttgatcagatgcctgataagaatttggtttcgtggaatgcaatgattacagggtacaaccacaacttgaggtatgatgatgcactgtgcacatttcagcagatgatgcttgagggaagattcatgcctgatgaagcaacattagtaagtgttgtctcagcctgcgctcagctaggcagtgttgaatactgcaactggatcagttcttacattagtaaaagcaacactcatataaccgttgcattaggaaatgcactcgtagatatgtttgcaaaatgtggagatgtaggaagagcacatttagtttttaataaaatgaaaacaagatgtaccattacatggacaacaatgatatctggttttgcttataatggacagtttagagaagccctattggtctacaatgatatgtgcagagaaggagtcacactggatgatacagtctttgttgctgcacttggtgcttgtgctcatggaggtttgttgcaagaaggttggagcatctttaatcaaatggttgagtactgtcgcattgttccaagaatggagcactatggatgcatagtggacctacttggtcgagctgagttgtcagagtatgtcagcacaaagatagttgaaatggaaccttttaattctagttatcaagtgttggtttcaaattgtagtgccctagagggaaggtgggacagtgtgatggatgctcgcagaacaatgcgtgattgcggagttgagaaaacacctggtagtagcttgattcaggtaggaaatgaggtacatgagtttttggctaaagacacaaggcacaagaaaaggaaagaggtatataaaactttggatggtttaatagccctcatcagacatacagatcacacccccttggataagttattgcagccacttgaataacgaagaattctttgagtagctgcaaccttactatgtgaacaataagttccggactaattcctgtgggaggccttttgtctaataggcagtcaagggcagatgggctttgtagccaagattgtgattagatcaacaattatgatttaatggcatccatggccagtagaggatactctaggataggttgagttattcactatcttgccaggttggttgtgtgcagtgcacttgacatgtgaatgaaagctgattcagttgtcaattatgatctagaatgtgaaatggggggccatcaaatgaattgcagttgcagtatgttggccagtcatttttattttgaatagaaaatgaactgtattttatttaagattgatggggccaccattgacaccagctgagcatgtgccaatcttaaagaggaacaacctactttgcatctcagatgtttcattcagataactgatataaagttttccttattataaattcatgctggggaattgcattcgtctctcaggactcgtgtttgcagttttgatatatttaacatgcttccctcaaaaaattgtagcaacttcgatagaattgagtcccttatgctgcagctattgagcatatcttattttgttgctatcttctggtcccataaataatagtactcacatcacatatgctggaacccagaagcatcacatatgccccaaccacccaagagtactacagtgctgggtgctcctcaactaagtgcggtggtacttcttctgtttctcatgtgcgcctaggaccatgcatggacagccttcagagcaactggcggtgaccacaagagagagaactgcctccgtgcatagttgatggctcgacgtcctaaaggggaggaaagcgtggttgatgtctctaaattttggtaagacaagcttggcctcttgttgccatggttgagttgcctacctgcctggacaagaggcgtcaacgagtgtgtcaactgtcaactcttccatgtgaatccctctgtttcctggccagtccttggatccagaaggacactggctcttcaattatcttaatggattatgattgcatttccgttcgttgcaattatccctttgtttcacaaagctgaagcagc

SEQ ID NO: 26384 - DNA, 2832 bp, Zea Mays
cagcacccagtatgatttggttggcaaaggatgttttctccagaataatgaaagtttagcttctggttcattttattgtctggtcgatcttttttatactgtgataaaatggggaagcactcagctgaatctggggttagtatgttgttgcatggagacttggacatacaaataattgaagcaaaatgtctccccaatatggatctcatgacagaaaggatgcgaaaatgctttactgggtatggagcttgcagcaatgattgtgggaagtcggaaccaccacacccggacatgagaaagatcatcactagtgatccatacgtttcagtttgtctgtcaggagcaacggtggcacaaactcgagtcattgccaactcggagaaccctaaatgggatgaacacttctatgttcaagttgctcattcagttagcagagtcgagtttcatgtaaaggacaacgatgtttttggggcagagcttatcggcgtggcttcaataccagttgagcacatcatgccaggtgatttggtcggtggctggtttcccatttctggtcagtacagtaatcctatgaagccatctcctgagctgcatttgtctatccagtataagccaatcgacacaaacccactatacaaggatggagttggtgctgatggccatcagagtgttggtgtcccaaatgcatatttccctcttaggaagggtggtaaggtcacactatatcaagatgctcatgttcctgacaattttcaacctcatattgagatggatgatgggaggacatatgaacaaaacaaatgctgggaagatatttgtcatgcaatcattgaggctcatcaccttatctacatagtcggctggtccttgtatcaccctgtgaagcttgtggaatgcaggatggtctcatgcatacacatgatgaggaagctcgaaaatatttcagacattcaggtgtccattgtgtgttgtctcctcgctatgccagcaacaaacttagcattttcaagcagcaggttgtaggaactttgtttacacaccatcagaaatgtgtcattgtagacacccaagccacaggaaacaatcgaaaaataactgcttttattggtggtctagacttgtgtgatggcagatatgatacacctgaacacaggcttttcaaggatttagatactattttcaaggacgatttccacaacccgacattccctgttaataagaatggacccagacagccatggcatgatttacattgtaaaattgagggtcctgctgcatatgatatacttacaaactttgaacagagatggagaaaatctgcaaagtggaaagttagcgtcagaagagctgtgagttggcatcatgatacattggtaaaaattgatcggatgtcatggattgtttccccctcttcagatgaattaaatgcacatgtttgtgaagaaaaggaccctgaaaactggcatgtacaggttttccgatcgattgattcaggatctgtaaaaggattcccaaaacttgttcaagaggctgaatcccagaatcttgtctgtgcaaagaatctgcagatagacaaaagcatacacaatgcatatgttaaagcgatcagatctgcacagcacttcgtctatattgaaaatcagtactttattgggtcttcatactactggtctgcacaccgaagtgcaggtgctgagaacttaataccaattgaattggccataaagattgcaagaaagattaaggcaaaggaaaggtttgcagcatacattgttataccgatgtggcctgaagggaatccgacaactgccgctatgcaggaaatcctctattggcaggggcataccatgtccatgatgtacaagattgtcgcagatgctctacgaaaggagggtttacatgaaaggcatccacaggagtacctgaacttctattgccttggcaaacgtgaagtctcgaatgaagttccgacgacaggcaattctaatgagaactctgcagtgcgtttgtcccagaaattcaagaggttcatgatctatgtgcactcaaaagggatgattgtggacgacgagtatgttctcatcggatcggccaacataaaccagagatccatggacggctcacgggacacggagatcgccatgggtgcataccagcctcactacagctgggctggaagcggcaggcctcccagaggacaggtgtatgggtacaggatgtctctttgggcggagcacctgggcacagtgcaggagtgtttccgccggccagagtccgaggagtgcgtgcagcaggtgaaccagatggcagatgacaactgggcgagctatgtctcgccgcagatggcggatatgaagggccacctcatgaagtaccccgtgagggtcgagcaggatgggagggtggggccgctgcatgggcaggagagcttcccagacgtcggtggcaaggtgctggggacgcactcgtcgctccccaatgcgttgacgacgtgagtactgagttggatgtagctcgaagaagctcgaaggtggcaggctggtaaatggtgagctgaagctctgctcgtcagaatcactggacgtggtgcaacaaggggttgatacattggaaagttgctgatccgatttctagctttaaggctgtttgtatgtatatttatattgaaaaagcgaaagatgtgatatccaagatgaatggagactaatgagaaaatgtttgcttcaattagcttgtggttacaactgattatatattgaggacaaaaaccttcaaaaaacgatcctcttcacggttaataagtgcttgttcggttacaagggataaaatctc

SEQ ID NO: 26385 - DNA, 2916 bp, Zea Mays
cagcacccagtatgatttggttggcaaaggatgttttctccagaataatgaaagtttagcttctggttcattttattgtctggtcgatcttttttatactgtgataaaatggggaagcactcagctgaatctggggttagtatgttgttgcatggagacttggacatacaaataattgaagcaaaatgtctccccaatatggatctcatgacagaaaggatgcgaaaatgctttactgggtatggagcttgcagcaatgattgtgggaagtcggaaccaccacacccggacatgagaaagatcatcactagtgatccatacgtttcagtttgtctgtcaggagcaacggtggcacaaactcgagtcattgccaactcggagaaccctaaatgggatgaacacttctatgttcaagttgctcattcagttagcagagtcgagtttcatgtaaaggacaacgatgtttttggggcagagcttatcggcgtggcttcaataccagttgagcacatcatgccaggtgatttggtcggtggctggtttcccatttctggtcagtacagtaatcctatgaagccatctcctgagctgcatttgtctatccagtataagccaatcgacacaaacccactatacaaggatggagttggtgctgatggccatcagagtgttggtgtcccaaatgcatatttccctcttaggaagggtggtaaggtcacactatatcaagatgctcatgttcctgacaattttcaacctcatattgagatggatgatgggaggacatatgaacaaaacaaatgctgggaagatatttgtcatgcaatcattgaggctcatcaccttatctacatagtcggctggtccttgtatcaccctgtgaagcttgtaagggaatcaacaaaacctgttcccaatggaaacccagtcactattggggaaattttgaaacgcaaagttcaagaaggagtccgtgttatagtgttgctttgggatgataaaacatcacatgacaaatttctcttaaaaacagatggtctcatgcatacacatgatgaggaagctcgaaaatatttcagacattcaggtgtccattgtgtgttgtctcctcgctatgccagcaacaaacttagcattttcaagcagcaggttgtaggaactttgtttacacaccatcagaaatgtgtcattgtagacacccaagccacaggaaacaatcgaaaaataactgcttttattggtggtctagacttgtgtgatggcagatatgatacacctgaacacaggcttttcaaggatttagatactattttcaaggacgatttccacaacccgacattccctgttaataagaatggacccagacagccatggcatgatttacattgtaaaattgagggtcctgctgcatatgatatacttacaaactttgaacagagatggagaaaatctgcaaagtggaaagttagcgtcagaagagctgtgagttggcatcatgatacattggtaaaaattgatcggatgtcatggattgtttccccctcttcagatgaattaaatgcacatgtttgtgaagaaaaggaccctgaaaactggcatgtacaggttttccgatcgattgattcaggatctgtaaaaggattcccaaaacttgttcaagaggctgaatcccagaatcttgtctgtgcaaagaatctgcagatagacaaaagcatacacaatgcatatgttaaagcgatcagatctgcacagcacttcgtctatattgaaaatcagtactttattgggtcttcatactactggtctgcacaccgaagtgcaggtgctgagaacttaataccaattgaattggccataaagattgcaagaaagattaaggcaaaggaaaggtttgcagcatacattgttataccgatgtggcctgaagggaatccgacaactgccgctatgcaggaaatcctctattggcaggggcataccatgtccatgatgtacaagattgtcgcagatgctctacgaaaggagggtttacatgaaaggcatccacaggagtacctgaacttctattgccttggcaaacgtgaagtctcgaatgaagttccgacgacaggcaattctaatgagaactctgcagtgggatgattgtggacgacgagtatgttctcatcggatcggccaacataaaccagagatccatggacggctcacgggacacggagatcgccatgggtgcataccagcctcactacagctgggctggaagcggcaggcctcccagaggacaggtgtatgggtacaggatgtctctttgggcggagcacctgggcacagtgcaggagtgtttccgccggccagagtccgaggagtgcgtgcagcaggtgaaccagatggcagatgacaactgggcgagctatgtctcgccgcagatggcggatatgaagggccacctcatgaagtaccccgtgagggtcgagcaggatgggagggtggggccgctgcatgggcaggagagcttcccagacgtcggtggcaaggtgctggggacgcactcgtcgctccccaatgcgttgacgacgtgagtactgagttggatgtagctcgaagaagctcgaaggtggcaggctggtaaatggtgagctgaagctctgctcgtcagaatcactggacgtggtgcaacaaggggttgatacattggaaagttgctgatccgatttctagctttaaggctgtttgtatgtatatttatattgaaaaagcgaaagatgtgatatccaagatgaatggagactaatgagaaaatgtttgcttcaattagcttgtggttacaactgattatatattgaggacaaaaaccttcaaaaaacgatcctcttcacggttaataagtgcttgttcggttacaagggataaaatctc

SEQ ID NO: 26386 - DNA, 2653 bp, Zea Mays
cagcacccagtatgatttggttggcaaaggatgttttctccagaataatgaaagtttagcttctggttcattttattgtctggtcgatcttttttatactgtgataaaatggggaagcactcagctgaatctggggttagtatgttgttgcatggagacttggacatacaaataattgaagcaaaatgtctccccaatatggatctcatgacagaaaggatgcgaaaatgctttactgggtatggagcttgcagcaatgattgtgggaagtcggaaccaccacacccggacatgagaaagatcatcactagtgatccatacgtttcagtttgtctgtcaggagcaacggtggcacaaactcgagtcattgccaactcggagaaccctaaatgggatgaacacttctatgttcaagttgctcattcagttagcagagtcgagtttcatgtaaaggacaacgatgtttttggggcagagcttatcggcgtggcttcaataccagttgagcacatcatgccaggtgatttggtcggtggctggtttcccatttctggtcagtacagtaatcctatgaagccatctcctgagctgcatttgtctatccagtataagccaatcgacacaaacccactatacaaggatggagttggtgctgatggccatcagagtgttggtgtcccaaatgcatatttccctcttaggaagggtggtggaatgcaggatggtctcatgcatacacatgatgaggaagctcgaaaatatttcagacattcaggtgtccattgtgtgttgtctcctcgctatgccagcaacaaacttagcattttcaagcagcaggttgtaggaactttgtttacacaccatcagaaatgtgtcattgtagacacccaagccacaggaaacaatcgaaaaataactgcttttattggtggtctagacttgtgtgatggcagatatgatacacctgaacacaggcttttcaaggatttagatactattttcaaggacgatttccacaacccgacattccctgttaataagaatggacccagacagccatggcatgatttacattgtaaaattgagggtcctgctgcatatgatatacttacaaactttgaacagagatggagaaaatctgcaaagtggaaagttagcgtcagaagagctgtgagttggcatcatgatacattggtaaaaattgatcggatgtcatggattgtttccccctcttcagatgaattaaatgcacatgtttgtgaagaaaaggaccctgaaaactggcatgtacaggttttccgatcgattgattcaggatctgtaaaaggattcccaaaacttgttcaagaggctgaatcccagaatcttgtctgtgcaaagaatctgcagatagacaaaagcatacacaatgcatatgttaaagcgatcagatctgcacagcacttcgtctatattgaaaatcagtactttattgggtcttcatactactggtctgcacaccgaagtgcaggtgctgagaacttaataccaattgaattggccataaagattgcaagaaagattaaggcaaaggaaaggtttgcagcatacattgttataccgatgtggcctgaagggaatccgacaactgccgctatgcaggaaatcctctattggcaggggcataccatgtccatgatgtacaagattgtcgcagatgctctacgaaaggagggtttacatgaaaggcatccacaggagtacctgaacttctattgccttggcaaacgtgaagtctcgaatgaagttccgacgacaggcaattctaatgagaactctgcagtgcgtttgtcccagaaattcaagaggttcatgatctatgtgcactcaaaagggatgattgtggacgacgagtatgttctcatcggatcggccaacataaaccagagatccatggacggctcacgggacacggagatcgccatgggtgcataccagcctcactacagctgggctggaagcggcaggcctcccagaggacaggtgtatgggtacaggatgtctctttgggcggagcacctgggcacagtgcaggagtgtttccgccggccagagtccgaggagtgcgtgcagcaggtgaaccagatggcagatgacaactgggcgagctatgtctcgccgcagatggcggatatgaagggccacctcatgaagtaccccgtgagggtcgagcaggatgggagggtggggccgctgcatgggcaggagagcttcccagacgtcggtggcaaggtgctggggacgcactcgtcgctccccaatgcgttgacgacgtgagtactgagttggatgtagctcgaagaagctcgaaggtggcaggctggtaaatggtgagctgaagctctgctcgtcagaatcactggacgtggtgcaacaaggggttgatacattggaaagttgctgatccgatttctagctttaaggctgtttgtatgtatatttatattgaaaaagcgaaagatgtgatatccaagatgaatggagactaatgagaaaatgtttgcttcaattagcttgtggttacaactgattatatattgaggacaaaaaccttcaaaaaacgatcctcttcacggttaataagtgcttgttcggttacaagggataaaatctc

SEQ ID NO: 26387 - DNA, 3073 bp, Zea Mays
atgagcgcccagtatatgctacagcaccggcgcccctggccctgccgcctgcgccgctcgttgccctgtgcactccgcgggcctcgggaatggccaaccaggacatttatcggtttcttttgtatttggataacctataaaggtctcagcacccagtatgatttggttggcaaaggatgttttctccagaataatgaaagtttagcttctggttcattttattgtctggtcgatcttttttatactgtgataaaatggggaagcactcagctgaatctggggttagtatgttgttgcatggagacttggacatacaaataattgaagcaaaatgtctccccaatatggatctcatgacagaaaggatgcgaaaatgctttactgggtatggagcttgcagcaatgattgtgggaagtcggaaccaccacacccggacatgagaaagatcatcactagtgatccatacgtttcagtttgtctgtcaggagcaacggtggcacaaactcgagtcattgccaactcggagaaccctaaatgggatgaacacttctatgttcaagttgctcattcagttagcagagtcgagtttcatgtaaaggacaacgatgtttttggggcagagcttatcggcgtggcttcaataccagttgagcacatcatgccaggtgatttggtcggtggctggtttcccatttctggtcagtacagtaatcctatgaagccatctcctgagctgcatttgtctatccagtataagccaatcgacacaaacccactatacaaggatggagttggtgctgatggccatcagagtgttggtgtcccaaatgcatatttccctcttaggaagggtggtaaggtcacactatatcaagatgctcatgttcctgacaattttcaacctcatattgagatggatgatgggaggacatatgaacaaaacaaatgctgggaagatatttgtcatgcaatcattgaggctcatcaccttatctacatagtcggctggtccttgtatcaccctgtgaagcttgtaagggaatcaacaaaacctgttcccaatggaaacccagtcactattggggaaattttgaaacgcaaagttcaagaaggagtccgtgttatagtgttgctttgggatgataaaacatcacatgacaaatttctcttaaaaacagtggaatgcaggatggtctcatgcatacacatgatgaggaagctcgaaaatatttcagacattcaggtgtccattgtgtgttgtctcctcgctatgccagcaacaaacttagcattttcaagcagcaggttgtaggaactttgtttacacaccatcagaaatgtgtcattgtagacacccaagccacaggaaacaatcgaaaaataactgcttttattggtggtctagacttgtgtgatggcagatatgatacacctgaacacaggcttttcaaggatttagatactattttcaaggacgatttccacaacccgacattccctgttaataagaatggacccagacagccatggcatgatttacattgtaaaattgagggtcctgctgcatatgatatacttacaaactttgaacagagatggagaaaatctgcaaagtggaaagttagcgtcagaagagctgtgagttggcatcatgatacattggtaaaaattgatcggatgtcatggattgtttccccctcttcagatgaattaaatgcacatgtttgtgaagaaaaggaccctgaaaactggcatgtacaggttttccgatcgattgattcaggatctgtaaaaggattcccaaaacttgttcaagaggctgaatcccagaatcttgtctgtgcaaagaatctgcagatagacaaaagcatacacaatgcatatgttaaagcgatcagatctgcacagcacttcgtctatattgaaaatcagtactttattgggtcttcatactactggtctgcacaccgaagtgcaggtgctgagaacttaataccaattgaattggccataaagattgcaagaaagattaaggcaaaggaaaggtttgcagcatacattgttataccgatgtggcctgaagggaatccgacaactgccgctatgcaggaaatcctctattggcaggggcataccatgtccatgatgtacaagattgtcgcagatgctctacgaaaggagggtttacatgaaaggcatccacaggagtacctgaacttctattgccttggcaaacgtgaagtctcgaatgaagttccgacgacaggcaattctaatgagaactctgcagtgggatgattgtggacgacgagtatgttctcatcggatcggccaacataaaccagagatccatggacggctcacgggacacggagatcgccatgggtgcataccagcctcactacagctgggctggaagcggcaggcctcccagaggacaggtgtatgggtacaggatgtctctttgggcggagcacctgggcacagtgcaggagtgtttccgccggccagagtccgaggagtgcgtgcagcaggtgaaccagatggcagatgacaactgggcgagctatgtctcgccgcagatggcggatatgaagggccacctcatgaagtaccccgtgagggtcgagcaggatgggagggtggggccgctgcatgggcaggagagcttcccagacgtcggtggcaaggtgctggggacgcactcgtcgctccccaatgcgttgacgacgtgagtactgagttggatgtagctcgaagaagctcgaaggtggcaggctggtaaatggtgagctgaagctctgctcgtcagaatcactggacgtggtgcaacaaggggttgatacattggaaagttgctgatccgatttctagctttaaggctgtttgtatgtatatttatattgaaaaagcgaaagatgtgatatccaagatgaatggagactaatgagaaaatgtttgcttcaattagcttgtggttacaactgattatatattgaggacaaaaaccttcaaaaaacgatcctcttcacggttaataagtgcttgttcggttacaagggataaaatctc

SEQ ID NO: 26388 - DNA, 3011 bp, Zea Mays
atgagcgcccagtatatgctacagcaccggcgcccctggccctgccgcctgcgccgctcgttgccctgtgcactccgcgggcctcgggaatggccaaccaggacatttatcggtttcttttgtatttggataacctataaaggtctcagcacccagtatgatttggttggcaaaggatgttttctccagaataatgaaagtttagcttctggttcattttattgtctggtcgatcttttttatactgtgataaaatggggaagcactcagctgaatctggggttagtatgttgttgcatggagacttggacatacaaataattgaagcaaaatgtctccccaatatggatctcatgacagaaaggatgcgaaaatgctttactgggtatggagcttgcagcaatgattgtgggaagtcggaaccaccacacccggacatgagaaagatcatcactagtgatccatacgtttcagtttgtctgtcaggagcaacggtggcacaaactcgagtcattgccaactcggagaaccctaaatgggatgaacacttctatgttcaagttgctcattcagttagcagagtcgagtttcatgtaaaggacaacgatgtttttggggcagagcttatcggcgtggcttcaataccagttgagcacatcatgccaggtgatttggtcggtggctggtttcccatttctggtcagtacagtaatcctatgaagccatctcctgagctgcatttgtctatccagtataagccaatcgacacaaacccactatacaaggatggagttggtgctgatggccatcagagtgttggtgtcccaaatgcatatttccctcttaggaagggtggtaaggtcacactatatcaagatgctcatgttcctgacaattttcaacctcatattgagatggatgatgggaggacatatgaacaaaacaaatgctgggaagatatttgtcatgcaatcattgaggctcatcaccttatctacatagtcggctggtccttgtatcaccctgtgaagcttgtaagggaatcaacaaaacctgttcccaatggaaacccagtcactattggggaaattttgaaacgcaaagttcaagaaggagtccgtgttatagtgttgctttgggatgataaaacatcacatgacaaatttctcttaaaaacagatggtctcatgcatacacatgatgaggaagctcgaaaatatttcagacattcaggtgtccattgtgtgttgtctcctcgctatgccagcaacaaacttagcattttcaagcagcagacttgtgtgatggcagatatgatacacctgaacacaggcttttcaaggatttagatactattttcaaggacgatttccacaacccgacattccctgttaataagaatggacccagacagccatggcatgatttacattgtaaaattgagggtcctgctgcatatgatatacttacaaactttgaacagagatggagaaaatctgcaaagtggaaagttagcgtcagaagagctgtgagttggcatcatgatacattggtaaaaattgatcggatgtcatggattgtttccccctcttcagatgaattaaatgcacatgtttgtgaagaaaaggaccctgaaaactggcatgtacaggttttccgatcgattgattcaggatctgtaaaaggattcccaaaacttgttcaagaggctgaatcccagaatcttgtctgtgcaaagaatctgcagatagacaaaagcatacacaatgcatatgttaaagcgatcagatctgcacagcacttcgtctatattgaaaatcagtactttattgggtcttcatactactggtctgcacaccgaagtgcaggtgctgagaacttaataccaattgaattggccataaagattgcaagaaagattaaggcaaaggaaaggtttgcagcatacattgttataccgatgtggcctgaagggaatccgacaactgccgctatgcaggaaatcctctattggcaggggcataccatgtccatgatgtacaagattgtcgcagatgctctacgaaaggagggtttacatgaaaggcatccacaggagtacctgaacttctattgccttggcaaacgtgaagtctcgaatgaagttccgacgacaggcaattctaatgagaactctgcagtgcgtttgtcccagaaattcaagaggttcatgatctatgtgcactcaaaagggatgattgtggacgacgagtatgttctcatcggatcggccaacataaaccagagatccatggacggctcacgggacacggagatcgccatgggtgcataccagcctcactacagctgggctggaagcggcaggcctcccagaggacaggtgtatgggtacaggatgtctctttgggcggagcacctgggcacagtgcaggagtgtttccgccggccagagtccgaggagtgcgtgcagcaggtgaaccagatggcagatgacaactgggcgagctatgtctcgccgcagatggcggatatgaagggccacctcatgaagtaccccgtgagggtcgagcaggatgggagggtggggccgctgcatgggcaggagagcttcccagacgtcggtggcaaggtgctggggacgcactcgtcgctccccaatgcgttgacgacgtgagtactgagttggatgtagctcgaagaagctcgaaggtggcaggctggtaaatggtgagctgaagctctgctcgtcagaatcactggacgtggtgcaacaaggggttgatacattggaaagttgctgatccgatttctagctttaaggctgtttgtatgtatatttatattgaaaaagcgaaagatgtgatatccaagatgaatggagactaatgagaaaatgtttgcttcaattagcttgtggttacaactgattatatattgaggacaaaaaccttcaaaaaacgatcctcttcacggttaataagtgcttgttcggttacaagggataaaatctc

SEQ ID NO: 26389 - DNA, 3743 bp, Zea Mays
ctcgtatgtccaccgctgaccgctcgtttgtcagcctagcaccggggtgcatgagcgcccagtatatgctacagcaccggcgcccctggccctgccgcctgcgccgctcgttgccctgtgcactccgcgggcctcgggaatggccaaccaggacatttatcggtttcttttgtatttggataacctataaaggtctcagcacccagtatgatttggttggcaaaggatgttttctccagaataatgaaagtttagcttctggttcattttattgtctggtcgatcttttttatactgtgataaaatggggaagcactcagctgaatctggggttagtatgttgttgcatggagacttggacatacaaataattgaagcaaaatgtctccccaatatggatctcatgacagaaaggatgcgaaaatgctttactgggtatggagcttgcagcaatgattgtgggaagtcggaaccaccacacccggacatgagaaagatcatcactagtgatccatacgtttcagtttgtctgtcaggagcaacggtggcacaaactcgagtcattgccaactcggagaaccctaaatgggatgaacacttctatgttcaagttgctcattcagttagcagagtcgagtttcatgtaaaggacaacgatgtttttggggcagagcttatcggcgtggcttcaataccagttgagcacatcatgccaggtgatttggtcggtggctggtttcccatttctggtcagtacagtaatcctatgaagccatctcctgagctgcatttgtctatccagtataagccaatcgacacaaacccactatacaaggatggagttggtgctgatggccatcagagtgttggtgtcccaaatgcatatttccctcttaggaagggtggtaaggtcacactatatcaagatgctcatgttcctgacaattttcaacctcatattgagatggatgatgggaggacatatgaacaaaacaaatgctgggaagatatttgtcatgcaatcattgaggctcatcaccttatctacatagtcggctggtccttgtatcaccctgtgaagcttgtaagggaatcaacaaaacctgttcccaatggaaacccagtcactattggggaaattttgaaacgcaaagttcaagaaggagtccgtgttatagtgttgctttgggatgataaaacatcacatgacaaatttctcttaaaaacagatggtctcatgcatacacatgatgaggaagctcgaaaatatttcagacattcaggtgtccattgtgtgttgtctcctcgctatgccagcaacaaacttagcattttcaagcagcaggtttggatattgtttctcccttgttacatacatgtacgctgaattgctagtttcctcatatcatgtactctttcttattttctctgttggttctttgtcctttcatatacattgtgactcactcaacatcctgtgcattgtcttccaaaacgtgaacctacattttgagctaatggaattttgaacttgtacagaaacagaagatgtccgcttgcattttattcaggccgaggctgtatatatctttttgttcggataaaaagttgcgagttagagataaagttggtagtttgatatatatgctgctgaaaaatgaagattcaaatttgcattgtgtatgtataacattcttgtgaaccttgggtagaaaaaagtgatgaactgttggctaggtatatgagcattctgcttgctgttggtgagtcttcttaattgaatttgatgacagaagtatttgtaatgaagttgtgggcttggagttagaatccgcagttcataggtcctattattttatagcacttactcttacctctgagttctgtaacacttctagtatatcttgaaaaaagttatcttctccaggttgtaggaactttgtttacacaccatcagaaatgtgtcattgtagacacccaagccacaggaaacaatcgaaaaataactgcttttattggtggtctagacttgtgtgatggcagatatgatacacctgaacacaggcttttcaaggatttagatactattttcaaggacgatttccacaacccgacattccctgttaataagaatggacccagacagccatggcatgatttacattgtaaaattgagggtcctgctgcatatgatatacttacaaactttgaacagagatggagaaaatctgcaaagtggaaagttagcgtcagaagagctgtgagttggcatcatgatacattggtaaaaattgatcggatgtcatggattgtttccccctcttcagatgaattaaatgcacatgtttgtgaagaaaaggaccctgaaaactggcatgtacaggttttccgatcgattgattcaggatctgtaaaaggattcccaaaacttgttcaagaggctgaatcccagaatcttgtctgtgcaaagaatctgcagatagacaaaagcatacacaatgcatatgttaaagcgatcagatctgcacagcacttcgtctatattgaaaatcagtactttattgggtcttcatactactggtctgcacaccgaagtgcaggtgctgagaacttaataccaattgaattggccataaagattgcaagaaagattaaggcaaaggaaaggtttgcagcatacattgttataccgatgtggcctgaagggaatccgacaactgccgctatgcaggaaatcctctattggcaggggcataccatgtccatgatgtacaagattgtcgcagatgctctacgaaaggagggtttacatgaaaggcatccacaggagtacctgaacttctattgccttggcaaacgtgaagtctcgaatgaagttccgacgacaggcaattctaatgagaactctgcagtgcgtttgtcccagaaattcaagaggttcatgatctatgtgcactcaaaagggatgattgtggacgacgagtatgttctcatcggatcggccaacataaaccagagatccatggacggctcacgggacacggagatcgccatgggtgcataccagcctcactacagctgggctggaagcggcaggcctcccagaggacaggtgtatgggtacaggatgtctctttgggcggagcacctgggcacagtgcaggagtgtttccgccggccagagtccgaggagtgcgtgcagcaggtgaaccagatggcagatgacaactgggcgagctatgtctcgccgcagatggcggatatgaagggccacctcatgaagtaccccgtgagggtcgagcaggatgggagggtggggccgctgcatgggcaggagagcttcccagacgtcggtggcaaggtgctggggacgcactcgtcgctccccaatgcgttgacgacgtgagtactgagttggatgtagctcgaagaagctcgaaggtggcaggctggtaaatggtgagctgaagctctgctcgtcagaatcactggacgtggtgcaacaaggggttgatacattggaaagttgctgatccgatttctagctttaaggctgtttgtatgtatatttatattgaaaaagcgaaagatgtgatatccaagatgaatggagactaatgagaaaatgtttgcttcaattagcttgtggttacaactgattatatattgaggacaaaaaccttcaaaaaacgatcctcttcacggttaataagtgcttgttcggttacaagggataaaatctc

SEQ ID NO: 26390 - DNA, 3755 bp, Zea Mays
agcacctctcgtatgtccaccgctgaccgctcgtttgtcagcctagcaccggggtgcatgagcgcccagtatatgctacagcaccggcgcccctggccctgccgcctgcgccgctcgttgccctgtgcactccgcgggcctcgggaatggccaaccaggacatttatcggtttcttttgtatttggataacctataaaggtctcagcacccagtatgatttggttggcaaaggatgttttctccagaataatgaaagtttagcttctggttcattttattgtctggtcgatcttttttatactgtgataaaatggggaagcactcagctgaatctggggttagtatgttgttgcatggagacttggacatacaaataattgaagcaaaatgtctccccaatatggatctcatgacagaaaggatgcgaaaatgctttactgggtatggagcttgcagcaatgattgtgggaagtcggaaccaccacacccggacatgagaaagatcatcactagtgatccatacgtttcagtttgtctgtcaggagcaacggtggcacaaactcgagtcattgccaactcggagaaccctaaatgggatgaacacttctatgttcaagttgctcattcagttagcagagtcgagtttcatgtaaaggacaacgatgtttttggggcagagcttatcggcgtggcttcaataccagttgagcacatcatgccaggtgatttggtcggtggctggtttcccatttctggtcagtacagtaatcctatgaagccatctcctgagctgcatttgtctatccagtataagccaatcgacacaaacccactatacaaggatggagttggtgctgatggccatcagagtgttggtgtcccaaatgcatatttccctcttaggaagggtggtaaggtcacactatatcaagatgctcatgttcctgacaattttcaacctcatattgagatggatgatgggaggacatatgaacaaaacaaatgctgggaagatatttgtcatgcaatcattgaggctcatcaccttatctacatagtcggctggtccttgtatcaccctgtgaagcttgtaagggaatcaacaaaacctgttcccaatggaaacccagtcactattggggaaattttgaaacgcaaagttcaagaaggagtccgtgttatagtgttgctttgggatgataaaacatcacatgacaaatttctcttaaaaacagtaggattctttcctcccgtagaacctcttcatttcctactttgctgaaattgatatatatcgaaactattttactattttgcttaaatggtcgtcaaggggtagacagatagcaaacatgcactagatagtactcttgtctatttaccagatgataatgatgaaaggaagaatcaagaatgtaataactgaaaaggtagatgtattttgatgatgtgtaattccttactttcaatgtccctagtgtctcttctaagattgttgtcaagatgaatacacaaagaactaagctaataagttgaataaactatttgaacctgcatatgttgtgtgtctgttttttcttctttgtcattcttgttgtattttggatttattctgtaattattattatttatataaaatataatgataatcagtcttcgtgtgtttttctagaaaaaaatatgaacaagataagcctaacgaagtatagaatgcagactgcaagtttcagctcctcctcctattgttttgactattactccatgtttgctgcttctttttaagaagaatagtctgatagaaatggtgtaggtggaatgcaggatggtctcatgcatacacatgatgaggaagctcgaaaatatttcagacattcaggtgtccattgtgtgttgtctcctcgctatgccagcaacaaacttagcattttcaagcagcaggttgtaggaactttgtttacacaccatcagaaatgtgtcattgtagacacccaagccacaggaaacaatcgaaaaataactgcttttattggtggtctagacttgtgtgatggcagatatgatacacctgaacacaggcttttcaaggatttagatactattttcaaggacgatttccacaacccgacattccctgttaataagaatggacccagacagccatggcatgatttacattgtaaaattgagggtcctgctgcatatgatatacttacaaactttgaacagagatggagaaaatctgcaaagtggaaagttagcgtcagaagagctgtgagttggcatcatgatacattggtaaaaattgatcggatgtcatggattgtttccccctcttcagatgaattaaatgcacatgtttgtgaagaaaaggaccctgaaaactggcatgtacaggttttccgatcgattgattcaggatctgtaaaaggattcccaaaacttgttcaagaggctgaatcccagaatcttgtctgtgcaaagaatctgcagatagacaaaagcatacacaatgcatatgttaaagcgatcagatctgcacagcacttcgtctatattgaaaatcagtactttattgggtcttcatactactggtctgcacaccgaagtgcaggtgctgagaacttaataccaattgaattggccataaagattgcaagaaagattaaggcaaaggaaaggtttgcagcatacattgttataccgatgtggcctgaagggaatccgacaactgccgctatgcaggaaatcctctattggcaggggcataccatgtccatgatgtacaagattgtcgcagatgctctacgaaaggagggtttacatgaaaggcatccacaggagtacctgaacttctattgccttggcaaacgtgaagtctcgaatgaagttccgacgacaggcaattctaatgagaactctgcagtgcgtttgtcccagaaattcaagaggttcatgatctatgtgcactcaaaagggatgattgtggacgacgagtatgttctcatcggatcggccaacataaaccagagatccatggacggctcacgggacacggagatcgccatgggtgcataccagcctcactacagctgggctggaagcggcaggcctcccagaggacaggtgtatgggtacaggatgtctctttgggcggagcacctgggcacagtgcaggagtgtttccgccggccagagtccgaggagtgcgtgcagcaggtgaaccagatggcagatgacaactgggcgagctatgtctcgccgcagatggcggatatgaagggccacctcatgaagtaccccgtgagggtcgagcaggatgggagggtggggccgctgcatgggcaggagagcttcccagacgtcggtggcaaggtgctggggacgcactcgtcgctccccaatgcgttgacgacgtgagtactgagttggatgtagctcgaagaagctcgaaggtggcaggctggtaaatggtgagctgaagctctgctcgtcagaatcactggacgtggtgcaacaaggggttgatacattggaaagttgctgatccgatttctagctttaaggctgtttgtatgtatatttatattgaaaaagcgaaagatgtgatatccaagatgaatggagactaatgagaaaatgtttgcttcaattagcttgtggttacaactgattatatattgaggacaaaaaccttcaaaaaacgatcctcttcacggttaataagtgcttgttcggttacaagggataaaatctc

SEQ ID NO: 26391 - DNA, 3188 bp, Zea Mays
cggaggagcagcacctctcgtatgtccaccgctgaccgctcgtttgtcagcctagcaccggggtgcatgagcgcccagtatatgctacagcaccggcgcccctggccctgccgcctgcgccgctcgttgccctgtgcactccgcgggcctcgggaatggccaaccaggacatttatcggtttcttttgtatttggataacctataaaggtctcagcacccagtatgatttggttggcaaaggatgttttctccagaataatgaaagtttagcttctggttcattttattgtctggtcgatcttttttatactgtgataaaatggggaagcactcagctgaatctggggttagtatgttgttgcatggagacttggacatacaaataattgaagcaaaatgtctccccaatatggatctcatgacagaaaggatgcgaaaatgctttactgggtatggagcttgcagcaatgattgtgggaagtcggaaccaccacacccggacatgagaaagatcatcactagtgatccatacgtttcagtttgtctgtcaggagcaacggtggcacaaactcgagtcattgccaactcggagaaccctaaatgggatgaacacttctatgttcaagttgctcattcagttagcagagtcgagtttcatgtaaaggacaacgatgtttttggggcagagcttatcggcgtggcttcaataccagttgagcacatcatgccaggtgatttggtcggtggctggtttcccatttctggtcagtacagtaatcctatgaagccatctcctgagctgcatttgtctatccagtataagccaatcgacacaaacccactatacaaggatggagttggtgctgatggccatcagagtgttggtgtcccaaatgcatatttccctcttaggaagggtggtaaggtcacactatatcaagatgctcatgttcctgacaattttcaacctcatattgagatggatgatgggaggacatatgaacaaaacaaatgctgggaagatatttgtcatgcaatcattgaggctcatcaccttatctacatagtcggctggtccttgtatcaccctgtgaagcttgtaagggaatcaacaaaacctgttcccaatggaaacccagtcactattggggaaattttgaaacgcaaagttcaagaaggagtccgtgttatagtgttgctttgggatgataaaacatcacatgacaaatttctcttaaaaacagtggaatgcaggatggtctcatgcatacacatgatgaggaagctcgaaaatatttcagacattcaggtgtccattgtgtgttgtctcctcgctatgccagcaacaaacttagcattttcaagcagcaggttgtaggaactttgtttacacaccatcagaaatgtgtcattgtagacacccaagccacaggaaacaatcgaaaaataactgcttttattggtggtctagacttgtgtgatggcagatatgatacacctgaacacaggcttttcaaggatttagatactattttcaaggacgatttccacaacccgacattccctgttaataagaatggacccagacagccatggcatgatttacattgtaaaattgagggtcctgctgcatatgatatacttacaaactttgaacagagatggagaaaatctgcaaagtggaaagttagcgtcagaagagctgtgagttggcatcatgatacattggtaaaaattgatcggatgtcatggattgtttccccctcttcagatgaattaaatgcacatgtttgtgaagaaaaggaccctgaaaactggcatgtacaggttttccgatcgattgattcaggatctgtaaaaggattcccaaaacttgttcaagaggctgaatcccagaatcttgtctgtgcaaagaatctgcagatagacaaaagcatacacaatgcatatgttaaagcgatcagatctgcacagcacttcgtctatattgaaaatcagtactttattgggtcttcatactactggtctgcacaccgaagtgcaggtgctgagaacttaataccaattgaattggccataaagattgcaagaaagattaaggcaaaggaaaggtttgcagcatacattgttataccgatgtggcctgaagggaatccgacaactgccgctatgcaggaaatcctctattggcaggggcataccatgtccatgatgtacaagattgtcgcagatgctctacgaaaggagggtttacatgaaaggcatccacaggagtacctgaacttctattgccttggcaaacgtgaagtctcgaatgaagttccgacgacaggcaattctaatgagaactctgcagtgcgtttgtcccagaaattcaagaggttcatgatctatgtgcactcaaaagggatgattgtggacgacgagtatgttctcatcggatcggccaacataaaccagagatccatggacggctcacgggacacggagatcgccatgggtgcataccagcctcactacagctgggctggaagcggcaggcctcccagaggacaggtgtatgggtacaggatgtctctttgggcggagcacctgggcacagtgcaggagtgtttccgccggccagagtccgaggagtgcgtgcagcaggtgaaccagatggcagatgacaactgggcgagctatgtctcgccgcagatggcggatatgaagggccacctcatgaagtaccccgtgagggtcgagcaggatgggagggtggggccgctgcatgggcaggagagcttcccagacgtcggtggcaaggtgctggggacgcactcgtcgctccccaatgcgttgacgacgtgagtactgagttggatgtagctcgaagaagctcgaaggtggcaggctggtaaatggtgagctgaagctctgctcgtcagaatcactggacgtggtgcaacaaggggttgatacattggaaagttgctgatccgatttctagctttaaggctgtttgtatgtatatttatattgaaaaagcgaaagatgtgatatccaagatgaatggagactaatgagaaaatgtttgcttcaattagcttgtggttacaactgattatatattgaggacaaaaaccttcaaaaaacgatcctcttcacggttaataagtgcttgttcggttacaagggataaaatctc

SEQ ID NO: 26392 - DNA, 1819 bp, Zea Mays
cctccttgtggtcgtggtcgtggccccgccgtcccgtgcgccattgccaagtcgaggcacgcggccagtggtgccctcgtcatcgtcaatgagcaccgacgccgcgcccctcctccactccacctgcacagcgccgctcgcccccacaccccaacccaaccatccgctccttgtcgccttccgacgctgagtttgctggtgtcgatttgcgccgtcggatgctcgatctggcagccgcctgtgccgacctactcgtcgaatccggttgttgtcatgacacatgcatatggaaacagatctggagtacgatatgtcacaaatggtttaaaggtctattatgtaccatggaggccattcctgatgcagaatacacttcctacactattcttgacgtttccaattgtaaggacaattattattcgagagaagatttctgtcgtgcatggacatcaagctttttcaacactgtgtcatgaagcattaatgcatgctaggacaatgggatattgatcaggcaatatgtgtctcacatacaagcaaagagaacactgtcttgaggtctgggatatctccagagaaggttttcatggttcctaatgcagttgacactgcaatgtttactccctctcccaagcgcttaaactgtgatgaaatagttattgttgtggtcagtagattagtataccgaaaaggcgccgaccttcttgttgaagtcattccagaagtgtgtcggctatttccaaaggttcgctttattgttggtggtgatggtccaaaacgtgtgcgccttgaagaaatgagggagaagttctcccttcaggatagagttgagatgttaggagctgtacctcatgctcaggtgcgatcggttctgatatctggacatatatttttgaacagttcactcacagaggcattttgcatagccattctagaagcagctagctgtggactgttgacagtgagcactagagtcggtggtgtccctgaggttcttccagatgacatgatagtacttgcagaaccagctcctggagatatggtaagagctgtcaagaaagccatcgacatgctacctggaatagacccccagattatgcatcttcggatgaaagaactttatagttgggacgatgttgccaaaagaactgagattgtttatgatcgtgcaatggaatctccaacaacaaatttactagatcgccttcctcggtatcttacttgtggatcttgggctggaaaactgttttgcctagttatgatcatcaattacctactatggcgccttttagaatttctacagcctgctgtaggtattgaagaagtcccagatatagggccactacatgctcatttaggttcaaggaatgatgaggctcaagagaagtgaaacttaaatctttgacagttttgaaatggttggggacttgaggtggcagtcatggtatcttctgcttgtcagcattcgttctgatccacatgcagtatatgcctttatgatatggcccccgcacagcattttctcttgaagcttcccgtctccgtagtcgcagctgaaagagagtggaacgccttgatttgtaggatttcttgtcatgctggttaaagctatggtccgagtctctgtcattgccagcttcttttttttttcttcctctgcgtaatgcgtagtgagtggatggcctgcgttttaggcacgtcatcaaaccaattatctgctggaacgttggtactctcttgccaccatattgcaactagaagtcttgattggcatgttgccacacaaattcctactatgtttgatgtcttgtaaaaaaca

SEQ ID NO: 26393 - DNA, 2033 bp, Zea Mays
gcgccattgccaagtcgaggcacgcggccagtggtgccctcgtcatcgtcaatgagcaccgacgccgcgcccctcctccactccacctgcacagcgccgctcgcccccacaccccaacccaaccatccgctccttgtcgccttccgacgctgagtttgctggtgtcgatttgcgccgtcggatgctcgatctggcagccgcctgtgccgacctactcgtcgaatccgttatctaacgtaatggatgggcaaggcacaaagcacaggattttgatggtgtctgactttttctttccaaactttggtggggtggaaagccatatctactacctgtcacaatgtctacttaagcttggccataaggttgttgtcatgacacatgcatatggaaacagatctggagtacgatatgtcacaaatggtttaaaggtctattatgtaccatggaggccattcctgatgcagaatacacttcctacactattcttgacgtttccaattgtaaggacaattattattcgagagaagatttctgtcgtgcatggacatcaagctttttcaacactgtgtcatgaagcattaatgcatgctaggacaatggggcaatatgtgtctcacatacaagcaaagagaacactgtcttgaggtctgggatatctccagagaaggttttcatggttcctaatgcagttgacactgcaatgtttactccctctcccaagcgcttaaactgtgatgaaatagttattgttgtggtcagtagattagtataccgaaaaggcgccgaccttcttgttgaagtcattccagaagtgtgtcggctatttccaaaggttcgctttattgttggtggtgatggtccaaaacgtgtgcgccttgaagaaatgagggagaagttctcccttcaggatagagttgagatgttaggagctgtacctcatgctcaggtgcgatcggttctgatatctggacatatatttttgaacagaggcattttgcatagccattctagaagcagctagctgtggactgttgacagtgagcactagagtcggtggtgtccctgaggttcttccagatgacatgatagtacttgcagaaccagctcctggagatatggtaagagctgtcaagaaagccatcgacatgctacctggaatagacccccagattatgcatcttcggatgaaagaactttatagttgggacgatgttgccaaaagaactgagattgtttatgatcgtgcaatggaatctccaacaacaaatttactagatcgccttcctcggtatcttacttgtggatcttgggctggaaaactgttttgcctagttatgatcatcaattacctactatggcgccttttagaatttctacagcctgctgtaggtattgaagaagtcccagatatagggccactacatgctcatttaggttcaaggaatgatgaggctcaagagaagtgaaacttaaatctttgacagttttgaaatggttggggacttgaggtggcagtcatggtatcttctgcttgtcagcattcgttctgatccacatgcagtatatgcctttatgatatggcccccgcacagcattttctcttgaagcttcccgtctccgtagtcgcagctgaaagagagtggaacgccttgatttgtaggatttcttgtcatgctggttaaagctatggtccgagtctctgtcattgccagcttcttttttttttcttcctctgcgtaatgcgtagtgagtggatggcctgcgttttaggcacgtcatcaaaccaattatctgctggaacgttggtactctcttgccaccatattgcaactagaagtcttgattggcatgttgccacacaaattcctactatgtttgatgtcttgtatcatgtcggagcaccaattcctgctgtgtttgtgatgtaataatgccaattccaaccagcgacgtgagaccaatctgcatggatccagtcgataatactttttgaatataaaataagtgcaatctcttttcggcactgtttggaa

SEQ ID NO: 26394 - DNA, 1956 bp, Zea Mays
gcgccattgccaagtcgaggcacgcggccagtggtgccctcgtcatcgtcaatgagcaccgacgccgcgcccctcctccactccacctgcacagcgccgctcgcccccacaccccaacccaaccatccgctccttgtcgccttccgacgctgagtttgctggtgtcgatttgcgccgtcggatgctcgatctggcagccgcctgtgccgacctactcgtcgaatccgttatctaacgtaatggatgggcaaggcacaaagcacaggattttgatggtgtctgactttttctttccaaactttggtggggtggaaagccatatctactacctgtcacaatgtctacttaagcttggccataaggttgttgtcatgacacatgcatatggaaacagatctggagtacgatatgtcacaaatggtttaaaggtctattatgtaccatggaggccattcctgatgcagaatacacttcctacactattcttgacgtttccaatttttactcttgcagatattgatcaggcaatatgtgtctcacatacaagcaaagagaacactgtcttgaggtctgggatatctccagagaaggttttcatggttcctaatgcagttgacactgcaatgtttactccctctcccaagcgcttaaactgtgatgaaatagttattgttgtggtcagtagattagtataccgaaaaggcgccgaccttcttgttgaagtcattccagaagtgtgtcggctatttccaaaggttcgctttattgttggtggtgatggtccaaaacgtgtgcgccttgaagaaatgagggagaagttctcccttcaggatagagttgagatgttaggagctgtacctcatgctcaggtgcgatcggttctgatatctggacatatatttttgaacagaggcattttgcatagccattctagaagcagctagctgtggactgttgacagtgagcactagagtcggtggtgtccctgaggttcttccagatgacatgatagtacttgcagaaccagctcctggagatatggtaagagctgtcaagaaagccatcgacatgctacctggaatagacccccagattatgcatcttcggatgaaagaactttatagttgggacgatgttgccaaaagaactgagattgtttatgatcgtgcaatggaatctccaacaacaaatttactagatcgccttcctcggtatcttacttgtggatcttgggctggaaaactgttttgcctagttatgatcatcaattacctactatggcgccttttagaatttctacagcctgctgtaggtattgaagaagtcccagatatagggccactacatgctcatttaggttcaaggaatgatgaggctcaagagaagtgaaacttaaatctttgacagttttgaaatggttggggacttgaggtggcagtcatggtatcttctgcttgtcagcattcgttctgatccacatgcagtatatgcctttatgatatggcccccgcacagcattttctcttgaagcttcccgtctccgtagtcgcagctgaaagagagtggaacgccttgatttgtaggatttcttgtcatgctggttaaagctatggtccgagtctctgtcattgccagcttcttttttttttcttcctctgcgtaatgcgtagtgagtggatggcctgcgttttaggcacgtcatcaaaccaattatctgctggaacgttggtactctcttgccaccatattgcaactagaagtcttgattggcatgttgccacacaaattcctactatgtttgatgtcttgtatcatgtcggagcaccaattcctgctgtgtttgtgatgtaataatgccaattccaaccagcgacgtgagaccaatctgcatggatccagtcgataatactttttgaatataaaataagtgcaatctcttttcggcactgtttggaa

SEQ ID NO: 26395 - DNA, 1944 bp, Zea Mays
gcgccattgccaagtcgaggcacgcggccagtggtgccctcgtcatcgtcaatgagcaccgacgccgcgcccctcctccactccacctgcacagcgccgctcgcccccacaccccaacccaaccatccgctccttgtcgccttccgacgctgagtttgctggtgtcgatttgcgccgtcggatgctcgatctggcagccgcctgtgccgacctactcgtcgaatccgttatctaacgtaatggatgggcaaggcacaaagcacaggattttgatggtgtctgactttttctttccaaactttggtggggtggaaagccatatctactacctgtcacaatgtctacttaagcttggccataaggttgttgtcatgacacatgcatatggaaacagatctggagtacgatatgtcacaaatggtttaaaggtctattatgtaccatggaggccattcctgatgcagaatacacttcctacactattcttgacgtttccaattatattgatcaggcaatatgtgtctcacatacaagcaaagagaacactgtcttgaggtctgggatatctccagagaaggttttcatggttcctaatgcagttgacactgcaatgtttactccctctcccaagcgcttaaactgtgatgaaatagttattgttgtggtcagtagattagtataccgaaaaggcgccgaccttcttgttgaagtcattccagaagtgtgtcggctatttccaaaggttcgctttattgttggtggtgatggtccaaaacgtgtgcgccttgaagaaatgagggagaagttctcccttcaggatagagttgagatgttaggagctgtacctcatgctcaggtgcgatcggttctgatatctggacatatatttttgaacagttcactcacagaggcattttgcatagccattctagaagcagctagctgtggactgttgacagtgagcactagagtcggtggtgtccctgagatgacatgatagtacttgcagaaccagctcctggagatatggtaagagctgtcaagaaagccatcgacatgctacctggaatagacccccagattatgcatcttcggatgaaagaactttatagttgggacgatgttgccaaaagaactgagattgtttatgatcgtgcaatggaatctccaacaacaaatttactagatcgccttcctcggtatcttacttgtggatcttgggctggaaaactgttttgcctagttatgatcatcaattacctactatggcgccttttagaatttctacagcctgctgtaggtattgaagaagtcccagatatagggccactacatgctcatttaggttcaaggaatgatgaggctcaagagaagtgaaacttaaatctttgacagttttgaaatggttggggacttgaggtggcagtcatggtatcttctgcttgtcagcattcgttctgatccacatgcagtatatgcctttatgatatggcccccgcacagcattttctcttgaagcttcccgtctccgtagtcgcagctgaaagagagtggaacgccttgatttgtaggatttcttgtcatgctggttaaagctatggtccgagtctctgtcattgccagcttcttttttttttcttcctctgcgtaatgcgtagtgagtggatggcctgcgttttaggcacgtcatcaaaccaattatctgctggaacgttggtactctcttgccaccatattgcaactagaagtcttgattggcatgttgccacacaaattcctactatgtttgatgtcttgtatcatgtcggagcaccaattcctgctgtgtttgtgatgtaataatgccaattccaaccagcgacgtgagaccaatctgcatggatccagtcgataatactttttgaatataaaataagtgcaatctcttttcggcactgtttggaa

SEQ ID NO: 26396 - DNA, 881 bp, Zea Mays
cttcacttcagtgactgtggcacagtaattactaagtgaaagaagaggcgacacttccatgtttggcataagtcgaatttgatgatgaaggcaaagtttgtggtgttacctcagaaggggagactgcaaaatgcaaaaaggttgtctgtgatccttcctacctacctgacaaggttaaaaaaattggaaaagtttttcgggcaattgctatcatgagccatcccatcccaaatactgctgaatctcactcagtacagatcatattaccacagaagcaacttggccgcagatcagacatgtatgttttctgctgttcctactctcataatgtcgcatcaaaaggcaaattcatcgcattcgtgtcagcacaagcggagactgataatccagagaaggaactaaagccagggatcgatcttcttgggaaggtggacgagttatttatcgacatatatgacagatatgaacctaccaatgactcatcagcagacaattgtttcatctcaacaagttatgatgccacaacacactttgagtccactgttatggatgtactttccctttacacaaagatcaccggaaagactgttgatctcagcgtggatctaagcgctgctagtgctgctgaagatgatatgtgatacttatcgtagtgctatgtggcgtagtgtggaaaatatttaattaagctttgctttggcaacgattattaggttcacctttatttttccaattgttgttattagctgtgttgtgaccatgattaaagattgcatgctgtaaatttgaaggcattttttttatcaaaagttgttaacgcggtgatccgtgtttagatttttgaagggtaactacactggtggtatcaaaactaaaaaaaa

SEQ ID NO: 26397 - DNA, 1497 bp, Zea Mays
gtcggtttcctttttccatttcatccctcccactccgtggtccgtgcggcctcctctgccggcccgcagcccgctcggcaaccagacgtccagacctctttgggcgaccgtgactcgagccgttggagatccacactttcctccctccatcgtttctcgatctctcgaccgggcgagggcgacgccgcccgcgcgcgcgccatggatgtggagtacgacgtgatcgtgctgggcaccgggctcaaggagtgcatcctcagcggcctcctctctgtggaccgcctcaaggtgttgcacatggacaggaatgactactacggcggagactccacatcgctcaatctcaatcagctctggaaacggttcaagggtgaagaaacaccgcctgcgcacataggagctagcagagactacaacgttgatatggttccaaagtttatgatggcaaatggtaccttggttcgtgtgctcattcatactggtgtcaccaagtacatgtccttcaaagctgtggatggaagctatgttttcaacaagggaaagctttatgcagaatcagtggctcgctttcaaggaggatcaccatatatttatcccttgtatggtttaggagaactgccacagggttttgcaagacttagcgctgtttatggtgggacctacatgttgagtaagccagagtgcaaggtcgaatttgatgatgaaggcaaagtttgtggtgttacctcagaaggggagactgcaaaatgcaaaaaggttgtctgtgatccttcctacctacctgacaaggttaaaaaaattggaaaagtttttcgggcaattgctatcatgagccatcccatcccaaatactgctgaatctcactcagtacagatcatattaccacagaagcaacttggccgcagatcagacatgtatgttttctgctgttcctactctcataatgtcgcatcaaaaggcaaattcatcgcattcgtgtcagcacaagcggagactgataatccagagaaggaactaaagccagggatcgatcttcttgggaaggtggacgagttatttatcgacatatatgacagatatgaacctaccaatgactcatcagcagacaattgtttcatctcaacaagttatgatgccacaacacactttgagtccactgttatggatgtactttccctttacacaaagatcaccggaaagactgttgatctcagcgtggatctaagcgctgctagtgctgctgaagatgatatgtgatacttatcgtagtgctatgtggcgtagtgtggaaaatatttaattaagctttgctttggcaacgattattaggttcacctttatttttccaattgttgttattagctgtgttgtgaccatgattaaagattgcatgctgtaaatttgaaggcattttttttatcaaaagttgttaacgcggtgatccgtgtttagatttttgaagggtaactacactggtggtatcaaaactaaaaaaaa

SEQ ID NO: 26398 - DNA, 5781 bp, Zea Mays
gttagttttacagcctctattaatatattaacacttataccggctttgatatcataataaagttcctttggtccattattgtcaacagctcggatcaactctccacagccatgaaacatgcttcacccaaacagctgactcgctgttttatatgcacgagtgcttgcagcaggctcgggctcctatgttcgatgttccttctgctattgaagtcatgcttacagggggttatcagaggcttccaagatgcatagaagagataggaagtcaacataaactttccccagatgaagaaaagcgcgctctgcgaaaattagatgctagcgtgcggtacagagtacttgtgacaccaagacctaaagaagtatctaatgtttcagtaactgatgggatagctgttttccgtgtggatggagaatttaaaattcttcttacattaggttaccgtggtaatgtagacttatggaggatattgcatatggagttactggttggtgagaagaagggtcctattaaactggatgaaagtaggagatttgctcttggtgatgatatagaaagaagaatggcagcttctgagaatccctttgcagtgctatatgctatacttcatgaattctgcatctctcttgctatggacactattattaagcaagctaatgttcttcgacagggaaggtggaaagatgccataagatctgaactcatctctgacagtgccactgtacaaacgggaaatactcctctaatgcagcttgttcaagatgcggagttcgattcaagtggttttaagatacctggcctgaaagttaattactggctagatgagaaaagcactagcacagcagaacctgattcatctccatttattaaaattgaggcagggctggacatgcagataaagtgtcagcatagttcatttatacttgatccatttacagataaagaggcgagcctttctcttgatctaagttgcattgatgttgagcaacttattttgagagcagtttcttgcaataggcacacacgccttcttaatattcagagacaactgtgcaaaaatgtccaaatttttcagtccccaaaagatgttgtcttgacacgagatgttgcagcagcgaaggacccaatgatgaatgcggagaagggtttctcagattgttttgggaatgaagtgcttcaagtaagggcatgtggtcaggcatatgttagtcttggaataaatatcaggagtggccgctttctcctccaatcaccagaaaatatattaccccgtgctgcacttatggactgtgaggaagctctaaacaaagggagtacatcagctaccgaggttttttcaagccttaggaccaggagcattctccacctacttgctgcaactggaagtttttttggccttaaggtttaccagcagtctcagggcactctgaagattcccaagaccttattacatggctcagatttgatggtcatggggtttccacattgtgcaaatgcctattatctgttgatgcaacttgataaggacttcaggcctgtttttcatttgcttgagacacagtgtgatgcaaatggtaatactaatgcaagtggagatgtgaaagaagctattagatataacaaaatcaatataggacagatgcaaatacttaaaaatgagatgaatgagaacccttttgatgtgaagctgcaggccctacaaagtttagtggactctgctgacatgatggagagtgatcttcctgtccaaaatgcaattgaacctcttccactacttcctgcttgttcaccatcattttcatctattgttgatgaggttttcgaatatgaacgtggttctactgctgcgcagaatcgttgtcttccagttgatattcaaggaataaatgctagggttgtctcaccaatgcatgatggatgcttatcttatacccaagctaataataacatgaatgttcatcctaatgtcagtttgaatagctatttcccaagtaactttagacatttacaaggtgcaaataaatcacttcagcttgtgccttcaagattagggaagctcatcactgctggttctgatggtgcatctaggaaacactatctttcagatttcttatcaagtatcccttcattacgaggactgcaacctagtgagccaagaaagcggagaaaaaaaacagaatcagtgcagagtctcctgcctttgcaggcacactcttctaatttgcaatcaagaggcagtctcacctatggagatgttcttgctgaaagaaataattgtgttccggcaactatatatgcttctgtgctactacatgtcataagacactgttcattatgcatcaaacatgcccaactcactgctcagatggattcccttgcgattccatatgttgaagaagttggtctgcggagaccatcgtctaatctttggttgagattaccttttgcacaggatgattcttggaaccatatatgcttgcgccttggtaaggctggaagcatgtcttgggatgttaggataaatgatccacatttcagggaactttgggaacttaatggaggaagcaccaaaacacaatggggtgttggcattcgcattgcgaatagctcagaaatggattcacatatctcatttgattccagtggtgttgttttaacttacaacactgttgaggcagatagtgtccagaagcttgtgtcagatttacgccgactttcaaatgctcgttcttttgctcttggaatgaggagactgattggtgtgaaatttcaagacaagctagatgacaaccagttaaccatggaggtgaaatcacaatctgttaataaaggtaacagtgatgctgctgacaagctatctgagcaaatgagaaagacattcaggattgaagctgtcggtctaatgagcttatggtttagctacggcaccatgcctatggtacacatagttgttgaatgggagattgctaaggctggttgcacaatgcacgtttctccagatcagctttggccacacacaaagtttctggaggatttcgtgaatggtggagaggtagcatccttcttggattgcattcggcttacagcaggaccattacttgcccttggaggtgcaattcgtcctgcaaggatgcctgttgctgtctcatctggatatagctctatgccaaaacagccgaacatccccacacaagggcctttagtaaatggttcatcttcaactatacatcacgcacctggcccctcaaatgctgcatctgcccatttaggcagtcataaccttcatgctgctgccatgctttcagctgttggacgcggtggacctgggcttgttcccagttcattactgccttttgatgtttcggttgtacttcgtgggccatactggatacgcattatatatcgcaagaaattttctgttgacatgcgctgctttgctggggatcaggtttggctccagccagctactcctcctaaaggtggaccttcagttggtggatcgttgccatgcccacagttccggcctttcataatggaacatgttgctcagggtctaaatgctcttgaacccaacttcatgaatgctacacaggctagtggacacttaaataacaatgcaggagttccacaaactgctcctagtgcaaatcgtttaaatgctacccctggtgtttctatggtcaggccaacatctggtgttgctaaccatgtagcagccagtttgagtcgagcaggaaatgccatgttggcttcttcggctcttgcttctggtattagtggaacttctgtgcgacttactgctggagctggtctccctgttcacatgaaaggtgaactaaacacagctttcataggactgggggatgacggtggatatggtggtggctgggttcctttggcagctcttaaaaaggtgctgagagggatcctaaagtacctaggagttctatggttgtttgcacaattgcctgaacttttgaaagaaatactaggatcaatcttaaaggacaatgaaggtgctctcttgaatttggatcaagagcagcctgcactccggttctatgtcggaggatatgtatttgcagtaagtgtacatcgggttcaactgcttctacaagttttgagtgtgaaaagatttcaccaccagcaacagcagcagcaggctcaaagcaatgctcaggaagagctagcagcagttgaaatcaatgaaatatgtgactactttagcagacgtgttgcctccgaaccatatgatgcttctagagttgcttcttttatcactttgcttacattaccaattttggttctgcgcgagtttttaaagctgattacatggaagaaaggtctttccccggttcatggggacattgctactgcacagagggctcgcatcgagctttgtttggagaatcactcaggatcagcttcgtctgataacaccgagaacagcagtttagccaagagtaatattcatcatgatagagcccacagttcagtagaatttgccctgacatttgtacttgaccatgctcttattcctcacatgaatgtagctggaggagctgcctggcttccatattgtgtatctgtgaaacttcgctattcttttggggacaacaatcatatagctttccttgctatgaatgggagccatggtgggagagcctgctggttgcagtttgaggagtgggaaagatgtaagcagaaggtttcaagagctgtggaaactgtgaatgggtctggtgtagctggagaggtaggccaaggaaggctgcgaatggttgcagagatgatccaaaagcagcttcaactctgtctacaacagctaagagatgacccactttctgcaggctcgactgcatcatgaacttgcttggaatgagctctatcaaggccattgatgtctgtcatattcagcatggcctttggctttgttaacgtgtagatgtgaaggaatacacatttggtagcagtgacagtttcgcctgaggcttgctcagatgacaattttgtacagtataaatggtggcggttgactctgatggacctttagttagcccatttgaacgtggcctgtaacatagctagggtgggtaataatgtgccaaggtggaattgctcagggatgcaaaatgatcttcgggaattggttgtctgtatcatctactgtaatcgtgtcctttttctccctttctgatggatagttcatttttggattcgttatcatctttcttctgtctgtactatgttaatctagacattggtggatctggtatatgtgttgttgtacatgatatattggcactggacttgagactgacgcatttgacgtcttagtattagcaggacatctctagttgtgttcagagtgattggacacaaaaaatattgcttggagcttttctttagggctagtttgggaacttaaatctcgaccccatagattcctggagaagatttgagttcccaaactagttcttaatgtttcttttttttttctattgcatcttcttagtaaatgatgtttttgtaactgtaaaaaccgtgccggtcaagattgatacctggatggataagatgatgttgggtcagatttcttgctcatggttaggaaattgatgtgagcactctggccagtttgtttgaaactgatattcgtgagttgtgattggaagcgtatggataggctttttaatcgtgttaaccgtcatacgggtaggcctttttagttctcgtgcttctacgtttgggacacaggtgtcagtttttgtgctttaa

SEQ ID NO: 26399 - DNA, 5982 bp, Zea Mays
attttgtctgacactattccatctgtcaatttttgctaaagttgggttgtagatcattcactctttgccctttctatatgaagtatgggatgcagtcaagttagttttacagcctctattaatatattaacacttataccggctttgatatcataataaagttcctttggtccattattgtcaacagctcggatcaactctccacagccatgaaacatgcttcacccaaacagctgactcgctgttttatatgcacgagtgcttgcagcaggctcgggctcctatgttcgatgttccttctgctattgaagtcatgcttacagggggttatcagaggcttccaagatgcatagaagagataggaagtcaacataaactttccccagatgaagaaaagcgcgctctgcgaaaattagatgctagcgtgcggtacagagtacttgtgacaccaagacctaaagaagtatctaatgtttcagtaactgatgggatagctgttttccgtgtggatggagaatttaaaattcttcttacattaggttaccgtggtaatgtagacttatggaggatattgcatatggagttactggttggtgagaagaagggtcctattaaactggatgaaagtaggagatttgctcttggtgatgatatagaaagaagaatggcagcttctgagaatccctttgcagtgctatatgctatacttcatgaattctgcatctctcttgctatggacactattattaagcaagctaatgttcttcgacagggaaggtggaaagatgccataagatctgaactcatctctgacagtgccactgtacaaacgggaaatactcctctaatgcagcttgttcaagatgcggagttcgattcaagtggttttaagatacctggcctgaaagttaattactggctagatgagaaaagcactagcacagcagaacctgattcatctccatttattaaaattgaggcagggctggacatgcagataaagtgtcagcatagttcatttatacttgatccatttacagataaagaggcgagcctttctcttgatctaagttgcattgatgttgagcaacttattttgagagcagtttcttgcaataggcacacacgccttcttaatattcagagacaactgtgcaaaaatgtccaaatttttcagtccccaaaagatgttgtcttgacacgagatgttgcagcagcgaaggacccaatgatgaatgcggagaagggtttctcagattgttttgggaatgaagtgcttcaagtaagggcatgtggtcaggcatatgttagtcttggaataaatatcaggagtggccgctttctcctccaatcaccagaaaatatattaccccgtgctgcacttatggactgtgaggaagctctaaacaaagggagtacatcagctaccgaggttttttcaagccttaggaccaggagcattctccacctacttgctgcaactggaagtttttttggccttaaggtttaccagcagtctcagggcactctgaagattcccaagaccttattacatggctcagatttgatggtcatggggtttccacattgtgcaaatgcctattatctgttgatgcaacttgataaggacttcaggcctgtttttcatttgcttgagacacagtgtgatgcaaatggtaatactaatgcaagtggagatgtgaaagaagctattagatataacaaaatcaatataggacagatgcaaatacttaaaaatgagatgaatgagaacccttttgatgtgaagctgcaggccctacaaagtttagtggactctgctgacatgatggagagtgatcttcctgtccaaaatgcaattgaacctcttccactacttcctgcttgttcaccatcattttcatctattgttgatgaggttttcgaatatgaacgtggttctactgctgcgcagaatcgttgtcttccagttgatattcaaggaataaatgctagggttgtctcaccaatgcatgatggatgcttatcttatacccaagctaataataacatgaatgttcatcctaatgtcagtttgaatagctatttcccaagtaactttagacatttacaaggtgcaaataaatcacttcagcttgtgccttcaagcaacgataacagcaatcaaatccctgctcaaagctcacattcagggaatcttgggaatgctacgcctggccatttgattggatcttcaactacaaccggaggattagggaagctcatcactgctggttctgatggtgcatctaggaaacactatctttcagatttcttatcaagtatcccttcattacgaggactgcaacctagtgagccaagaaagcggagaaaaaaaacagaatcagtgcagagtctcctgcctttgcaggcacactcttctaatttgcaatcaagaggcagtctcacctatggagatgttcttgctgaaagaaataattgtgttccggcaactatatatgcttctgtgctactacatgtcataagacactgttcattatgcatcaaacatgcccaactcactgctcagatggattcccttgcgattccatatgttgaagaagttggtctgcggagaccatcgtctaatctttggttgagattaccttttgcacaggatgattcttggaaccatatatgcttgcgccttggtaaggctggaagcatgtcttgggatgttaggataaatgatccacatttcagggaactttgggaacttaatggaggaagcaccaaaacacaatggggtgttggcattcgcattgcgaatagctcagaaatggattcacatatctcatttgattccagtggtgttgttttaacttacaacactgttgaggcagatagtgtccagaagcttgtgtcagatttacgccgactttcaaatgctcgttcttttgctcttggaatgaggagactgattggtgtgaaatttcaagacaagctagatgacaaccagttaaccatggaggtgaaatcacaatctgttaataaaggtaacagtgatgctgctgacaagctatctgagcaaatgagaaagacattcaggattgaagctgtcggtctaatgagcttatggtttagctacggcaccatgcctatggtacacatagttgttgaatgggagattgctaaggctggttgcacaatgcacgtttctccagatcagctttggccacacacaaagtttctggaggatttcgtgaatggtggagaggtagcatccttcttggattgcattcggcttacagcaggaccattacttgcccttggaggtgcaattcgtcctgcaaggatgcctgttgctgtctcatctggatatagctctatgccaaaacagccgaacatccccacacaagggcctttagtaaatggttcatcttcaactatacatcacgcacctggcccctcaaatgctgcatctgcccatttaggcagtcataaccttcatgctgctgccatgctttcagctgttggacgcggtggacctgggcttgttcccagttcattactgccttttgatgtttcggttgtacttcgtgggccatactggatacgcattatatatcgcaagaaattttctgttgacatgcgctgctttgctggggatcaggtttggctccagccagctactcctcctaaaggtggaccttcagttggtggatcgttgccatgcccacagttccggcctttcataatggaacatgttgctcagggtctaaatgctcttgaacccaacttcatgaatgctacacaggctagtggacacttaaataacaatgcaggagttccacaaactgctcctagtgcaaatcgtttaaatgctacccctggtgtttctatggtcaggccaacatctggtgttgctaaccatgtagcagccagtttgagtcgagcaggaaatgccatgttggcttcttcggctcttgcttctggtattagtggaacttctgtgcgacttactgctggagctggtctccctgttcacatgaaaggtgaactaaacacagctttcataggactgggggatgacggtggatatggtggtggctgggttcctttggcagctcttaaaaaggtgctgagagggatcctaaagtacctaggagttctatggttgtttgcacaattgcctgaacttttgaaagaaatactaggatcaatcttaaaggacaatgaaggtgctctcttgaatttggatcaagagcagcctgcactccggttctatgtcggaggatatgtatttgcagtaagtgtacatcgggttcaactgcttctacaagttttgagtgtgaaaagatttcaccaccagcaacagcagcagcaggctcaaagcaatgctcaggaagagctagcagcagttgaaatcaatgaaatatgtgactactttagcagacgtgttgcctccgaaccatatgatgcttctagagttgcttcttttatcactttgcttacattaccaattttggttctgcgcgagtttttaaagctgattacatggaagaaaggtctttccccggttcatggggacattgctactgcacagagggctcgcatcgagctttgtttggagaatcactcaggatcagcttcgtctgataacaccgagaacagcagtttagccaagagtaatattcatcatgatagagcccacagttcagtagaatttgccctgacatttgtacttgaccatgctcttattcctcacatgaatgtagctggaggagctgcctggcttccatattgtgtatctgtgaaacttcgctattcttttggggacaacaatcatatagctttccttgctatgaatgggagccatggtgggagagcctgctggttgcagtttgaggagtgggaaagatgtaagcagaaggtttcaagagctgtggaaactgtgaatgggtctggtgtagctggagaggtaggccaaggaaggctgcgaatggttgcagagatgatccaaaagcagcttcaactctgtctacaacagctaagagatgacccactttctgcaggctcgactgcatcatgaacttgcttggaatgagctctatcaaggccattgatgtctgtcatattcagcatggcctttggctttgttaacgtgtagatgtgaaggaatacacatttggtagcagtgacagtttcgcctgaggcttgctcagatgacaattttgtacagtataaatggtggcggttgactctgatggacctttagttagcccatttgaacgtggcctgtaacatagctagggtgggtaataatgtgccaaggtggaattgctcagggatgcaaaatgatcttcgggaattggttgtctgtatcatctactgtaatcgtgtcctttttctccctttctgatggatagttcatttttggattcgttatcatctttcttctgtctgtactatgttaatctagacattggtggatctggtatatgtgttgttgtacatgatatattggcactggacttgagactgacgcatttgacgtcttagtattagcaggacatctctagttgtgttcagagtgattggacacaaaaaatattgcttggagcttttctttagggctagtttgggaacttaaatctcgaccccatagattcctggagaagatttgagttcccaaactagttcttaatgtttcttttttttttctattgcatcttcttagtaaatgatgtttttgtaactgtaaaaaccgtgccggtcaagattgatacctggatggataagatgatgttgggtcagatttcttgctcatggttaggaaattgatgtgagcactctggccagtttgtttgaaactgatattcgtgagttgtgattggaagcgtatggataggctttttaatcgtgttaaccgtcatacgggtaggcctttttagttctcgtgcttctacgtttgggacacaggtgtcagtttttgtgctttaa

SEQ ID NO: 26400 - DNA, 5898 bp, Zea Mays
ccgcgtgggcccgtcgactagggcgcactcgcaccctccgccggtcctgaactcatcgatcgcagaagcgagagagagagagagaggaggccgtacccacgccgccgcttcgccgccgccgacctccgtctctcgcttccaccatctctctccttttcaccctctctcgcggccaccctcggtcccctccctgagccttacccttgactgagtggtttccaatttcagttccactccctcttccaccactattcacggggaggcgcggcgaatcctgcgagattcctcccggcccacgcgtgcgcacgttggcgatacagggctagagtttcgtctccggcgctttgcggagttaattaggagaaggaactggagaatgtgtaggtggtgggcgctgaaaccctagctgttcgggacgggcgtgcgtgcggggatggcaggggagctggggcagcagacggtggagctgggcgcggtggtgcggcgtgcggcggaggagtcttatctcgctctgcgggagctcgtggagaagtcgcaggcggaggccgaggggaagggcatcggcgccggagccaatggcagctggcagcggtccgacaccgagaagaagattgacttgctcaagttcatcacacgcacacgccagcgcatgcttcgtctccacgtccttgccaagtggtgtcagcagggaaggtggaaagatgccataagatctgaactcatctctgacagtgccactgtacaaacgggaaatactcctctaatgcagcttgttcaagatgcggagttcgattcaagtggttttaagatacctggcctgaaagttaattactggctagatgagaaaagcactagcacagcagaacctgattcatctccatttattaaaattgaggcagggctggacatgcagataaagtgtcagcatagttcatttatacttgatccatttacagataaagaggcgagcctttctcttgatctaagttgcattgatgttgagcaacttattttgagagcagtttcttgcaataggcacacacgccttcttaatattcagagacaactgtgcaaaaatgtccaaatttttcagtccccaaaagatgttgtcttgacacgagatgttgcagcagcgaaggacccaatgatgaatgcggagaagggtttctcagattgttttgggaatgaagtgcttcaagtaagggcatgtggtcaggcatatgttagtcttggaataaatatcaggagtggccgctttctcctccaatcaccagaaaatatattaccccgtgctgcacttatggactgtgaggaagctctaaacaaagggagtacatcagctaccgaggttttttcaagccttaggaccaggagcattctccacctacttgctgcaactggaagtttttttggccttaaggtttaccagcagtctcagggcactctgaagattcccaagaccttattacatggctcagatttgatggtcatggggtttccacattgtgcaaatgcctattatctgttgatgcaacttgataaggacttcaggcctgtttttcatttgcttgagacacagtgtgatgcaaatggtaatactaatgcaagtggagatgtgaaagaagctattagatataacaaaatcaatataggacagatgcaaatacttaaaaatgagatgaatgagaacccttttgatgtgaagctgcaggccctacaaagtttagtggactctgctgacatgatggagagtgatcttcctgtccaaaatgcaattgaacctcttccactacttcctgcttgttcaccatcattttcatctattgttgatgaggttttcgaatatgaacgtggttctactgctgcgcagaatcgttgtcttccagttgatattcaaggaataaatgctagggttgtctcaccaatgcatgatggatgcttatcttatacccaagctaataataacatgaatgttcatcctaatgtcagtttgaatagctatttcccaagtaactttagacatttacaaggtgcaaataaatcacttcagcttgtgccttcaagcaacgataacagcaatcaaatccctgctcaaagctcacattcagggaatcttgggaatgctacgcctggccatttgattggatcttcaactacaaccggaggattagggaagctcatcactgctggttctgatggtgcatctaggaaacactatctttcagatttcttatcaagtatcccttcattacgaggactgcaacctagtgagccaagaaagcggagaaaaaaaacagaatcagtgcagagtctcctgcctttgcaggcacactcttctaatttgcaatcaagaggcagtctcacctatggagatgttcttgctgaaagaaataattgtgttccggcaactatatatgcttctgtgctactacatgtcataagacactgttcattatgcatcaaacatgcccaactcactgctcagatggattcccttgcgattccatatgttgaagaagttggtctgcggagaccatcgtctaatctttggttgagattaccttttgcacaggatgattcttggaaccatatatgcttgcgccttggtaaggctggaagcatgtcttgggatgttaggataaatgatccacatttcagggaactttgggaacttaatggaggaagcaccaaaacacaatggggtgttggcattcgcattgcgaatagctcagaaatggattcacatatctcatttgattccagtggtgttgttttaacttacaacactgttgaggcagatagtgtccagaagcttgtgtcagatttacgccgactttcaaatgctcgttcttttgctcttggaatgaggagactgattggtgtgaaatttcaagacaagctagatgacaaccagttaaccatggaggtgaaatcacaatctgttaataaaggtaacagtgatgctgctgacaagctatctgagcaaatgagaaagacattcaggattgaagctgtcggtctaatgagcttatggtttagctacggcaccatgcctatggtacacatagttgttgaatgggagattgctaaggctggttgcacaatgcacgtttctccagatcagctttggccacacacaaagtttctggaggatttcgtgaatggtggagaggtagcatccttcttggattgcattcggcttacagcaggaccattacttgcccttggaggtgcaattcgtcctgcaaggatgcctgttgctgtctcatctggatatagctctatgccaaaacagccgaacatccccacacaagggcctttagtaaatggttcatcttcaactatacatcacgcacctggcccctcaaatgctgcatctgcccatttaggcagtcataaccttcatgctgctgccatgctttcagctgttggacgcggtggacctgggcttgttcccagttcattactgccttttgatgtttcggttgtacttcgtgggccatactggatacgcattatatatcgcaagaaattttctgttgacatgcgctgctttgctggggatcaggtttggctccagccagctactcctcctaaaggtggaccttcagttggtggatcgttgccatgcccacagttccggcctttcataatggaacatgttgctcagggtctaaatgctcttgaacccaacttcatgaatgctacacaggctagtggacacttaaataacaatgcaggagttccacaaactgctcctagtgcaaatcgtttaaatgctacccctggtgtttctatggtcaggccaacatctggtgttgctaaccatgtagcagccagtttgagtcgagcaggaaatgccatgttggcttcttcggctcttgcttctggtattagtggaacttctgtgcgacttactgctggagctggtctccctgttcacatgaaaggtgaactaaacacagctttcataggactgggggatgacggtggatatggtggtggctgggttcctttggcagctcttaaaaaggtgctgagagggatcctaaagtacctaggagttctatggttgtttgcacaattgcctgaacttttgaaagaaatactaggatcaatcttaaaggacaatgaaggtgctctcttgaatttggatcaagagcagcctgcactccggttctatgtcggaggatatgtatttgcagtaagtgtacatcgggttcaactgcttctacaagttttgagtgtgaaaagatttcaccaccagcaacagcagcagcaggctcaaagcaatgctcaggaagagctagcagcagttgaaatcaatgaaatatgtgactactttagcagacgtgttgcctccgaaccatatgatgcttctagagttgcttcttttatcactttgcttacattaccaattttggttctgcgcgagtttttaaagctgattacatggaagaaaggtctttccccggttcatggggacattgctactgcacagagggctcgcatcgagctttgtttggagaatcactcaggatcagcttcgtctgataacaccgagaacagcagtttagccaagagtaatattcatcatgatagagcccacagttcagtagaatttgccctgacatttgtacttgaccatgctcttattcctcacatgaatgtagctggaggagctgcctggcttccatattgtgtatctgtgaaacttcgctattcttttggggacaacaatcatatagctttccttgctatgaatgggagccatggtgggagagcctgctggttgcagtttgaggagtgggaaagatgtaagcagaaggtttcaagagctgtggaaactgtgaatgggtctggtgtagctggagaggtaggccaaggaaggctgcgaatggttgcagagatgatccaaaagcagcttcaactctgtctacaacagctaagagatgacccactttctgcaggctcgactgcatcatgaacttgcttggaatgagctctatcaaggccattgatgtctgtcatattcagcatggcctttggctttgttaacgtgtagatgtgaaggaatacacatttggtagcagtgacagtttcgcctgaggcttgctcagatgacaattttgtacagtataaatggtggcggttgactctgatggacctttagttagcccatttgaacgtggcctgtaacatagctagggtgggtaataatgtgccaaggtggaattgctcagggatgcaaaatgatcttcgggaattggttgtctgtatcatctactgtaatcgtgtcctttttctccctttctgatggatagttcatttttggattcgttatcatctttcttctgtctgtactatgttaatctagacattggtggatctggtatatgtgttgttgtacatgatatattggcactggacttgagactgacgcatttgacgtcttagtattagcaggacatctctagttgtgttcagagtgattggacacaaaaaatattgcttggagcttttctttagggctagtttgggaacttaaatctcgaccccatagattcctggagaagatttgagttcccaaactagttcttaatgtttcttttttttttctattgcatcttcttagtaaatgatgtttttgtaactgtaaaaaccgtgccggtcaagattgatacctggatggataagatgatgttgggtcagatttcttgctcatggttaggaaattgatgtgagcactctggccagtttgtttgaaactgatattcgtgagttgtgattggaagcgtatggataggctttttaatcgtgttaaccgtcatacgggtaggcctttttagttctcgtgcttctacgtttgggacacaggtgtcagtttttgtgctttaa

SEQ ID NO: 26401 - DNA, 6510 bp, Zea Mays
ccgcgtgggcccgtcgactagggcgcactcgcaccctccgccggtcctgaactcatcgatcgcagaagcgagagagagagagagaggaggccgtacccacgccgccgcttcgccgccgccgacctccgtctctcgcttccaccatctctctccttttcaccctctctcgcggccaccctcggtcccctccctgagccttacccttgactgagtggtttccaatttcagttccactccctcttccaccactattcacggggaggcgcggcgaatcctgcgagattcctcccggcccacgcgtgcgcacgttggcgatacagggctagagtttcgtctccggcgctttgcggagttaattaggagaaggaactggagaatgtgtaggtggtgggcgctgaaaccctagctgttcgggacgggcgtgcgtgcggggatggcaggggagctggggcagcagacggtggagctgggcgcggtggtgcggcgtgcggcggaggagtcttatctcgctctgcgggagctcgtggagaagtcgcaggcggaggccgaggggaagggcatcggcgccggagccaatggcagctggcagcggtccgacaccgagaagaagattgacttgctcaagttcatcacacgcacacgccagcgcatgcttcgtctccacgtccttgccaagtggtgtcagcaggttcctttggtccattattgtcaacagctcggatcaactctccacagccatgaaacatgcttcacccaaacagctgactcgctgttttatatgcacgagtgcttgcagcaggctcgggctcctatgttcgatgttccttctgctattgaagtcatgcttacagggggttatcagaggcttccaagatgcatagaagagataggaagtcaacataaactttccccagatgaagaaaagcgcgctctgcgaaaattagatgctagcgtgcggtacagagtacttgtgacaccaagacctaaagaagtatctaatgtttcagtaactgatgggatagctgttttccgtgtggatggagaatttaaaattcttcttacattaggttaccgtggtaatgtagacttatggaggatattgcatatggagttactggttggtgagaagaagggtcctattaaactggatgaaagtaggagatttgctcttggtgatgatatagaaagaagaatggcagcttctgagaatccctttgcagtgctatatgctatacttcatgaattctgcatctctcttgctatggacactattattaagcaagctaatgttcttcgacagggaaggtggaaagatgccataagatctgaactcatctctgacagtgccactgtacaaacgggaaatactcctctaatgcagcttgttcaagatgcggagttcgattcaagtggttttaagatacctggcctgaaagttaattactggctagatgagaaaagcactagcacagcagaacctgattcatctccatttattaaaattgaggcagggctggacatgcagataaagtgtcagcatagttcatttatacttgatccatttacagataaagaggcgagcctttctcttgatctaagttgcattgatgttgagcaacttattttgagagcagtttcttgcaataggcacacacgccttcttaatattcagagacaactgtgcaaaaatgtccaaatttttcagtccccaaaagatgttgtcttgacacgagatgttgcagcagcgaaggacccaatgatgaatgcggagaagggtttctcagattgttttgggaatgaagtgcttcaagtaagggcatgtggtcaggcatatgttagtcttggaataaatatcaggagtggccgctttctcctccaatcaccagaaaatatattaccccgtgctgcacttatggactgtgaggaagctctaaacaaagggagtacatcagctaccgaggttttttcaagccttaggaccaggagcattctccacctacttgctgcaactggaagtttttttggccttaaggtttaccagcagtctcagggcactctgaagattcccaagaccttattacatggctcagatttgatggtcatggggtttccacattgtgcaaatgcctattatctgttgatgcaacttgataaggacttcaggcctgtttttcatttgcttgagacacagtgtgatgcaaatggtaatactaatgcaagtggagatgtgaaagaagctattagatataacaaaatcaatataggacagatgcaaatacttaaaaatgagatgaatgagaacccttttgatgtgaagctgcaggccctacaaagtttagtggactctgctgacatgatggagagtgatcttcctgtccaaaatgcaattgaacctcttccactacttcctgcttgttcaccatcattttcatctattgttgatgaggttttcgaatatgaacgtggttctactgctgcgcagaatcgttgtcttccagttgatattcaaggaataaatgctagggttgtctcaccaatgcatgatggatgcttatcttatacccaagctaataataacatgaatgttcatcctaatgtcagtttgaatagctatttcccaagtaactttagacatttacaaggtgcaaataaatcacttcagcttgtgccttcaagcaacgataacagcaatcaaatccctgctcaaagctcacattcagggaatcttgggaatgctacgcctggccatttgattggatcttcaactacaaccggaggattagggaagctcatcactgctggttctgatggtgcatctaggaaacactatctttcagatttcttatcaagtatcccttcattacgaggactgcaacctagtgagccaagaaagcggagaaaaaaaacagaatcagtgcagagtctcctgcctttgcaggcacactcttctaatttgcaatcaagaggcagtctcacctatggagatgttcttgctgaaagaaataattgtgttccggcaactatatatgcttctgtgctactacatgtcataagacactgttcattatgcatcaaacatgcccaactcactgctcagatggattcccttgcgattccatatgttgaagaagttggtctgcggagaccatcgtctaatctttggttgagattaccttttgcacaggatgattcttggaaccatatatgcttgcgccttggtaaggctggaagcatgtcttgggatgttaggataaatgatccacatttcagggaactttgggaacttaatggaggaagcaccaaaacacaatggggtgttggcattcgcattgcgaatagctcagaaatggattcacatatctcatttgattccagtggtgttgttttaacttacaacactgttgaggcagatagtgtccagaagcttgtgtcagatttacgccgactttcaaatgctcgttcttttgctcttggaatgaggagactgattggtgtgaaatttcaagacaagctagatgacaaccagttaaccatggaggtgaaatcacaatctgttaataaaggtaacagtgatgctgctgacaagctatctgagcaaatgagaaagacattcaggattgaagctgtcggtctaatgagcttatggtttagctacggcaccatgcctatggtacacatagttgttgaatgggagattgctaaggctggttgcacaatgcacgtttctccagatcagctttggccacacacaaagtttctggaggatttcgtgaatggtggagaggtagcatccttcttggattgcattcggcttacagcaggaccattacttgcccttggaggtgcaattcgtcctgcaaggatgcctgttgctgtctcatctggatatagctctatgccaaaacagccgaacatccccacacaagggcctttagtaaatggttcatcttcaactatacatcacgcacctggcccctcaaatgctgcatctgcccatttaggcagtcataaccttcatgctgctgccatgctttcagctgttggacgcggtggacctgggcttgttcccagttcattactgccttttgatgtttcggttgtacttcgtgggccatactggatacgcattatatatcgcaagaaattttctgttgacatgcgctgctttgctggggatcaggtttggctccagccagctactcctcctaaaggtggaccttcagttggtggatcgttgccatgcccacagttccggcctttcataatggaacatgttgctcagggtctaaatgctcttgaacccaacttcatgaatgctacacaggctagtggacacttaaataacaatgcaggagttccacaaactgctcctagtgcaaatcgtttaaatgctacccctggtgtttctatggtcaggccaacatctggtgttgctaaccatgtagcagccagtttgagtcgagcaggaaatgccatgttggcttcttcggctcttgcttctggtattagtggaacttctgtgcgacttactgctggagctggtctccctgttcacatgaaaggtgaactaaacacagctttcataggactgggggatgacggtggatatggtggtggctgggttcctttggcagctcttaaaaaggtgctgagagggatcctaaagtacctaggagttctatggttgtttgcacaattgcctgaacttttgaaagaaatactaggatcaatcttaaaggacaatgaaggtgctctcttgaatttggatcaagagcagcctgcactccggttctatgtcggaggatatgtatttgcagtaagtgtacatcgggttcaactgcttctacaagttttgagtgtgaaaagatttcaccaccagcaacagcagcagcaggctcaaagcaatgctcaggaagagctagcagcagttgaaatcaatgaaatatgtgactactttagcagacgtgttgcctccgaaccatatgatgcttctagagttgcttcttttatcactttgcttacattaccaattttggttctgcgcgagtttttaaagctgattacatggaagaaaggtctttccccggttcatggggacattgctactgcacagagggctcgcatcgagctttgtttggagaatcactcaggatcagcttcgtctgataacaccgagaacagcagtttagccaagagtaatattcatcatgatagagcccacagttcagtagaatttgccctgacatttgtacttgaccatgctcttattcctcacatgaatgtagctggaggagctgcctggcttccatattgtgtatctgtgaaacttcgctattcttttggggacaacaatcatatagctttccttgctatgaatgggagccatggtgggagagcctgctggttgcagtttgaggagtgggaaagatgtaagcagaaggtttcaagagctgtggaaactgtgaatgggtctggtgtagctggagaggtaggccaaggaaggctgcgaatggttgcagagatgatccaaaagcagcttcaactctgtctacaacagctaagagatgacccactttctgcaggctcgactgcatcatgaacttgcttggaatgagctctatcaaggccattgatgtctgtcatattcagcatggcctttggctttgttaacgtgtagatgtgaaggaatacacatttggtagcagtgacagtttcgcctgaggcttgctcagatgacaattttgtacagtataaatggtggcggttgactctgatggacctttagttagcccatttgaacgtggcctgtaacatagctagggtgggtaataatgtgccaaggtggaattgctcagggatgcaaaatgatcttcgggaattggttgtctgtatcatctactgtaatcgtgtcctttttctccctttctgatggatagttcatttttggattcgttatcatctttcttctgtctgtactatgttaatctagacattggtggatctggtatatgtgttgttgtacatgatatattggcactggacttgagactgacgcatttgacgtcttagtattagcaggacatctctagttgtgttcagagtgattggacacaaaaaatattgcttggagcttttctttagggctagtttgggaacttaaatctcgaccccatagattcctggagaagatttgagttcccaaactagttcttaatgtttcttttttttttctattgcatcttcttagtaaatgatgtttttgtaactgtaaaaaccgtgccggtcaagattgatacctggatggataagatgatgttgggtcagatttcttgctcatggttaggaaattgatgtgagcactctggccagtttgtttgaaactgatattcgtgagttgtgattggaagcgtatggataggctttttaatcgtgttaaccgtcatacgggtaggcctttttagttctcgtgcttctacgtttgggacacaggtgtcagtttttgtgctttaa

SEQ ID NO: 26402 - DNA, 6467 bp, Zea Mays
ccgcgtgggcccgtcgactagggcgcactcgcaccctccgccggtcctgaactcatcgatcgcagaagcgagagagagagagagaggaggccgtacccacgccgccgcttcgccgccgccgacctccgtctctcgcttccaccatctctctccttttcaccctctctcgcggccaccctcggtcccctccctgagccttacccttgactgagtggtttccaatttcagttccactccctcttccaccactattcacggggaggcgcggcgaatcctgcgagattcctcccggcccacgcgtgcgcacgttggcgatacagggctagagtttcgtctccggcgctttgcggagttaattaggagaaggaactggagaatgtgtaggtggtgggcgctgaaaccctagctgttcgggacgggcgtgcgtgcggggatggcaggggagctggggcagcagacggtggagctgggcgcggtggtgcggcgtgcggcggaggagtcttatctcgctctgcgggagctcgtggagaagtcgcaggcggaggccgaggggaagggcatcggcgccggagccaatggcagctggcagcggtccgacaccgagaagaagattgacttgctcaagttcatcacacgcacacgccagcgcatgcttcgtctccacgtccttgccaagtggtgtcagcaggttcctttggtccattattgtcaacagctcggatcaactctccacagccatgaaacatgcttcacccaaacagctgactcgctgttttatatgcacgagtgcttgcagcaggctcgggctcctatgttcgatgttccttctgctattgaagtcatgcttacagggggttatcagaggcttccaagatgcatagaagagataggaagtcaacataaactttccccagatgaagaaaagcgcgctctgcgaaaattagatgctagcgtgcggtacagagtacttgtgacaccaagacctaaagaagtatctaatgtttcagtaactgatgggatagctgttttccgtgtggatggagaatttaaaattcttcttacattaggttaccgtggtaatgtagacttatggaggatattgcatatggagttactggttggtgagaagaagggtcctattaaactggatgaaagtaggagatttgctcttggtgatgatatagaaagaagaatggcagcttctgagaatccctttgcagtgctatatgctatacttcatgaattctgcatctctcttgctatggacactattattaagcaagctaatgttcttcgacagggaaggtggaaagatgccataagatctgaactcatctctgacagtgccactgtacaaacgggaaatactcctctaatgcagcttgttcaagatgcggagttcgattcaagtggttttaagatacctggcctgaaagttaattactggctagatgagaaaagcactagcacagcagaacctgattcatctccatttattaaaattgaggcagggctggacatgcagataaagtgtcagcatagttcatttatacttgatccatttacagataaagaggcgagcctttctcttgatctaagttgcattgatgttgagcaacttattttgagagcagtttcttgcaataggcacacacgccttcttaatattcagagacaactgtgcaaaaatgtccaaatttttcagtccccaaaagatgttgtcttgacacgagatgttgcagcagcgaaggacccaatgatgaatgcggagaagggtttctcagattgttttgggaatgaagtgcttcaagtaagggcatgtggtcaggcatatgttagtcttggaataaatatcaggagtggccgctttctcctccaatcaccagaaaatatattaccccgtgctgcacttatggactgtgaggaagctctaaacaaagggagtacatcagctaccgaggttttttcaagccttaggaccaggagcattctccacctacttgctgcaactggaagtttttttggccttaaggtttaccagcagtctcagggcactctgaagattcccaagaccttattacatggctcagatttgatggtcatggggtttccacattgtgcaaatgcctattatctgttgatgcaacttgataaggacttcaggcctgtttttcatttgcttgagacacagtgtgatgcaaatggtaatactaatgcaagtggagatgtgaaagaagctattagatataacaaaatcaatataggacagatgcaaatacttaaaaatgagatgaatgagaacccttttgatgtgaagctgcaggccctacaaagtttagtggactctgctgacatgatggagagtgatcttcctgtccaaaatgcaattgaacctcttccactacttcctgcttgttcaccatcattttcatctattgttgatgaggttttcgaatatgaacgtggttctactgctgcgcagaatcgttgtcttccagttgatattcaaggaataaatgctagggttgtctcaccaatgcatgatggatgcttatcttatacccaagctaataataacatgaatgttcatcctaatgtcagtttgaatagctatttcccaagtaactttagacatttacaaggtgcaaataaatcacttcagcttgtgccttcaagcaacgataacagcaatcaaatccctgctcaaagctcacattcagggaatcttgggaatgctacgcctggccatttgattggatcttcaactacaaccggaggaaacactatctttcagatttcttatcaagtatcccttcattacgaggactgcaacctagtgagccaagaaagcggagaaaaaaaacagaatcagtgcagagtctcctgcctttgcaggcacactcttctaatttgcaatcaagaggcagtctcacctatggagatgttcttgctgaaagaaataattgtgttccggcaactatatatgcttctgtgctactacatgtcataagacactgttcattatgcatcaaacatgcccaactcactgctcagatggattcccttgcgattccatatgttgaagaagttggtctgcggagaccatcgtctaatctttggttgagattaccttttgcacaggatgattcttggaaccatatatgcttgcgccttggtaaggctggaagcatgtcttgggatgttaggataaatgatccacatttcagggaactttgggaacttaatggaggaagcaccaaaacacaatggggtgttggcattcgcattgcgaatagctcagaaatggattcacatatctcatttgattccagtggtgttgttttaacttacaacactgttgaggcagatagtgtccagaagcttgtgtcagatttacgccgactttcaaatgctcgttcttttgctcttggaatgaggagactgattggtgtgaaatttcaagacaagctagatgacaaccagttaaccatggaggtgaaatcacaatctgttaataaaggtaacagtgatgctgctgacaagctatctgagcaaatgagaaagacattcaggattgaagctgtcggtctaatgagcttatggtttagctacggcaccatgcctatggtacacatagttgttgaatgggagattgctaaggctggttgcacaatgcacgtttctccagatcagctttggccacacacaaagtttctggaggatttcgtgaatggtggagaggtagcatccttcttggattgcattcggcttacagcaggaccattacttgcccttggaggtgcaattcgtcctgcaaggatgcctgttgctgtctcatctggatatagctctatgccaaaacagccgaacatccccacacaagggcctttagtaaatggttcatcttcaactatacatcacgcacctggcccctcaaatgctgcatctgcccatttaggcagtcataaccttcatgctgctgccatgctttcagctgttggacgcggtggacctgggcttgttcccagttcattactgccttttgatgtttcggttgtacttcgtgggccatactggatacgcattatatatcgcaagaaattttctgttgacatgcgctgctttgctggggatcaggtttggctccagccagctactcctcctaaaggtggaccttcagttggtggatcgttgccatgcccacagttccggcctttcataatggaacatgttgctcagggtctaaatgctcttgaacccaacttcatgaatgctacacaggctagtggacacttaaataacaatgcaggagttccacaaactgctcctagtgcaaatcgtttaaatgctacccctggtgtttctatggtcaggccaacatctggtgttgctaaccatgtagcagccagtttgagtcgagcaggaaatgccatgttggcttcttcggctcttgcttctggtattagtggaacttctgtgcgacttactgctggagctggtctccctgttcacatgaaaggtgaactaaacacagctttcataggactgggggatgacggtggatatggtggtggctgggttcctttggcagctcttaaaaaggtgctgagagggatcctaaagtacctaggagttctatggttgtttgcacaattgcctgaacttttgaaagaaatactaggatcaatcttaaaggacaatgaaggtgctctcttgaatttggatcaagagcagcctgcactccggttctatgtcggaggatatgtatttgcagtaagtgtacatcgggttcaactgcttctacaagttttgagtgtgaaaagatttcaccaccagcaacagcagcagcaggctcaaagcaatgctcaggaagagctagcagcagttgaaatcaatgaaatatgtgactactttagcagacgtgttgcctccgaaccatatgatgcttctagagttgcttcttttatcactttgcttacattaccaattttggttctgcgcgagtttttaaagctgattacatggaagaaaggtctttccccggttcatggggacattgctactgcacagagggctcgcatcgagctttgtttggagaatcactcaggatcagcttcgtctgataacaccgagaacagcagtttagccaagagtaatattcatcatgatagagcccacagttcagtagaatttgccctgacatttgtacttgaccatgctcttattcctcacatgaatgtagctggaggagctgcctggcttccatattgtgtatctgtgaaacttcgctattcttttggggacaacaatcatatagctttccttgctatgaatgggagccatggtgggagagcctgctggttgcagtttgaggagtgggaaagatgtaagcagaaggtttcaagagctgtggaaactgtgaatgggtctggtgtagctggagaggtaggccaaggaaggctgcgaatggttgcagagatgatccaaaagcagcttcaactctgtctacaacagctaagagatgacccactttctgcaggctcgactgcatcatgaacttgcttggaatgagctctatcaaggccattgatgtctgtcatattcagcatggcctttggctttgttaacgtgtagatgtgaaggaatacacatttggtagcagtgacagtttcgcctgaggcttgctcagatgacaattttgtacagtataaatggtggcggttgactctgatggacctttagttagcccatttgaacgtggcctgtaacatagctagggtgggtaataatgtgccaaggtggaattgctcagggatgcaaaatgatcttcgggaattggttgtctgtatcatctactgtaatcgtgtcctttttctccctttctgatggatagttcatttttggattcgttatcatctttcttctgtctgtactatgttaatctagacattggtggatctggtatatgtgttgttgtacatgatatattggcactggacttgagactgacgcatttgacgtcttagtattagcaggacatctctagttgtgttcagagtgattggacacaaaaaatattgcttggagcttttctttagggctagtttgggaacttaaatctcgaccccatagattcctggagaagatttgagttcccaaactagttcttaatgtttcttttttttttctattgcatcttcttagtaaatgatgtttttgtaactgtaaaaaccgtgccggtcaagattgatacctggatggataagatgatgttgggtcagatttcttgctcatggttaggaaattgatgtgagcactctggccagtttgtttgaaactgatattcgtgagttgtgattggaagcgtatggataggctttttaatcgtgttaaccgtcatacgggtaggcctttttagttctcgtgcttctacgtttgggacacaggtgtcagtttttgtgctttaa

SEQ ID NO: 26403 - DNA, 6065 bp, Zea Mays
ccgcgtgggcccgtcgactagggcgcactcgcaccctccgccggtcctgaactcatcgatcgcagaagcgagagagagagagagaggaggccgtacccacgccgccgcttcgccgccgccgacctccgtctctcgcttccaccatctctctccttttcaccctctctcgcggccaccctcggtcccctccctgagccttacccttgactgagtggtttccaatttcagttccactccctcttccaccactattcacggggaggcgcggcgaatcctgcgagattcctcccggcccacgcgtgcgcacgttggcgatacagggctagagtttcgtctccggcgctttgcggagttaattaggagaaggaactggagaatgtgtaggtggtgggcgctgaaaccctagctgttcgggacgggcgtgcgtgcggggatggcaggggagctggggcagcagacggtggagctgggcgcggtggtgcggcgtgcggcggaggagtcttatctcgctctgcgggagctcgtggagaagtcgcaggcggaggccgaggggaagggcatcggcgccggagccaatggcagctggcagcggtccgacaccgagaagaagattgacttgctcaagttcatcacacgcacacgccagcgcatgcttcgtctccacgtccttgccaagtggtgtcagcaggttcctttggtccattattgtcaacagctcggatcaactctccacagccatgaaacatgcttcacccaaacagctgactcgctgttttatatgcacgagtgcttgcagcaggctcgggctcctatgttcgatgttccttctgctattgaagtcatgcttacagggggttatcagaggcttccaagatgcatagaagagataggaagtcaacataaactttccccagatgaagaaaagcgcgctctgcgaaaattagatgctagcgtgcgggaaggtggaaagatgccataagatctgaactcatctctgacagtgccactgtacaaacgggaaatactcctctaatgcagcttgttcaagatgcggagttcgattcaagtggttttaagatacctggcctgaaagttaattactggctagatgagaaaagcactagcacagcagaacctgattcatctccatttattaaaattgaggcagggctggacatgcagataaagtgtcagcatagttcatttatacttgatccatttacagataaagaggcgagcctttctcttgatctaagttgcattgatgttgagcaacttattttgagagcagtttcttgcaataggcacacacgccttcttaatattcagagacaactgtgcaaaaatgtccaaatttttcagtccccaaaagatgttgtcttgacacgagatgttgcagcagcgaaggacccaatgatgaatgcggagaagggtttctcagattgttttgggaatgaagtgcttcaagtaagggcatgtggtcaggcatatgttagtcttggaataaatatcaggagtggccgctttctcctccaatcaccagaaaatatattaccccgtgctgcacttatggactgtgaggaagctctaaacaaagggagtacatcagctaccgaggttttttcaagccttaggaccaggagcattctccacctacttgctgcaactggaagtttttttggccttaaggtttaccagcagtctcagggcactctgaagattcccaagaccttattacatggctcagatttgatggtcatggggtttccacattgtgcaaatgcctattatctgttgatgcaacttgataaggacttcaggcctgtttttcatttgcttgagacacagtgtgatgcaaatggtaatactaatgcaagtggagatgtgaaagaagctattagatataacaaaatcaatataggacagatgcaaatacttaaaaatgagatgaatgagaacccttttgatgtgaagctgcaggccctacaaagtttagtggactctgctgacatgatggagagtgatcttcctgtccaaaatgcaattgaacctcttccactacttcctgcttgttcaccatcattttcatctattgttgatgaggttttcgaatatgaacgtggttctactgctgcgcagaatcgttgtcttccagttgatattcaaggaataaatgctagggttgtctcaccaatgcatgatggatgcttatcttatacccaagctaataataacatgaatgttcatcctaatgtcagtttgaatagctatttcccaagtaactttagacatttacaaggtgcaaataaatcacttcagcttgtgccttcaagattagggaagctcatcactgctggttctgatggtgcatctaggaaacactatctttcagatttcttatcaagtatcccttcattacgaggactgcaacctagtgagccaagaaagcggagaaaaaaaacagaatcagtgcagagtctcctgcctttgcaggcacactcttctaatttgcaatcaagaggcagtctcacctatggagatgttcttgctgaaagaaataattgtgttccggcaactatatatgcttctgtgctactacatgtcataagacactgttcattatgcatcaaacatgcccaactcactgctcagatggattcccttgcgattccatatgttgaagaagttggtctgcggagaccatcgtctaatctttggttgagattaccttttgcacaggatgattcttggaaccatatatgcttgcgccttggtaaggctggaagcatgtcttgggatgttaggataaatgatccacatttcagggaactttgggaacttaatggaggaagcaccaaaacacaatggggtgttggcattcgcattgcgaatagctcagaaatggattcacatatctcatttgattccagtggtgttgttttaacttacaacactgttgaggcagatagtgtccagaagcttgtgtcagatttacgccgactttcaaatgctcgttcttttgctcttggaatgaggagactgattggtgtgaaatttcaagacaagctagatgacaaccagttaaccatggaggtgaaatcacaatctgttaataaaggtaacagtgatgctgctgacaagctatctgagcaaatgagaaagacattcaggattgaagctgtcggtctaatgagcttatggtttagctacggcaccatgcctatggtacacatagttgttgaatgggagattgctaaggctggttgcacaatgcacgtttctccagatcagctttggccacacacaaagtttctggaggatttcgtgaatggtggagaggtagcatccttcttggattgcattcggcttacagcaggaccattacttgcccttggaggtgcaattcgtcctgcaaggatgcctgttgctgtctcatctggatatagctctatgccaaaacagccgaacatccccacacaagggcctttagtaaatggttcatcttcaactatacatcacgcacctggcccctcaaatgctgcatctgcccatttaggcagtcataaccttcatgctgctgccatgctttcagctgttggacgcggtggacctgggcttgttcccagttcattactgccttttgatgtttcggttgtacttcgtgggccatactggatacgcattatatatcgcaagaaattttctgttgacatgcgctgctttgctggggatcaggtttggctccagccagctactcctcctaaaggtggaccttcagttggtggatcgttgccatgcccacagttccggcctttcataatggaacatgttgctcagggtctaaatgctcttgaacccaacttcatgaatgctacacaggctagtggacacttaaataacaatgcaggagttccacaaactgctcctagtgcaaatcgtttaaatgctacccctggtgtttctatggtcaggccaacatctggtgttgctaaccatgtagcagccagtttgagtcgagcaggaaatgccatgttggcttcttcggctcttgcttctggtattagtggaacttctgtgcgacttactgctggagctggtctccctgttcacatgaaaggtgaactaaacacagctttcataggactgggggatgacggtggatatggtggtggctgggttcctttggcagctcttaaaaaggtgctgagagggatcctaaagtacctaggagttctatggttgtttgcacaattgcctgaacttttgaaagaaatactaggatcaatcttaaaggacaatgaaggtgctctcttgaatttggatcaagagcagcctgcactccggttctatgtcggaggatatgtatttgcagtaagtgtacatcgggttcaactgcttctacaagttttgagtgtgaaaagatttcaccaccagcaacagcagcagcaggctcaaagcaatgctcaggaagagctagcagcagttgaaatcaatgaaatatgtgactactttagcagacgtgttgcctccgaaccatatgatgcttctagagttgcttcttttatcactttgcttacattaccaattttggttctgcgcgagtttttaaagctgattacatggaagaaaggtctttccccggttcatggggacattgctactgcacagagggctcgcatcgagctttgtttggagaatcactcaggatcagcttcgtctgataacaccgagaacagcagtttagccaagagtaatattcatcatgatagagcccacagttcagtagaatttgccctgacatttgtacttgaccatgctcttattcctcacatgaatgtagctggaggagctgcctggcttccatattgtgtatctgtgaaacttcgctattcttttggggacaacaatcatatagctttccttgctatgaatgggagccatggtgggagagcctgctggttgcagtttgaggagtgggaaagatgtaagcagaaggtttcaagagctgtggaaactgtgaatgggtctggtgtagctggagaggtaggccaaggaaggctgcgaatggttgcagagatgatccaaaagcagcttcaactctgtctacaacagctaagagatgacccactttctgcaggctcgactgcatcatgaacttgcttggaatgagctctatcaaggccattgatgtctgtcatattcagcatggcctttggctttgttaacgtgtagatgtgaaggaatacacatttggtagcagtgacagtttcgcctgaggcttgctcagatgacaattttgtacagtataaatggtggcggttgactctgatggacctttagttagcccatttgaacgtggcctgtaacatagctagggtgggtaataatgtgccaaggtggaattgctcagggatgcaaaatgatcttcgggaattggttgtctgtatcatctactgtaatcgtgtcctttttctccctttctgatggatagttcatttttggattcgttatcatctttcttctgtctgtactatgttaatctagacattggtggatctggtatatgtgttgttgtacatgatatattggcactggacttgagactgacgcatttgacgtcttagtattagcaggacatctctagttgtgttcagagtgattggacacaaaaaatattgcttggagcttttctttagggctagtttgggaacttaaatctcgaccccatagattcctggagaagatttgagttcccaaactagttcttaatgtttcttttttttttctattgcatcttcttagtaaatgatgtttttgtaactgtaaaaaccgtgccggtcaagattgatacctggatggataagatgatgttgggtcagatttcttgctcatggttaggaaattgatgtgagcactctggccagtttgtttgaaactgatattcgtgagttgtgattggaagcgtatggataggctttttaatcgtgttaaccgtcatacgggtaggcctttttagttctcgtgcttctacgtttgggacacaggtgtcagtttttgtgctttaa

SEQ ID NO: 26404 - DNA, 6232 bp, Zea Mays
ccgcgtgggcccgtcgactagggcgcactcgcaccctccgccggtcctgaactcatcgatcgcagaagcgagagagagagagagaggaggccgtacccacgccgccgcttcgccgccgccgacctccgtctctcgcttccaccatctctctccttttcaccctctctcgcggccaccctcggtcccctccctgagccttacccttgactgagtggtttccaatttcagttccactccctcttccaccactattcacggggaggcgcggcgaatcctgcgagattcctcccggcccacgcgtgcgcacgttggcgatacagggctagagtttcgtctccggcgctttgcggagttaattaggagaaggaactggagaatgtgtaggtggtgggcgctgaaaccctagctgttcgggacgggcgtgcgtgcggggatggcaggggagctggggcagcagacggtggagctgggcgcggtggtgcggcgtgcggcggaggagtcttatctcgctctgcgggagctcgtggagaagtcgcaggcggaggccgaggggaagggcatcggcgccggagccaatggcagctggcagcggtccgacaccgagaagaagattgacttgctcaagttcatcacacgcacacgccagcgcatgcttcgtctccacgtccttgccaagtggtgtcagcaggttcctttggtccattattgtcaacagctcggatcaactctccacagccatgaaacatgcttcacccaaacagctgactcgctgttttatatgcacgagtgcttgcagcaggctcgggctcctatgttcgatgttccttctgctattgaagtcatgcttacagggggttatcagaggcttccaagatgcatagaagagataggaagtcaacataaactttccccagatgaagaaaagcgcgctctgcgaaaattagatgctagcgtgcggtacagagtacttgtgacaccaagacctaaagaagtatctaatgtttcagtaactgatgggatagctgttttccgtgtggatggagaatttaaaattcttcttacattaggttaccgtggtaatgtagacttatggaggatattgcatatggagttactggttggtgagaagaagggtcctattaaactggatgaaagtaggagatttgctcttggtgatgatatagaaagaagaatggcagcttctgagaatccctttgcagtgctatatgctatacttcatgaattctgcatctctcttgctatggacactattattaagcaagctaatgttcttcgacagggaaggtggaaagatgccataagatctgaactcatctctgacagtgccactgtacaaacgggaaatactcctctaatgcagcttgttcaagatgcggagttcgattcaagtggttttaagatacctggcctgaaagttaattactggctagatgagaaaagcactagcacagcagaacctgattcatctccatttattaaaattgaggcagggctggacatgcagataaagtgtcagcatagttcatttatacttgatccatttacagataaagaggcgagcctttctcttgatctaagttgcattgatgttgagcaacttattttgagagcagtttcttgcaataggcacacacgccttcttaatattcagagacaactgtgcaaaaatgtccaaatttttcagtccccaaaagatgttgtcttgacacgagatgttgcagcagcgaaggacccaatgatgaatgcggagaagggtttctcagattgttttgggaatgaagtgcttcaagtaagggcatgtggtcaggcatatgttagtcttggaataaatatcaggagtggccgctttctcctccaatcaccagaaaatatattaccccgtgctgcacttatggactgtgaggaagctctaaacaaagggagtacatcagctaccgaggttttttcaagccttaggaccaggagcattctccacctacttgctgcaactggaagtttttttggccttaaggtttaccagcagtctcagggcactctgaagattcccaagaccttattacatggctcagatttgatggtcatggggtttccacattgtgcaaatgcctattatctgttgatgcaacttgataaggacttcaggcctgtttttcatttgcttgagacacagtgtgatgcaaatgaatcgttgtcttccagttgatattcaaggaataaatgctagggttgtctcaccaatgcatgatggatgcttatcttatacccaagctaataataacatgaatgttcatcctaatgtcagtttgaatagctatttcccaagtaactttagacatttacaaggtgcaaataaatcacttcagcttgtgccttcaagcaacgataacagcaatcaaatccctgctcaaagctcacattcagggaatcttgggaatgctacgcctggccatttgattggatcttcaactacaaccggaggattagggaagctcatcactgctggttctgatggtgcatctaggaaacactatctttcagatttcttatcaagtatcccttcattacgaggactgcaacctagtgagccaagaaagcggagaaaaaaaacagaatcagtgcagagtctcctgcctttgcaggcacactcttctaatttgcaatcaagaggcagtctcacctatggagatgttcttgctgaaagaaataattgtgttccggcaactatatatgcttctgtgctactacatgtcataagacactgttcattatgcatcaaacatgcccaactcactgctcagatggattcccttgcgattccatatgttgaagaagttggtctgcggagaccatcgtctaatctttggttgagattaccttttgcacaggatgattcttggaaccatatatgcttgcgccttggtaaggctggaagcatgtcttgggatgttaggataaatgatccacatttcagggaactttgggaacttaatggaggaagcaccaaaacacaatggggtgttggcattcgcattgcgaatagctcagaaatggattcacatatctcatttgattccagtggtgttgttttaacttacaacactgttgaggcagatagtgtccagaagcttgtgtcagatttacgccgactttcaaatgctcgttcttttgctcttggaatgaggagactgattggtgtgaaatttcaagacaagctagatgacaaccagttaaccatggaggtgaaatcacaatctgttaataaaggtaacagtgatgctgctgacaagctatctgagcaaatgagaaagacattcaggattgaagctgtcggtctaatgagcttatggtttagctacggcaccatgcctatggtacacatagttgttgaatgggagattgctaaggctggttgcacaatgcacgtttctccagatcagctttggccacacacaaagtttctggaggatttcgtgaatggtggagaggtagcatccttcttggattgcattcggcttacagcaggaccattacttgcccttggaggtgcaattcgtcctgcaaggatgcctgttgctgtctcatctggatatagctctatgccaaaacagccgaacatccccacacaagggcctttagtaaatggttcatcttcaactatacatcacgcacctggcccctcaaatgctgcatctgcccatttaggcagtcataaccttcatgctgctgccatgctttcagctgttggacgcggtggacctgggcttgttcccagttcattactgccttttgatgtttcggttgtacttcgtgggccatactggatacgcattatatatcgcaagaaattttctgttgacatgcgctgctttgctggggatcaggtttggctccagccagctactcctcctaaaggtggaccttcagttggtggatcgttgccatgcccacagttccggcctttcataatggaacatgttgctcagggtctaaatgctcttgaacccaacttcatgaatgctacacaggctagtggacacttaaataacaatgcaggagttccacaaactgctcctagtgcaaatcgtttaaatgctacccctggtgtttctatggtcaggccaacatctggtgttgctaaccatgtagcagccagtttgagtcgagcaggaaatgccatgttggcttcttcggctcttgcttctggtattagtggaacttctgtgcgacttactgctggagctggtctccctgttcacatgaaaggtgaactaaacacagctttcataggactgggggatgacggtggatatggtggtggctgggttcctttggcagctcttaaaaaggtgctgagagggatcctaaagtacctaggagttctatggttgtttgcacaattgcctgaacttttgaaagaaatactaggatcaatcttaaaggacaatgaaggtgctctcttgaatttggatcaagagcagcctgcactccggttctatgtcggaggatatgtatttgcagtaagtgtacatcgggttcaactgcttctacaagttttgagtgtgaaaagatttcaccaccagcaacagcagcagcaggctcaaagcaatgctcaggaagagctagcagcagttgaaatcaatgaaatatgtgactactttagcagacgtgttgcctccgaaccatatgatgcttctagagttgcttcttttatcactttgcttacattaccaattttggttctgcgcgagtttttaaagctgattacatggaagaaaggtctttccccggttcatggggacattgctactgcacagagggctcgcatcgagctttgtttggagaatcactcaggatcagcttcgtctgataacaccgagaacagcagtttagccaagagtaatattcatcatgatagagcccacagttcagtagaatttgccctgacatttgtacttgaccatgctcttattcctcacatgaatgtagctggaggagctgcctggcttccatattgtgtatctgtgaaacttcgctattcttttggggacaacaatcatatagctttccttgctatgaatgggagccatggtgggagagcctgctggttgcagtttgaggagtgggaaagatgtaagcagaaggtttcaagagctgtggaaactgtgaatgggtctggtgtagctggagaggtaggccaaggaaggctgcgaatggttgcagagatgatccaaaagcagcttcaactctgtctacaacagctaagagatgacccactttctgcaggctcgactgcatcatgaacttgcttggaatgagctctatcaaggccattgatgtctgtcatattcagcatggcctttggctttgttaacgtgtagatgtgaaggaatacacatttggtagcagtgacagtttcgcctgaggcttgctcagatgacaattttgtacagtataaatggtggcggttgactctgatggacctttagttagcccatttgaacgtggcctgtaacatagctagggtgggtaataatgtgccaaggtggaattgctcagggatgcaaaatgatcttcgggaattggttgtctgtatcatctactgtaatcgtgtcctttttctccctttctgatggatagttcatttttggattcgttatcatctttcttctgtctgtactatgttaatctagacattggtggatctggtatatgtgttgttgtacatgatatattggcactggacttgagactgacgcatttgacgtcttagtattagcaggacatctctagttgtgttcagagtgattggacacaaaaaatattgcttggagcttttctttagggctagtttgggaacttaaatctcgaccccatagattcctggagaagatttgagttcccaaactagttcttaatgtttcttttttttttctattgcatcttcttagtaaatgatgtttttgtaactgtaaaaaccgtgccggtcaagattgatacctggatggataagatgatgttgggtcagatttcttgctcatggttaggaaattgatgtgagcactctggccagtttgtttgaaactgatattcgtgagttgtgattggaagcgtatggataggctttttaatcgtgttaaccgtcatacgggtaggcctttttagttctcgtgcttctacgtttgggacacaggtgtcagtttttgtgctttaa

SEQ ID NO: 26405 - DNA, 512 bp, Zea Mays
atcttcccgagctgagccaccaccagtcctccgttcccgagctggttcgccgccgccgtccgtcgtcctgctgttgcagcaccttcggagagccgatcctggaggacgaccagctagagcctgctgaccaggagcccgacgtcgaggaggagtacgcgagtgaagaggatcctgactttgtgcccgacgagtagcgcgttcctacacccaagtcccctgtggtgccattgtgttgtagcagacgccatgtccgatgaggagctcgcagtcgcgttcttcgccaccactattttatttctagtttctattatcgtattattagaatgtgctaaataaaagccttgtatgttatggcaccacttgagcattttactggaactctgtattctattaaatctatgcatatttagtttcggtcattagaccgggtcgcttcacttatttgggcggcctcaccagaatcgtaatcctcgttgcctacctgtggtacctgtgctccatactcaacaata

SEQ ID NO: 26406 - DNA, 1790 bp, Zea Mays
ggtgatttaatgtaaagctgcagctattaatagagaagctcaaatttccccctttttgaattttacattctgatgcaaagaagggaaaacagtatccaatcattcgaaaaactccgcctggtgcgacacaacttggagcaagcaaaagcactaatggatgctttgattaagagggaggagacaaagcgggaggccatggaatgccaggttaacctgcaacgcgttcagatgaaatataagcatgaggcccagcttgttgaggataggactaccttgtctggcttccagcaaactaacagcagatttgaatcgagtgatgatgattatgcgaattcagatgacacaacaactgaacaaccatatatacgtccagctgttttccatcctaggtttcctgctaacaagctatctgtgatccctccacttcgcataaagcgtgaacgagaactaaaaaggaggactcagcagaatggctgggcatttaaacgggatcctgaggagccagtattcttattcacaagacctcttgatccggagaagttgatcgcagcaggtatcaagccaccaccagatcctcctattgagaatggtgccacatcgccaccatttcggtgtcgaggtaggattggacgaggcggccgcatcatctttgatcggtggaatcctcttctccagacaccaattgaccaggagacctcttattatgtgccgtacggtcacaagcccccctcacctgaaggttaaagcagtttttcacatgcacatagtgcttaatgtcactggcacagctatgaaatttttgaagcccccgagcaattggcccttggagagcccatttgtgactacctgagttgtgagttcagtggatctgatggaaaggcaagaaggctccttgataagcagcagcctcagtggaagattgagagtgtattgtgggggtatattggggctagcatttctttctcagatgtggcttggtcatcttttttcatagctgttgtaaaattattgcagtgtaggtgaaagagtagattttttttgtctaatcttggcatttagggtcagtatttatatcatgctctctcaattgattattcatttggagtagaggaaatcattctcgttgctacgcccagcttttctgtataatgcttcaacaccttgttgcatgtattcaactaatgcgcacacgtgtatatactgtaactcgatgtgcattggccttttgtggcaaatgtcactagtcagtaggttagggagagaatggtaatggaaggggttcgacaatgatatttaatctgttgttgaaatgttgctgcgcaactcagctcttgtaactgcacagattcagtttttttgttgtgtaacacaaagtcaacagacagctggtcattatcaggactgttatatgttctgattcttcctgataacacttcgttggagaattgcgttgaatgcagcaagggttcatcatgctcgtgtgttagcaacaatgcgacctggtgtattcagaagaataggcatgttacaattaaatcgactcagtttctgtcaatcttgcccatgctcatgtcagtagtcaagacagctgaaatggtattgttttgagctgtttgtctgtaaggtcatttctgctggtgctcatgccttggacatgacgaattgagatgttctgttcaaatgtttggctgcgaggcgttgcctcaggaaatattactgggcataggcacaggtctgaagcagtaaactgttgcattcacagagcgtgtagtgtttgtgcttttggtagc

SEQ ID NO: 26407 - DNA, 1867 bp, Zea Mays
gatgagactcctaaaaaggcagcttatgtttggcttgcaaagtgccgacttagcgaaagagcttctagccgcctccaccagtgaatgatacaaatccatacaatgtcttcagaccaagagaaaaggcccatcgtcttcatacaagaaggatgcaaagaagggaaaacagtatccaatcattcgaaaaactccgcctggtgcgacacaacttggagcaagcaaaagcactaatggatgctttgattaagagggaggagacaaagcgggaggccatggaatgccaggttaacctgcaacgcgttcagatgaaatataagcatgaggcccagcttgttgaggataggactaccttgtctggcttccagcaaactaacagcagatttgaatcgagtgatgatgattatgcgaattcagatgacacaacaactgaacaaccatatatacgtccagctgttttccatcctaggtttcctgctaacaagctatctgtgatccctccacttcgcataaagcgtgaacgagaactaaaaaggaggactcagcagaatggctgggcatttaaacgggatcctgaggagccagtattcttattcacaagacctcttgatccggagaagttgatcgcagcaggtatcaagccaccaccagatcctcctattgagaatggtgccacatcgccaccatttcggtgtcgaggtaggattggacgaggcggccgcatcatctttgatcggtggaatcctcttctccagacaccaattgaccaggagacctcttattatgtgccgtacggtcacaagcccccctcacctgaaggttaaagcagtttttcacatgcacatagtgcttaatgtcactggcacagctatgaaatttttgaagcccccgagcaattggcccttggagagcccatttgtgactacctgagttgtgagttcagtggatctgatggaaaggcaagaaggctccttgataagcagcagcctcagtggaagattgagagtgtattgtgggggtatattggggctagcatttctttctcagatgtggcttggtcatcttttttcatagctgttgtaaaattattgcagtgtaggtgaaagagtagattttttttgtctaatcttggcatttagggtcagtatttatatcatgctctctcaattgattattcatttggagtagaggaaatcattctcgttgctacgcccagcttttctgtataatgcttcaacaccttgttgcatgtattcaactaatgcgcacacgtgtatatactgtaactcgatgtgcattggccttttgtggcaaatgtcactagtcagtaggttagggagagaatggtaatggaaggggttcgacaatgatatttaatctgttgttgaaatgttgctgcgcaactcagctcttgtaactgcacagattcagtttttttgttgtgtaacacaaagtcaacagacagctggtcattatcaggactgttatatgttctgattcttcctgataacacttcgttggagaattgcgttgaatgcagcaagggttcatcatgctcgtgtgttagcaacaatgcgacctggtgtattcagaagaataggcatgttacaattaaatcgactcagtttctgtcaatcttgcccatgctcatgtcagtagtcaagacagctgaaatggtattgttttgagctgtttgtctgtaaggtcatttctgctggtgctcatgccttggacatgacgaattgagatgttctgttcaaatgtttggctgcgaggcgttgcctcaggaaatattactgggcataggcacaggtctgaagcagtaaactgttgcattcacagagcgtgtagtgtttgtgcttttggtagc

SEQ ID NO: 26408 - DNA, 1966 bp, Zea Mays
gattatatttcatttagtggatcttcatgatatagcagcatcgttcataccatatacgtcaggctttgcagtacttgtctgttcgatatgccattttccaagctgtatataactactggaaaacaaagagggagcgatggcaaaaacctattcttcgacgtttgcagccgcctccaccagtgaatgatacaaatccatacaatgtcttcagaccaagagaaaaggcccatcgtcttcatacaagaaggatgcaaagaagggaaaacagtatccaatcattcgaaaaactccgcctggtgcgacacaacttggagcaagcaaaagcactaatggatgctttgattaagagggaggagacaaagcgggaggccatggaatgccaggttaacctgcaacgcgttcagatgaaatataagcatgaggcccagcttgttgaggataggactaccttgtctggcttccagcaaactaacagcagatttgaatcgagtgatgatgattatgcgaattcagatgacacaacaactgaacaaccatatatacgtccagctgttttccatcctaggtttcctgctaacaagctatctgtgatccctccacttcgcataaagcgtgaacgagaactaaaaaggaggactcagcagaatggctgggcatttaaacgggatcctgaggagccagtattcttattcacaagacctcttgatccggagaagttgatcgcagcaggtatcaagccaccaccagatcctcctattgagaatggtgccacatcgccaccatttcggtgtcgaggtaggattggacgaggcggccgcatcatctttgatcggtggaatcctcttctccagacaccaattgaccaggagacctcttattatgtgccgtacggtcacaagcccccctcacctgaaggttaaagcagtttttcacatgcacatagtgcttaatgtcactggcacagctatgaaatttttgaagcccccgagcaattggcccttggagagcccatttgtgactacctgagttgtgagttcagtggatctgatggaaaggcaagaaggctccttgataagcagcagcctcagtggaagattgagagtgtattgtgggggtatattggggctagcatttctttctcagatgtggcttggtcatcttttttcatagctgttgtaaaattattgcagtgtaggtgaaagagtagattttttttgtctaatcttggcatttagggtcagtatttatatcatgctctctcaattgattattcatttggagtagaggaaatcattctcgttgctacgcccagcttttctgtataatgcttcaacaccttgttgcatgtattcaactaatgcgcacacgtgtatatactgtaactcgatgtgcattggccttttgtggcaaatgtcactagtcagtaggttagggagagaatggtaatggaaggggttcgacaatgatatttaatctgttgttgaaatgttgctgcgcaactcagctcttgtaactgcacagattcagtttttttgttgtgtaacacaaagtcaacagacagctggtcattatcaggactgttatatgttctgattcttcctgataacacttcgttggagaattgcgttgaatgcagcaagggttcatcatgctcgtgtgttagcaacaatgcgacctggtgtattcagaagaataggcatgttacaattaaatcgactcagtttctgtcaatcttgcccatgctcatgtcagtagtcaagacagctgaaatggtattgttttgagctgtttgtctgtaaggtcatttctgctggtgctcatgccttggacatgacgaattgagatgttctgttcaaatgtttggctgcgaggcgttgcctcaggaaatattactgggcataggcacaggtctgaagcagtaaactgttgcattcacagagcgtgtagtgtttgtgcttttggtagc

SEQ ID NO: 26409 - DNA, 2789 bp, Zea Mays
ccggccctcgacgctcttcctctttcttcctcctcgcgtccttcttccctcgcttccgtttcctttcaaaccctaagtccgattacccgttcaaaaccctaatcctagctccccagcctcctccccactgcgtccccacactgctccgcgtcatacctcgcgacttccgcgcccccgcgcgcccggccctcccactcggccctcgcggacctagggtttctcccgggccggagctgctcgttcgttcactgcctttgggcgagccggtgcgggcgggtggttgggcgaggaggtggtgggcggagatgagatgaggttgcagcggctgtgggggcggtgtgaactatgagtaggctctcgttcaggccgcggccgctcgacatccataagaagctccccatcctcaagtctgtgcgggagttcgaggatgaggagccaggggtcgcgccgctttcttctgcgagggctggggtgctgctgcggcactcaggaactgagctccccgcgtctggggcgaacaagacgacagagggcgagggaagtcaagcacccagtaagaaaaatgcccaagaaatacctacaccgcagtttgatgctgtggacacatatgaaagggactatactcgcacctttgcacaaccgacatcttatatacgtggaagaggagccagagctgagatcggtgaatttgtcgagtatgacctggacaatgaagatgaggagtggcttgaagaattcaataacgagcggaagaatataaaccctgaaaagttggaggtccttctattcaagttggaagttttggaccacaaagctcgtgaaagagcaggagccataacaccaactttcataggaccagtgccagtcctcttgcagctagatgctgctatagagtacttgtctgttcgatatgccattttccaagctgtatataactactggaaaacaaagagggagcgatggcaaaaacctattcttcgacgtttgcagccgcctccaccagtgaatgatacaaatccatacaatgtcttcagaccaagagaaaaggcccatcgtcttcatacaagaaggatgcaaagaagggaaaacagtatccaatcattcgaaaaactccgcctggtgcgacacaacttggagcaagcaaaagcactaatggatgctttgattaagagggaggagacaaagcgggaggccatggaatgccaggttaacctgcaacgcgttcagatgaaatataagcatgaggcccagcttgttgaggataggactaccttgtctggcttccagcaaactaacagcagatttgaatcgagtgatgatgattatgcgaattcagatgacacaacaactgaacaaccatatatacgtccagctgttttccatcctaggtttcctgctaacaagctatctgtgatccctccacttcgcataaagcgtgaacgagaactaaaaaggaggactcagcagaatggctgggcatttaaacgggatcctgaggagccagtattcttattcacaagacctcttgatccggagaagttgatcgcagcaggtatcaagccaccaccagatcctcctattgagaatggtgccacatcgccaccatttcggtgtcgaggtaggattggacgaggcggccgcatcatctttgatcggtggaatcctcttctccagacaccaattgaccaggagacctcttattatgtgccgtacggtcacaagcccccctcacctgaaggttaaagcagtttttcacatgcacatagtgcttaatgtcactggcacagctatgaaatttttgaagcccccgagcaattggcccttggagagcccatttgtgactacctgagttgtgagttcagtggatctgatggaaaggcaagaaggctccttgataagcagcagcctcagtggaagattgagagtgtattgtgggggtatattggggctagcatttctttctcagatgtggcttggtcatcttttttcatagctgttgtaaaattattgcagtgtaggtgaaagagtagattttttttgtctaatcttggcatttagggtcagtatttatatcatgctctctcaattgattattcatttggagtagaggaaatcattctcgttgctacgcccagcttttctgtataatgcttcaacaccttgttgcatgtattcaactaatgcgcacacgtgtatatactgtaactcgatgtgcattggccttttgtggcaaatgtcactagtcagtaggttagggagagaatggtaatggaaggggttcgacaatgatatttaatctgttgttgaaatgttgctgcgcaactcagctcttgtaactgcacagattcagtttttttgttgtgtaacacaaagtcaacagacagctggtcattatcaggactgttatatgttctgattcttcctgataacacttcgttggagaattgcgttgaatgcagcaagggttcatcatgctcgtgtgttagcaacaatgcgacctggtgtattcagaagaataggcatgttacaattaaatcgactcagtttctgtcaatcttgcccatgctcatgtcagtagtcaagacagctgaaatggtattgttttgagctgtttgtctgtaaggtcatttctgctggtgctcatgccttggacatgacgaattgagatgttctgttcaaatgtttggctgcgaggcgttgcctcaggaaatattactgggcataggcacaggtctgaagcagtaaactgttgcattcacagagcgtgtagtgtttgtgcttttggtagc

SEQ ID NO: 26410 - DNA, 2794 bp, Zea Mays
ccggccctcgacgctcttcctctttcttcctcctcgcgtccttcttccctcgcttccgtttcctttcaaaccctaagtccgattacccgttcaaaaccctaatcctagctccccagcctcctccccactgcgtccccacactgctccgcgtcatacctcgcgacttccgcgcccccgcgcgcccggccctcccactcggccctcgcggacctagggtttctcccgggccggagctgctcgttcgttcactgcctttgggcgagccggtgcgggcgggtggttgggcgaggaggtggtgggcggagatgagatgaggttgcagcggctgtgggggcggtgtgaactatgagtaggctctcgttcaggccgcggccgctcgacatccataagaagctccccatcctcaagtctgtgcgggagttcgaggatgaggagccaggggtcgcgccgctttcttctgcgagggctggggtgctgctgcggcactcaggaactgagctccccgcgtctggggcgaacaagacgacagagggcgagggaagtcaagcacccagtaagaaaaatgcccaagaaatacctacaccgcagtttgatgctgtggacacatatgaaagggactatactcgcacctttgcacaaccgacatcttatatacgtggaagaggagagctgagatcggtgaatttgtcgagtatgacctggacaatgaagatgaggagtggcttgaagaattcaataacgagcggaagaatataaaccctgaaaagttggaggtccttctattcaagttggaagttttggaccacaaagctcgtgaaagagcaggagccataacaccaactttcataggaccagtgccagtcctcttgcagctagatgctgctatagaggctttgcagtacttgtctgttcgatatgccattttccaagctgtatataactactggaaaacaaagagggagcgatggcaaaaacctattcttcgacgtttgcagccgcctccaccagtgaatgatacaaatccatacaatgtcttcagaccaagagaaaaggcccatcgtcttcatacaagaaggatgcaaagaagggaaaacagtatccaatcattcgaaaaactccgcctggtgcgacacaacttggagcaagcaaaagcactaatggatgctttgattaagagggaggagacaaagcgggaggccatggaatgccaggttaacctgcaacgcgttcagatgaaatataagcatgaggcccagcttgttgaggataggactaccttgtctggcttccagcaaactaacagcagatttgaatcgagtgatgatgattatgcgaattcagatgacacaacaactgaacaaccatatatacgtccagctgttttccatcctaggtttcctgctaacaagctatctgtgatccctccacttcgcataaagcgtgaacgagaactaaaaaggaggactcagcagaatggctgggcatttaaacgggatcctgaggagccagtattcttattcacaagacctcttgatccggagaagttgatcgcagcaggtatcaagccaccaccagatcctcctattgagaatggtgccacatcgccaccatttcggtgtcgaggtaggattggacgaggcggccgcatcatctttgatcggtggaatcctcttctccagacaccaattgaccaggagacctcttattatgtgccgtacggtcacaagcccccctcacctgaaggttaaagcagtttttcacatgcacatagtgcttaatgtcactggcacagctatgaaatttttgaagcccccgagcaattggcccttggagagcccatttgtgactacctgagttgtgagttcagtggatctgatggaaaggcaagaaggctccttgataagcagcagcctcagtggaagattgagagtgtattgtgggggtatattggggctagcatttctttctcagatgtggcttggtcatcttttttcatagctgttgtaaaattattgcagtgtaggtgaaagagtagattttttttgtctaatcttggcatttagggtcagtatttatatcatgctctctcaattgattattcatttggagtagaggaaatcattctcgttgctacgcccagcttttctgtataatgcttcaacaccttgttgcatgtattcaactaatgcgcacacgtgtatatactgtaactcgatgtgcattggccttttgtggcaaatgtcactagtcagtaggttagggagagaatggtaatggaaggggttcgacaatgatatttaatctgttgttgaaatgttgctgcgcaactcagctcttgtaactgcacagattcagtttttttgttgtgtaacacaaagtcaacagacagctggtcattatcaggactgttatatgttctgattcttcctgataacacttcgttggagaattgcgttgaatgcagcaagggttcatcatgctcgtgtgttagcaacaatgcgacctggtgtattcagaagaataggcatgttacaattaaatcgactcagtttctgtcaatcttgcccatgctcatgtcagtagtcaagacagctgaaatggtattgttttgagctgtttgtctgtaaggtcatttctgctggtgctcatgccttggacatgacgaattgagatgttctgttcaaatgtttggctgcgaggcgttgcctcaggaaatattactgggcataggcacaggtctgaagcagtaaactgttgcattcacagagcgtgtagtgtttgtgcttttggtagc

SEQ ID NO: 26411 - DNA, 2785 bp, Zea Mays
ccggccctcgacgctcttcctctttcttcctcctcgcgtccttcttccctcgcttccgtttcctttcaaaccctaagtccgattacccgttcaaaaccctaatcctagctccccagcctcctccccactgcgtccccacactgctccgcgtcatacctcgcgacttccgcgcccccgcgcgcccggccctcccactcggccctcgcggacctagggtttctcccgggccggagctgctcgttcgttcactgcctttgggcgagccggtgcgggcgggtggttgggcgaggaggtggtgggcggagatgagatgaggttgcagcggctgtgggggcggtgtgaactatgagtaggctctcgttcaggccgcggccgctcgacatccataagaagctccccatcctcaagtctgtgcgggagttcgaggatgaggagccaggggtcgcgccgctttcttctgcgagggctggggtgctgctgcggcactcaggaactgagctccccgcgtctggggcgaacaagacgacagagggcgagggaagtcaagcacccagtaagaaaaatgcccaagaaatacctacaccgcagtttgatgctgtggacacatatgaaagggactatactcgcacctttgcacaaccgacatcttatatacgtggaagaggagagctgagatcggtgaatttgtcgagtatgacctggacaatgaagatgaggagtggcttgaagaattcaataacgagcggaagaatataaaccctgaaaagttggaggtccttctattcaagttggaagttttggaccacaaagctcgtgaaagagcaggagccataacaccaactttcataggaccagtgccagtcctcttgcagctagatgctgctatagagtacttgtctgttcgatatgccattttccaagctgtatataactactggaaaacaaagagggagcgatggcaaaaacctattcttcgacgtttgcagccgcctccaccagtgaatgatacaaatccatacaatgtcttcagaccaagagaaaaggcccatcgtcttcatacaagaaggatgcaaagaagggaaaacagtatccaatcattcgaaaaactccgcctggtgcgacacaacttggagcaagcaaaagcactaatggatgctttgattaagagggaggagacaaagcgggaggccatggaatgccaggttaacctgcaacgcgttcagatgaaatataagcatgaggcccagcttgttgaggataggactaccttgtctggcttccagcaaactaacagcagatttgaatcgagtgatgatgattatgcgaattcagatgacacaacaactgaacaaccatatatacgtccagctgttttccatcctaggtttcctgctaacaagctatctgtgatccctccacttcgcataaagcgtgaacgagaactaaaaaggaggactcagcagaatggctgggcatttaaacgggatcctgaggagccagtattcttattcacaagacctcttgatccggagaagttgatcgcagcaggtatcaagccaccaccagatcctcctattgagaatggtgccacatcgccaccatttcggtgtcgaggtaggattggacgaggcggccgcatcatctttgatcggtggaatcctcttctccagacaccaattgaccaggagacctcttattatgtgccgtacggtcacaagcccccctcacctgaaggttaaagcagtttttcacatgcacatagtgcttaatgtcactggcacagctatgaaatttttgaagcccccgagcaattggcccttggagagcccatttgtgactacctgagttgtgagttcagtggatctgatggaaaggcaagaaggctccttgataagcagcagcctcagtggaagattgagagtgtattgtgggggtatattggggctagcatttctttctcagatgtggcttggtcatcttttttcatagctgttgtaaaattattgcagtgtaggtgaaagagtagattttttttgtctaatcttggcatttagggtcagtatttatatcatgctctctcaattgattattcatttggagtagaggaaatcattctcgttgctacgcccagcttttctgtataatgcttcaacaccttgttgcatgtattcaactaatgcgcacacgtgtatatactgtaactcgatgtgcattggccttttgtggcaaatgtcactagtcagtaggttagggagagaatggtaatggaaggggttcgacaatgatatttaatctgttgttgaaatgttgctgcgcaactcagctcttgtaactgcacagattcagtttttttgttgtgtaacacaaagtcaacagacagctggtcattatcaggactgttatatgttctgattcttcctgataacacttcgttggagaattgcgttgaatgcagcaagggttcatcatgctcgtgtgttagcaacaatgcgacctggtgtattcagaagaataggcatgttacaattaaatcgactcagtttctgtcaatcttgcccatgctcatgtcagtagtcaagacagctgaaatggtattgttttgagctgtttgtctgtaaggtcatttctgctggtgctcatgccttggacatgacgaattgagatgttctgttcaaatgtttggctgcgaggcgttgcctcaggaaatattactgggcataggcacaggtctgaagcagtaaactgttgcattcacagagcgtgtagtgtttgtgcttttggtagc

SEQ ID NO: 26412 - DNA, 2850 bp, Zea Mays
ccggccctcgacgctcttcctctttcttcctcctcgcgtccttcttccctcgcttccgtttcctttcaaaccctaagtccgattacccgttcaaaaccctaatcctagctccccagcctcctccccactgcgtccccacactgctccgcgtcatacctcgcgacttccgcgcccccgcgcgcccggccctcccactcggccctcgcggacctagggtttctcccgggccggagctgctcgttcgttcactgcctttgggcgagccggtgcgggcgggtggttgggcgaggaggtggtgggcggagatgagatgaggttgcagcggctgtgggggcggtgtgaactatgagtaggctctcgttcaggccgcggccgctcgacatccataagaagctccccatcctcaagtctgtgcgggagttcgaggatgaggagccaggggtcgcgccgctttcttctgcgagggctggggtgctgctgcggcactcaggaactgagctccccgcgtctggggcgaacaagacgacagagggcgagggaagtcaagcacccagtaagaaaaatgcccaagaaatacctacaccgcagtttgatgctgtggacacatatgaaagggactatactcgcacctttgcacaaccgacatcttatatacgtggaagaggagccagagctgagatcggtgaatttgtcgagtatgacctggacaatgaagatgaggagtggcttgaagaattcaataacgagcggaagaatataaaccctgaaaagttggaggtccttctattcaagttggaagttttggaccacaaagctcgtgaaagagcaggagccataacaccaactttcataggaccagtgccagtcctcttgcagctagatgctgctatagagtacttgtctgttcgatatgccattttccaagctgtatataactactggaaaacaaagagggagcgatggcaaaaacctattcttcgacgtttgcagccgcctccaccagtgaatgatacaaatccatacaatgtcttcagaccaagagaaaaggcccatcgtcttcatacaagaaggatgcaaagaagggaaaacagtatccaatcattcgaaaaactccgcctggtgctacatgatttatgcttttttactgcttatgatgctagcttgaaaaattttatatcaggtgcgacacaacttggagcaagcaaaagcactaatggatgctttgattaagagggaggagacaaagcgggaggccatggaatgccaggttaacctgcaacgcgttcagatgaaatataagcatgaggcccagcttgttgaggataggactaccttgtctggcttccagcaaactaacagcagatttgaatcgagtgatgatgattatgcgaattcagatgacacaacaactgaacaaccatatatacgtccagctgttttccatcctaggtttcctgctaacaagctatctgtgatccctccacttcgcataaagcgtgaacgagaactaaaaaggaggactcagcagaatggctgggcatttaaacgggatcctgaggagccagtattcttattcacaagacctcttgatccggagaagttgatcgcagcaggtatcaagccaccaccagatcctcctattgagaatggtgccacatcgccaccatttcggtgtcgaggtaggattggacgaggcggccgcatcatctttgatcggtggaatcctcttctccagacaccaattgaccaggagacctcttattatgtgccgtacggtcacaagcccccctcacctgaaggttaaagcagtttttcacatgcacatagtgcttaatgtcactggcacagctatgaaatttttgaagcccccgagcaattggcccttggagagcccatttgtgactacctgagttgtgagttcagtggatctgatggaaaggcaagaaggctccttgataagcagcagcctcagtggaagattgagagtgtattgtgggggtatattggggctagcatttctttctcagatgtggcttggtcatcttttttcatagctgttgtaaaattattgcagtgtaggtgaaagagtagattttttttgtctaatcttggcatttagggtcagtatttatatcatgctctctcaattgattattcatttggagtagaggaaatcattctcgttgctacgcccagcttttctgtataatgcttcaacaccttgttgcatgtattcaactaatgcgcacacgtgtatatactgtaactcgatgtgcattggccttttgtggcaaatgtcactagtcagtaggttagggagagaatggtaatggaaggggttcgacaatgatatttaatctgttgttgaaatgttgctgcgcaactcagctcttgtaactgcacagattcagtttttttgttgtgtaacacaaagtcaacagacagctggtcattatcaggactgttatatgttctgattcttcctgataacacttcgttggagaattgcgttgaatgcagcaagggttcatcatgctcgtgtgttagcaacaatgcgacctggtgtattcagaagaataggcatgttacaattaaatcgactcagtttctgtcaatcttgcccatgctcatgtcagtagtcaagacagctgaaatggtattgttttgagctgtttgtctgtaaggtcatttctgctggtgctcatgccttggacatgacgaattgagatgttctgttcaaatgtttggctgcgaggcgttgcctcaggaaatattactgggcataggcacaggtctgaagcagtaaactgttgcattcacagagcgtgtagtgtttgtgcttttggtagc

SEQ ID NO: 26413 - DNA, 2676 bp, Zea Mays
ccggccctcgacgctcttcctctttcttcctcctcgcgtccttcttccctcgcttccgtttcctttcaaaccctaagtccgattacccgttcaaaaccctaatcctagctccccagcctcctccccactgcgtccccacactgctccgcgtcatacctcgcgacttccgcgcccccgcgcgcccggccctcccactcggccctcgcggacctagggtttctcccgggccggagctgctcgttcgttcactgcctttgggcgagccggtgcgggcgggtggttgggcgaggaggtggtgggcggagatgagatgaggttgcagcggctgtgggggcggtgtgaactatgagtaggctctcgttcaggccgcggccgctcgacatccataagaagctccccatcctcaagtctgtgcgggagttcgaggatgaggagccaggggtcgcgccgctttcttctgcgagggctggggtgctgctgcggcactcaggaactgagctccccgcgtctggggcgaacaagacgacagagggcgagggaagtcaagcacccagtaagaaaaatgcccaagaaatacctacaccgcagtttgatgctgtggacacatatgaaagggactatactcgcacctttgcacaaccgacatcttatatacgtggaagaggagccagagctgagatcggtgaatttgtcgagtatgacctggacaatgaagatgaggagtggcttgaagaattcaataacgagcggaagaatataaaccctgaaaagttggaggtccttctattcaagttggaagttttggaccacaaagctcgtgaaagagcaggagccataacaccaactttcataggaccagtgccagtcctcttgcagctagatgctgctatagaggctttgcagtacttgtctgttcgatatgccattttccaagctgtatataactactggaaaacaaagagggagcgatggcaaaaacctattcttcgacgtttgcagccgcctccaccagtgaatgatacaaatccatacaatgtcttcagaccaagagaaaaggcccatcgtcttcatacaagaaggatgcaaagaagggaaaacagtatccaatcattcgaaaaactccgcctggtgcgacacaacttggagcaagcaaaagcactaatggatgctttgattaagagggaggagacaaagcgggaggccatggaatgccaggttaacctgcaacgcgttcagatgaaatataagcatgaggcccagcttgttgaggataggactaccttgtctggcttccagcaaactaacagcagatttgaatcgagtgatgatgattatgcgaattcagatgacacaacaactgaacaaccatatatacgtccagctgttttccatcctaggtttcctgctaacaagctatctgtgatccctccacttcgcataaagcgtgaacgagaactaaaaaggaggactcagcagaatggctgggcatttaaacgggatcctgaggagccagtattcttattcacaagacctcttgatccggagaagttgatcgcagcagacaccaattgaccaggagacctcttattatgtgccgtacggtcacaagcccccctcacctgaaggttaaagcagtttttcacatgcacatagtgcttaatgtcactggcacagctatgaaatttttgaagcccccgagcaattggcccttggagagcccatttgtgactacctgagttgtgagttcagtggatctgatggaaaggcaagaaggctccttgataagcagcagcctcagtggaagattgagagtgtattgtgggggtatattggggctagcatttctttctcagatgtggcttggtcatcttttttcatagctgttgtaaaattattgcagtgtaggtgaaagagtagattttttttgtctaatcttggcatttagggtcagtatttatatcatgctctctcaattgattattcatttggagtagaggaaatcattctcgttgctacgcccagcttttctgtataatgcttcaacaccttgttgcatgtattcaactaatgcgcacacgtgtatatactgtaactcgatgtgcattggccttttgtggcaaatgtcactagtcagtaggttagggagagaatggtaatggaaggggttcgacaatgatatttaatctgttgttgaaatgttgctgcgcaactcagctcttgtaactgcacagattcagtttttttgttgtgtaacacaaagtcaacagacagctggtcattatcaggactgttatatgttctgattcttcctgataacacttcgttggagaattgcgttgaatgcagcaagggttcatcatgctcgtgtgttagcaacaatgcgacctggtgtattcagaagaataggcatgttacaattaaatcgactcagtttctgtcaatcttgcccatgctcatgtcagtagtcaagacagctgaaatggtattgttttgagctgtttgtctgtaaggtcatttctgctggtgctcatgccttggacatgacgaattgagatgttctgttcaaatgtttggctgcgaggcgttgcctcaggaaatattactgggcataggcacaggtctgaagcagtaaactgttgcattcacagagcgtgtagtgtttgtgcttttggtagc

SEQ ID NO: 26414 - DNA, 2764 bp, Zea Mays
ctctcccggccctcgacgctcttcctctttcttcctcctcgcgtccttcttccctcgcttccgtttcctttcaaaccctaagtccgattacccgttcaaaaccctaatcctagctccccagcctcctccccactgcgtccccacactgctccgcgtcatacctcgcgacttccgcgcccccgcgcgcccggccctcccactcggccctcgcggacctagggtttctcccgggccggagctgctcgttcgttcactgcctttgggcgagccggtgcgggcgggtggttgggcgaggaggtggtgggcggagatgagatgaggttgcagcggctgtgggggcggtgtgaactatgagtaggctctcgttcaggccgcggccgctcgacatccataagaagctccccatcctcaagtctgtgcgggagttcgaggatgaggagccaggggtcgcgccgctttcttctgcgagggctggggtgctgctgcggcactcaggaactgagctccccgcgtctggggcgaacaagacgacagagggcgagggaagtcaagcacccagtaagaaaaatgcccaagaaatacctacaccgcagtttgatgctgtggacacatatgaaagggactatactcgcacctttgcacaaccgacatcttatatacgtggaagaggagccagagctgagatcggtgaatttgtcgagtatgacctggacaatgaagatgaggagtggcttgaagaattcaataacgagcggaagaatataaaccctgaaaagttggaggtccttctattcaagttggaagttttggaccacaaagctcgtgaaagagcaggagccataacaccaactttcataggaccagtgccagtcctcttgcagctagatgctgctatagaggctttgcagtacttgtctgttcgatatgccattttccaagctgtatataactactggaaaacaaagccgcctccaccagtgaatgatacaaatccatacaatgtcttcagaccaagagaaaaggcccatcgtcttcatacaagaaggatgcaaagaagggaaaacagtatccaatcattcgaaaaactccgcctggtgcgacacaacttggagcaagcaaaagcactaatggatgctttgattaagagggaggagacaaagcgggaggccatggaatgccaggttaacctgcaacgcgttcagatgaaatataagcatgaggcccagcttgttgaggataggactaccttgtctggcttccagcaaactaacagcagatttgaatcgagtgatgatgattatgcgaattcagatgacacaacaactgaacaaccatatatacgtccagctgttttccatcctaggtttcctgctaacaagctatctgtgatccctccacttcgcataaagcgtgaacgagaactaaaaaggaggactcagcagaatggctgggcatttaaacgggatcctgaggagccagtattcttattcacaagacctcttgatccggagaagttgatcgcagcaggtatcaagccaccaccagatcctcctattgagaatggtgccacatcgccaccatttcggtgtcgaggtaggattggacgaggcggccgcatcatctttgatcggtggaatcctcttctccagacaccaattgaccaggagacctcttattatgtgccgtacggtcacaagcccccctcacctgaaggttaaagcagtttttcacatgcacatagtgcttaatgtcactggcacagctatgaaatttttgaagcccccgagcaattggcccttggagagcccatttgtgactacctgagttgtgagttcagtggatctgatggaaaggcaagaaggctccttgataagcagcagcctcagtggaagattgagagtgtattgtgggggtatattggggctagcatttctttctcagatgtggcttggtcatcttttttcatagctgttgtaaaattattgcagtgtaggtgaaagagtagattttttttgtctaatcttggcatttagggtcagtatttatatcatgctctctcaattgattattcatttggagtagaggaaatcattctcgttgctacgcccagcttttctgtataatgcttcaacaccttgttgcatgtattcaactaatgcgcacacgtgtatatactgtaactcgatgtgcattggccttttgtggcaaatgtcactagtcagtaggttagggagagaatggtaatggaaggggttcgacaatgatatttaatctgttgttgaaatgttgctgcgcaactcagctcttgtaactgcacagattcagtttttttgttgtgtaacacaaagtcaacagacagctggtcattatcaggactgttatatgttctgattcttcctgataacacttcgttggagaattgcgttgaatgcagcaagggttcatcatgctcgtgtgttagcaacaatgcgacctggtgtattcagaagaataggcatgttacaattaaatcgactcagtttctgtcaatcttgcccatgctcatgtcagtagtcaagacagctgaaatggtattgttttgagctgtttgtctgtaaggtcatttctgctggtgctcatgccttggacatgacgaattgagatgttctgttcaaatgtttggctgcgaggcgttgcctcaggaaatattactgggcataggcacaggtctgaagcagtaaactgttgcattcacagagcgtgtagtgtttgtgcttttggtagc

SEQ ID NO: 26415 - DNA, 2882 bp, Zea Mays
cgggcccgacctgtctccctctcccggccctcgacgctcttcctctttcttcctcctcgcgtccttcttccctcgcttccgtttcctttcaaaccctaagtccgattacccgttcaaaaccctaatcctagctccccagcctcctccccactgcgtccccacactgctccgcgtcatacctcgcgacttccgcgcccccgcgcgcccggccctcccactcggccctcgcggacctagggtttctcccgggccggagctgctcgttcgttcactgcctttgggcgagccggtgcgggcgggtggttgggcgaggaggtggtgggcggagatgagatgaggttgcagcggctgtgggggcggtgtgaactatgagtaggctctcgttcaggccgcggccgctcgacatccataagaagctccccatcctcaagtctgtgcgggagttcgaggatgaggagccaggggtcgcgccgctttcttctgcgagggctggggtgctgctgcggcactcaggaactgagctccccgcgtctggggcgaacaagacgacagagggcgagggaagtcaagcacccagtaagaaaaatgcccaagaaatacctacaccgcagtttgatgctgtggacacatatgaaagggactatactcgcacctttgcacaaccgacatcttatatacgtggaagaggagccagagctgagatcggtgaatttgtcgagtatgacctggacaatgaagatgaggagtggcttgaagaattcaataacgagcggaagaatataaaccctgaaaagttggaggtccttctattcaagttggaagttttggaccacaaagctcgtgaaagagcaggagccataacaccaactttcataggaccagtgccagtcctcttgcagctagatgctgctatagaggctttgcagtacttgtctgttcgatatgccattttccaagctgtatataactactggaaaacaaagagggagcgatggcaaaaacctattcttcgacgtttgcagccgcctccaccagtgaatgatacaaatccatacaatgtcttcagaccaagagaaaaggcccatcgtcttcatacaagaaggatgcaaagaagggaaaacagtatccaatcattcgaaaaactccgcctggtgctacatgatttatgcttttttactgcttatgatgctagcttgaaaaattttatatcaggtgcgacacaacttggagcaagcaaaagcactaatggatgctttgattaagagggaggagacaaagcgggaggccatggaatgccaggttaacctgcaacgcgttcagatgaaatataagcatgaggcccagcttgttgaggataggactaccttgtctggcttccagcaaactaacagcagatttgaatcgagtgatgatgattatgcgaattcagatgacacaacaactgaacaaccatatatacgtccagctgttttccatcctaggtttcctgctaacaagctatctgtgatccctccacttcgcataaagcgtgaacgagaactaaaaaggaggactcagcagaatggctgggcatttaaacgggatcctgaggagccagtattcttattcacaagacctcttgatccggagaagttgatcgcagcaggtatcaagccaccaccagatcctcctattgagaatggtgccacatcgccaccatttcggtgtcgaggtaggattggacgaggcggccgcatcatctttgatcggtggaatcctcttctccagacaccaattgaccaggagacctcttattatgtgccgtacggtcacaagcccccctcacctgaaggttaaagcagtttttcacatgcacatagtgcttaatgtcactggcacagctatgaaatttttgaagcccccgagcaattggcccttggagagcccatttgtgactacctgagttgtgagttcagtggatctgatggaaaggcaagaaggctccttgataagcagcagcctcagtggaagattgagagtgtattgtgggggtatattggggctagcatttctttctcagatgtggcttggtcatcttttttcatagctgttgtaaaattattgcagtgtaggtgaaagagtagattttttttgtctaatcttggcatttagggtcagtatttatatcatgctctctcaattgattattcatttggagtagaggaaatcattctcgttgctacgcccagcttttctgtataatgcttcaacaccttgttgcatgtattcaactaatgcgcacacgtgtatatactgtaactcgatgtgcattggccttttgtggcaaatgtcactagtcagtaggttagggagagaatggtaatggaaggggttcgacaatgatatttaatctgttgttgaaatgttgctgcgcaactcagctcttgtaactgcacagattcagtttttttgttgtgtaacacaaagtcaacagacagctggtcattatcaggactgttatatgttctgattcttcctgataacacttcgttggagaattgcgttgaatgcagcaagggttcatcatgctcgtgtgttagcaacaatgcgacctggtgtattcagaagaataggcatgttacaattaaatcgactcagtttctgtcaatcttgcccatgctcatgtcagtagtcaagacagctgaaatggtattgttttgagctgtttgtctgtaaggtcatttctgctggtgctcatgccttggacatgacgaattgagatgttctgttcaaatgtttggctgcgaggcgttgcctcaggaaatattactgggcataggcacaggtctgaagcagtaaactgttgcattcacagagcgtgtagtgtttgtgcttttggtagc

SEQ ID NO: 26416 - DNA, 954 bp, Zea Mays
ctttcttcctccctcccgttttcgtagcatcccatattcccatgtcatctacccaacccataggccatagctaccggaagatgagagctccagctcctcctgttcccgcgctgctctcccgctgctcctcgcctccctcctcggccccgctccgcctcctcacctcctctcgcacgccggccgccttccgcccgcctccggccgtcgcccgctctgtctccgtctccgtcgatgcgccggcggccgccacggagccggctgtcttgggcgcgccctcctcgatgccgcgccgtcgcctcatcctcctccgccacggggagagcaccgccgggggccgctccactagagatcatgacagacctctaagcaaggctgggagagctgacgcaatcagcgtttctaataaactccaacaaatgggatggataccggagcttatcctctgcagcgacgcaatgcgtacgaaggaaactcttaagatcctgcaagagcatgtccaaggattgtctgaagcagtagtgcacttcatcccaagtttctactccattgcagcaatggatggccaaactgcagagcatttgcagaaggcgatctgtgaatattcgagtgatgagatcttaaccgtgataattactcaggtgcatggggcataataaaggatgggaagaagcagcctctatgttttctggtgattcagtagcgctcgagacatgtaacgctgcgttgctggaagctgcaggcaaatcatgggttgaggctttttctgtggctggtctggggggatggaagcttcatggaattgtaaagccatgagttgtaactaaaagctaggtgtaatttctgtagctgtttcttaattcttgttaacttttgtgtagttgtttttacgtgccactgaagagcgtggataaatagatgagatgaatgaattcttccacgagaaaaaaataaaaa

SEQ ID NO: 26417 - DNA, 742 bp, Zea Mays
atggcatacgatggcatctatcgattctatattcaagtccaatccctttctacaaaatatgatgagagatgcaagattgttggagatgtggcatctaatctaacaatggatgaggccactttccgtgattcccaggaacataggttggaaatttattacaccataattaggccgcaaaaaattgtctacatattcagagaagtgcaacagtgcacactcctttcaaagactgagtgcagtgaagaatgttcctatgccctcagtcatcaagatacaacattggatcgaacactcaaaaatgatggatcagcaaaaaagggtactattattgtctgggagatctttgctttgaaacacaaagcaagacatttagttcaatctcgtcttcttcagtcaccagttgcagttgtcgccgtcgcttctgcgacaactgcctatgctgtaattactaccacagatgagaaacctagagatattgttgtgacagatgattttgatatcaagagaactcaacctacaagtaattccaaaaagatcgttgctgaaactgatgtacttactggacagaatgtggccacttttgaattttcttccggacgcgttgttcaattttcttccggatgcagctatgccagcttttcaccaaagcagagggtgatggagagagaccctaaactagaaggcaatatcaagaacgaccgtgcggtgctgtggggcactaatgagcacgacatggataaat

SEQ ID NO: 26418 - DNA, 1471 bp, Zea Mays
caccagcccacctcgccgtggggcacgaccttcctccatgacatctgcagctccgacgaccatgaggatgacatgctcgtctgcgccgcggccaccacaccttttgcctcctcccccaaatcaccgccgaggtccacatctggtcacatccccagccgatcacgccaccatgctgccaacggtcgtgcgcctcgcacctcgatgccacctcagccttacatcgcatcaaaagccattgaactctcgctcgattcgtctccggtcggacctcttctctgcccaaaccctacccccaccatttcccaaaaataatcgttcgatctcctttgtggaaagtttcacttacagatcgctgcagtaggctactccatcatcgcctttaggggctttgactctagcaccaggcccttctccacagctattaagtatgtgagcactcctcagatccgctacacctgtgtttgcctaatcttgcagcaccttgattcgccggagaacaagtcggccatgtgggagttctcgggggcgaatatgaagaagcagaggcgcaaaatgttttcatttgacaacgttgcaataaaggataagaacgctaggaagctataagcacagaaagaaaaaagctatcgattctatattcaagtccaatccctttctacaaaatatgatgagagatgcaagattgttggagatgtggcatctaatctaacaatggatgaggccactttccgtgattcccaggaacataggttggaaatttattacaccataattaggccgcaaaaaattgtctacatattcagagaagtgcaacagtgcacactcctttcaaagactgagtgcagtgaagaatgttcctatgccctcagtcatcaagatacaacattggatcgaacactcaaaaatgatggatcagcaaaaaagggtactattattgtctgggagatctttgctttgaaacacaaagcaagacatttagttcaatctcgtcttcttcagtcaccagttgcagttgtcgccgtcgcttctgcgacaactgcctatgctgtaattactaccacagatgagaaacctagagatattgttgtgacagatgattttgatatcaagagaactcaacctacaagtaattccaaaaagatcgttgctgaaactgatgtacttactggacagaatggtaaactagcgaccagattggcagaagttcttgatgaaaactaaatgatagattagacatgaaaaacttgccatatgatgaattggcaaagataaagctttctttatgttagtacataatgcttgatttttgttgacaatctctcccttttccctttcaaagaagcttaaattagttcaagatcaactagcaccagagggttcaagatgacagaagcctgattcccaaattgctgctgcacggaagagattggaatctttatgattttccttgtctaattttgtggccgcatta

SEQ ID NO: 26419 - DNA, 1583 bp, Zea Mays
cttagactgagctttgagctagctcgtgtccggctcccataccccacagttcacgccgttcttaactccccacctcacagtcatcgtccgtgctcgacttgctccaccagcccacctcgccgtggggcacgaccttcctccatgacatctgcagctccgacgaccatgaggatgacatgctcgtctgcgccgcggccaccacaccttttgcctcctcccccaaatcaccgccgaggtccacatctggtcacatccccagccgatcacgccaccatgctgccaacggtcgtgcgcctcgcacctcgatgccacctcagccttacatcgcatcaaaagccattgaactctcgctcgattcgtctccggtcggacctcttctctgcccaaaccctacccccaccatttcccaaaaataatcgttcgatctcctttgtggaaagtttcacttacagatcgctgcagtaggctactccatcatcgcctttaggggctttgactctagcaccaggcccttctccacagctattaagtatgtgagcactcctcagatccgctacacctgtgtttgcctaatcttgcagcaccttgattcgccggagaacaagtcggccatgtgggagttctcgggggcgaatatgaagaaggccaacagcagaggcgcaaaatgttttcatttgacaacgttgcaataaaggataagaacgctaggaagctataagcacagaaagaaaaaagctatcgattctatattcaagtccaatccctttctacaaaatatgatgagagatgcaagattgttggagatgtggcatctaatctaacaatggatgaggccactttccgtgattcccaggaacataggttggaaatttattacaccataattaggccgcaaaaaattgtctacatattcagagaagtgcaacagtgcacactcctttcaaagactgagtgcagtgaagaatgttcctatgccctcagtcatcaagatacaacattggatcgaacactcaaaaatgatggatcagcaaaaaagggtactattattgtctgggagatctttgctttgaaacacaaagcaagacatttagttcaatctcgtcttcttcagtcaccagttgcagttgtcgccgtcgcttctgcgacaactgcctatgctgtaattactaccacagatgagaaacctagagatattgttgtgacagatgattttgatatcaagagaactcaacctacaagtaattccaaaaagatcgttgctgaaactgatgtacttactggacagaatggtaaactagcgaccagattggcagaagttcttgatgaaaactaaatgatagattagacatgaaaaacttgccatatgatgaattggcaaagataaagctttctttatgttagtacataatgcttgatttttgttgacaatctctcccttttccctttcaaagaagcttaaattagttcaagatcaactagcaccagagggttcaagatgacagaagcctgattcccaaattgctgctgcacggaagagattggaatctttatgattttccttgtctaattttgtggccgcatta

SEQ ID NO: 26420 - DNA, 768 bp, Zea Mays
taataataataataaatttagaaaagagagcaccagtgtaaagtcacatgccagtactcaactggacatgttatttaccttagatcaagcttagaaggcacttttggactatgcatagactatttctagccgtagctaatggcactgaattcgtcttgtctatactttacatgtattgtaagctctcaagttgggggtcgaggttttccatttttttataatttgatatatcaaacatatatgcatctttctgtttgactacaattgtgtctgctctcttttcagtgatgagaaagataattaggtgctggtgtaggaacgtggaacttttgccttcacagttgcagccatgtgtaattcagggttatcatctatttctacttttctcaagttgtcgtatatgttagttggatgggggagatgtggtacatacttttgtatgcaacatcgctaacgatttgcctacacaaacctgccaaggttaactttgatcaggatgctacgcttatcacgcttttgatatgctggcggccaacgtgaatgcatctcacttaaaatcgtgcttgttacctttcctccccggatgttcatccttagcaacttgtaatgtgtagtggcagaagaaaaacctactcttttgtatatatcaactgcccgttgttaaaccttttgctacatcgcacggctgcaaactgtgctctacttatttgtgtggctaaagtcttttggtaacccagaaatgcattttattccatgactcacttatat

SEQ ID NO: 26421 - DNA, 1055 bp, Zea Mays
gcgacacgtccatacgactcacgggtcgcttctcgctccgcgcgtgatgggtgttctctctcctcgcggacatgatgcttcgtccagccacgctgtcctctccatctgcttcgccgatgtgtcgcgcttcaccacagccaagtgccccacgtcagcagcctccggatctgatgggtgctgcggcagccgagtcgcgcggagcagtggcgtggccgcccctccggtgaggccgactgtcgcgagctgtgctgggctccgctccgcgcggatcctgcagcgagcaacccgtcgccccgcgtctgcaccccgccttcggatctgaccagtgctagagctgtctcgtcgcgcggagcaggggcgtggcggtgaggtcggcggtcgcggtctgcagatggggccctccgcttcgttcacagtgcgcggaccaggggcgtcgccgcccctccggtgaggccgaccgtcgcgagctgcggtgggctccgctccgcgcagacccacttgtagctgcagcgagcaacccgtcgccccgcgtctgcgctccgccttcggatctgaccagtggcagagttgtctcgtcgcgcggagcatgggcgtggccatccctccggtgaggccggtggtcgcggtctgtagatggggccccctctgcttcgttcacagtgccgtcgggggacgcacgggagtaccgctgtcttcacccactgcgcagattaaactaccgctgctgtggtggggagcggctccgcgtggacccacgcgcagctgcagcgagtagaggatgcggcccgtcgataccgtcgcctcacagctgcgcacgtcgtccacagttcaacagagccgcggcatgggcgtcgtccgtgttcttggttctcgccaaacaccgtccttacggctccctcgctttgccgctgatggcgttcggcgaggtcttctgacatccctccgcgcatccagatagcttttgacggagttcacagaaggctgctcgtcgctgattccttttgggagttcacgtgcgcgctattcatgttctacaagtgctaggtgtgtgtgtc

SEQ ID NO: 26422 - DNA, 197 bp, Zea Mays
tgggcttgctcacatgttgtaatgttgttctgaataagtgccaggaaataaggcctctagcgtatgtcgagagagagaggtcgttcggctttggaatagccgattaggtgttgtttttgctgcatgatgcaaatgaattatcgtaccaatgaagggatgtttgcttgtgcctactgccatgtatgctcataaaaaac

SEQ ID NO: 26423 - DNA, 2017 bp, Zea Mays
agcaacggggcacatcaatttttactcatattttggggcaaatgttttgcatccgcgcaccattatacctgtgatgaaagacaacattcccattgttattaggaacatgttcaacctctctgcccctggaaccatgatttgcaagcagcctgccaatgaaaatggtgatttagacgcatgtgtcaaatcatttgctactgtcgataatttagcacttgttaatgttgaaggaactggaatggctggcgttccaggtacagcaagtgctatatttagtgctgttaaggatgttggagctaatgttatcatgatatctcaggctagcagcgaacattcagtatgctttgctgttccagaaaaggaagttgctgtagtttctgctgagttacatgataggtttcgtgaggcattagctgcagggaggctgtctaaggttgaagttattaatggttgcagcattcttgctgctgttggtctgaggatggccagcactccaggagtcagtgcaatactttttgatgcattagcaaaggcaaacattaatgttcgagcaatagctcaaggttgcagtgaatacaatattactgttgtattgaagcaacaagattgtgtaagggctctgagagctgctcactcaaggttcttcctctccaaaaccacacttgctgttgggatcattggacctggtttaattggtggagcactccttaaccagttgaagaatcagactgctgttctcaaggaaaatatgaacattgatctgcgtgtcattggaataactggctcaagtacaatgcttctgagcgacacgggaatagacttaacccagtggaaacagcttctacaaaaggaagcagaaccagctgatattggtagttttgttcatcatttatctgataatcatgtatttccgaacaaagttttggtggactgcacagcggatacaagtgtggcatcccactattacgattggttaaagaagggtattcatgtcatcacgccaaataagaaagcaaattctgggccacttgatcagtacctgaaattacggactatgcagcgtgcctcatacactcattacttttatgaagcaactgttggtgctggcctcccaatcatcagcaccttgcgaggtcttctggagacgggtgacaagatactgcgtattgagggcattttcagtggaactttgagttatatatttaacaatttcgaaggaacaagggcgtttagtgatgttgttgccgaagcaagagaggcgggatacactgaacctgacccaagggatgatctatctggaactgacgttgcccgaaaggtcgttgtcctcgcgagggaatctggtctgaggcttgaactttctgacattcctgtgaagagccttgtgccagaaacacttgcatcatgctcgtcagcagatgaattcatgcagaagctaccgtccttcgacgaggactgggccaggcaacgcagtgatgctgaggctgcaggcgaagtcctgcgttacgttggagcgttggatgcggtgaacaggagcggacaggtggagctacgcaggtacaggagggaccacccgttcgcgcagctctccggctccgacaacatcatcgccttcaccacgtcgaggtacaaggagcagccgctgatcgtgcggggtccgggtgccggcgcggaggtgacagccggtggcgtcttctgcgacattctgcggctggcgtcttacctcggtgctccttcttgagcttctactagctacaggtgccagtttcaggaagcagacggagacacactgccatgcatgatgcctcccctccgtgtttgggctatgctcacatgttgtaatgttgttctgaataagtgccaggaaataaggcctctagcgtatgtcgagagagagaggtcgttcggctttggaatagccgattaggtgttgtttttgctgcatgatgcaaatgaattatcgtaccaatgaagggatgtttgcttgtgcctactgccatgtatgctcataaaaaac

SEQ ID NO: 26424 - DNA, 3017 bp, Zea Mays
ctcgggtctcggctctcgccgtcgccactcgccgcgagcgagatgcagggcctagccgtatcatgccagcttcctcctgctgcggccgcagctcggtggcggccgcgcgcttcttcctctaatagggaagcagttttacaatgttggaagtatgaattaagtcaagaccactatttgggaggccccctaaggataggtcagtctcaaggaagtttgcacagacatcgctctacaaattttctcagaccagctgctgcagctatttcagttgaacaagatgaagtcaatacttatcttccaaaaggtgatatgtggtctgtgcacaagttcggtggaacctgtatgggaactcccaaaagaatccagtgtgttgcaaatatagttcttggtgattcttctgagaggaagctgatcattgtttccgcaatgtccaaagtaactgacatgatgtacaaccttgtacaaaaggctcagtcacgggatgattcatatgcaatagcactggcagaagtttttgagaagcatatgactgcagcaaaggatcttcttgacggagaagatcttgcaagattcttgtctcagttgcattcagacgtcagcaacttgcgagccatgctccgtgctatttatatagctgggcatgcgacagaatctttctctgactttgttgttgggcatggagagttgtggtctgcgcagatgctgtcgtatgcaataaagaagtctggggcaccctgcagttggatggatacaagagaagttctagttgtaacacccagtggttgtaatcaagtagaccctgattacttggaatgtgagaagcgacttcagaaatggttttctcgacaaccagctgagataatagttgctacaggatttattgcaagtacagctggaaacattccaacaactctaaaaagggatggaagtgatttctcagcagccatagttggttctcttgtcagggcacgccaggtcactatttggactgatgttgacggggtatttagcgcagatcctagaaaagttagtgaggctgtgatcttaagcactctgtcttaccaggaggcctgggaaatgtcatattttggggcaaatgttttgcatccgcgcaccattatacctgtgatgaaagacaacattcccattgttattaggaacatgttcaacctctctgcccctggaaccatgatttgcaagcagcctgccaatgaaaatggtgatttagacgcatgtgtcaaatcatttgctactgtcgataatttagcacttgttaatgttgaaggaactggaatggctggcgttccaggtacagcaagtgctatatttagtgctgttaaggatgttggagctaatgttatcatgatatctcaggctagcagcgaacattcagtatgctttgctgttccagaaaaggaagttgctgtagtttctgctgagttacatgataggtttcgtgaggcattagctgcagggaggctgtctaaggttgaagttattaatggttgcagcattcttgctgctgttggtctgaggatggccagcactccaggagtcagtgcaatactttttgatgcattagcaaaggcaaacattaatgttcgagcaatagctcaaggttgcagtgaatacaatattactgttgtattgaagcaacaagattgtgtaagggctctgagagctgctcactcaaggttcttcctctccaaaaccacacttgctgttgggatcattggacctggtttaattggtggagcactccttaaccagttgaagaatcagactgctgttctcaaggaaaatatgaacattgatctgcgtgtcattggaataactggctcaagtacaatgcttctgagcgacacgggaatagacttaacccagtggaaacagcttctacaaaaggaagcagaaccagctgatattggtagttttgttcatcatttatctgataatcatgtatttccgaacaaagttttggtggactgcacagcggatacaagtgtggcatcccactattacgattggttaaagaagggtattcatgtcatcacgccaaataagaaagcaaattctgggccacttgatcagcaactgttggtgctggcctcccaatcatcagcaccttgcgaggtcttctggagacgggtgacaagatactgcgtattgagggcattttcagtggaactttgagttatatatttaacaatttcgaaggaacaagggcgtttagtgatgttgttgccgaagcaagagaggcgggatacactgaacctgacccaagggatgatctatctggaactgacgttgcccgaaaggtcgttgtcctcgcgagggaatctggtctgaggcttgaactttctgacattcctgtgaagagccttgtgccagaaacacttgcatcatgctcgtcagcagatgaattcatgcagaagctaccgtccttcgacgaggactgggccaggcaacgcagtgatgctgaggctgcaggcgaagtcctgcgttacgttggagcgttggatgcggtgaacaggagcggacaggtggagctacgcaggtacaggagggaccacccgttcgcgcagctctccggctccgacaacatcatcgccttcaccacgtcgaggtacaaggagcagccgctgatcgtgcggggtccgggtgccggcgcggaggtgacagccggtggcgtcttctgcgacattctgcggctggcgtcttacctcggtgctccttcttgagcttctactagctacaggtgccagtttcaggaagcagacggagacacactgccatgcatgatgcctcccctccgtgtttgggctatgctcacatgttgtaatgttgttctgaataagtgccaggaaataaggcctctagcgtatgtcgagagagagaggtcgttcggctttggaatagccgattaggtgttgtttttgctgcatgatgcaaatgaattatcgtaccaatgaagggatgtttgcttgtgcctactgccatgtatgctcataaaaaac

SEQ ID NO: 26425 - DNA, 3073 bp, Zea Mays
gacctgcactgcgtccctctctccactctcccgtctctcgggtctcggctctcgccgtcgccactcgccgcgagcgagatgcagggcctagccgtatcatgccagcttcctcctgctgcggccgcagctcggtggcggccgcgcgcttcttcctctaatagggaagcagttttacaatgttggaagtatgaattaagtcaagaccactatttgggaggccccctaaggataggtcagtctcaaggaagtttgcacagacatcgctctacaaattttctcagaccagctgctgcagctatttcagttgaacaagatgaagtcaatacttatcttccaaaaggtgatatgtggtctgtgcacaagttcggtggaacctgtatgggaactcccaaaagaatccagtgtgttgcaaatatagttcttggtgattcttctgagaggaagctgatcattgtttccgcaatgtccaaagtaactgacatgatgtacaaccttgtacaaaaggctcagtcacgggatgattcatatgcaatagcactggcagaagtttttgagaagcatatgactgcagcaaaggatcttcttgacggagaagatcttgcaagattcttgtctcagttgcattcagacgtcagcaacttgcgagccatgctccgtgctatttatatagctgggcatgcgacagaatctttctctgactttgttgttgggcatggagagttgtggtctgcgcagatgctgtcgtatgcaataaagaagtctggggcaccctgcagttggatggatacaagagaagttctagttgtaacacccagtggttgtaatcaagtagaccctgattacttggaatgtgagaagcgacttcagaaatggttttctcgacaaccagctgagataatagttgctacaggatttattgcaagtacagctggaaacattccaacaactctaaaaagggatggaagtgatttctcagcagccatagttggttctcttgtcagggcacgccaggtcactatttggactgatgttgacggggtatttagcgcagatcctagaaaagttagtgaggctgtgatcttaagcactctgtcttaccaggaggcctgggaaatgtcatattttggggcaaatgttttgcatccgcgcaccattatacctgtgatgaaagacaacattcccattgttattaggaacatgttcaacctctctgcccctggaaccatgatttgcaagcagcctgccaatgaaaatggtgatttagacgcatgtgtcaaatcatttgctactgtcgataatttagcacttgttaatgttgaaggaactggaatggctggcgttccaggtacagcaagtgctatatttagtgctgttaaggatgttggagctaatgttatcatgatatctcaggctagcagcgaacattcagtatgctttgctgttccagaaaaggaagttgctgtagtttctgctgagttacatgataggtttcgtgaggcattagctgcagggaggctgtctaaggttgaagttattaatggttgcagcattcttgctgctgttggtctgaggatggccagcactccaggagtcagtgcaatactttttgatgcattagcaaaggcaaacattaatgttcgagcaatagctcaaggttgcagtgaatacaatattactgttgtattgaagcaacaagattgtgtaagggctctgagagctgctcactcaaggttcttcctctccaaaaccacacttgctgttgggatcattggacctggtttaattggtggagcactccttaaccagttgaagaatcagactgctgttctcaaggaaaatatgaacattgatctgcgtgtcattggaataactggctcaagtacaatgcttctgagcgacacgggaatagacttaacccagtggaaacagcttctacaaaaggaagcagaaccagctgatattggtagttttgttcatcatttatctgataatcatgtatttccgaacaaagttttggtggactgcacagcggatacaagtgtggcatcccactattacgattggttaaagaagggtattcatgtcatcacgccaaataagaaagcaaattctgggccacttgatcagtacctgaaattacggactatgcagcgtgcctcatacactcattacttttatgaagcaactgttggtgctggcctcccaatcatcagcaccttgcgaggtcttctggagacgggtgacaagatactgcgtattgagggcattttcaggaacaagggcgtttagtgatgttgttgccgaagcaagagaggcgggatacactgaacctgacccaagggatgatctatctggaactgacgttgcccgaaaggtcgttgtcctcgcgagggaatctggtctgaggcttgaactttctgacattcctgtgaagagccttgtgccagaaacacttgcatcatgctcgtcagcagatgaattcatgcagaagctaccgtccttcgacgaggactgggccaggcaacgcagtgatgctgaggctgcaggcgaagtcctgcgttacgttggagcgttggatgcggtgaacaggagcggacaggtggagctacgcaggtacaggagggaccacccgttcgcgcagctctccggctccgacaacatcatcgccttcaccacgtcgaggtacaaggagcagccgctgatcgtgcggggtccgggtgccggcgcggaggtgacagccggtggcgtcttctgcgacattctgcggctggcgtcttacctcggtgctccttcttgagcttctactagctacaggtgccagtttcaggaagcagacggagacacactgccatgcatgatgcctcccctccgtgtttgggctatgctcacatgttgtaatgttgttctgaataagtgccaggaaataaggcctctagcgtatgtcgagagagagaggtcgttcggctttggaatagccgattaggtgttgtttttgctgcatgatgcaaatgaattatcgtaccaatgaagggatgtttgcttgtgcctactgccatgtatgctcataaaaaac

SEQ ID NO: 26426 - DNA, 2825 bp, Zea Mays
cgaacttgcgcgacctgcactgcgtccctctctccactctcccgtctctcgggtctcggctctcgccgtcgccactcgccgcgagcgagatgcagggcctagccgtatcatgccagcttcctcctgctgcggccgcagctcggtggcggccgcgcgcttcttcctctaatagggaagcagttttacaatgttggaagtatgaattaagtcaagaccactatttgggaggccccctaaggataggtcagtctcaaggaagtttgcacagacatcgctctacaaattttctcagaccagctgctgcagctatttcagttgaacaagatgaagtcaatacttatcttccaaaaggtgatatgtggtctgtgcacaagttcggtggaacctgtatgggaactcccaaaagaatccagtgtgttgcaaatatagttcttggtgattcttctgagaggaagctgatcattgtttccgcaatgtccaaagtaactgacatgatgtacaaccttgtacaaaaggctcagtcacgggatgattcatatgcaatagcactggcagaagtttttgagaagcatatgactgcagcaaaggatcttcttgacggagaagatcttgcaagattcttgtctcagttgcattcagacgtcagcaacttgcgagccatgctccgtgctatttatatagctgggcatgcgacagaatctttctctgactttgttgttgggcatggagagttgtggtctgcgcagatgctgtcgtatgcaataaagaagtctggggcaccctgcagttggatggatacaagagaagttctagttgtaacacccagtggttgtaatcaagtagaccctgattacttggaatgtgagaagcgacttcagaaatggttttctcgacaaccagctgagataatagttgctacaggatttattgcaagtacagctggaaacattccaacaactctaaaaagggatggaagtgatttctcagcagccatagttggttctcttgtcagggcacgccaggtcactatttggactgatgttgacggggtatttagcgcagatcctagaaaagttagtgaggctgtgatcttaagcactctgtcttaccaggaggcctgggaaatgtcatattttggggcaaatgttttgcatccgcgcaccattatacctgtgatgaaagacaacattcccattgttattaggaacatgttcaacctctctgcccctggaaccatgatttgcaagcagcctgccaatgaaaatggtgatttagacgcatgtgtcaaatcatttgctactgtcgataatttagcacttgttaatgttgaaggaactggaatggctggcgttccaggtacagcaagtgctatatttagtgctgttaaggatgttggagctaatgttatcatgatatctcaggctagcagcgaacattcagtatgctttgctgttccagaaaaggaagttgctgtagtttctgctgagttacatgataggtttcgtgaggcattagctgcagggaggctgtctaagactgctgttctcaaggaaaatatgaacattgatctgcgtgtcattggaataactggctcaagtacaatgcttctgagcgacacgggaatagacttaacccagtggaaacagcttctacaaaaggaagcagaaccagctgatattggtagttttgttcatcatttatctgataatcatgtatttccgaacaaagttttggtggactgcacagcggatacaagtgtggcatcccactattacgattggttaaagaagggtattcatgtcatcacgccaaataagaaagcaaattctgggccacttgatcagtacctgaaattacggactatgcagcgtgcctcatacactcattacttttatgaagcaactgttggtgctggcctcccaatcatcagcaccttgcgaggtcttctggagacgggtgacaagatactgcgtattgagggcattttcagtggaactttgagttatatatttaacaatttcgaaggaacaagggcgtttagtgatgttgttgccgaagcaagagaggcgggatacactgaacctgacccaagggatgatctatctggaactgacgttgcccgaaaggtcgttgtcctcgcgagggaatctggtctgaggcttgaactttctgacattcctgtgaagagccttgtgccagaaacacttgcatcatgctcgtcagcagatgaattcatgcagaagctaccgtccttcgacgaggactgggccaggcaacgcagtgatgctgaggctgcaggcgaagtcctgcgttacgttggagcgttggatgcggtgaacaggagcggacaggtggagctacgcaggtacaggagggaccacccgttcgcgcagctctccggctccgacaacatcatcgccttcaccacgtcgaggtacaaggagcagccgctgatcgtgcggggtccgggtgccggcgcggaggtgacagccggtggcgtcttctgcgacattctgcggctggcgtcttacctcggtgctccttcttgagcttctactagctacaggtgccagtttcaggaagcagacggagacacactgccatgcatgatgcctcccctccgtgtttgggctatgctcacatgttgtaatgttgttctgaataagtgccaggaaataaggcctctagcgtatgtcgagagagagaggtcgttcggctttggaatagccgattaggtgttgtttttgctgcatgatgcaaatgaattatcgtaccaatgaagggatgtttgcttgtgcctactgccatgtatgctcataaaaaac

SEQ ID NO: 26427 - DNA, 3143 bp, Zea Mays
tagcagtccgccagtccctttctgctgcgaacttgcgcgacctgcactgcgtccctctctccactctcccgtctctcgggtctcggctctcgccgtcgccactcgccgcgagcgagatgcagggcctagccgtatcatgccagcttcctcctgctgcggccgcagctcggtggcggccgcgcgcttcttcctctaatagggaagcagttttacaatgttggaagtatgaattaagtcaagaccactatttgggaggccccctaaggataggtcagtctcaaggaagtttgcacagacatcgctctacaaattttctcagaccagctgctgctatttcagttgaacaagatgaagtcaatacttatcttccaaaaggtgatatgtggtctgtgcacaagttcggtggaacctgtatgggaactcccaaaagaatccagtgtgttgcaaatatagttcttggtgattcttctgagaggaagctgatcattgtttccgcaatgtccaaagtaactgacatgatgtacaaccttgtacaaaaggctcagtcacgggatgattcatatgcaatagcactggcagaagtttttgagaagcatatgactgcagcaaaggatcttcttgacggagaagatcttgcaagattcttgtctcagttgcattcagacgtcagcaacttgcgagccatgctccgtgctatttatatagctgggcatgcgacagaatctttctctgactttgttgttgggcatggagagttgtggtctgcgcagatgctgtcgtatgcaataaagaagtctggggcaccctgcagttggatggatacaagagaagttctagttgtaacacccagtggttgtaatcaagtagaccctgattacttggaatgtgagaagcgacttcagaaatggttttctcgacaaccagctgagataatagttgctacaggatttattgcaagtacagctggaaacattccaacaactctaaaaagggatggaagtgatttctcagcagccatagttggttctcttgtcagggcacgccaggtcactatttggactgatgttgacggggtatttagcgcagatcctagaaaagttagtgaggctgtgatcttaagcactctgtcttaccaggaggcctgggaaatgtcatattttggggcaaatgttttgcatccgcgcaccattatacctgtgatgaaagacaacattcccattgttattaggaacatgttcaacctctctgcccctggaaccatgatttgcaagcagcctgccaatgaaaatggtgatttagacgcatgtgtcaaatcatttgctactgtcgataatttagcacttgttaatgttgaaggaactggaatggctggcgttccaggtacagcaagtgctatatttagtgctgttaaggatgttggagctaatgttatcatgatatctcaggctagcagcgaacattcagtatgctttgctgttccagaaaaggaagttgctgtagtttctgctgagttacatgataggtttcgtgaggcattagctgcagggaggctgtctaaggttgaagttattaatggttgcagcattcttgctgctgttggtctgaggatggccagcactccaggagtcagtgcaatactttttgatgcattagcaaaggcaaacattaatgttcgagcaatagctcaaggttgcagtgaatacaatattactgttgtattgaagcaacaagattgtgtaagggctctgagagctgctcactcaaggttcttcctctccaaaaccacacttgctgttgggatcattggacctggtttaattggtggagcactccttaaccagttgaagaatcagactgctgttctcaaggaaaatatgaacattgatctgcgtgtcattggaataactggctcaagtacaatgcttctgagcgacacgggaatagacttaacccagtggaaacagcttctacaaaaggaagcagaaccagctgatattggtagttttgttcatcatttatctgataatcatgtatttccgaacaaagttttggtggactgcacagcggatacaagtgtggcatcccactattacgattggttaaagaagggtattcatgtcatcacgccaaataagaaagcaaattctgggccacttgatcagtacctgaaattacggactatgcagcgtgcctcatacactcattacttttatgaagcaactgttggtgctggcctcccaatcatcagcaccttgcgaggtcttctggagacgggtgacaagatactgcgtattgagggcattttcagtggaactttgagttatatatttaacaatttcgaaggaacaagggcgtttagtgatgttgttgccgaagcaagagaggcgggatacactgaacctgacccaagggatgatctatctggaactgacgttgcccgaaaggtcgttgtcctcgcgagggaatctggtctgaggcttgaactttctgacattcctgtgaagagccttgtgccagaaacacttgcatcatgctcgtcagcagatgaattcatgcagaagctaccgtccttcgacgaggactgggccaggcaacgcagtgatgctgaggctgcaggcgaagtcctgcgttacgttggagcgttggatgcggtgaacaggagcggacaggtggagctacgcaggtacaggagggaccacccgttcgcgcagctctccggctccgacaacatcatcgccttcaccacgtcgaggtacaaggagcagccgctgatcgtgcggggtccgggtgccggcgcggaggtgacagccggtggcgtcttctgcgacattctgcggctggcgtcttacctcggtgctccttcttgagcttctactagctacaggtgccagtttcaggaagcagacggagacacactgccatgcatgatgcctcccctccgtgtttgggctatgctcacatgttgtaatgttgttctgaataagtgccaggaaataaggcctctagcgtatgtcgagagagagaggtcgttcggctttggaatagccgattaggtgttgtttttgctgcatgatgcaaatgaattatcgtaccaatgaagggatgtttgcttgtgcctactgccatgtatgctcataaaaaac

SEQ ID NO: 26428 - DNA, 2587 bp, Zea Mays
ctcgggtctcggctctcgccgtcgccactcgccgcgagcgagatgcagggcctagccgtatcatgccagcttcctcctgctgcggccgcagctcggtggcggccgcgcgcttcttcctctaatagggaagcagttttacaatgttggaagtatgaattaagtcaagaccactatttgggaggccccctaaggataggtcagtctcaaggaagtttgcacagacatcgctctacaaattttctcagaccagctgctgcagctatttcagttgaacaagatgaagtcaatacttatcttccaaaaggtgatatgtggtctgtgcacaagttcggtggaacctgtatgggaactcccaaaagaatccagtgtgttgcaaatatagttcttggtgattcttctgagaggaagctgatcattgtttccgcaatgtccaaagtaactgacatgatgtacaaccttgtacaaaaggctcagtcacgggatgattcatatgcaatagcactggcagaagtttttgagaagcatatgactgcagcaaaggatcttcttgacggagaagatcttgcaagattcttgtctcagttgcattcagacgtcagcaacttgcgagccatgctccgtgctatttatatagctgggcatgcgacagaatctttctctgactttgttgttgggcatggagagttgtggtctgcgcagatgctgtcgtatgcaataaagaagtctggggcaccctgcagttggatggatacaagagaagttctagttgtaacacccagtggttgtaatcaagtagaccctgattacttggaatgtgagaagcgacttcagaaatggttttctcgacaaccagctgagataatagttgctacaggatttattgcaagtacagctggaaacattccaacaactctaaaaagggatggaagtgatttctcagcagccatagttggttctcttgtcagggcacgccaggtcactatttggactgatgttgacggggtatttagcgcagatcctagaaaagttagtgaggctgtgatcttaagcactctgtcttaccaggaggcctgggaaatgtcatattttggggcaaatgttttgcatccgcgcaccattatacctgtgatgaaagacaacattcccattgttattaggaacatgttcaacctctctgcccctggaaccatgatttgcaagcagcctgccaatgaaaatggtgatttagacgcatgtgtcaaatcatttgctactgtcgataatttagcacttgttaatgttgaaggaactggaatggctggcgttccaggtacagcaagtgctatatttagtgctgttaaggatgttggagctaatgttatcatgatatctcaggctagcagcgaacattcagtatgctttgctgttccagaaaaggaagttgctgtagtttctgctgagttacatgataggtttcgtgaggcattagctgcagggaggctgtctaaggttgaagttattaatggttgcagcattcttgctgctgttggtctgaggatggccagcactccaggagtcagtgcaatactttttgatgcattagcaaaggcaaacattaatgttcgagcaatagctcaaggttgcagtgaatacaatattactgttgtattgaagcaacaagattgtgtaagggctctgagagctgctcactcaaggttcttcctctccaaaaccacacttgctgttgggatcattggacctggtttaattggtggagcactccttaaccagttgaagaatcagactgctgttctcaaggaaaatatgaacattgatctgcgtgtcattggaataactggctcaagtacaatgcttctgagcgacacgggaatagacttaacccagtggaaacagcttctacaaaaggaagcagaaccagctgatattggtagttttgttcatcatttatctgataatcatgtatttccgaacaaagttttggtggactgcacagcggatacaagtgtggcatcccactattacgattggttaaagaagggtattcatgtcatcacgccaaataagaaagcaaattctgggccacttgatcagtacctgaaattacggactatgcagcgtgcctcatacactcattacttttatgaagcaactgttggtgctggcctcccaatcatcagcaccttgcgaggtcttctggagacgggtgacaagatactgcgtattgagggcattttcagtggaactttgagttatatatttaacaatttcgaaggaacaagggcgtttagtgatgttgttgccgaagcaagagaggcgggatacactgaacctgacccaagggatgatctatctggaactgacgttgcccgaaaggtcgttgtcctcgcgagggaatctggtctgaggcttgaactttctgacattcctgtgaagagccttgtgccagaaacacttgcatcatgctcgtcagcagatgaattcatgcagaagctaccgtccttcgacgaggactgggccaggcaacgcagtgatgctgaggctgcaggcgaaaggtgattcggcttggctttccccttcccgttttccg

SEQ ID NO: 26429 - DNA, 1990 bp, Zea Mays
cctctctccactctcccgtctctcgggtctcggctctcgccgtcgccactcgccgcgagcgagatgcagggcctagccgtatcatgccagcttcctcctgctgcggccgcagctcggtggcggccgcgcgcttcttcctctaatagggaagcagttttacaatgttggaagtatgaattaagtcaagaccactatttgggaggccccctaaggataggtcagtctcaaggaagtttgcacagacatcgctctacaaattttctcagaccagctgctgcagctatttcagttgaacaagatgaagtcaatacttatcttccaaaaggtgatatgtggtctgtgcacaagttcggtggaacctgtatgggaactcccaaaagaatccagtgtgttgcaaatatagttcttggtgattcttctgagaggaagctgatcattgtttccgcaatgtccaaagtaactgacatgatgtacaaccttgtacaaaaggctcagtcacgggatgattcatatgcaatagcactggcagaagtttttgagaagcatatgactgcagcaaaggatcttcttgacggagaagatcttgcaagattcttgtctcagttgcattcagacgtcagcaacttgcgagccatgctccgtgctatttatatagctgggcatgcgacagaatctttctctgactttgttgttgggcatggagagttgtggtctgcgcagatgctgtcgtatgcaataaagaagtctggggcaccctgcagttggatggatacaagagaagttctagttgtaacacccagtggttgtaatcaagtagaccctgattacttggaatgtgagaagcgacttcagaaatggttttctcgacaaccagctgagataatagttgctacaggatttattgcaagtacagctggaaacattccaacaactctaaaaagggatggaagtgatttctcagcagccatagttggttctcttgtcagggcacgccaggtcactatttggactgatgttgacggggtatttagcgcagatcctagaaaagttagtgaggctgtgatcttaagcactctgtcttaccaggaggcctgggaaatgtcatattttggggcaaatgttttgcatccgcgcaccattatacctgtgatgaaagacaacattcccattgttattaggaacatgttcaacctctctgcccctggaaccatgatttgcaagcagcctgccaatgaaaatggtgatttagacgcatgtgtcaaatcatttgctactgtcgataatttagcacttgttaatgttgaaggaactggaatggctggcgttccaggtacagcaagtgctatatttagtgctgttaaggatgttggagctaatgttatcatgatatctcaggctagcagcgaacattcagtatgctttgctgttccagaaaaggaagttgctgtagtttctgctgagttacatgataggtttcgtgaggcattagctgcagggaggctgtctaaggttgaagttattaatggttgcagcattcttgctgctgttggtctgaggatggccagcactccaggagtcagtgcaatactttttgatgcattagcaaagctcaaggttgcagtgaatacaatattactgttgtattgaagcaacaagattgtgtaagggctctgagagctgctcactcaaggttcttcctctccaaaaccacacttgctgttgggatcattggacctggtttaattggtggagcactccttaaccagttgaagaatcagattcgccaccaccgcagacttcgccgcaacgggcaacaccaagtctattgccgcgtacacctcctcggggccgggaacacgaacaacgccagcgacgacggaagggcgaggatggtgggcgaccgtgacaacattgacgagcgccgagctgtccatgaccatgagcgcgacaaccttggtgcgcgtgaggcagcggggagcacggagtaaat

SEQ ID NO: 26430 - DNA, 2052 bp, Zea Mays
gtccctttctgctgcgaacttgcgcgacctgcactgcgtccctctctccactctcccgtctctcgggtctcggctctcgccgtcgccactcgccgcgagcgagatgcagggcctagccgtatcatgccagcttcctcctgctgcggccgcagctcggtggcggccgcgcgcttcttcctctaatagggaagcagttttacaatgttggaagtatgaattaagtcaagaccactatttgggaggccccctaaggataggtcagtctcaaggaagtttgcacagacatcgctctacaaattttctcagaccagctgctgctatttcagttgaacaagatgaagtcaatacttatcttccaaaaggtgatatgtggtctgtgcacaagttcggtggaacctgtatgggaactcccaaaagaatccagtgtgttgcaaatatagttcttggtgattcttctgagaggaagctgatcattgtttccgcaatgtccaaagtaactgacatgatgtacaaccttgtacaaaaggctcagtcacgggatgattcatatgcaatagcactggcagaagtttttgagaagcatatgactgcagcaaaggatcttcttgacggagaagatcttgcaagattcttgtctcagttgcattcagacgtcagcaacttgcgagccatgctccgtgctatttatatagctgggcatgcgacagaatctttctctgactttgttgttgggcatggagagttgtggtctgcgcagatgctgtcgtatgcaataaagaagtctggggcaccctgcagttggatggatacaagagaagttctagttgtaacacccagtggttgtaatcaagtagaccctgattacttggaatgtgagaagcgacttcagaaatggttttctcgacaaccagctgagataatagttgctacaggatttattgcaagtacagctggaaacattccaacaactctaaaaagggatggaagtgatttctcagcagccatagttggttctcttgtcagggcacgccaggtcactatttggactgatgttgacggggtatttagcgcagatcctagaaaagttagtgaggctgtgatcttaagcactctgtcttaccaggaggcctgggaaatgtcatattttggggcaaatgttttgcatccgcgcaccattatacctgtgatgaaagacaacattcccattgttattaggaacatgttcaacctctctgcccctggaaccatgatttgcaagcagcctgccaatgaaaatggtgatttagacgcatgtgtcaaatcatttgctactgtcgataatttagcacttgttaatgttgaaggaactggaatggctggcgttccaggtacagcaagtgctatatttagtgctgttaaggatgttggagctaatgttatcatgatatctcaggctagcagcgaacattcagtatgctttgctgttccagaaaaggaagttgctgtagtttctgctgagttacatgataggtttcgtgaggcattagctgcagggaggctgtctaaggttgaagttattaatggttgcagcattcttgctgctgttggtctgaggatggccagcactccaggagtcagtgcaatactttttgatgcattagcaaaggcaaacattaatgttcgagcaatagctcaaggttgcagtgaatacaatattactgttgtattgaagcaacaagattgtgtaagggctctgagagctgctcactcaaggttcttcctctccaaaaccacacttgctgttgggatcattggacctggtttaattggtggagcactccttaaccagttgaagaatcagattcgccaccaccgcagacttcgccgcaacgggcaacaccaagtctattgccgcgtacacctcctcggggccgggaacacgaacaacgccagcgacgacggaagggcgaggatggtgggcgaccgtgacaacattgacgagcgccgagctgtccatgaccatgagcgcgacaaccttggtgcgcgtgaggcagcggggagcacggagtaaat

SEQ ID NO: 26431 - DNA, 1994 bp, Zea Mays
cgccagtccctttctgctgcgaacttgcgcgacctgcactgcgtccctctctccactctcccgtctctcgggtctcggctctcgccgtcgccactcgccgcgagcgagatgcagggcctagccgtatcatgccagcttcctcctgctgcggccgcagctcggtggcggccgcgcgcttcttcctctaataggataggtcagtctcaaggaagtttgcacagacatcgctctacaaattttctcagaccagctgctgcagctatttcagttgaacaagatgaagtcaatacttatcttccaaaaggtgatatgtggtctgtgcacaagttcggtggaacctgtatgggaactcccaaaagaatccagtgtgttgcaaatatagttcttggtgattcttctgagaggaagctgatcattgtttccgcaatgtccaaagtaactgacatgatgtacaaccttgtacaaaaggctcagtcacgggatgattcatatgcaatagcactggcagaagtttttgagaagcatatgactgcagcaaaggatcttcttgacggagaagatcttgcaagattcttgtctcagttgcattcagacgtcagcaacttgcgagccatgctccgtgctatttatatagctgggcatgcgacagaatctttctctgactttgttgttgggcatggagagttgtggtctgcgcagatgctgtcgtatgcaataaagaagtctggggcaccctgcagttggatggatacaagagaagttctagttgtaacacccagtggttgtaatcaagtagaccctgattacttggaatgtgagaagcgacttcagaaatggttttctcgacaaccagctgagataatagttgctacaggatttattgcaagtacagctggaaacattccaacaactctaaaaagggatggaagtgatttctcagcagccatagttggttctcttgtcagggcacgccaggtcactatttggactgatgttgacggggtatttagcgcagatcctagaaaagttagtgaggctgtgatcttaagcactctgtcttaccaggaggcctgggaaatgtcatattttggggcaaatgttttgcatccgcgcaccattatacctgtgatgaaagacaacattcccattgttattaggaacatgttcaacctctctgcccctggaaccatgatttgcaagcagcctgccaatgaaaatggtgatttagacgcatgtgtcaaatcatttgctactgtcgataatttagcacttgttaatgttgaaggaactggaatggctggcgttccaggtacagcaagtgctatatttagtgctgttaaggatgttggagctaatgttatcatgatatctcaggctagcagcgaacattcagtatgctttgctgttccagaaaaggaagttgctgtagtttctgctgagttacatgataggtttcgtgaggcattagctgcagggaggctgtctaaggttgaagttattaatggttgcagcattcttgctgctgttggtctgaggatggccagcactccaggagtcagtgcaatactttttgatgcattagcaaaggcaaacattaatgttcgagcaatagctcaaggttgcagtgaatacaatattactgttgtattgaagcaacaagattgtgtaagggctctgagagctgctcactcaaggttcttcctctccaaaaccacacttgctgttgggatcattggacctggtttaattggtggagcactccttaaccagttgaagaatcagattcgccaccaccgcagacttcgccgcaacgggcaacaccaagtctattgccgcgtacacctcctcggggccgggaacacgaacaacgccagcgacgacggaagggcgaggatggtgggcgaccgtgacaacattgacgagcgccgagctgtccatgaccatgagcgcgacaaccttggtgcgcgtgaggcagcggggagcacggagtaaat

SEQ ID NO: 26432 - DNA, 1100 bp, Zea Mays
cgaacttgcgcgacctgcactgcgtccctctctccactctcccgtctctcgggtctcggctctcgccgtcgccactcgccgcgagcgagatgcagggcctagccgtatcatgccagcttcctcctgctgcggccgcagctcggtggcggccgcgcgcttcttcctctaatagggaagcagttttacaatgttggaagtatgaattaagtcaagaccactatttgggaggccccctaaggataggtcagtctcaaggaagtttgcacagacatcgctctacaaattttctcagaccagctgctgcagctatttcagttgaacaagatgaagtcaatacttatcttccaaaaggtgatatgtggtctgtgcacaagttcggtggaacctgtatgggaactcccaaaagaatccagtgtgttgcaaatatagttcttggtgattcttctgagaggaagctgatcattgtttccgcaatgtccaaagtaactgacatgatgtacaaccttgtacaaaaggctcagtcacgggatgattcatatgcaatagcactggcagaagtttttgagaagcatatgactgcagcaaaggatcttcttgacggagaagatcttgcaagattcttgtctcagttgcattcagacgtcagcaacttgcgagccatgctccgtgctatttatatagctgggcatgcgacagaatctttctctgactttgttgttgggcatggagagttgtggtctgcgcagatgctgtcgtatgcaataaagaagtctggggcaccctgcagttggatggatacaagagaagttctagttgtaacacccagtggttgtaatcaagtagaccctgattacttggaatgtgagaagcgacttcagaaatggttttctcgacaaccagctgagataatagttgctacaggatttattgcaagtacagctggaaacattccaacaactctaaaaagggatggaagtgatttctcagcagccatagttggttctcttgtcagggcacgccaggtcactatttggactgatgttgacggggtatttagcgcagatcctagaaaagatcagattcagatcaaagagttgcac

SEQ ID NO: 26433 - DNA, 336 bp, Zea Mays
attatgacaagattcaaactaagtacataccatacctctctaggctcgtttggataaatccaactccaatggccattggactccaactaattatcccctcaatccgtccacaccccccccccaaaaaaaacatgtggaatagttaatccatacaagccttcaatggtaggaaagtaatacctcatgaacgttctccccagcaagtgaatgatgcaccatggtgccgaagaaacctaaccttcccttgctgttgtacaccagaagcatcagcagagcatatatttattccatttttgtcgctgatcttaacttgctactcaccttagtcccataaac

SEQ ID NO: 26434 - DNA, 1247 bp, Zea Mays
cacacatttctagacaattttttgcttaactttgtaagatacaaccaagtctaggttctgaaggttttgccataccctataaacatcacaacggtgcagtttgctgttggaagtgccattgctttgttcatgtggatcactggtatccataaaaggccaaagatttcgggtgcccagcttttcgctatccttcctctagctattgtccataccatgggcaatcttttcacaaacatgagccttggaaaggttgcagtgtcatttacacatactataaaggccatggaacctttcttctcagttctcctttcagcaattttccttggggagttgcctacgccatgggttgtgttgtctcttcttccgattgttggtggtgtagctttggcatcccttactgaggcctcctttaactgggctggattttggagtgcaatggcttcaaatgtaaccttccagtcaaggaatgtgctaagcaagaaacttatggtgaagaaagaggaatctctcgacaacattaacctattctcgatcattacagtcatgtcattcttcctgttggccccagtaaccttacttacagaaggtgttaaagttagtccagcagtgttgcagtctgctggtttgaacttgaaacaggtatacacaaggtcattgattgctgcattctgcttccatgcataccaacaggtatcatacatgatcctcgccagggtatccccagtcacacattcagtgggcaattgcgtcaagcgtgtggtggtcattgtgacctctgttctgttcttcaggacccctgtttctcccatcaactctcttggtaccgggatcgctcttgctggagttttcctatactcgcaattgaagagacttaagcccaagcccaagactgcttgatcatatacatttgtaggtccattcaatagaactttggaagttatgctatgtcattggagtgatcagtgagtgccgtagttagaatgataagcctctccgttttgttaccagttgggtggataatttatgatttacttgctagcatttttggacggatttgttcgtgtattaataattttgcagggatggttgtcgttgtgatgtttgctgtttatagacctgaaactgaactgcgatgtttcattggactatcttcaatcgtgacactaaattaagatagtagatacaatagtttggagagatatttggaaatatgttttcatgtgatggctaaacctctctgaatggac

SEQ ID NO: 26435 - DNA, 1705 bp, Zea Mays
catccgcccactgccaaacggccccacaagctcagcgcggcggcctcgtcgctgcataaagcccctacctaactccaaatctcgccagcgccaggcctcgccgagccggtggaaacctcgtgatctccgccgcctcgagccctccgcgcgcctcttccagagcaccatccactcttcggtggcgaggccgcggctccccgagacgggcaatgcagagcgcggctgccatcgggctcctacggccatgtgccgcgcggccgctcgccgcctacactagcccacgccgcggcgccggcgcgtgcagcggcggcacccagccgctcatcacgccccgcggcatccgcctctccgcccgccccggtctcgtgccggcctcgccgctggaggagaaggagaaccggagatgcagggccagtatgcacgcggcggcgtcggccggagaggaagctgggggagggctcgccaagacgctgcagctgggggcgcttttcgggctctggtacctcttcaacatctacttcaacatctacaacaagcaggttctgaaggttttgccataccctataaacatcacaacggtgcagtttgctgttggaagtgccattgctttgttcatgtggatcactggtatccataaaaggccaaagatttcgggtgcccagcttttcgctatccttcctctagctattgtccataccatgggcaatcttttcacaaacatgagccttggaaaggttgcagtgtcatttacacatactataaaggccatggaacctttcttctcagttctcctttcagcaattttccttggggagttgcctacgccatgggttgtgttgtctcttcttccgattgttggtggtgtagctttggcatcccttactgaggcctcctttaactgggctggattttggagtgcaatggcttcaaatgtaaccttccagtcaaggaatgtgctaagcaagaaacttatggtgaagaaagaggaatctctcgacaacattaacctattctcgatcattacagtcatgtcattcttcctgttggccccagtaaccttacttacagaaggtgttaaaggtttgaacttgaaacaggtatacacaaggtcattgattgctgcattctgcttccatgcataccaacaggtatcatacatgatcctcgccagggtatccccagtcacacattcagtgggcaattgcgtcaagcgtgtggtggtcattgtgacctctgttctgttcttcaggacccctgtttctcccatcaactctcttggtaccgggatcgctcttgctggagttttcctatactcgcaattgaagagacttaagcccaagcccaagactgcttgatcatatacatttgtaggtccattcaatagaactttggaagttatgctatgtcattggagtgatcagtgagtgccgtagttagaatgataagcctctccgttttgttaccagttgggtggataatttatgatttacttgctagcatttttggacggatttgttcgtgtattaataattttgcagggatggttgtcgttgtgatgtttgctgtttatagacctgaaactgaactgcgatgtttcattggactatcttcaatcgtgacactaaattaagatagtagatacaatagtttggagagatatttggaaatatgttttcatgtgatggctaaacctctctgaatggac

SEQ ID NO: 26436 - DNA, 2091 bp, Zea Mays
catccgcccactgccaaacggccccacaagctcagcgcggcggcctcgtcgctgcataaagcccctacctaactccaaatctcgccagcgccaggcctcgccgagccggtggaaacctcgtgatctccgccgcctcgagccctccgcgcgcctcttccagagcaccatccactcttcggtggcgaggccgcggctccccgagacgggcaatgcagagcgcggctgccatcgggctcctacggccatgtgccgcgcggccgctcgccgcctacactagcccacgccgcggcgccggcgcgtgcagcggcggcacccagccgctcatcacgccccgcggcatccgcctctccgcccgccccggtctcgtgccggcctcgccgctggaggagaaggagaaccggagatgcagggccagtatgcacgcggcggcgtcggccggagaggaagctgggggagggctcgccaagacgctgcagctgggggcgcttttcgggctctggtacctcttcaacatctacttcaacatctacaacaagcaggttctgaaggttttgccataccctataaacatcacaacggtgcagtttgctgttggaagtgccattgctttgttcatgtggatcactggtatccataaaaggccaaagatttcgggtgcccagcttttcgctatccttcctctagctattgtccataccatgggcaatcttttcacaaacatgagccttggaaaggttgcagtgtcatttacacatactataaaggccatggaacctttcttctcagttctcctttcagcaattttccttggggaggtaagtttctgttcaactctgaagcctaatagtaactacacaactctctgcgatatgataaaatctttcttgctttcctatgacaaatgagtgattttgcagttgcctacgccatgggttgtgttgtctcttcttccgattgttggtggtgtagctttggcatcccttactgaggcctcctttaactggtatacaatacaggcaccttagattgaatacaagcaaggatgcttgttgtgcaaattacatttgtctttttctattactttttttttgtcttttgttccattgcttcattcatctccatacgtcaaaatttagttatacaattgttccagtgctattgtttctatgtgtgtgtgcgcgcttacaccaatatgaagttaaaagcaatggcttgttacccattttacactcatgtgtagcttcgaaattttcaacacagggctggattttggagtgcaatggcttcaaatgtaaccttccagtcaaggaatgtgctaagcaagaaacttatggtgaagaaagaggaatctctcgacaacattaacctattctcgatcattacagtcatgtcattcttcctgttggccccagtaaccttacttacagaaggtgttaaagttagtccagcagtgttgcagtctgctggtttgaacttgaaacaggtatacacaaggtcattgattgctgcattctgcttccatgcataccaacaggtatcatacatgatcctcgccagggtatccccagtcacacattcagtgggcaattgcgtcaagcgtgtggtggtcattgtgacctctgttctgttcttcaggacccctgtttctcccatcaactctcttggtaccgggatcgctcttgctggagttttcctatactcgcaattgaagagacttaagcccaagcccaagactgcttgatcatatacatttgtaggtccattcaatagaactttggaagttatgctatgtcattggagtgatcagtgagtgccgtagttagaatgataagcctctccgttttgttaccagttgggtggataatttatgatttacttgctagcatttttggacggatttgttcgtgtattaataattttgcagggatggttgtcgttgtgatgtttgctgtttatagacctgaaactgaactgcgatgtttcattggactatcttcaatcgtgacactaaattaagatagtagatacaatagtttggagagatatttggaaatatgttttcatgtgatggctaaacctctctgaatggac

SEQ ID NO: 26437 - DNA, 2111 bp, Zea Mays
gcagcctccgcagatcaccgcactccccccgcacggcaccagtgacgcgaaagcaaaacgccaaacaggctcctctgaaactcccagagccggtagaggcacgccactccgcagtgtcagtcactgcccccccatcacgccgcccgccctttctcggccgttgccgcgagctcgctccgacccaccgccgatggcgacggcgatgggcgcgatggccgccacctgcatggcctcgatcccggccgccgctacgttccccggtgatctcggcgtcggacgacgccgagcggttgtaccagggtggcgcgccggtgggagacggctgcgtgcgacgccgcctgcccggaggccgttcctgttctcgccgaagggcgtttcggactcgcggagctcgcaaacgtgccttgatccggacgccagcacgagtgttcttgggatcatccttggagggggtgctgggacaaggctgtatccactgacgaagaagagggcgaaaccagcagtgccgttgggcgccaactacaggctcatagatatccctgtcagcaactgtctcaacagtaacgtctccaagatatatgtgctaacacagttcaactctgcttcgctcaaccgccacctctcgagggcctatggaaacaacattgccgggtacaagaatgagggattcgttgaggtccttgcagcacaacagagtccagagaatcccaactggtttcagggtactgcagatgccgtgcgtcaatatatgtggctatttgaggagcataatatcatggagttccttattctggctggagatcatctgtaccgtatggattaccaaaagttcattcaagctcatagagaaacagatgctgatataacagttgcagccctgccaatggatgaacaacgtgcaactgcatttggtcttatgaaaattgatgatgaagggaggatagttgagttcgcagaaaaaccaaaaggagagaagctgagatcaatgatggtagacaccactatattgggccttgatcctgaaagggccaaagaactgccttatattgctacaaatgactttggaagtgaggttattcctggcgcaacagaaattggattaagggtgcaagcttacttatatgatggttactgggaagatattggtactattgaagcattttataatgcaaacttgggaataaccaagaagcctgtaccggattttagcttctatgatcgttctgctccaatttatacgcaacctagatatttgcctccttcaaaggttcttgatgctgatgtgacagacagtgttattggagaagggtgtgttattaaacattgcacaatcaatcattccgtagttggactccgttcctgcatttctgaaggtgcagttatagaggactctttgctaatgggtgcagactattacgagactgagaatgataagaatgtcctttctgagactggtggcattcccattggtattgggaaaaattcacatatcagaaaagcaatcattgacaaaaatgctcgcattggagaaaatgtgaagataatcaattttgataatgtccaagaagcagtaagggagacagaaggatattttatcaaaagtggaattgtcacggtgattaaagatgctttaattcctagtggaacaatcatataaagtcagccaacaccatgtatataaggttgggttgcatcatatggtgatcgccaatgtgcatcaagttctctcatcccttgcgagaccatgcttatttccattgcaaaatcatcaagctctgcatcaacttgttgtggataataatgaaataataaatggtgccattccatggcaacatttttctgtcagtagtttatgaggcactgttctaaatgtactgttgagtggaatttgaatatgtatgcttttgcaatcgcacacctaaataccttgtgcttatactccttgttacctaaatatgctcactgcattgcccaaggaatcagatgaaaaatgtcatgcataacatgatttttgttagattgttgtaaagcttacataagtttcttctagcctcagagagatgtttagagtggaaaaagaatgaacctaaaaacaaataaattacaaaaca

SEQ ID NO: 26438 - DNA, 1578 bp, Zea Mays
aacttgagttgaaaaatcagtaagctcacattgataaggctttagaagtgtgccactaaaatcttggaatacatggcaaaagaaatactctgtgtctgggcttaagactagattagcgacgcagaaaccgcatgaaagctaacggaatcgagactgagaaagacaaatgtttggatttggtccagaactgataaaaccaacgagcgacctggcacaagaagcaaggggatccgtggaacatgagcgaggcagggtcgctggcctaccggcgagaggaggaaaaagcaatccaagcagagacaggcggatctccagttgtcccctccacgccgcgctagcccagagggcggggcaacggcgacgcctccctgcgagggaggaatggcctcgggcctggctctacgccgacggtggcgccgctcgccgacggcgaggcgcgagaaactaggaggtggcggcatcttcaggaggatgctacgaatatccgccctcagtcacccgtgtaccaagcaatatcttgctacctggagaaagtcagctaccacaagactggaccaccaatttcccttgtcaccaccagtaccaccatatccgacaacactagcaaagacagccatcaccgcgccctcaggcttcgccgatttgtcagttcaagaggacctccgcttgagctcatgcgacttgtggaggagcagcggcggacattccatgcctgatggggaaggggaaggtttgcctcctggactgtgcgagccgatggagctgacggaaagctggttgaacaccgacgagctcaacgtgtccgtggggccgccacacatgaccacccctccaggggatatctccgggagatcagggtcagagatgctgaagccacttgaagcgaactgttcggtgaccatcttgcacgcgctctccaggatactgtcgatgtacttctgaaacgcttccattctgatctgcacgcgcttttggacctggtaatggtaaaaccagccaacgattgtaatgagcaaggccttgtatgcagctgtggctgttacaaataaatgcatcccgcattatattgggctcagatatgctccatagggagcagatatcctgaaggtcctattgtccataatcagcctgctcaccgcagttaattgtttcagttaaggtcagcctcctaaactaattgtttatttcctgagattccgtttttttacttttagcaagaaaccatttaatcaacacagtattcgcaaacctgaaagcacccttcaagcaagaacacaaatattgtagaaaatttcaatggtgaattcataactccttcagaagaattgacttattccattaacgagactgtcctttcaactagcaccacaaatgcagctcactagttaaattgaatatatggataagtgaagcctaaggattctgcatcgtccgataaagaatctattaataaaccctagtccaagcttcacttctgagctcaatgaatgtgacaaaagcaaaactactgcagaaaatacaagagttggcattttctcgcttcacgcaattcaggaaactaatttaagagcatgatag

SEQ ID NO: 26439 - DNA, 1987 bp, Zea Mays
cgagaggccaggttcaggtacgttctctcatagagcacgacatgtggcgcgttcactcctttctcttcagcttagaacttcgaaggaaggagaatagcacatgctcatctttgagatgaaaggaaaaaataacaataaaacgcaagaaaaacgggattcgccgtcgtcaagcaggagagcacaccagaagaagacggcatcagcggccgcagacttccaacatctcctgagacgccttcctcctcctcaacccctcccacagcgcagcgtccccacgaacaaggaatcggtggagtccaaaccccggcccgtctctctgcttgcgaggggagcccgtgcgtcatggacacggagccgctgctgccgacgcacctcctccacccgctgccggagcactcggaggtgtcccacttctcctcaccgccctcccccgcctgcccatccccggcctccttctacaaggaccgcatcatcttcggcgcacacccgccgccgccgccgccccctccgcctccgccgccgcgctcgcaccgcgcccaccaccgccacagctccgtcgacggcctccacgaccttgacctgccctccggctcctcgtccatgccctcgccgccgtcggacccggaggacccttccgccggcggcggcgcgccctccctcctcgaattcatcgctggcgcccgcaccaacctccaccgctcccgcaccgccccggccatggcgccgctcagcgccgtggcgctcgcggccgccgcggcggccggggaccagactccggcgccgcccaagcgcccctccatcgtgctgcacgccttcctcttcctgctcgcctacctcgccctcggcgtcaccttctacgccgccgcgcccgccaacttcacctcctcggcggggcccacgcaccccgtcgccgacgcgctctacttctgcatcgtcacgctctgcaccatcgggagcacctcctcatcaccgcgctcaataacccaacctctgcgcgcaagcaccgccacaactacatctttgacatcaagaagggcaggatgcgcatccgtatgaaggtggcgctcgcgctgggcgtcgtggctgtctgcgtcggtgtcggggctgcagttctcaggaaggtggagagccttgggtggctcgacgccgtctatcttgcagtgatgtcggtgaccacagtcggttatggggatcaggcgttccagacactagctgggcggctttttgcatccgcttggctgctcgtgtccaccctggctgtggcaagggcattcctctacttggcagagatgaggattgacaagaggcaccgagccatggctaactgggtgctgtcgagggacatgaccgtgtctgaatttcttgctgcagacatagacaacaatggatatgtcacgaaatcagaatttgttgtttataagctcaaggagatggggaagatttctgaaaaagatatcatgatgatctgcgaccaattccagaggctggacacagggagctgtgggaagattaggctttcagatcttctggagagccatcacttggttccagaagccagggacaagaaaaaggggaagaaatcttaacaggggtgtcataggatgtacacagaaattgtagaacagtgttaaaattttgggactagaaaatacaccaaatcagcaagggtgggacatgaggcattcttctacgcggaaacagtaggatagttccgtagtagttgtggcccaggtatgatgctacctagaaatggtggaatgaccattgctgctaggaggcggctgtaaatatgaacaattatagaggatgatttattcagattctttttttagggggtgtttgaatgcactatagctaatagttagttggctaaaaatttgctagtgaaattagctagctaactattaactaatttgctaaaaatagatatcttcaactaattttagcaattaactattagttttaatgcattcaaattcaaataccc

SEQ ID NO: 26440 - DNA, 2035 bp, Zea Mays
ctgaacacgaggaagacgagagaagatgacgagaggccaggttcaggaaaaaataacaataaaacgcaagaaaaacgggattcgccgtcgtcaagcaggagagcacaccagaagaagacggcatcagcggccgcagacttccaacatctcctgagacgccttcctcctcctcaacccctcccacagcgcagcgtccccacgaacaaggaatcggtggagtccaaaccccggcccgtctctctgcttgcgaggggagcccgtgcgtcatggacacggagccgctgctgccgacgcacctcctccacccgctgccggagcactcggaggtgtcccacttctcctcaccgccctcccccgcctgcccatccccggcctccttctacaaggaccgcatcatcttcggcgcacacccgccgccgccgccgccccctccgcctccgccgccgcgctcgcaccgcgcccaccaccgccacagctccgtcgacggcctccacgaccttgacctgccctccggctcctcgtccatgccctcgccgccgtcggacccggaggacccttccgccggcggcggcgcgccctccctcctcgaattcatcgctggcgcccgcaccaacctccaccgctcccgcaccgccccggccatggcgccgctcagcgccgtggcgctcgcggccgccgcggcggccggggaccagactccggcgccgcccaagcgcccctccatcgtgctgcacgccttcctcttcctgctcgcctacctcgccctcggcgtcaccttctacgccgccgcgcccgccaacttcacctcctcggcggggcccacgcaccccgtcgccgacgcgctctacttctgcatcgtcacgctctgcaccatcgggtacggggacatcacgccagcgacgcccgccgccaagctcttctccatatccttcgtcctcgtcggcttcggcttcgttgacatcctcctctccgggatggtctcctatgtgctcgatctgcaggagcacctcctcatcaccgcgctcaataacccaacctctgcgcgcaagcaccgccacaactacatctttgacatcaagaagggcaggatgcgcatccgtatgaaggtggcgctcgcgctgggcgtcgtggctgtctgcgtcggtgtcggggctgcagttctcaggaaggtggagagccttgggtggctcgacgccgtctatcttgcagtgatgtcggtgaccacagtcggttatggggatcaggcgttccagacactagctgggcggctttttgcatccgcttggctgctcgtgtccaccctggctgtggcaagggcattcctctacttggcagagatgaggattgacaagaggcaccgagccatggctaactgggtgctgtcgagggacatgaccgtgtctgaatttcttgctgcagacatagacaacaatggatatgtcacgaaatcagaatttgttgtttataagctcaaggagatggggaagatttctgaaaaagatatcatgatgatctgcgaccaattccagaggctggacacagggagctgtgggaagattaggctttcagatcttctggagagccatcacttggttccagaagccagggacaagaaaaaggggaagaaatcttaacaggggtgtcataggatgtacacagaaattgtagaacagtgttaaaattttgggactagaaaatacaccaaatcagcaagggtgggacatgaggcattcttctacgcggaaacagtaggatagttccgtagtagttgtggcccaggtatgatgctacctagaaatggtggaatgaccattgctgctaggaggcggctgtaaatatgaacaattatagaggatgatttattcagattctttttttagggggtgtttgaatgcactatagctaatagttagttggctaaaaatttgctagtgaaattagctagctaactattaactaatttgctaaaaatagatatcttcaactaattttagcaattaactattagttttaatgcattcaaattcaaataccc

SEQ ID NO: 26441 - DNA, 1279 bp, Zea Mays
ccaaagtccatttttcgacccccaacttgcacaaaggtctaattttaaaccctatactaccaaatagggtaccaaacacccccctgaaggcatcccaacagctccttaatttcattcccaaattcatgttttaggaaaaaaacaagaaaacaagcactccaacaattccctaattaccttccctttcctcccgcgcgcgcaaaaacccagtcgcgcgcccagatatccgccgtcctccctcgaccgccgtcgttcgtctgctcgaccctcgtcccttcatctcctcgacgacgacgaccttcatccaggccacgcccctcgtcgccgagacaccgccggcaaacatccaacacctcgacgacatatctaggaggcagccccggtcggaagttgcggcccactagaggcccatcgtcgggcccagccccaaccctagctccagccgccgcttggctctcctgctgtccgtcctggtaccgcgcggccgcaccacctctccaggctccagctccagcgccgcagcgcgctcgcccgcggcccgcgcctcctgctcctgccctcctctgtcctctccaggctccagctcgcccgtcaggccgccaccgccaggcgctcgcccgccagcgcgctcgctcgccaggccgccaccgccaggcgcagccgcccacagcggccacagcgcgctcgccccgtcgcccgccaccgccaggcgccagccgcggagcgccggaggcccggagccgcaggccgccgcagcgctcgcccggagccgcaggccgcagcgcgctcgcccgcagtggtgtcgtcgtgctcacctacgagctccgcgaccgcatcgttaagctggtttactagcttacccacgcacggccgccgccgcctcacgcacgcagcagccggccagccgcggtacgttctccaggtcgtgccgacgtccgacgacaaagaaggccctgggggcgctggcgcgcatcgcgagtcccctcgccggcaagtatatttgcaagcagaccctcgagctcgtgcgtttagcctcggagggcaagttcccgaaccggggaatcaaggacgtcgtcaggagcatctgttgcgggaacgtagggaaaatgtcaacgaatcctgatgaacctaagagtcgtgcccggacagactttttgctcaacaatgaactggaggtccagaagttttgggatgagaacacggtttttcaggctgatcctggcaatgactctccaagccccggggaaaaattctttgggaactttccatacccttacat

SEQ ID NO: 26442 - DNA, 274 bp, Zea Mays
ctcgcccgcagtggtgtcgtcgtgctcacctacgagctccgcgaccgcatcgttaagctggtttactagcttacccacgcacggccgccgccgcctcacgcacgcagcagccggccagccgcggtacgttctccaggtcgtgccgacgtccgacgacaaagaaggccctgggggcgctggcgcgcatcgcgagtcccctcgccggcaagtatatttgcaagcagaccctcgagctccctcggagggcaagttcccgaaccggggaatcaaggac

SEQ ID NO: 26443 - DNA, 2537 bp, Zea Mays
gtcagtgatggctagacttctcactccctcccagcttcttcggacgcttcgcttgtctaatcgctgcaactgcagcttgctcgctgacttgccgccggcgagccccgctccgagcatctccgctgctgcttctgccgaatcccagagctccttctcccgcttgccccctttccctcctgtcacattgattcgattttcgtcgcccatggagctacaaattaagtgtaggaaccaattaaaagcttgccaaaactagggcggcggcatcagcattcagcaataccctaggcgggctctcctcgcctccacagctccaggaagccgacccagagcagcacagcgccgcccattctgtctctctcggtctcggcagcgtaggcagcgtcaccctccgcttaaaccaccagcaccagctgctggtgcgccgccccgcccggcaccgccgctcctctacctcttcctggtggattgattattgtgagtttatccctgccccaatccatctgtccatggtccgcgtgggcttgtcttccgcgcccggggtcaatctgacagagcaaatcgataatgtttttgaccaactgatcaacaagatagaacatgcggattttgatacgcggcctttcttgaaacaattgaatgtgttaggccgctatgaaccaatcaagcggagtatccttgccaactagacttttgaatcttcactgtaatataggagtattgtttttctcaagataatttatttgcacatttgcctcgtttaattcttactgttcatcatcaaaatatcatattctgacacgtccttgttcaacatattcaaactttctattctatgcctcttttatcagtcaagttagtatttcatccaacatatcctgtaacttgactacattacatagtcctagcctgaagtagaaatcagtgcaggaacgaaactagcaattcaatactgtgactacaacagggatatgtcttaatgttatatcatttttctttttcttattgagagtcgagtcaaattgtttttctagcttctgagttctgagtgaaaaaagagaatcgaaatattactataccttggtgaatttgaatatgtgcctttttatggatatgtccacatttttattgcctttaattctactaagatgtatattgcactaagagacgcattgaagattatggcatttcttgtcactgtaagccttctcctggttcatcagttgtgtgtggcagagactgccattgtggcatgcttttctcttgctgttcatcacaatgtgaatgtgatgacacatgcaccaataaatcattccagcacagacctcttaagaaaaccaaattgattaagacagagaaatgtggtcatggattggttgctgaggatgaaataaagaaaggagaatttgttattgagtatgttggagaagaacatgtgagaataggctatggacaatgaaaaggctgcttgacactgacttctacctttgtgaggtcagtagtaatatggtcattgatgcaacaaacaagggaaaccggtcccgattcataaaccatagctgtgaaccaaacacagcgatgcagaaatggactgttgatggagagaccagggttggaatttttgcacttcgtgacataaagataggggaggagctgacctatgactataaatttgtccagtttggagcagctcaagtttgtcattgtgggtcttcgaactgcagaaaaatgctaggcacgacgaagtattcaggaagctcacagaatcatcatgccaagaagaaaaagcggaaaacaagttgtgagaattgcatacagcagtttcttcggctgtggcatccacataaaaaaatgtatgttggttgttggataattgacttcgatcaagaaactaaaatgcatactctgaagttcaatgatctccatactgaaaagttcaatttgaaggaagaagaatggcacttcttagaggtcgattttgatgaagattgatcattgaaggtaactgcaagagttggctgccatggtttgtgacagggttgccatggtttgctgcaccgccggcctactagttgggggttcatttgcgatggcagcatagacagacggacggccatttttcttccattttggagtaatagtccaagcctgaactgtgacattcgtgcatgcttatacgtgaaagtgtacctgagagcagattatacgtgaaagtgtatcagcgttgcatatgcatggacggttgggtcccccagcgttttttttggtgctgcggcgatgcttgctgcctcgacaaacaagcatgtttcaagcgcctgcagctcatgtggtggcctacaaccgcaaccccccttccgttaccatcttccttctactacagtacagtactgtttccaacaacacatcaccaaccaatactacactacacaactacggcacagaaaataaaagcggaggaagctagctttagcagctttgcgtcgctctaaaattcacaaagctaaagatctaacgatcgacgggtccctgtgtctgtg

SEQ ID NO: 26444 - DNA, 2496 bp, Zea Mays
gtcagtgatggctagacttctcactccctcccagcttcttcggacgcttcgcttgtctaatcgctgcaactgcagcttgctcgctgacttgccgccggcgagccccgctccgagcatctccgctgctgcttctgccgaatcccagagctccttctcccgcttgccccctttccctcctgtcacattgattcgattttcgtcgcccatggagctacaaattaagtgtaggaaccaattaaaagcttgccaaaactagggcggcggcatcagcattcagcaataccctaggcgggctctcctcgcctccacagctccaggaagccgacccagagcagcacagcgccgcccattctgtctctctcggtctcggcagcgtaggcagcgtcaccctccgcttaaaccaccagcaccagctgctggtgcgccgccccgcccggcaccgccgctcctctacctcttcctggtggattgattattgtgagtttatccctgccccaatccatctgtccatggtccgcgtgggcttgtcttccgcgcccggggtcaatctgacagagcaaatcgataatgtttttgaccaactgatcaacaagatagaacatgcggattttgatacgcggcctttcttgaaacaattgaatgtgttaggccgctatgaaccaatcaagcggagtatccttgccaactagacttttgaatcttcactgtaatataggagtattgtttttctcaagataatttatttgcacatttgcctcgtttaattcttactgttcatcatcaaaatatcatattctgacacgtccttgttcaacatattcaaactttctattctatgcctcttttatcagtcaagttagtatttcatccaacatatcctgtaacttgactacattacatagtcctagcctgaagtagaaatcagtgcaggaacgaaactagcaattcaatactgtgactacaacagggatatgtcttaatgttatatcatttttctttttcttattgagagtcgagtcaaattgtttttctagcttctgagttctgagtgaaaaaagagaatcgaaatattactataccttggtgaatttgaatatgtgcctttttatggatatgtccacatttttattgcctttaattctactaagatgtatattgcactaagagacgcattgaagattatggcatttcttgtcactgtaagccttctcctggttcatcagttgtgtgtggcagagactgccattgtggcatgcttttctcttgctgttcatcacaatgtgaatgtgatgacacatgcaccaataaatcattccagcacagacctcttaagaaaaccaaattgattaagacagagaaatgtggtcatggattggttgctgaggatgaaataaagaaaggagaatttgttattgagtatgttggagaagttattgatgacagaacatgtgagaataggctatggacaatgaaaaggctgcttgacactgacttctacctttgtgaggtcagtagtaatatggtcattgatgcaacaaacaagggaaaccggtcccgattcataaaccatagctgtgaaccaaacacagcgatgcagaaatggactgttgatggagagaccagggttggaatttttgcacttcgtgacataaagataggggaggagctgacctatgactataaaaaaatgctaggcacgacgaagtattcaggaagctcacagaatcatcatgccaagaagaaaaagcggaaaacaagttgtgagaattgcatacagcagtttcttcggctgtggcatccacataaaaaaatgtatgttggttgttggataattgacttcgatcaagaaactaaaatgcatactctgaagttcaatgatctccatactgaaaagttcaatttgaaggaagaagaatggcacttcttagaggtcgattttgatgaagattgatcattgaaggtaactgcaagagttggctgccatggtttgtgacagggttgccatggtttgctgcaccgccggcctactagttgggggttcatttgcgatggcagcatagacagacggacggccatttttcttccattttggagtaatagtccaagcctgaactgtgacattcgtgcatgcttatacgtgaaagtgtacctgagagcagattatacgtgaaagtgtatcagcgttgcatatgcatggacggttgggtcccccagcgttttttttggtgctgcggcgatgcttgctgcctcgacaaacaagcatgtttcaagcgcctgcagctcatgtggtggcctacaaccgcaaccccccttccgttaccatcttccttctactacagtacagtactgtttccaacaacacatcaccaaccaatactacactacacaactacggcacagaaaataaaagcggaggaagctagctttagcagctttgcgtcgctctaaaattcacaaagctaaagatctaacgatcgacgggtccctgtgtctgtg

SEQ ID NO: 26445 - DNA, 2550 bp, Zea Mays
gtcagtgatggctagacttctcactccctcccagcttcttcggacgcttcgcttgtctaatcgctgcaactgcagcttgctcgctgacttgccgccggcgagccccgctccgagcatctccgctgctgcttctgccgaatcccagagctccttctcccgcttgccccctttccctcctgtcacattgattcgattttcgtcgcccatggagctacaaattaagtgtaggaaccaattaaaagcttgccaaaactagggcggcggcatcagcattcagcaataccctaggcgggctctcctcgcctccacagctccaggaagccgacccagagcagcacagcgccgcccattctgtctctctcggtctcggcagcgtaggcagcgtcaccctccgcttaaaccaccagcaccagctgctggtgcgccgccccgcccggcaccgccgctcctctacctcttcctggtggattgattattgtgagtttatccctgccccaatccatctgtccatggtccgcgtgggcttgtcttccgcgcccggggtcaatctgacagagcaaatcgataatgtttttgaccaactgatcaacaagatagaacatgcggattttgatacgcggcctttcttgaaacaattgaatgtgttaggccgctatgaaccaatcaagcggagtatccttgccaactagacttttgaatcttcactgtaatataggagtattgtttttctcaagataatttatttgcacatttgcctcgtttaattcttactgttcatcatcaaaatatcatattctgacacgtccttgttcaacatattcaaactttctattctatgcctcttttatcagtcaagttagtatttcatccaacatatcctgtaacttgactacattacatagtcctagcctgaagtagaaatcagtgcaggaacgaaactagcaattcaatactgtgactacaacagggatatgtcttaatgttatatcatttttctttttcttattgagagtcgagtcaaattgtttttctagcttctgagttctgagtgaaaaaagagaatcgaaatattactataccttggtgaatttgaatatgtgcctttttatggatatgtccacatttttattgcctttaattctactaagatgtatattgcactaagagacgcattgaagattatggcatttcttgtcactgtaagccttctcctggttcatcagttgtgtgtggcagagactgccattgtggcatgcttttctcttgctgttcatcacaatgtgaatgtgatgacacatgcaccaataaatcattccagcacagacctcttaagaaaaccaaattgattaagacagagaaatgtggtcatggattggttgctgaggatgaaataaagaaaggagaatttgttattgagtatgttggagaagttattgatgacagaacatgtgagaataggctatggacaatgaaaaggctgcttgacactgacttctacctttgtgaggtcagtagtaatatggtcattgatgcaacaaacaagggaaaccggtcccgattcataaaccatagctgtgaaccaaacacagcgatgcagaaatggactgttgatggagagaccagggttggaatttttgcacttcgtgacataaagataggggaggagctgacctatgactataaatttgtccagtttggagcagctcaagtttgtcattgtgggtcttcgaactgcagaaaaatgctaggcacgacgaagtattcaggaagctcacagaatcatcatgccaagaagaaaaagcggaaaacaagttgtgagaattgcatacagcagtttcttcggctgtggcatccacataaaaaaatgtatgttggttgttggataattgacttcgatcaagaaactaaaatgcatactctgaagttcaatgatctccatactgaaaagttcaatttgaaggaagaagaatggcacttcttagaggtcgattttgatgaagattgatcattgaaggtaactgcaagagttggctgccatggtttgtgacagggttgccatggtttgctgcaccgccggcctactagttgggggttcatttgcgatggcagcatagacagacggacggccatttttcttccattttggagtaatagtccaagcctgaactgtgacattcgtgcatgcttatacgtgaaagtgtacctgagagcagattatacgtgaaagtgtatcagcgttgcatatgcatggacggttgggtcccccagcgttttttttggtgctgcggcgatgcttgctgcctcgacaaacaagcatgtttcaagcgcctgcagctcatgtggtggcctacaaccgcaaccccccttccgttaccatcttccttctactacagtacagtactgtttccaacaacacatcaccaaccaatactacactacacaactacggcacagaaaataaaagcggaggaagctagctttagcagctttgcgtcgctctaaaattcacaaagctaaagatctaacgatcgacgggtccctgtgtctgtg

SEQ ID NO: 26446 - DNA, 2686 bp, Zea Mays
gtcagtgatggctagacttctcactccctcccagcttcttcggacgcttcgcttgtctaatcgctgcaactgcagcttgctcgctgacttgccgccggcgagccccgctccgagcatctccgctgctgcttctgccgaatcccagagctccttctcccgcttgccccctttccctcctgtcacattgattcgattttcgtcgcccatggagctacaaattaagtgtaggaaccaattaaaagcttgccaaaactagggcggcggcatcagcattcagcaataccctaggcgggctctcctcgcctccacagctccaggaagccgacccagagcagcacagcgccgcccattctgtctctctcggtctcggcagcgtaggcagcgtcaccctccgcttaaaccaccagcaccagctgctggtgcgccgccccgcccggcaccgccgctcctctacctcttcctggtggattggtgagaggaagccctaacttggcctctcttgaatcaactcggcggtggctttgagtcagtaggtgttgttttgcgctcttattcaaaacccaaatctgtccctcctctcagattattgtgagtttatccctgccccaatccatctgtccatggtccgcgtgggcttgtcttccgcgcccggggtcaatctgacagagcctatcttttacttctgtgctgcagcaaatcgataatgtttttgaccaactgatcaacaagatagaacatgcggattttgatacgcggcctttcttgaaacaattgaatgtgttaggccgctatgaaccaatcaagcggagtatccttgccaactagacttttgaatcttcactgtaatataggagtattgtttttctcaagataatttatttgcacatttgcctcgtttaattcttactgttcatcatcaaaatatcatattctgacacgtccttgttcaacatattcaaactttctattctatgcctcttttatcagtcaagttagtatttcatccaacatatcctgtaacttgactacattacatagtcctagcctgaagtagaaatcagtgcaggaacgaaactagcaattcaatactgtgactacaacagggatatgtcttaatgttatatcatttttctttttcttattgagagtcgagtcaaattgtttttctagcttctgagttctgagtgaaaaaagagaatcgaaatattactataccttggtgaatttgaatatgtgcctttttatggatatgtccacatttttattgcctttaattctactaagatgtatattgcactaagagacgcattgaagattatggcatttcttgtcactgtaagccttctcctggttcatcagttgtgtgtggcagagactgccattgtggcatgcttttctcttgctgttcatcacaatgtgaatgtgatgacacatgcaccaataaatcattccagcacagacctcttaagaaaaccaaattgattaagacagagaaatgtggtcatggattggttgctgaggatgaaataaagaaaggagaatttgttattgagtatgttggagaagttattgatgacagaacatgtgagaataggctatggacaatgaaaaggctgcttgacactgacttctacctttgtgaggtcagtagtaatatggtcattgatgcaacaaacaagggaaaccggtcccgattcataaaccatagctgtgaaccaaacacagcgatgcagaaatggactgttgatggagagaccagggttggaatttttgcacttcgtgacataaagataggggaggagctgacctatgactataaatttgtccagtttggagcagctcaagtttgtcattgtgggtcttcgaactgcagaaaaatgctaggcacgacgaagtattcaggaagctcacagaatcatcatgccaagaagaaaaagcggaaaacaagttgtgagaattgcatacagcagtttcttcggctgtggcatccacataaaaaaatgtatgttggttgttggataattgacttcgatcaagaaactaaaatgcatactctgaagttcaatgatctccatactgaaaagttcaatttgaaggaagaagaatggcacttcttagaggtcgattttgatgaagattgatcattgaaggtaactgcaagagttggctgccatggtttgtgacagggttgccatggtttgctgcaccgccggcctactagttgggggttcatttgcgatggcagcatagacagacggacggccatttttcttccattttggagtaatagtccaagcctgaactgtgacattcgtgcatgcttatacgtgaaagtgtacctgagagcagattatacgtgaaagtgtatcagcgttgcatatgcatggacggttgggtcccccagcgttttttttggtgctgcggcgatgcttgctgcctcgacaaacaagcatgtttcaagcgcctgcagctcatgtggtggcctacaaccgcaaccccccttccgttaccatcttccttctactacagtacagtactgtttccaacaacacatcaccaaccaatactacactacacaactacggcacagaaaataaaagcggaggaagctagctttagcagctttgcgtcgctctaaaattcacaaagctaaagatctaacgatcgacgggtccctgtgtctgtg

SEQ ID NO: 26447 - DNA, 2468 bp, Zea Mays
gtcagtgatggctagacttctcactccctcccagcttcttcggacgcttcgcttgtctaatcgctgcaactgcagcttgctcgctgacttgccgccggcgagccccgctccgagcatctccgctgctgcttctgccgaatcccagagctccttctcccgcttgccccctttccctcctgtcacattgattcgattttcgtcgcccatggagctacaaattaagtgtaggaaccaattaaaagcttgccaaaactagggcggcggcatcagcattcagcaataccctaggcgggctctcctcgcctccacagctccaggaagccgacccagagcagcacagcgccgcccattctgtctctctcggtctcggcagcgtaggcagcgtcaccctccgcttaaaccaccagcaccagctgctggtgcgccgccccgcccggcaccgccgctcctctacctcttcctggtggattgattattgtgagtttatccctgccccaatccatctgtccatggtccgcgtgggcttgtcttccgcgcccggggtcaatctgacagagcaaatcgataatgtttttgaccaactgatcaacaagatagaacatgcggattttgatacgcggcctttcttgaaacaattgaatgtgttaggccgctatgaaccaatcaagcggagtatccttgccaactagacttttgaatcttcactgtaatataggagtattgtttttctcaagataatttatttgcacatttgcctcgtttaattcttactgttcatcatcaaaatatcatattctgacacgtccttgttcaacatattcaaactttctattctatgcctcttttatcagtcaagttagtatttcatccaacatatcctgtaacttgactacattacatagtcctagcctgaagtagaaatcagtgcaggaacgaaactagcaattcaatactgtgactacaacagggatatgtcttaatgttatatcatttttctttttcttattgagagtcgagtcaaattgtttttctagcttctgagttctgagtgaaaaaagagaatcgaaatattactataccttggtgaatttgaatatgtgcctttttatggatatgtccacatttttattgcctttaattctactaagatgtatattgcactaagagacgcattgaagattatggcatttcttgtcactgtaagccttctcctggttcatcagttgtgtgtggcagagactgccattgtggcatgcttttctcttgctgttcatcacaatgtgaatgtgatgacacatgcaccaataaatcattccagcacagacctcttaagaaaaccaaattgattaagacagagaaatgtggtcatggattggttgctgaggatgaaataaagaaaggagaatttgttattgagtatgttggagaagtagtaatatggtcattgatgcaacaaacaagggaaaccggtcccgattcataaaccatagctgtgaaccaaacacagcgatgcagaaatggactgttgatggagagaccagggttggaatttttgcacttcgtgacataaagataggggaggagctgacctatgactataaatttgtccagtttggagcagctcaagtttgtcattgtgggtcttcgaactgcagaaaaatgctaggcacgacgaagtattcaggaagctcacagaatcatcatgccaagaagaaaaagcggaaaacaagttgtgagaattgcatacagcagtttcttcggctgtggcatccacataaaaaaatgtatgttggttgttggataattgacttcgatcaagaaactaaaatgcatactctgaagttcaatgatctccatactgaaaagttcaatttgaaggaagaagaatggcacttcttagaggtcgattttgatgaagattgatcattgaaggtaactgcaagagttggctgccatggtttgtgacagggttgccatggtttgctgcaccgccggcctactagttgggggttcatttgcgatggcagcatagacagacggacggccatttttcttccattttggagtaatagtccaagcctgaactgtgacattcgtgcatgcttatacgtgaaagtgtacctgagagcagattatacgtgaaagtgtatcagcgttgcatatgcatggacggttgggtcccccagcgttttttttggtgctgcggcgatgcttgctgcctcgacaaacaagcatgtttcaagcgcctgcagctcatgtggtggcctacaaccgcaaccccccttccgttaccatcttccttctactacagtacagtactgtttccaacaacacatcaccaaccaatactacactacacaactacggcacagaaaataaaagcggaggaagctagctttagcagctttgcgtcgctctaaaattcacaaagctaaagatctaacgatcgacgggtccctgtgtctgtg

SEQ ID NO: 26448 - DNA, 1915 bp, Zea Mays
cgtcgccgtttcggtctccggaaaggaaagcaaaagagaaggagggggcgagagaagaaactgatttttggcgaggccaagccgggggtgggattaccgggagcacgctgactgggatcacggcggatggcggcggcggataggcagttggtagttgccgtcgaggggaccgcggcgctggggccctactggtccaccattgtggcggagtacgtcgagaagatcgtgaggagcttttgtgcaagtgaactgccaggccagaagcttgtgggtactccgcctgaacttgcattagttgtttttcatacccatggaccttacagtgcttttgatgtgcagcgaagtggatggacaaaagatgtcgatgctttcctatcatggttatctggaatattgttcagtggtggaggattcagtgaagcttctacttgtgaaggtcttgctgaagcattgaagatacttcaaggcaatcctaatacaacccaaggtcatcaaaaccatgaagcacaaaagcattgcatacttgtcgctgcaagtaatccttatcctctgccaacacctgtatactgtcttcctactcaaagtactgatcacaaagagaacattgagacatcaaaagaaccttcaattgctgatgctgagaccgttgcaaagtcatttgctcagtgctctgtctcattgtcagtgatatctccaaaacagcttccaacattaaaggcaatatacaatgcgggcaagcgaaatcttcgggctgctgatccatcagtcgaccatgcgaaaaatccacacttccttgttttgctctctgagaatttcatggaggcacggactgctcttagtcgccctttacatggaaacttggctccaaatcaaaccataacgaagatggacacggcacctgcagtgactatgccaggaccaacatcaaatggcaactcctcagtgaatgcaatggcaggccgtcaaccaattgttggaggtatttctaccacatctgttaaagtggagccaacaaccatgccaccgatagtttctgcacctgctttctcgcatgtaacgcctatttcaaatgtggcttcacaaggaatatcagcactgcaaacctcatcaccttctcttatttcacaagaagcaaatatgggaaatgataatgtacaagaacacaagcctataataaacccagttcaacaaccgattcggcctggtggtcatggcagcctcctcaacaatctgtcacaggttcggttgatgaactcaacttctttaggaggaggagctacctcgatgggactgcctaacatgggagcaacaccaatacaagtccacatgtcaaacatgatatcaagcggcatgacatcaacaccctctgtcatctcctctatgtctggacctggacaacctattagtactcaacagatggtacagagcacagctcttggttcgtttggctcaaacactcctactgttacaggcaattcaactattgctgtatcatcctctttgactaacaaccaaagcagcatgggcatgggtcaatctgtgcaatctgtggcacagggaggcttggtgtctggttcacaattaggacaaggtggaattgttgcaaaccaaaatgtgatgagcacccttggacctacagctatctcttcaacgcctgcgatgatgccgacacctgggatggtcccacagacaggagtcaattccttaggtgtgaataacaattctgctatgaatatgcctattacgcagcagcatgccaatgcccaacagccgccaccaaagtacgtcaaaatttgggagggaactttatctggccaaaggcaaggacagcctgtaataatttgtaaactcgaacattacttagcagaaataatggttcctgagttcctgagatatgatgacacttctatgctct

SEQ ID NO: 26449 - DNA, 375 bp, Zea Mays
tgtcgggacgaggaggcctagcaggggagatgcgatgcgaggagctggtgccatagtgggctactggtcactgccggcgcgttgtgcattgccctggtccccgcctccccggaccggaccccggccgccccctcccgcggtcccgcccggcctccgctccggactctcttgcatatgggactgtgagatgacccgccgcgcgccgcgtaaaaacctctgggcatcgagccacttccgggcgtggcagtggcactagggtcggtgcaggcacatcgggggagggcggctcggccagggctcagccgttgctgctcggtcgggacagagaggagcgaggcgagggaagggaggagaggtgaggggagagagaagagg

SEQ ID NO: 26450 - DNA, 1926 bp, Zea Mays
aaaccgcccattttttcagctataaatggccccctcgtccatgcttcaattccctttccccctctccccgaactcccttgctaggttaccacgttcttctgcccttcaggccctccctcatctgatcatctctctcactctttcagtagcagcgcagttttgttactgacacacgccccctgtcctgcctgtctgtgttgacctgatagtactagcaaagtttggagactccatccaacctcttgtctctgaaacttggacttgttgccgatcccaaggggaggttctgccaaaatttcggcttctgaacatccatttccagaggggatcgagggaggttctgccaaattttgctcctttgatcataagtttcccagggggaggttctgccgaaatttcatctcctgtgctgtgacgaccatcagctttccagggggagattctgccgaagttttgtgggctgaccatcagtcttccaagaggaggttctgccgaaattcccttctctcatcatcacttctccaaggccaagcagtcctcctggtcctgccgaagtgttctctgaacaagagggcatgcatgcactccttcttgtccctgatgttagactagctagctagcactagcagagactgaggccgcagcgtctgttgagaattcagatgttgttgttgctcgtcctgtccgagcacctcctcctgtccggatttatgatcggttccgccataacccgcctcgtccagtccttctctgtcgttttcctctactggttctatgtcttctcagtgagctgccactgccagtagtgccagtagttgatctcacctttttcaagttaataactcggcactataacaaagaggtagctaggtatatacctgccaaacaaacaagagggagtgaaaaaacttcagattacgcctcagtttgtgagctagaggtgaccatgtcaagtggaagctcgtttgggtcgagccagtggactcagagatccaggtcggcggaggatgacctggacctggacctccaggccgagatggagaagaggaggaaacgaaggaaggagtccaaccgagagtcggctcggaggtctaggctaaggaagcagcaacaccacgacgacctcacgtcacagaccagctgaagggccagaacaagcagctcaacttggcgctgagcacgaccagccaaaacctcgtggcagtgcaagcgcagaactctgtcctgcagacccagaggatggagctggccagcaggctgggcgccctgaccgagatcctctggtgcatcagctcaagcaccggcactgctgctcctcctacaaacccagccatggtgaacggcggcgtcacgacgacatggagctggagcgacgcctctggtgatattcttggcgccagcgcatggaaccaccagcagcagcagcccatagacgcgtaccggtgctattattagctagctctacaagctagctagagagaaggcggtggtagggccaggaggaaaggaggcttgttgcttcgccatcgtttgttttggaggcgacggcgacgttttgttggtagagcggaggagcctaaaggacggacaatggcaactttgccttggctttctgtgacgtgaatgcagcgcagttgttctcttgtagttgaggagtatatatataggaaataataatattgggccagatagtgaaagagaggtaggtgatttgaaagctcttcatatatatgtataagggaaattatatgcgtaatgatgatgataaaatgctcattaagatgtcgatttgatggtaacaacttgatatccgttgtgcctctctataaaccctacgtacgggtgcactctcgattctgttttccatcttgtatgtttgatcgctgatgataatgttcacttattagatttggattttgattgctc

SEQ ID NO: 26451 - DNA, 2259 bp, Zea Mays
atttttttctgagcctgagatcttagttaatgatatttatgatctcatgtggtccttatttcttaaggaaatgacaggcttggatatatgtgtggaactgctgattatctgtctatttccagatgtgtcagttgattgcaatcttgcttttggtccctgagtttgtgtaaacttgaaaaattgtctctgttgtctgcttggtcatcttgaacccttattcttggacagtagaccagaatgatcacaccattttaatttcataattgtaatttattagattacctgcattctgttacactcgtctgctattttgttcactcctcaaatgataaatgagattgccacttttcaccaacatcctataggttgaactcgcacaattattagaaactgtcaaatgtcatggttactcggatttttctgtttctgaacatattaccttttcctagtatggaaaatacaatttgatactgtcaacctgctccagtcagtgtagtttttactaatattcaactagccttgtttacccgactgatgtttgaagttgatactgtcttctagtggtaggcttatgtacttgtcaatcaagattgatcctctttctgctgttgaatttggctctgtatatcatgaaatgttcatgtcagttttcttagcatggttgatagtttgtttgtatgactccagtgttttcctgtatccctgcacatatttgaagtttctttaaatcatgaagaaaggctatcagcatgttttttcccaccaaagcttataccttttattttaatttagaactgttctcatggaaataccttggtccaggtctatgcattaatgatatcattaaatacattgtgtttctgtaattattctaccgccataactcataggagatgctaaattgtcactgttaatgtccatgctacatactaacagaacctgaggactatctttacatgctatatactaatggaacctgaaaactatgtttgcaccctgtacgaaaggagacaatggcagaccagttagggtcttacactattagatcccatggaatgatattggcaaggttgcacatacatgatgactgacttgagatatcctatgaagggcaatacagtgccattttgggctgttccactgattggaattatactgccttgggccatctttgttgggatttacttcaaaaagaagaatttttatgatttgcaccatggcatactggggattctatactcagtgctgataactgcagtgattactgatgcaattaaggatggtgttggacggcctcgtccagattttttctggcgctgtttccctaatggaaatgatgtttatgataacattactactggtgttatatgcaatggagtgaagagcgtaatcaaggaaggccacaagagctttcccagtggacacagttcatggtcttttgctggtctaggcttccttgcatggtacttagctgggaaactcacagcctttgaccgcaaagggcatattgcgaagctatgcattgtgttcctgcctctccttactgccgcacttgtggctgtttctcgagtggacgactactggcatcattggcaagatgtatttgcagggggtcttataggtcttacagttgcttcgttttgctacctacagtttttcccatatcctttcgatggcgatgctttgtggcctcacgcatacgcggtccggttagccgaggaggggaacagcagaaatgcgaactcatacagcgtgagaccaaccgaaatcgaaacagtcgatattcctgggcacggtgggatcatcaccctaagagatactctaaacgatgtggagtctggcagtgccaggagattgtgagatgggtctgcaggtgtggagattgatgtctcagataccatgggagttgcttgcatatgtgtacaggtagatctattgtagagctgttgactgctgccaccgtgataggggagggttgtttagacgggcctggcagtaaatttacttggtagggtgctgtttcttctgagaacctttggcttttgtttgtatatatgctcttatcaaagtgttgagttcagagttgtggttaaagtttgtttgctgacactctttgtaaccagtttggtcgctgcattcagcaactatgatctgatcagatgttgcccagtctactgttgttcttatattaagcgtgaaattcatttgtcaccatgatttactcttttattaagcacgaaattcatttgccaccataat

SEQ ID NO: 26452 - DNA, 1331 bp, Zea Mays
ccagagatttgtctgttagttcttttgaagttccagaaacttctgttcacccacctgcgctgtctttccaaattaggaggagacaatggcagaccagttagggtcttacactattagatcccatggaatgatattggcaaggttgcacatacatgatgactgacttgagatatcctatgaagggcaatacagtgccattttgggctgttccactgattggaattatactgccttgggccatctttgttgggatttacttcaaaaagaagaatttttatgatttgcaccatggcatactggggattctatactcagtgctgataactgcagtgattactgatgcaattaaggatggtgttggacggcctcgtccagattttttctggcgctgtttccctaatggaaatgatgtttatgataacattactactggtgttatatgcaatggagtgaagagcgtaatcaaggaaggccacaagagctttcccagtggacacagttcatggtcttttgctggtctaggcttccttgcatggtacttagctgggaaactcacagcctttgaccgcaaagggcatattgcgaagctatgcattgtgttcctgcctctccttactgccgcacttgtggctgtttctcgagtggacgactactggcatcattggcaagatgtatttgcagggggtcttataggtcttacagttgcttcgttttgctacctacagtttttcccatatcctttcgatggcgatgctttgtggcctcacgcatacgcggtccggttagccgaggaggggaacagcagaaatgcgaactcatacagcgtgagaccaaccgaaatcgaaacagtcgatattcctgggcacggtgggatcatcaccctaagagatactctaaacgatgtggagtctggcagtgccaggagattgtgagatgggtctgcaggtgtggagattgatgtctcagataccatgggagttgcttgcatatgtgtacaggtagatctattgtagagctgttgactgctgccaccgtgataggggagggttgtttagacgggcctggcagtaaatttacttggtagggtgctgtttcttctgagaacctttggcttttgtttgtatatatgctcttatcaaagtgttgagttcagagttgtggttaaagtttgtttgctgacactctttgtaaccagtttggtcgctgcattcagcaactatgatctgatcagatgttgcccagtctactgttgttcttatattaagcgtgaaattcatttgtcaccatgatttactcttttattaagcacgaaattcatttgccaccataat

SEQ ID NO: 26453 - DNA, 1549 bp, Zea Mays
tgattttcaagtggatggcatgggtcctttggctctagatatttttctaagttttgtctgggggtaacataaataatacagacacgattagataattcagtccacctggactgtggtttgagacttcgatgtcactagccactcctaggtcactatccacctgtactgtaattgccgggaaacaacaagactaccgggcaactactactagtcgaggccaataaatttgagtggaactcttgacccactcgatcaaattcgagggaaaccctccccccaacagaaaggagattcgaggagacaatggcagaccagttagggtcttacactattagatcccatggaatgatattggcaaggttgcacatacatgatgactgacttgagatatcctatgaagggcaatacagtgccattttgggctgttccactgattggaattatactgccttgggccatctttgttgggatttacttcaaaaagaagaatttttatgatttgcaccatggcatactggggattctatactcagtgctgataactgcagtgattactgatgcaattaaggatggtgttggacggcctcgtccagattttttctggcgctgtttccctaatggaaatgatgtttatgataacattactactggtgttatatgcaatggagtgaagagcgtaatcaaggaaggccacaagagctttcccagtggacacagttcatggtcttttgctggtctaggcttccttgcatggtacttagctgggaaactcacagcctttgaccgcaaagggcatattgcgaagctatgcattgtgttcctgcctctccttactgccgcacttgtggctgtttctcgagtggacgactactggcatcattggcaagatgtatttgcagggggtcttataggtcttacagttgcttcgttttgctacctacagtttttcccatatcctttcgatggcgatgctttgtggcctcacgcatacgcggtccggttagccgaggaggggaacagcagaaatgcgaactcatacagcgtgagaccaaccgaaatcgaaacagtcgatattcctgggcacggtgggatcatcaccctaagagatactctaaacgatgtggagtctggcagtgccaggagattgtgagatgggtctgcaggtgtggagattgatgtctcagataccatgggagttgcttgcatatgtgtacaggtagatctattgtagagctgttgactgctgccaccgtgataggggagggttgtttagacgggcctggcagtaaatttacttggtagggtgctgtttcttctgagaacctttggcttttgtttgtatatatgctcttatcaaagtgttgagttcagagttgtggttaaagtttgtttgctgacactctttgtaaccagtttggtcgctgcattcagcaactatgatctgatcagatgttgcccagtctactgttgttcttatattaagcgtgaaattcatttgtcaccatgatttactcttttattaagcacgaaattcatttgccaccataat

SEQ ID NO: 26454 - DNA, 1354 bp, Zea Mays
atttgaacccatgtcggagtaggcgtaaattgagagacgaggatcgaggaggcaccgatccgtagcggcgatatcgtagagccgctggtctcacgccgcaccgagacaatggcagaccagttagggtcttacactattagatcccatggaatgatattggcaaggttgcacatacatgatgactgacttgagatatcctatgaagggcaatacagtgccattttgggctgttccactgattggaattatactgccttgggccatctttgttgggatttacttcaaaaagaagaatttttatgatttgcaccatggcatactggggattctatactcagtgctgataactgcagtgattactgatgcaattaaggatggtgttggacggcctcgtccagattttttctggcgctgtttccctaatggaaatgatgtttatgataacattactactggtgttatatgcaatggagtgaagagcgtaatcaaggaaggccacaagagctttcccagtggacacagttcatggtcttttgctggtctaggcttccttgcatggtacttagctgggaaactcacagcctttgaccgcaaagggcatattgcgaagctatgcattgtgttcctgcctctccttactgccgcacttgtggctgtttctcgagtggacgactactggcatcattggcaagatgtatttgcagggggtcttataggtcttacagttgcttcgttttgctacctacagtttttcccatatcctttcgatggcgatgctttgtggcctcacgcatacgcggtccggttagccgaggaggggaacagcagaaatgcgaactcatacagcgtgagaccaaccgaaatcgaaacagtcgatattcctgggcacggtgggatcatcaccctaagagatactctaaacgatgtggagtctggcagtgccaggagattgtgagatgggtctgcaggtgtggagattgatgtctcagataccatgggagttgcttgcatatgtgtacaggtagatctattgtagagctgttgactgctgccaccgtgataggggagggttgtttagacgggcctggcagtaaatttacttggtagggtgctgtttcttctgagaacctttggcttttgtttgtatatatgctcttatcaaagtgttgagttcagagttgtggttaaagtttgtttgctgacactctttgtaaccagtttggtcgctgcattcagcaactatgatctgatcagatgttgcccagtctactgttgttcttatattaagcgtgaaattcatttgtcaccatgatttactcttttattaagcacgaaattcatttgccaccataat

SEQ ID NO: 26455 - DNA, 1846 bp, Zea Mays
tttttttttgtttaaagaaaagaatttgaaacagagatcaaggagtggggaggttgcaatgcaagggggctctgacacccgtggcgcgtggttacctaccgctaccggcaagcgtgattatcattgacagactggggcgacgcctcctgagtcctgacgcctgttcaaataaaatcgaattcaaatgttcactaccacccatcccgaaagagccccagcccgcagggagtcaagtagtcaaccgttctgcccgctccccctcacacaaaaggcaaaccacccgccaccgtcggcagacggcaactactttcatttcgtcgtcgtcgcccgcccccacccgctcctccactccaccaccaccggacagatacggatgtctccgcccgcacatccacttcacaaacgaaaacccgcagcaaacgctagcagcggcggcgccggcagttggtagccgcgaccgagacacggcgggtgacctgccccgccgcagtcggggtgtatgtattaccaccgccagaattccaggagacgaggatcgaggaggcaccgatccgtagcggcgatatcgtagagccgctggtctcacgccgcaccgagacaatggcagaccagttagggtcttacactattagatcccatggaatgatattggcaaggttgcacatacatgatgactgacttgagatatcctatgaagggcaatacagtgccattttgggctgttccactgattggaattatactgccttgggccatctttgttgggatttacttcaaaaagaagaatttttatgatttgcaccatggcatactggggattctatactcagtgctgataactgcagtgattactgatgcaattaaggatggtgttggacggcctcgtccagattttttctggcgctgtttccctaatggaaatgatgtttatgataacattactactggtgttatatgcaatggagtgaagagcgtaatcaaggaaggccacaagagctttcccagtggacacagttcatggtcttttgctggtctaggcttccttgcatggtacttagctgggaaactcacagcctttgaccgcaaagggcatattgcgaagctatgcattgtgttcctgcctctccttactgccgcacttgtggctgtttctcgagtggacgactactggcatcattggcaagatgtatttgcagggggtcttataggtcttacagttgcttcgttttgctacctacagtttttcccatatcctttcgatggcgatgctttgtggcctcacgcatacgcggtccggttagccgaggaggggaacagcagaaatgcgaactcatacagcgtgagaccaaccgaaatcgaaacagtcgatattcctgggcacggtgggatcatcaccctaagagatactctaaacgatgtggagtctggcagtgccaggagattgtgagatgggtctgcaggtgtggagattgatgtctcagataccatgggagttgcttgcatatgtgtacaggtagatctattgtagagctgttgactgctgccaccgtgataggggagggttgtttagacgggcctggcagtaaatttacttggtagggtgctgtttcttctgagaacctttggcttttgtttgtatatatgctcttatcaaagtgttgagttcagagttgtggttaaagtttgtttgctgacactctttgtaaccagtttggtcgctgcattcagcaactatgatctgatcagatgttgcccagtctactgttgttcttatattaagcgtgaaattcatttgtcaccatgatttactcttttattaagcacgaaattcatttgccaccataat

SEQ ID NO: 26456 - DNA, 817 bp, Zea Mays
ccggaggttaaatttcacttcatcttgtaaactctgcatgaaattgttccactgaggaaggtgtgccgccgaccggaaactgactacaggcttcagattctgcatgctgctagagcggcagccactaatgcagatgttcacactccacccaaagaggttaaggtggagttggcgtccactgataagagcccagccgagcagaaaccccataagcagcacaagatgatggacgtgaacactgatgaggtgaccatggtctccaccttggagcaagatgagacaccaggcaagactgtagcccccgtaccgtcagcaactgcagaaacccgcaattcaagttcggacacagtgatgaaaggtgctgaggcttcctcggtcgttgaagatgacgatgaagtgcaggcagttgacaagatgaaagaggggtagggttttttttttctgtcaccttttgttatctaggtcagtgcctgtcttaattaccatgtagcatcttaatggcctcagaagcttgtttgaaggcctatgtgagcctttgccttgcctacacctttttgtttggtcgatgatatggtgaaatggaacctggctgggatggttctgtttctccgagggacttttgttatctgtggtcttccttctccagcgtgggcagaggggcgccagagactgcgggtttcgcttcaggatctcagggtaaaatgtgtagctgttcgattgattgtttgcttcactccattgagcgttgttcgtcaataataatttattggagtagtccttgctagtttgttcaatgttgtcagcatgatttgtcttt

SEQ ID NO: 26457 - DNA, 1185 bp, Zea Mays
ctcgatgtcgttgggcacccgtttgagggaagaatcctgtggaaagtgtctcagttgagtttgaggccaagtcagctcgtgatggtgcatggtatgatgttgctgcctttctttcacataggttgtttgaatccggtgacccggaggtgcgggttcgtttttctggatttggggcagaggaggatgaatggatcaatgttcgcaaatgtgtgcgacaacgttctcttccatgcgaggccacagaatgtgttgctgtgcttcctggggacctgattctttgttttcaggaaggtaaagatcaggctctctattatgatgctcatgtccttgatgctcaaaggagaaggcatgacgttagaggttgccgttgtagatttcttgttcgctacgaccatgattcttctgaggaaattgttccactgaggaaggtgtgccgccgaccggaaactgactacaggcttcagattctgcatgctgctagagcggcagccactaatgcagatgttcacactccacccaaagaggttaaggtggagttggcgtccactgataagagcccagccgagcagaaaccccataagcagcacaagatgatggacgtgaacactgatgaggtgaccatggtctccaccttggagcaagatgagacaccaggcaagactgtagcccccgtaccgtcagcaactgcagaaacccgcaattcaagttcggacacagtgatgaaaggtgctgaggcttcctcggtcgttgaagatgacgatgaagtgcaggcagttgacaagatgaaagaggggtagggttttttttttctgtcaccttttgttatctaggtcagtgcctgtcttaattaccatgtagcatcttaatggcctcagaagcttgtttgaaggcctatgtgagcctttgccttgcctacacctttttgtttggtcgatgatatggtgaaatggaacctggctgggatggttctgtttctccgagggacttttgttatctgtggtcttccttctccagcgtgggcagaggggcgccagagactgcgggtttcgcttcaggatctcagggtaaaatgtgtagctgttcgattgattgtttgcttcactccattgagcgttgttcgtcaataataatttattggagtagtccttgctagtttgttcaatgttgtcagcatgatttgtcttt

SEQ ID NO: 26458 - DNA, 1681 bp, Zea Mays
gctgtggcgcagcccagtaggccatcgttcactgttcgcacacacgggacacggcacgccgcaggccgcagcgcgcgcgagagggagccggagccggctgcctgcttgaacgcctggtaacacggcctctcgcttcccctcccaaactttccctaccccgaccgccgatcctcctcgccttgacgtccaagagccccggtccgatgggtcgtccgccgagcgccggtgctccggcgttccgcttcctcccgtccgaggtggcggagatggaggcgcgcctgctgcagctcaacaacggcatccccacccgcgccgtgctgcagaccctcgcggataagttctccgcttcgcccgagcgcgctggcaaggtggccatccagcccaagcagggccgcgtcgtcaccgccggctaagatgacgccctcgggagctgatcaccaccagcatgccgctaacgcctccgccttcagggctgctcagctctcttctgttgctgctgcgcaccacggttcctcctctacagggaagaatcctgtggaaagtgtctcagttgagtttgaggccaagtcagctcgtgatggtgcatggtatgatgttgctgcctttctttcacataggttgtttgaatccggtgacccggaggtgcgggttcgtttttctggatttggggcagaggaggatgaatggatcaatgttcgcaaatgtgtgcgacaacgttctcttccatgcgaggccacagaatgtgttgctgtgcttcctggggacctgattctttgttttcaggaaggtaaagatcaggctctctattatgatgctcatgtccttgatgctcaaaggagaaggcatgacgttagaggttgccgttgtagatttcttgttcgctacgaccatgattcttctgaggaaattgttccactgaggaaggtgtgccgccgaccggaaactgactacaggcttcagattctgcatgctgctagagcggcagccactaatgcagatgttcacactccacccaaagaggttaaggtggagttggcgtccactgataagagcccagccgagcagaaaccccataagcagcacaagatgatggacgtgaacactgatgaggtgaccatggtctccaccttggagcaagatgagacaccaggcaagactgtagcccccgtaccgtcagcaactgcagaaacccgcaattcaagttcggacacagtgatgaaaggtgctgaggcttcctcggtcgttgaagatgacgatgaagtgcaggcagttgacaagatgaaagaggggtagggttttttttttctgtcaccttttgttatctaggtcagtgcctgtcttaattaccatgtagcatcttaatggcctcagaagcttgtttgaaggcctatgtgagcctttgccttgcctacacctttttgtttggtcgatgatatggtgaaatggaacctggctgggatggttctgtttctccgagggacttttgttatctgtggtcttccttctccagcgtgggcagaggggcgccagagactgcgggtttcgcttcaggatctcagggtaaaatgtgtagctgttcgattgattgtttgcttcactccattgagcgttgttcgtcaataataatttattggagtagtccttgctagtttgttcaatgttgtcagcatgatttgtcttt

SEQ ID NO: 26459 - DNA, 1520 bp, Zea Mays
gctgtggcgcagcccagtaggccatcgttcactgttcgcacacacgggacacggcacgccgcaggccgcagcgcgcgcgagagggagccggagccggctgcctgcttgaacgcctggtaacacggcctctcgcttcccctcccaaactttccctaccccgaccgccgatcctcctcgccttgacgtccaagagccccggtccgatgggtcgtccgccgagcgccggtgctccggcgttccgcttcctcccgtccgaggtggcggagatggaggcgcgcctgctgcagctcaacaacggcatccccacccgcgccgtgctgcagaccctcgcggataagttctccgcttcgcccgagcgcgctggcaaggtggccatccagcccaagcagaacagacggtactcacaccgggccaaaactcccagggccgcgtcgtcaccgccggctaagatgacgccctcgggagctgatcaccaccagcatgccgctaacgcctccgccttcagggctgctcagctctcttctgttgctgctgcgcaccacggttcctcctctacagggaagaatcctgtggaaagtgtctcagttgagtttgaggccaagtcagctcgtgatggtgcatggaaggtaaagatcaggctctctattatgatgctcatgtccttgatgctcaaaggagaaggcatgacgttagaggttgccgttgtagatttcttgttcgctacgaccatgattcttctgaggaaattgttccactgaggaaggtgtgccgccgaccggaaactgactacaggcttcagattctgcatgctgctagagcggcagccactaatgcagatgttcacactccacccaaagaggttaaggtggagttggcgtccactgataagagcccagccgagcagaaaccccataagcagcacaagatgatggacgtgaacactgatgaggtgaccatggtctccaccttggagcaagatgagacaccaggcaagactgtagcccccgtaccgtcagcaactgcagaaacccgcaattcaagttcggacacagtgatgaaaggtgctgaggcttcctcggtcgttgaagatgacgatgaagtgcaggcagttgacaagatgaaagaggggtagggttttttttttctgtcaccttttgttatctaggtcagtgcctgtcttaattaccatgtagcatcttaatggcctcagaagcttgtttgaaggcctatgtgagcctttgccttgcctacacctttttgtttggtcgatgatatggtgaaatggaacctggctgggatggttctgtttctccgagggacttttgttatctgtggtcttccttctccagcgtgggcagaggggcgccagagactgcgggtttcgcttcaggatctcagggtaaaatgtgtagctgttcgattgattgtttgcttcactccattgagcgttgttcgtcaataataatttattggagtagtccttgctagtttgttcaatgttgtcagcatgatttgtcttt

SEQ ID NO: 26460 - DNA, 1611 bp, Zea Mays
aaatcccaccgaggctctggcgctgtggcgcagcccagtaggccatcgttcactgttcgcacacacgggacacggcacgccgcaggccgcagcgcgcgcgagagggagccggagccggctgcctgcttgaacgcctggtaacacggcctctcgcttcccctcccaaactttccctaccccgaccgccgatcctcctcgccttgacgtccaagagccccggtccgatgggtcgtccgccgagcgccggtgctccggcgttccgcttcctcccgtccgaggtggcggagatggaggcgcgcctgctgcagctcaacaacggcatccccacccgcgccgtgctgcagaccctcgcggataagttctccgcttcgcccgagcgcgctggcaaggtggccatccagcccaagcaggtgtggaactggtttcagaacagacggtactcacaccgggccaaaactcccagggccgcgtcgtcaccgccggctaagatgacgccctcgggagctgatcaccaccagcatgccgctaacgcctccgccttcagggctgctcagctctcttctgttgctgctgcgcaccacggttcctcctctacagggaagaatcctgtggaaagtgtctcagttgagtttgaggccaagtcagctcgtgatggtgcatggtatgatgttgctgcctttctttcacataggttgtttgaatccggtgacccggaaggtaaagatcaggctctctattatgatgctcatgtccttgatgctcaaaggagaaggcatgacgttagaggttgccgttgtagatttcttgttcgctacgaccatgattcttctgaggaaattgttccactgaggaaggtgtgccgccgaccggaaactgactacaggcttcagattctgcatgctgctagagcggcagccactaatgcagatgttcacactccacccaaagaggttaaggtggagttggcgtccactgataagagcccagccgagcagaaaccccataagcagcacaagatgatggacgtgaacactgatgaggtgaccatggtctccaccttggagcaagatgagacaccaggcaagactgtagcccccgtaccgtcagcaactgcagaaacccgcaattcaagttcggacacagtgatgaaaggtgctgaggcttcctcggtcgttgaagatgacgatgaagtgcaggcagttgacaagatgaaagaggggtagggttttttttttctgtcaccttttgttatctaggtcagtgcctgtcttaattaccatgtagcatcttaatggcctcagaagcttgtttgaaggcctatgtgagcctttgccttgcctacacctttttgtttggtcgatgatatggtgaaatggaacctggctgggatggttctgtttctccgagggacttttgttatctgtggtcttccttctccagcgtgggcagaggggcgccagagactgcgggtttcgcttcaggatctcagggtaaaatgtgtagctgttcgattgattgtttgcttcactccattgagcgttgttcgtcaataataatttattggagtagtccttgctagtttgttcaatgttgtcagcatgatttgtcttt

SEQ ID NO: 26461 - DNA, 387 bp, Zea Mays
cgaacaggtccttacggagaggtactcaggaaacagcctgagccccctagagtatcacaagatcaacaatataatcgtaatgacaacatcgtatcataagtgttcacatcatgttcattgattaaagtaaagcaccagcatagagctaaccatgataatccgaaaggtaaacaaggataagataaatagaaaactagtcaatccttaggttgttcatagtatgcgggacagtgtattataaagtaaatgggacataatgggaccgaggacacttgccttcaccaaacagatgctcagggttttcgatctcgtagaaatcgaagaattcgatcacttggtggccgaagcttgactgtcgattcctcgaagctcgaaaatggatcgcag

SEQ ID NO: 26462 - DNA, 1654 bp, Zea Mays
aaaaaagtacaatatgctaatatgatattcaaaggttcttcagcccacttgggatggttcccgtggttgcactggtggggcttggacttttcgagagaggattcccagtggttgggaaatgcgtggagattggtcttccaatgcttatcctatttgtcgcgctttcccagtatctcaagcacgtgcatattcgtcatgttcctgttttcgagaggttctcattgctgatgtgcatcactcttgtatgggtatatgcccacatcctcacagcaagtggtgcatacaagcacacagcacttgtcacccagatcaactgtcggacagaccgtgccaatctcatatcttcatcacaatggataagcattccataccctttacaatggggtgcaccaacattcagtgcagaccatgcatttggtatgatggcagcggtgatggtttctttaatagagaccacgggagcattcaaagctgctgcacgattggctagtgcgacacccccaccagcatatgtcctgagcagaggcattgggtggcagggcattggcaccctactagatggcctgtttggcactgggactggttctactgtttctgttgagaacgttggtctcctaggatcaacgagggttggtagcagaagagtgatacaaatttctgctggtttcatgatcttcttctccattcttggaaaatttggagcactttttgcctccattcctttcacaatattcgctgccatttactgcgttatgtttggaattgtcgctgctgtggggctctcctttatgcagttcaccaacatgaactcgatgcgcaatctcttcatcatcggtgtctcactcttcctgggtttatctataccagagtacttctctaggtattccacaagttctcaacaaggcccagcgcacacaaaagctggatgggttcgtatttttctctatgtacttcaaaattcaaattccaacttaaacttagctcccagcgaaaagaagaaaacatctagcatgatatagtaactcgaagctgatgcattgtatactgttaaagctgagtttgaagtgttgtgcattttgtttgtttgttgcagttcaatgactacatcaacactagcttctcatcaccacccgccgtcgccctcattgtagcagtactccttgacaacacacttgatgtgagagatgcagcaagggaccgaggaatgccatggtgggcgcggttcaggacattccgtggcgacagcaggaacgaagagttctacactttgcctttcaacctcaacagattctttccaccgacttaagccaaattgccattgagaacacgctgcatgtcaagtggtccactcaagcaagcattgcctaacaatgaggtctgcttctgatagagtagaacaacaaaaggctcgacaaaggaagaactaattccctgttaccaatcgattgtacataaaacaaaactgtttaggttgaccaccggtgtcgaatcagaatgccatattttgatgtaatatgagtttagagatcttatgaacaattttcaagccttatatgcaagctagcttttaaaccgtgttttcatggcttagtggcatggtctggtgtctgatccccaaaaagctatagaaggtatattgcaagaattgttcttc

SEQ ID NO: 26463 - DNA, 2511 bp, Zea Mays
gctactgctactacctacagtacggtgctgccgcctcgcctctcctctccgtccttccttttccgctttgcccgctttcctccttttctctctctttttcgcctttgctgctttgcggcctttgttcaaggttcgacgacacgtccgactccgatcggcggtttcatcgcctcatcggcggccgcgggcggcatctcccttggcttccccccctccactttgctcgctgcttgttcgcttgcgtgcgcgctttttactgttccgcagtcagtcgccaccacatccattctccgtcttcttcctcgcccgccgacccctgaccctgaggccctgaccaccgccgctgcgcccgctgacatttgtctccccggtcgccgaagaggcgaacgtttacgttgctggattcgcgtttatcttcccccgcattacttaccgttgccccacgtcagaggatctcgttccgctcctggagcctgcttggcttctcttgacttgggctttcgcagcgctgctggctgttgctacgtcccctcgctcttcctctcctctgctctgctctcagggtcgcttccttcctctgcccagattgattgttctcgaggttcagatcttggacttggaccctttcgtcggctactcagagttccagaacccgtcccgcgcttgttccagcagattcagagatggccgaggtgaagcctgaggacatggtgcatcatctgcccatggaccagctccagggactggagtactgcatcgactccaatccttcatggggatgacaaggccaaggtggttcaaacgctgctgttcgttactgggatcaagacgctgctccagacgctattcggcactcgtcttcccacagtcatgggaggttcatacgcttacgtggttccaatcctctccatagtccgtgacccctcgttcgcgcgtatagctgatggccacactagattcctgcagactatgagggccgtacaaggttcactgattgtatcctcaagcatccaaataattcttggatatagccagttgtgggctatatgttctaggttcttcagcccacttgggatggttcccgtggttgcactggtggggcttggacttttcgagagaggattcccagtggttgggaaatgcgtggagattggtcttccaatgcttatcctatttgtcgcgctttcccagtatctcaagcacgtgcatattcgtcatgttcctgttttcgagaggttctcattgctgatgtgcatcactcttgtatgggtatatgcccacatcctcacagcaagtggtgcatacaagcacacagcacttgtcacccagatcaactgtcggacagaccgtgccaatctcatatcttcatcacaatggataagcattccataccctttacaatggggtgcaccaacattcagtgcagaccatgcatttggtatgatggcagcggtgatggtttctttaatagagaccacgggagcattcaaagctgctgcacgattggctagtgcgacacccccaccagcatatgtcctgagcagaggcattgggtggcagggcattggcaccctactagatggcctgtttggcactgggactggttctactgtttctgttgagaacgttggtctcctaggatcaacgagggttggtagcagaagagtgatacaaatttctgctggtttcatgatcttcttctccattcttggaaaatttggagcactttttgcctccattcctttcacaatattcgctgccatttactgcgttatgtttggaattgtcgctgctgtggggctctcctttatgcagttcaccaacatgaactcgatgcgcaatctcttcatcatcggtgtctcactcttcctgggtttatctataccagagtacttctctaggtattccacaagttctcaacaaggcccagcgcacacaaaagctggatggttcaatgactacatcaacactagcttctcatcaccacccgccgtcgccctcattgtagcagtactccttgacaacacacttgatgtgagagatgcagcaagggaccgaggaatgccatggtgggcgcggttcaggacattccgtggcgacagcaggaacgaagagttctacactttgcctttcaacctcaacagattctttccaccgacttaagccaaattgccattgagaacacgctgcatgtcaagtggtccactcaagcaagcattgcctaacaatgaggtctgcttctgatagagtagaacaacaaaaggctcgacaaaggaagaactaattccctgttaccaatcgattgtacataaaacaaaactgtttaggttgaccaccggtgtcgaatcagaatgccatattttgatgtaatatgagtttagagatcttatgaacaattttcaagccttatatgcaagctagcttttaaaccgtgttttcatggcttagtggcatggtctggtgtctgatccccaaaaagctatagaaggtatattgcaagaattgttcttc

SEQ ID NO: 26464 - DNA, 1838 bp, Zea Mays
cctagttgcgcgcgcctactcatgcatgactcatctctggcgctcgcggcgcgccttttcatggcgatggcctgctgccgccactgctactgctactacctacagatgacaaggccaaggtggttcaaacgctgctgttcgttactgggatcaagacgctgctccagacgctattcggcactcgtcttcccacagtcatgggaggttcatacgcttacgtggttccaatcctctccatagtccgtgacccctcgttcgcgcgtatagctgatggccacactagattcctgcagactatgagggccgtacaaggttcactgattgtatcctcaagcatccaaataattcttggatatagccagttgtgggctatatgttctaggttcttcagcccacttgggatggttcccgtggttgcactggtggggcttggacttttcgagagaggattcccagtggttgggaaatgcgtggagattggtcttccaatgcttatcctatttgtcgcgctttcccagtatctcaagcacgtgcatattcgtcatgttcctgttttcgagaggttctcattgctgatgtgcatcactcttgtatgggtatatgcccacatcctcacagcaagtggtgcatacaagcacacagcacttgtcacccagatcaactgtcggacagaccgtgccaatctcatatcttcatcacaatggataagcattccataccctttacaatggggtgcaccaacattcagtgcagaccatgcatttggtatgatggcagcggtgatggtttctttaatagagaccacgggagcattcaaagctgctgcacgattggctagtgcgacacccccaccagcatatgtcctgagcagaggcattgggtggcagggcattggcaccctactagatggcctgtttggcactgggactggttctactgtttctgttgagaacgttggtctcctaggatcaacgagggttggtagcagaagagtgatacaaatttctgctggtttcatgatcttcttctccattcttggaaaatttggagcactttttgcctccattcctttcacaatattcgctgccatttactgcgttatgtttggaattgtcgctgctgtggggctctcctttatgcagttcaccaacatgaactcgatgcgcaatctcttcatcatcggtgtctcactcttcctgggtttatctataccagagtacttctctaggtattccacaagttctcaacaaggcccagcgcacacaaaagctggatggttcaatgactacatcaacactagcttctcatcaccacccgccgtcgccctcattgtagcagtactccttgacaacacacttgatgtgagagatgcagcaagggaccgaggaatgccatggtgggcgcggttcaggacattccgtggcgacagcaggaacgaagagttctacactttgcctttcaacctcaacagattctttccaccgacttaagccaaattgccattgagaacacgctgcatgtcaagtggtccactcaagcaagcattgcctaacaatgaggtctgcttctgatagagtagaacaacaaaaggctcgacaaaggaagaactaattccctgttaccaatcgattgtacataaaacaaaactgtttaggttgaccaccggtgtcgaatcagaatgccatattttgatgtaatatgagtttagagatcttatgaacaattttcaagccttatatgcaagctagcttttaaaccgtgttttcatggcttagtggcatggtctggtgtctgatccccaaaaagctatagaaggtatattgcaagaattgttcttc

SEQ ID NO: 26465 - DNA, 923 bp, Zea Mays
cggtcgtaacctcgtcatcgttcggcagctctagcgcctctgttctttcctgcgcgcgccggtgcccagctcgtttggggctgcgtgtgctcctgtgtcgcgctctgtttgcggagttccttcgcatagttcatctccagctcgccgagtctgaccccaaacagtcgtgcgccgcctgggcccggtgtctctttctcgtcaccagctcgcgcgcccctgtttcctttgtcgtcggtcgtcgtctccgagttgattcttagctgttgtagtatttttagttatcccggttgcgtctgtggccgtcaaatcgtcggagtcgctcaactcaccaatcgtatcttggtcagtcatcgattttatgttcgtcatggtcctcacgtcagtcgtccctatccgaacttgccagctcgccgactgaccgtcgtgttccttgaaatccctcgtcggccgatctcgcaacttagttcgtcatgtcgtgtgtgcagctctatatatgccaccctcctatatcgtcgtcgaagctgtcatctccggctcgatccccagctcaccagctcgctccagactttaattgaaggtcgtcgtcgatccgtgcgtcatcaagaaattccaagagtcaagtgaagacggagccaacaacgtgatattcaccaagtgcgcgacaaaaagctcgagccaggatttatcagcattcgtacgagatttgggtcgcgtttgatgctggtacgtttattgactgcgtgatgtggaagacaacccaagtcgaccccaagcgcgggctaatccgcaagatgatgttgatggacgaaccggaagatggataatctgaacgagtgtgtgccaggacaaaggatggtcgtcaagtggacgtcacctaacaacactaacctagtgttacccaggcaagccccggtgcatgcaac

SEQ ID NO: 26466 - DNA, 1007 bp, Zea Mays
agaatattagtaggccaatattttaatcccttataaagatgtagtataaattataaagcaagagataaggttagcatttaattaattagctggtgagttgtgtaggttaattgtatttcatgtgtatagtttgttgttcgtgatgtttgcgttagcttcgagaagcgtaatcgttacgcgtagtcgtatattaataactagtgtttccgtacaaaattgtacaacgcctcgccactaggtgtttaattcgctatcgcatagcactatttaggtttgtaatattcatgtttatatgcattcatatgcataatgcatttcattcaggtacgttaattaatcacgtgatacggaagacgatccaagtcgaccccaagcgcgggataatccgcaggataaagctgatggaccaacctgaagatggacaatggagcgagtatcagaataaaggctgatcgtcaagtggacgtcatctaacaacactaacctagtgttactcaggcaagccccggtgcatttgccaccttccttgatgtttttaaaatctttctcacttgattgctgcattaggtgataggagttgattgataaaaccattcctgcattaccttccttgaacttgattaccttccttgatcacccgttttacaaaaagattttgatgcttagccttgctttagaaaacaaaatgttttgtttttacaaaatatgatatggcaaaggtgggtgggatgttttcgaaaataaaacttgatggtgaatccatcacggccgtgatggattcaacatcggaaaagatgtacctctgccaggtaccaagtttttgggttgaaaagattaagctgagaccgggcgggtgacttgcacgagaagagagtctcggtgtagtgtctccgtctgagtcgattaaggaccttgtcgatgtaggcctgctgaccgaggaccctttaactggtcacatgcctcgtcatgggtaagctttgcctcgggcggactaaggccagaataag

SEQ ID NO: 26467 - DNA, 2272 bp, Zea Mays
caaatcgcaagccgtgcttcttgtgtggctcaacgcgggggacaggaaaaatcccaccgctgatttcctcctcctccttatccctctcgcgcagcttcttcatccacacgtgggaagaagaaaatcctgccgccgagattttttccggccgccgtcgtcatccagatgccgctcaagccgtcgctgttcctcgccgttatccgctcagccggccgaatacaaatccagcagcccggctgttcctccctgaagattttcccccatggcgccctcacccctgttcctcctagcgtccgggctctgctcgtcctcggccatggcggacgccgtcgccatttttccccttggtgctcaccggtcgagtcccagccccagcgccgtgaaactccctgcgcccccgtcctcttccccagtcgcgagctccttttctcttctccatggcgcgcccaagctccctctgctttcttatcctctttccagcgcgcgtaggcttcctctgggattctttgtttgccgacttaatcttccagccgagcgcagtgcttcttcctcctcagccgtcgcccaagtcttcttcttctacgcgcacagggttctcctctgcgcatcctctgactctcccagcgccgtggcttctctgagttcgtcgctggaaacgcaccgtcctctgctcgttcggtgcccctctctccaagcttccatggcgccttggagccccagctcggccgacggccgggaggacgcgctgggtctccctctgctcggtcgtctccctcctcccgctccagctcccctgtgtgccgtggatctcgcgcccctgcccaagtccggctgcctgcgcgctccttcttccttttcccctgtcagccgcatctccttcgggcgttccgcggtatactggctcacgcagatgctcgatgcccaatccctgcgtcgcgtccattctctgctcttcctgttcgccggcagaagctcccagccgagcgttccttctcttcgccgcgcgcccagccgtcgaagctccctgccatcgtcgttttcggccctgccgttggtacaacatcgtttgctgttgctagttgatgcaacgttgccgtccttcgacgccgcgccgtgagcagcgacttcgtcgatccgtcattttgacagggtacttgcgctgctctcctgtgtatgtgatgattggaaaaggagtcccagctgatgaaggattaaggaacgaaagctttagtacaccccgcctgccagctgatcgtcgtacatcctgaaccagggtttaatcattttctttgtgaagttcgagccgattataattttggaaggagattggtgctgaagtcgaagctagcagcccctttattcttcgtcgtcaacccacgccgcgtcgcgacatgcccgtcgatcccgacgatctatctgccagatgcgtgccacttgtgttgagctccaaagcccctgtcgagctcttcccctgaaagccgccttcgagcacaatccctgtcatgtgtttgatgggaagtctgaaccaatgttcatcgtcgatctacgattatcaaatcattctggtcatagtaagtcgatgagttattcagaatagttcaattgttgaataaattaatgtgctagtgtgatactagttgctcgataaattacgcgagtcacggaactctcgtcgacttcgcggttcttgcgattatcgagccaggttctattatagcgagttatttcgctattccggacaattagctgaattagtgtaccgagtagaatattagtaggccaatattttaatcccttgtaaagatgtagtataaattataaagcaagagataaggttagcatttaattaattagctggtgagttgtgtaggttaattgtatttcatgtgtatagtttgttgttcgtgatgtttgcgttagcttcgagaagcgtaatcgttacgcgtagtcgtatattaataactagtgtttccgtacaaaattgtacaacgcctcgccactaggtgtttaattcgctatcgcatagcactatttaggtttgtaatattcatgtttatatgcattcatatgcataatgcatttcattcaggtacgttaattaatcacgtgatacggaagacgatccaagtcgaccccaagcgcgggataatccgcaggataaagctgatggaccaacctgaagatggacaatggagcgagtatcggaataaaggctgatcgtcaagtggacgtcatctaacaacactaacctagtgttactcaggcaagcccc

SEQ ID NO: 26468 - DNA, 725 bp, Zea Mays
gtacaggacattgatcgccagcttttgattgtgggtgaccacaacatgcgtagcttcttggagcgtttatctaggcgcctacgtggagctgctgctcgctgtggctgcaggaccaatgttgcacattacgttcatgtaccgttgtatagccacacaacaatgccatctataagattggacgttggcttggactatgatcagaatgagatcagaccttcacaggttcaggggccttgtcaaaaagccatacgatggtacttgaacggtccacgtagattgtcaaaaaaaaatttatgtgtgatatccggctacagagcagctcctagagagatctacagcttagctacagcatgtcaagttgctggaaacgtccatggactcattaaaaaatacgaatagcggaagagccgcttgtgtttcgtccttgggctcattaaaaaaagagccgcttgtgtttcttcatgtacacaacttggtgtaaaggggctaaagttttagaattatgatgcacatgaaatcttctgagaactaactgtaacatgttaagattctgaagtttttaggaggaaaggctttaggaggaaaggctttatattactatatatacgcttgtgcaaagcaaggtagaaaaatacttttaccttgtattttctcaagaggagcctagtgaaggcaattcagttttttctttcttttggtactttgccttctggtcttcaaataag

SEQ ID NO: 26469 - DNA, 2744 bp, Zea Mays
ccgtccattactcctagacgcatcgcggcggatcgtctttctccgtgctccgcctcgccggcctcgtgcggtcgtgccccgcagccccgactccccatccgccgcctccacctcatgggccaccgggtccaccctcgctgtccagcttggcgacatctttgaccgtggtgtcgacgagctccgcctcctcgccccttctgctgaggcccacgtcggcgtatttctgccatagtcgacaaccaataggagcgtaaaactggagctagggattgcatttgttgcaggtacatgtcatacatgaatggacatgggcaggcactcccactgagggtgcttcttggctttgtctgcagaggcttgctgatacttggcataggatattgttaattccagtgacaggtggagtagttgtgggtatgatgcatggattatttgagaactttgagtagataaagcaatcattatcatctcaaagggagggtttgatttcatggccgtgataccccctccctccttgtcaaagccatccaagccgcaattactttagggacagggtgttcacttgggctagaaagattctgtttttattgcacgacacatggcaacatgtccaagtagtccttaacttgattcatttagctggtagtgagcgtcttgctaaaagtggctccacaggtgaacttaggtgagtgtttggttaccatgtatttccagatcaatgacatactaaaattgttctttgcacatgtaaatacaaaaaaggtacatgtcttccctgtcgagccccaaaaataaatgacatgcaacccaataaatcctttttgtattttttataagaaatgacagaaaaaatcctcggcgttaaaataagtgaaagattctaacaaccactaattatcttccaaaaaatcaattattatttatgcaccaagttgtaacaatactaaaaccatattcctttcatctcattttatcagtttaacacaatagttttaataagttcaataccacactgaaaagagtgaaccaatgatttgtcatagactacaggcattagctctcttttgatactaaatccatattcctttcatcctttgatctcatttgatctgtttaatacattgattttagtatattcaacatcacactacaagcatggttattttttataaagatgcctaccattttttatcggtcaggcaacttctcaaaattgttccataacacaatatttaccaatctatacatccatacatcattcaggaatgctagatcttgatagcgagacaacgttcttcggtgtttttgatggtcatggaggtaatcacaatatgtgctttttatgttccgttgaattagactgcctacgaggaataccattatgccaagtatttatagaacctaactttaacattacacaacctcataccattgctttacttaagaagagtagctgtcaaattctgtacagaatacctgcataatcaagttctcaaaagtgaagcctattcagttggtgacctaggtcctactgtcctaataaagcttaaatatttgttatatgtatacaacaaacacaaagtttattgtgtaaatgctttgttgatagtggctttctaattgaacatatatccctataactgcatatatgtattgagtatgataatgttatctgcatttaaatggatctgtgggtaagactcatatgaatgaacagtcgtccagaggccattttgtatttaaattaaatatatccgaatctaatgaggtagaatggaacattcacaattatcataccaagatctactaaaatatagtgttccttatgctctctttcagactggcgacaatccctttttagacaaatattttgcatgctaaataactaatcctgagaaagtatagctcccatttttttggttgaagaaaacaggccaacccagccaaagagtcattaacttgattgattttgctgcaacgagcgttttgctaaaagtggttacataggtgatcgcttgaaggaaactcaggtcatcaaaacgccgacagtggtttagagacatcgctctcccttgatctgctgcacggcagacgaagggacgacagggcagagaagcgacgacacagagaattgaaaagaagaggatgagtctgttgctattcgcctctgtcctccgaccgaaggacacctgccctttatagacgggccgcaacaaccccttgattcgatttgctatattgcaggaaccgccccctgaaatatctctacgtgcaaccgcttggagatctcgcacgtaacgtgcgtgcccgttactcctggttgatgtggcagtctaggtgtgatatttgataaccaaataaacaaaaggcaaaaattaaactgtcgtttagaacatgtcatgacgcgatcactcagtgtcacaagtcacatgtcacacgataaataacacgaaaaaacgtgaaacgcgagcaagctcgcgcgtgtggcagcctccatagccctttaaatgatatggtttgtgtgtagatttgaccggcggaagcaaaagaagataacagactttcgtcaacatcatctggaatttattgaagagtgggatttggctgaggagaatgtgcatgaaaacgatgagttgcacaacaacagtgactacaggcggtaccaagcttggtaccagggtgcgactcattgtaagcttcgccagcagtggacatcggatgactacgccgacattgattcttcc

SEQ ID NO: 26470 - DNA, 2074 bp, Zea Mays
gtccattactcctagacgcatcgcggcggatcgtctttctccgtgctccgcctcgccggcctcgtgcggtcgtgccccgcagccccgactccccatccgccgcctccacctcatgggccaccgggtccaccctcgctgtccagcttggcgacatctttgaccgtggtgtcgacgagctccgcctcctcgccccttctgctgaggcccacgtcggcgtatttctgccatagtcgacaaccaataggagcgtaaaactggagctagggattgcatttgttgcaggtacatgtcatacatgaatggacatgggcaggcactcccactgagggtgcttcttggctttgtctgcagaggcttgctgatacttggcataggatattgttaattccagtgacaggtggagtagttgtgggtatgatgcatggattatttgagaactttgagtagataaagcaatcattatcatctcaaagggagggtttgatttcatggccgtgataccccctccctccttgtcaaagccatccaagccgcaattactttagggacagggtgttcacttgggctagaaagattctgtttttattgcacgacacatggcaacatgtccaagtagtccttaacttgattcatttagctggtagtgagcgtcttgctaaaagtggctccacaggtgaacttaggtgagtgtttggttaccatgtatttccagatcaatgacatactaaaattgttctttgcacatgtaaatacaaaaaaggtacatgtcttccctgtcgagccccaaaaataaatgacatgcaacccaataaatcctttttgtattttttataagaaatgacagaaaaaatcctcggcgttaaaataagtgaaagattctaacaaccactaattatcttccaaaaaatcaattattatttatgcaccaagttgtaacaatactaaaaccatattcctttcatctcattttatcagtttaacacaatagttttaataagttcaataccacactgaaaagagtgaaccaatgatttgtcatagactacaggcattagctctcttttgatactaaatccatattcctttcatcctttgatctcatttgatctgtttaatacattgattttagtatattcaacatcacactacaagcatggttattttttataaagatgcctaccattttttatcggtcaggcaacttctcaaaattgttccataacacaatatttaccaatctatacatccatacatcattcaggaatgctagatcttgatagcgagacaacgttcttcggtgtttttgatggtcatggaggtaatcacaatatgtgctttttatgttccgttgaattagactgcctacgaggaataccattatgccaagtatttatagaacctaactttaacattacacaacctcataccattgctttacttaagaagagtagctgtcaaattctgtacagaatacctgcataatcaagttctcaaaagtgaagcctattcagttggtgacctaggtcctactgtcctaataaagcttaaatatttgttatatgtatacaacaaacacaaagtttattgtgtaaatgctttgttgatagtggctttctaattgaacatatatccctataactgcatatatgtattgagtatgataatgttatctgcatttaaatggatctgtgggtaagactcatatgaatgaacagtcgtccagaggccattttgtatttaaattaaatatatccgaatctaatgaggtagaatggaacattcacaattatcataccaagatctactaaaatatagtgttccttatgctctctttcagactggcgacaatccctttttagacaaatattttgcatgctaaataactaatcctgagaaagtatagctcccatttttttggttgaagaaaacaggccaacccagccaaagagtcattaacttgattgattttgctgcaacgagcgttttgctaaaagtggttacataggtgatcgcttgaaggaaactcaggttcaaggacccatgagtatccgaaatcttcccaaaactaaatgtt

SEQ ID NO: 26471 - DNA, 1253 bp, Zea Mays
agaagaaccagaattgcatcacagatgtttcatgtgttcacttgatgcaaactgaaactgattatgatcgcactgcatccattattgatggcaagtccattgcagaggacatgaggttacatattgctgaagaggtctgtcaaatgaaatgttcagttggacacgtgcctggtctagctgttgttttggttggtgatagaagagattctgaatcatatgtgcgatacaaaacaaaaggctgtgaggaagttggtattaaatctttgttggcgaagttgcctggaaactgttcagaagatgaagtgatggattcagtgtcaagatttaatgaggatccatctgttcatggcatcctagtgcagttgcctctaccagagtttatggatgaggaaaagattctgagcatcatcagtctgaataaggatgttgatggtttccatcccttaaatgttggcaatcttgcactaagaagccgaaatcctttgtttgtgccctgtgctgcaaaggcttgcattgaattattgctccaatctgggattgaactgatgggcaagcatgtatctgtcattgggagaagcaaagttgttggattgccaacttccttacttttacagcggcatcatgccactgtcagtgttatccatgccttcacaacaaatccagaggctattacccgcgaatctgatattgtgatatcagctgctggagtggccaatcttgtaaggggaagctggttaaagcaaggtgcagtggtgattgatgttgggacaaatccaatcgaggatccaaccagtgactacggttatcgcctaactggggatgtctgcttcgaagaagcagtgaatgtggcctctgctataactccagttcctggcggagttggaccagtaacgattgccatgcttcttggcaacacacttgattcagcaaaacgcgtttatggcctaagtgactgaaactgacccccctctgaactgtaattttgtcgtgcttgtcctttgtaaactagttctcttctcttttcaacctcccgtcgctctctattttagctgtaggaggagggctgggatgtaccatattcttgctcaataagtattgtattagctgtgtccattaggtaagtttttttgtgtgtgaccatattagcctgttacctatataaccaacacacaatagcaggaacatgtcttcagacacgatttatttgcatttttttataagagaaataggcctgactgacaacattattgatt

SEQ ID NO: 26472 - DNA, 1318 bp, Zea Mays
gaacaacgcaaaacagtggcaaaactgattatgatcgcactgcatccattattgatggcaagtccattgcagaggacatgaggttacatattgctgaagaggtctgtcaaatgaaatgttcagttggacacgtgcctggtctagctgttgttttggttggtgatagaagagattctgaatcatatgtgcgatacaaaacaaaaggctgtgaggaagttggtattaaatctttgttggcgaagttgcctggaaactgttcagaagatgaagtgatggattcagtgtcaagatttaatgaggatccatctgttcatggcatcctagtgcagttgcctctaccagagtttatggatgaggaaaagattctgagcatcatcagtctgaataaggatgttgatggtttccatcccttaaatgttggcaatcttgcactaagaagccgaaatcctttgtttgtgccctgtgctgcaaaggcttgcattgaattattgctccaatctgggattgaactgatgggcaagcatgtatctgtcattgggagaagcaaagttgttggattgccaacttccttacttttacaggtaaagatgtcaaaatccgagtcacacctatgatttttatgcattttgctgcggttttgttatacgaagacattactttgtcattgatcttctttcagcggcatcatgccactgtcagtgttatccatgccttcacaacaaatccagaggctattacccgcgaatctgatattgtgatatcagctgctggagtggccaatcttgtaaggggaagctggttaaagcaaggtgcagtggtgattgatgttgggacaaatccaatcgaggatccaaccagtgactacggttatcgcctaactggggatgtctgcttcgaagaagcagtgaatgtggcctctgctataactccagttcctggcggagttggaccagtaacgattgccatgcttcttggcaacacacttgattcagcaaaacgcgtttatggcctaagtgactgaaactgacccccctctgaactgtaattttgtcgtgcttgtcctttgtaaactagttctcttctcttttcaacctcccgtcgctctctattttagctgtaggaggagggctgggatgtaccatattcttgctcaataagtattgtattagctgtgtccattaggtaagtttttttgtgtgtgaccatattagcctgttacctatataaccaacacacaatagcaggaacatgtcttcagacacgatttatttgcatttttttataagagaaataggcctgactgacaacattattgatt

SEQ ID NO: 26473 - DNA, 1484 bp, Zea Mays
gtggcccaaaaggcccaaacattcactgatatcccatgttttgacacgagcggtgggacgtgctgacggagatgggtggcgccgccgccgccgttcttgccgtcgcagccgcacgccggaaatctggtcccttcgtatccttgttctccagggcggcgcgcaggctccacgatgctgtagagactgcagcggcggaggaggacatggcggggacgcggagtccgcggcggcggcggcggagcagcagcagcctccttcttggaccggaattccccgacacctgggacccttcatcgcgtgacacgacgccgcagtctcctccgcggtgtgcccaagaggacatgaggttacatattgctgaagaggtctgtcaaatgaaatgttcagttggacacgtgcctggtctagctgttgttttggttggtgatagaagagattctgaatcatatgtgcgatacaaaacaaaaggctgtgaggaagttggtattaaatctttgttggcgaagttgcctggaaactgttcagaagatgaagtgatggattcagtgtcaagatttaatgaggatccatctgttcatggcatcctagtgcagttgcctctaccagagtttatggatgaggaaaagattctgagcatcatcagtctgaataaggatgttgatggtttccatcccttaaatgttggcaatcttgcactaagaagccgaaatcctttgtttgtgccctgtgctgcaaaggcttgcattgaattattgctccaatctgggattgaactgatgggcaagcatgtatctgtcattgggagaagcaaagttgttggattgccaacttccttacttttacagcggcatcatgccactgtcagtgttatccatgccttcacaacaaatccagaggctattacccgcgaatctgatattgtgatatcagctgctggagtggccaatcttgtaaggggaagctggttaaagcaaggtgcagtggtgattgatgttgggacaaatccaatcgaggatccaaccagtgactacggttatcgcctaactggggatgtctgcttcgaagaagcagtgaatgtggcctctgctataactccagttcctggcggagttggaccagtaacgattgccatgcttcttggcaacacacttgattcagcaaaacgcgtttatggcctaagtgactgaaactgacccccctctgaactgtaattttgtcgtgcttgtcctttgtaaactagttctcttctcttttcaacctcccgtcgctctctattttagctgtaggaggagggctgggatgtaccatattcttgctcaataagtattgtattagctgtgtccattaggtaagtttttttgtgtgtgaccatattagcctgttacctatataaccaacacacaatagcaggaacatgtcttcagacacgatttatttgcatttttttataagagaaataggcctgactgacaacattattgatt

SEQ ID NO: 26474 - DNA, 1447 bp, Zea Mays
gtggcccaaaaggcccaaacattcactgatatcccatgttttgacacgagcggtgggacgtgctgacggagatgggtggcgccgccgccgccgttcttgccgtcgcagccgcacgccggaaatctggtcccttcgtatccttgttctccagggcggcgcgcaggctccacgatgctgtagagactgcagcggcggaggaggacatggcggggacgcggagtccgcggcggcggcggcggagcagcagcagcctccttcttggaccggaattccccgacacctgggacccttcatcgcgtgacacgacgccgcagtctcctccgcggtgtgcccaagctgattatgatcgcactgcatccattattgatggcaagtccattgcagaggacatgaggttacatattgctgaagaggtctgtcaaatgaaatgttcagttggacacgtgcctggtctagctgttgttttggttggtgatagaagagattctgaatcatatgtgcgatacaaaacaaaaggctgtgaggaagttggtattaaatctttgttggcgaagttgcctggaaactgttcagaagatgaagtgatggattcagtgtcaagatttaatgaggatccatctgttcatggcatcctagtgcagttgcctctaccagagtttatggatgaggaaaagattctgagcatcatcagtctgaataaggatgttgatggtttccatcccttaaatgttggcaatcttgcactaagaagccgaaatcctttgtttgtgccctgtgctgcaaaggcttgcattgaattattgctccaatctgggattgaactgatgggcaagcatgtatctgtcattgggagaagcaaagttgttggattgccaacttccttacttttacagctgctggagtggccaatcttgtaaggggaagctggttaaagcaaggtgcagtggtgattgatgttgggacaaatccaatcgaggatccaaccagtgactacggttatcgcctaactggggatgtctgcttcgaagaagcagtgaatgtggcctctgctataactccagttcctggcggagttggaccagtaacgattgccatgcttcttggcaacacacttgattcagcaaaacgcgtttatggcctaagtgactgaaactgacccccctctgaactgtaattttgtcgtgcttgtcctttgtaaactagttctcttctcttttcaacctcccgtcgctctctattttagctgtaggaggagggctgggatgtaccatattcttgctcaataagtattgtattagctgtgtccattaggtaagtttttttgtgtgtgaccatattagcctgttacctatataaccaacacacaatagcaggaacatgtcttcagacacgatttatttgcatttttttataagagaaataggcctgactgacaacattattgatt

SEQ ID NO: 26475 - DNA, 1512 bp, Zea Mays
gtggcccaaaaggcccaaacattcactgatatcccatgttttgacacgagcggtgggacgtgctgacggagatgggtggcgccgccgccgccgttcttgccgtcgcagccgcacgccggaaatctggtcccttcgtatccttgttctccagggcggcgcgcaggctccacgatgctgtagagactgcagcggcggaggaggacatggcggggacgcggagtccgcggcggcggcggcggagcagcagcagcctccttcttggaccggaattccccgacacctgggacccttcatcgcgtgacacgacgccgcagtctcctccgcggtgtgcccaagctgattatgatcgcactgcatccattattgatggcaagtccattgcagaggacatgaggttacatattgctgaagaggtctgtcaaatgaaatgttcagttggacacgtgcctggtctagctgttgttttggttggtgatagaagagattctgaatcatatgtgcgatacaaaacaaaaggctgtgaggaagttggtattaaatctttgttggcgaagttgcctggaaactgttcagaagatgaagtgatggattcagtgtcaagatttaatgaggatccatctgttcatggcatcctagtgcagttgcctctaccagagtttatggatgaggaaaagattctgagcatcatcagtctgaataaggatgttgatggtttccatcccttaaatgttggcaatcttgcactaagaagccgaaatcctttgtttgtgccctgtgctgcaaaggcttgcattgaattattgctccaatctgggattgaactgatgggcaagcatgtatctgtcattgggagaagcaaagttgttggattgccaacttccttacttttacagtgttatccatgccttcacaacaaatccagaggctattacccgcgaatctgatattgtgatatcagctgctggagtggccaatcttgtaaggggaagctggttaaagcaaggtgcagtggtgattgatgttgggacaaatccaatcgaggatccaaccagtgactacggttatcgcctaactggggatgtctgcttcgaagaagcagtgaatgtggcctctgctataactccagttcctggcggagttggaccagtaacgattgccatgcttcttggcaacacacttgattcagcaaaacgcgtttatggcctaagtgactgaaactgacccccctctgaactgtaattttgtcgtgcttgtcctttgtaaactagttctcttctcttttcaacctcccgtcgctctctattttagctgtaggaggagggctgggatgtaccatattcttgctcaataagtattgtattagctgtgtccattaggtaagtttttttgtgtgtgaccatattagcctgttacctatataaccaacacacaatagcaggaacatgtcttcagacacgatttatttgcatttttttataagagaaataggcctgactgacaacattattgatt

SEQ ID NO: 26476 - DNA, 1530 bp, Zea Mays
gtggcccaaaaggcccaaacattcactgatatcccatgttttgacacgagcggtgggacgtgctgacggagatgggtggcgccgccgccgccgttcttgccgtcgcagccgcacgccggaaatctggtcccttcgtatccttgttctccagggcggcgcgcaggctccacgatgctgtagagactgcagcggcggaggaggacatggcggggacgcggagtccgcggcggcggcggcggagcagcagcagcctccttcttggaccggaattccccgacacctgggacccttcatcgcgtgacacgacgccgcagtctcctccgcggtgtgcccaagctgattatgatcgcactgcatccattattgatggcaagtccattgcagaggacatgaggttacatattgctgaagaggtctgtcaaatgaaatgttcagttggacacgtgcctggtctagctgttgttttggttggtgatagaagagattctgaatcatatgtgcgatacaaaacaaaaggctgtgaggaagttggtattaaatctttgttggcgaagttgcctggaaactgttcagaagatgaagtgatggattcagtgtcaagatttaatgaggatccatctgttcatggcatcctagtgcagttgcctctaccagtttatggatgaggaaaagattctgagcatcatcagtctgaataaggatgttgatggtttccatcccttaaatgttggcaatcttgcactaagaagccgaaatcctttgtttgtgccctgtgctgcaaaggcttgcattgaattattgctccaatctgggattgaactgatgggcaagcatgtatctgtcattgggagaagcaaagttgttggattgccaacttccttacttttacagcggcatcatgccactgtcagtgttatccatgccttcacaacaaatccagaggctattacccgcgaatctgatattgtgatatcagctgctggagtggccaatcttgtaaggggaagctggttaaagcaaggtgcagtggtgattgatgttgggacaaatccaatcgaggatccaaccagtgactacggttatcgcctaactggggatgtctgcttcgaagaagcagtgaatgtggcctctgctataactccagttcctggcggagttggaccagtaacgattgccatgcttcttggcaacacacttgattcagcaaaacgcgtttatggcctaagtgactgaaactgacccccctctgaactgtaattttgtcgtgcttgtcctttgtaaactagttctcttctcttttcaacctcccgtcgctctctattttagctgtaggaggagggctgggatgtaccatattcttgctcaataagtattgtattagctgtgtccattaggtaagtttttttgtgtgtgaccatattagcctgttacctatataaccaacacacaatagcaggaacatgtcttcagacacgatttatttgcatttttttataagagaaataggcctgactgacaacattattgatt

SEQ ID NO: 26477 - DNA, 1713 bp, Zea Mays
cttgctcttgtgaaaatgatttgccgagaagttacacaacaccaagattagcttaaccatcatgaacagcaaatataaacatgtgtatatgtctgaacatgacagtaaatagcctcataaaccttcaatccaaattttgtacatctgagagaattacatgatataaccctctaacacttgctgcctaccaatgagagatgggcatttaccgagtggaacataacccattgtgacataaaaaaagaaaaggttagactctttgctcccagtaagaaaacatcagtagctccaattacaacacttttagcagggtatgttacgcagtgagggattgggaggattctaatgtcaactagtgtggaacagtagcgcatatgaaccatacaacgaagccatgaatatcaatgacaccgtgaaaagtaagttttttgtcccaacttggaatcaaattcttaacctctaaatcatgtctctggagtaccaacataatctaatagccaccaggttaggcagcacaagagtcatattttcagttaccaatcatatgaccggggtgagtatatagttcctttaatccttttcatggtcacaagtgatttaggatgaacagcaccctgccttcttcacagcagagacatcatccttgccaccaacattgatggtttgccctcttggtggagcagcagggtcatcgccaatgtcaagggccttcttgctgacgacacgatagatctgagttaggacctcggtgaaagcgctctcaacattcatggactccagcgcggatgtttccatgaagaaggtcatttccctctcagcgaagcccttggcatcctccacggatacagctctaaggtgtcgcagatcagctttgttgccaacaagcattatgacaatgtttgcatcagtgtgatcccggagctcctttaaccacctctccacattctcaaaggtcacatgacgtgtcacatcatacacgacaagtgcaccaacagcccctctatagtacgcacttgtaattgcccgatacctgcaaaagagaggatggatgatatatggcaaaattaagctccatccaaagaaatttcggtagcgaaattaggcaataaataatacagctgagcagaccaaacaaaacaggtcatattggagctggctacagagaacataaaatggcaagaaaatcagcattatatttaaatgaaaaccaaacaaatgttagtctacattccacatcaggtgcaacgatttggctcgaagcatcacaagaaaaatgaagctggaactacagaaacaataggaaacaatcctagaatatcttcagtgttacacaactactgcagaatttccactttgcaggtgagctggtcaagtgccaccatattaggttaacttatattaaacaagaggtgcctgcctaattacctattgccatcacctacgatggttgcaacagaacattattcaatgcaaccaggagcccaggaggagggtagtacaaaatgtataatcccccagcattaccactttaccaggtatgacaatggcaggacgtcactaagccatgaatcatgatgacaacgatggtaggaattcttagattggaaaggtataagggcattgactttaatccgtaccgccttctactacttctaccgtgttttgtctctatggattagagttgtagccgtccgaacagctggctttaatctg

SEQ ID NO: 26478 - DNA, 1093 bp, Zea Mays
tattctaagtttatacctgataacacatttgcacatacttgatgcatttgtctatggtattttctttttataaagtgaatcatcttgacaatgaaatagtgcatttatcagttttgtaatgggacatcactcctcaagtatccagaaggtaaactagatgtatttctcatacatcaattgggcaagtttgagatatagttgtcccaatttgtccagaaatttatttacctgtacctccacaagtacataatgcgctcgaccacattaatgttgttgttaagagtcaaacgatggtttgtgttcacaactgaaaccattggattttgtttttgacatctcaaggaggtattaaccgagagcttgctgccgcaaaaaagatttctcacatctgagatcgagagaagaaagcattttcaaggagaatagctgatctgttgatgtgcttggccttaagactgcttttgcaaccttcatgggtaaggctggcccatcggatcctcagcgctttccgttcattttggtcgggaacaagattcattcagatggcgggagcaaacggatggttccggagaagaaagcgagggaatggtgcgcctccaagggcgatattccatacttcgagacctctgcgaaggaggaccacaacgtcgacactgctttcctatgcatcgctaggctcgccttggagcatgagcatgaccaagacatttacttcaagacagttgcagaacaagtcccggacactgaacagacaagcagatgtgcttgctaggagccagccatttcctagaaggctggaactacgtggatgttactgaaggactggcccccgatatgttccctcgcagtttttcttttgagctccagtaactttattactgttctgtgttgctctcactggattttagcacttctgtaagttgtcatcttttaaagttaagaatttttacataagtcttacacatcgaacaaatccaccatatacattaagatgcaatgcttatcgaccactcaagtaatatgctcttgtaacctaaattaatcaaaattgggaaataatcagcaaccgacttgtactaaggtagaaaaataa

SEQ ID NO: 26479 - DNA, 439 bp, Zea Mays
gtcgcacatccgccgccctcgcccagcacagcgcagccgcacaggcacaccgcacacagccgccacagctagtcgccattgttcacggctgctcagcgctccataccgtgcccccaaattccgtgactcatcttccttctctctgccgggctgcgcgtgcagaccacggacgaacgcactgcccccaatccactggtttttgctgttcggagttggcgctcgtttttcattttcaatatccacttgttatattgtaaacttgtgatcaatttgttatattgtgaacttgtgatttatgggattaatttgtaatattgtgaacttgtgatctgtgtgatccattattatattgtgaacttgtgatattgtgaattgtgaacatgtgatattgaaaattgtgaacttgtgttttttgtgatattcgtaaactttgttgtat

SEQ ID NO: 26480 - DNA, 1127 bp, Zea Mays
tgtggtcggagctcggaagggatggggtcctgggtggactcctttagttccagttggatgtcaatcatggcactaagagagtgaggaaacccaaagcttggaagcatccccaaccgataaccatggcccagctcaggcagatgcgtgaggagttttgggacaccgctcctcactacggtggtcagaaagaaatctgggatgcccttcgagttgcatcagagtctgaggtatcccatgcacaggctgttgtggaaagtgcaggcataattgtttctaatgccgatctgactctctgctacgatgaaaggggtgctaagtatgaattgcccaagtatgttttgagtgaaccaaccaacctgatccgagacagctgaacggcagccggccgtaggaagacccaccgatgtaaaaactgtaaatgactgcagatgccgccaaattggtcccttgcttgtggtaactggagtgcctcgagtaaccttcagatttgctttggcaactttcggcaatagggttttccagttctagtgttcagataaaaaaaaacttttgcgtaccctcgtctattgttcttggttctactgtaaacatgagtctgcttagaattctttggagcgagaatgctgctgagattgttctcgtccactatcatgatacaagctggagcatacgttttagaaacttgtcacatctcgtgcaactaattatattattatgtggtctggtctgacatttgaaatgaaatgcatgataaggagcaaatcgcaatctaatttttacattatcgcaacatatccgatgatactggagttttacattattatcatgagaatgatgctgattcatctagtggtagtgttgcgtggagtctgagaacctgaaccggctgaatgcctcctccatcgccatcaccatcgccagcaggtccagatccatccctcctccgtcttcgtcggcgacgctcctctcgcagagcgcgaaccggcacaccgggcagctgccgtgcccctgcacccagggagcgatgcacccctggtgaaacgtgtggttgcagggcgtgaccgcaacctgctctccaggcaggaacgtctccaggcatatggtgcagaccttctcctcttcactgg

SEQ ID NO: 26481 - DNA, 1260 bp, Zea Mays
ccggaaacgggagtctggagcatttccgagttgtctccaccgcgcaagcgacgagaaggcggcgcgccaccaccgctgctggcctgccgccacgactcgccggcagactaggctcctatggcgcgccgccgcgtgctgctcttcctcaagcccttcgacgtataccctccccgcccgtacgtcggagctgcggcctcttctcccacctctgcgccctcgtcactgccgcaaccgcgcgccgccaaccccaaggtcttgagctatctggatgataggtgcagagttcacaaggacactattgatctctgccagagtgtcttacagcgcaagtcccttgactggattgctgtgcagcgcaatcatttgtgtcagccaatacgtgatgtggatcttgtggttgctgtcggcggcgatggcacccttctccgggctagccattttttggatgattcagttcctatattgggtgttaattcagatcctacttgtactaaggaggttgaggagctatctgatgaatttgatgcaaggaggagcacagggtatctttgtgcagctactgcaggaaactttgagcagtaggcgccctttggagctgtcaaggatatcggtgaaactaaatggaattcagctgccgacttatgctctgaatgatatattggtgtcacacccttgtccagcaagtgtgtcgcgcttctcatttaggaaaaggaacaatacaggagagaactcgcgtttaattaattgtagatcaagcggtctgagggtctcaacagctgctggatcaactgctgccatgctatcagctggaggatttacgatgccattatcaagccgtgagcttcagtatatgataagggagcccatttctccaatggatgccgacaaagcaatgctccatgatgttcttaagcaagaacaacacatgcatgtcgtgtggtacaatcaagagggtgctgtttatgttgatggttcacacgtagtgcattcaattcagcatggggactcacttgagatatcctcaggtgctccgaccttaaaagttgttttgccagaacatttgctaaagatgggacctgaatggtgaaataacaatatttttgtgatgttccttatctatttaatatgatataggagttgagcagtgagctgagttattgggtgcttaagcggtatcaatccatgttcatgtagtgactgacagttaaacgctatcagatgaagcattagtgacaaatttgcgaggttttgtttgtagat

SEQ ID NO: 26482 - DNA, 1280 bp, Zea Mays
ccggaaacgggagtctggagcatttccgagttgtctccaccgcgcaagcgacgagaaggcggcgcgccaccaccgctgctggcctgccgccacgactcgccggcagactaggctcctatggcgcgccgccgcgtgctgctcttcctcaagcccttcgacgtataccctccccgcccgtacgtcggagctgcggcctcttctcccacctctgcgccctcgtcactgccgcaaccgcgcgccgccaaccccaaggtcttgagctatctggatgataggtgcagagttcacaaggacactattgatctctgccagagtgtcttacagcgcaagtcccttgactggattgctgtgcagcgcaatcatttgtgtcagccaatacgtgatgtggatcttgtggttgctgtcggcggcgatggcacccttctccgggctagccattttttggatgattcagttcctatattgggtgttaattcagatcctacttgtactaaggaggttgaggagctatctgatgaatttgatgcaaggaggagcacagggtatctttgtgcagctactgcaggaaactttgagcagatacttgatgtgacgcttgatggcagtaggcgccctttggagctgtcaaggatatcggtgaaactaaatggaattcagctgccgacttatgctctgaatgatatattggtgtcacacccttgtccagcaagtgtgtcgcgcttctcatttaggaacaatacaggagagaactcgcgtttaattaattgtagatcaagcggtctgagggtctcaacagctgctggatcaactgctgccatgctatcagctggaggatttacgatgccattatcaagccgtgagcttcagtatatgataagggagcccatttctccaatggatgccgacaaagcaatgctccatgatgttcttaagcaagaacaacacatgcatgtcgtgtggtacaatcaagagggtgctgtttatgttgatggttcacacgtagtgcattcaattcagcatggggactcacttgagatatcctcaggtgctccgaccttaaaagttgttttgccagaacatttgctaaagatgggacctgaatggtgaaataacaatatttttgtgatgttccttatctatttaatatgatataggagttgagcagtgagctgagttattgggtgcttaagcggtatcaatccatgttcatgtagtgactgacagttaaacgctatcagatgaagcattagtgacaaatttgcgaggttttgtttgtagat

SEQ ID NO: 26483 - DNA, 1040 bp, Zea Mays
ccggaaacgggagtctggagcatttccgagttgtctccaccgcgcaagcgacgagaaggcggcgcgccaccaccgctgctggcctgccgccacgactcgccggcagactaggctcctatggcgcgccgccgcgtgctgctcttcctcaagcccttcgacgtataccctccccgcccgtacgtcggagctgcggcctcttctcccacctctgcgccctcgtcactgccgcaaccgcgcgccgccaaccccaaggttgaggagctatctgatgaatttgatgcaaggaggagcacagggtatctttgtgcagctactgcaggaaactttgagcagatacttgatgtgacgcttgatggcagtaggcgccctttggagctgtcaaggatatcggtgaaactaaatggaattcagctgccgacttatgctctgaatgatatattggtgtcacacccttgtccagcaagtgtgtcgcgcttctcatttaggaaaaggaacaatacaggagagaactcgcgtttaattaattgtagatcaagcggtctgagggtctcaacagctgctggatcaactgctgccatgctatcagctggaggatttacgatgccattatcaagccgtgagcttcagtatatgataagggagcccatttctccaatggatgccgacaaagcaatgctccatgatgttcttaagcaagaacaacacatgcatgtcgtgtggtacaatcaagagggtgctgtttatgttgatggttcacacgtagtgcattcaattcagcatggggactcacttgagatatcctcaggtgctccgaccttaaaagttgttttgccagaacatttgctaaagatgggacctgaatggtgaaataacaatatttttgtgatgttccttatctatttaatatgatataggagttgagcagtgagctgagttattgggtgcttaagcggtatcaatccatgttcatgtagtgactgacagttaaacgctatcagatgaagcattagtgacaaatttgcgaggttttgtttgtagat

SEQ ID NO: 26484 - DNA, 3247 bp, Zea Mays
tcggcgaaaggacgcggagaaacgcgaacatcgttgatagcgacatgctcacggacagaaatggaggccgatctccacgtggtttgtgctgatgctgcacgggattggtagagaggcagaccgtgctaacgttgtcgcagtagacaggagtggtgcacgcgaggggctgtggagctcatgaagaagttgacggagccaggaagtctcggccacaccattggccacagcgcgatactcggcctcagcgctagagcgggagacgacgggctgccgcttcgagggaggggaggggcctggtggtgacagcagcaggggaggagggggtggcggctgctgtgggagggagaggaaaacctagctagataccatgttaggagaatgaaaccttaaccctaatatgggttgggaatatattaatatagttgagtatgtgggccaaggcccattacagaagagaaatacacaggtacgctaacatttttcatcaaacagcttggcaggcgtgcagaatctatggtgttgcccttggaattcttgcagcaattcaaggcatcagattttctctgatcctcaagagtatgaggcatggcggagtaggaatctgaagcttcttgaggctggtctacttgttcatccactcgttccattgaacaaatcagacagttctgtgcaacggttgcggcaaattatacggggtgcatatgataggccacttgaaactgggaaaaactctgagtcaatgcagggtctacgtacttgtgtcatgtcccttgctggaagatctcatgatggtacttctgatggatgccactgggcagatggcttcccattgaatctccatctgtaccaaacgttggtagaagcttgctttgataatgatgagggcactgtggttgatgagatcgatgaggtgatggagctcttgaagaaaacctgggttattcttggaattaatgagttgctccacaatctttgctttacttgggcattgttcaaccattttgttatgtctggtcaagtagatatcgagctactttctgcagcagagaaccagttagctgaagtggctaaggatgcgaaaaccacaaaagatccaaattactgtaaagtattgagctcaacattaagctcaataatgggctggacagagaaaagacttctggcatatcatgaaaccttcaatacaagtaatattgagtctatgcaaggcattgtctccattggagtgtcagctgcaagggttcttgttgaagatatatcccatgaataccgccgtagaagaaaagaagagactgatgtagctcgaagcagggtagagacatacataaggtcttcactacggacagcttttgctcaaagaatggaagaagcagattcaaaacgatcatcaagaaaccctactccagttctttctatccttgcgaaggacattagtgacctagctacgaaggagaaaaaattgtacagtccaatactgaagacatggcatcctcttgcttctggtgttgctgttgcaacccttcattcttgttatggaaatgagctgaagcagtttgtagctgggcttacagagctgacccctgatacagttgaagtacttaaatcagcagacaaattagagaaggaccttgttaatatagctgtagaagattctgtggatagtgatgatggaggcaagtcactaatcagagagatgccgccatatgaagctgaaaatgcaattgctaatctggtgaaagtgtggataaaagaaagagtagacagactaaagggatgggttgaccggaatttgaagcaagagacctggaatccaggtgccaacagggataattttgctccctcttccgtggagatgcttcgagttattggtgaaacgttggatgcatttttccaattgcctataccaatgcatccggctcttcttcctgatctgacagttgggctcgacagaagcctacagctttatgttgctaaagcaaaatctggctgcggagcacgaaattcttttatgccccaactacccccactaacgcgatgcgaggttggctccaagttattattcaagaaaaaggagaagccacaaaatctgcaggttcgtgtatcacaaaatggagcatcaaacggaaatgatcccttgggccttcctcaactctgtgtgcgcctgaatactcttcagtacatccgtggtgagtttgagaatctagagaagaaaattaaaacgagcttacgaaatgttgagtcagctcaggcagatatcactgatggattgaacatcaagtttgagctttgccaggcagcctgtcaagaaggcattcagcagatttgtgagacgactgcatataagataatagaagatgacttcagggccctcagagatctgtacttagcagatggggatggtttgccagaggaattagttgacaaggcatcctcccaggtcaagaatgtcctgcccctctttcgagcagactctgaaagtctcattgagcgattcaaacgcatgatggttgaatcgaatcggcctgcgtccaagaacaggttaccattgcctccaacaacagggcattggagtccaaatgagcctaacacagtcctgcgagttctgtgctaccggaatgatgagacagctacaaagttcctcaagaaaacttacaacctaccgaagaagatttgacttgtgggatagatcacaaaccatatgtacatgttcctgtcactacaaaaaggtttctctatgcctgtcacattctctggctgaggaccccgaggaaataccccctgtaaagtttccacatcaaaggtttcaagtgatcatcagcaagaaggtttattctgtggtgctgtagagatgtgactgggtgttttcggtggttcgtgtcattgataggttttgcggtgaagggtggatttacttacagctcgatttgttcattatattatatgtttgcctaatccagttcttttgctgaccttgcgctcgtgtaatttggttcattctagtctgcaacagctaaatccagcgtgtgaataagttgtgtactcgcgtgacactgtccggtgcttttgctgtgacaatatgcggggagcatttgtatattttactgcatcgtgcactccatctctctccatatcctcgttggatccgttcttcagtcaatcgatcctgttcaaagtgagaataatacgtggtcgagatgatgaaatgagtgattgttaacacatggttgagattagggatgaaagtggt

SEQ ID NO: 26485 - DNA, 2983 bp, Zea Mays
gtcaagagtgccatgatgttctcggagtttgttgaaggcttggcaggcgtgcagaatctatggtgttgcccttggaattcttgcagcaattcaaggcatcagattttctctgatcctcaagagtatgaggcatggcggagtaggaatctgaagcttcttgaggctggtctacttgttcatccactcgttccattgaacaaatcagacagttctgtgcaacggttgcggcaaattatacggggtgcatatgataggccacttgaaactgggaaaaactctgagtcaatgcagggtctacgtacttgtgtcatgtcccttgctggaagatctcatgatggtacttctgatggatgccactgggcagatggcttcccattgaatctccatctgtaccaaacgttggtagaagcttgctttgataatgatgagggcactgtggttgatgagatcgatgaggtgatggagctcttgaagaaaacctgggttattcttggaattaatgagttgctccacaatctttgctttacttgggcattgttcaaccattttgttatgtctggtcaagtagatatcgagctactttctgcagcagagaaccagttagctgaagtggctaaggatgcgaaaaccacaaaagatccaaattactgtaaagtattgagctcaacattaagctcaataatgggctggacagagaaaagacttctggcatatcatgaaaccttcaatacaagtaatattgagtctatgcaaggcattgtctccattggagtgtcagctgcaagggttcttgttgaagatatatcccatgaataccgccgtagaagaaaagaagagactgatgtagctcgaagcagggtagagacatacataaggtcttcactacggacagcttttgctcaaagaatggaagaagcagattcaaaacgatcatcaagaaaccctactccagttctttctatccttgcgaaggacattagtgacctagctacgaaggagaaaaaattgtacagtccaatactgaagacatggcatcctcttgcttctggtgttgctgttgcaacccttcattcttgttatggaaatgagctgaagcagtttgtagctgggcttacagagctgacccctgatacagttgaagtacttaaatcagcagacaaattagagaaggaccttgttaatatagctgtagaagattctgtggatagtgatgatggaggcaagtcactaatcagagagatgccgccatatgaagctgaaaatgcaattgctaatctggtgaaagtgtggataaaagaaagagtagacagactaaagggatgggttgaccggaatttgaagcaagagacctggaatccaggtgccaacagggataattttgctccctcttccgtggagatgcttcgagttattggtgaaacgttggatgcatttttccaattgcctataccaatgcatccggctcttcttcctgatctgacagttgggctcgacagaagcctacagctttatgttgctaaagcaaaatctggctgcggagcacgaaattcttttatgccccaactacccccactaacgcgatgcgaggttggctccaagttattattcaagaaaaaggagaagccacaaaatctgcaggttcgtgtatcacaaaatggagcatcaaacggaaatgatcccttgggccttcctcaactctgtgtgcgcctgaatactcttcagtacatccgtggtgagtttgagaatctagagaagaaaattaaaacgagcttacgaaatgttgagtcagctcaggcagatatcactgatggattgaacatcaagtttgagctttgccaggcagcctgtcaagaaggcattcagcagatttgtgagacgactgcatataaggtgatgttttatgacttgggacatgtcctctgggacaccctttatgttggtgatactgcatcaaacagggttgaggtactgttgagggaacttgaccctgtccttgagacggtatctagtatggtgcacaacaaagtgcggaaccgtgctattactgcactgatgaaagcaacttttgatggtttcttgctggtgcttcttgctggtgggcctttgcgtactttcacccgtcaagactctcagataatagaagatgacttcagggccctcagagatctgtacttagcagatggggatggtttgccagaggaattagttgacaagtctcattgagcgattcaaacgcatgatggttgaatcgaatcggcctgcgtccaagaacaggttaccattgcctccaacaacagggcattggagtccaaatgagcctaacacagtcctgcgagttctgtgctaccggaatgatgagacagctacaaagttcctcaagaaaacttacaacctaccgaagaagatttgacttgtgggatagatcacaaaccatatgtacatgttcctgtcactacaaaaaggtttctctatgcctgtcacattctctggctgaggaccccgaggaaataccccctgtaaagtttccacatcaaaggtttcaagtgatcatcagcaagaaggtttattctgtggtgctgtagagatgtgactgggtgttttcggtggttcgtgtcattgataggttttgcggtgaagggtggatttacttacagctcgatttgttcattatattatatgtttgcctaatccagttcttttgctgaccttgcgctcgtgtaatttggttcattctagtctgcaacagctaaatccagcgtgtgaataagttgtgtactcgcgtgacactgtccggtgcttttgctgtgacaatatgcggggagcatttgtatattttactgcatcgtgcactccatctctctccatatcctcgttggatccgttcttcagtcaatcgatcctgttcaaagtgagaataatacgtggtcgagatgatgaaatgagtgattgttaacacatggttgagattagggatgaaagtggt

SEQ ID NO: 26486 - DNA, 3679 bp, Zea Mays
ctctatcccacgctgcctcgctggagttgggagggggtttccctctctctctcctcctcatccccctctttctccactagagagccgggacctagcacgagagggagggagggagagagtcacgccgggaggtcaccgtcgccgccgacggccgcgatggctcgcctgttccgcgagtcccgccgcgactcgtcccccttctcctcctcctccaatggcttcctcccgccggcgtccgcttccagcccctcggtctccgcgctcccctcgccgttcccggacctcggggtcgccctctccaccgcggacctccgggaggccgcctacgaggtgctggtcgcggcctcccgcaccacgggcgggaagcccctcacctatatcccccagtcctcgtcggtggccgcgggggccacggcgtccccggcctcctccgcgtcctcggcatcctccgcctcgctccagcgctccctcacctctgccgccgccagcaagatgaagaaggcgctcgggctccgctcgtccgcctcctccaagggtgtcggcagccccgggagtggcgggaaggcggcgcccccgcgtaggcccgccacgtttggggagctcatgcgggtgcagatgcgcatctccgagcccaccgacgccaggatccgcaggggcctcctccgcatcgctgccagccagcttggcaggcgtgcagaatctatggtgttgcccttggaattcttgcagcaattcaaggcatcagattttctctgatcctcaagagtatgaggcatggcggagtaggaatctgaagcttcttgaggctggtctacttgttcatccactcgttccattgaacaaatcagacagttctgtgcaacggttgcggcaaattatacggggtgcatatgataggccacttgaaactgggaaaaactctgagtcaatgcagggtctacgtacttgtgtcatgtcccttgctggaagatctcatgatggtacttctgatggatgccactgggcagatggcttcccattgaatctccatctgtaccaaacgttggtagaagcttgctttgataatgatgagggcactgtggttgatgagatcgatgaggtgatggagctcttgaagaaaacctgggttattcttggaattaatgagttgctccacaatctttgctttacttgggcattgttcaaccattttgttatgtctggtcaagtagatatcgagctactttctgcagcagagaaccagttagctgaagtggctaaggatgcgaaaaccacaaaagatccaaattactgtaaagtattgagctcaacattaagctcaataatgggctggacagagaaaagacttctggcatatcatgaaaccttcaatacaagtaatattgagtctatgcaaggcattgtctccattggagtgtcagctgcaagggttcttgttgaagatatatcccatgaataccgccgtagaagaaaagaagagactgatgtagctcgaagcagggtagagacatacataaggtcttcactacggacagcttttgctcaaagaatggaagaagcagattcaaaacgatcatcaagaaaccctactccagttctttctatccttgcgaaggacattagtgacctagctacgaaggagaaaaaattgtacagtccaatactgaagacatggcatcctcttgcttctggtgttgctgttgcaacccttcattcttgttatggaaatgagctgaagcagtttgtagctgggcttacagagctgacccctgatacagttgaagtacttaaatcagcagacaaattagagaaggaccttgttaatatagctgtagaagattctgtggatagtgatgatggaggcaagtcactaatcagagagatgccgccatatgaagctgaaaatgcaattgctaatctggtgaaagtgtggataaaagaaagagtagacagactaaagggatgggttgaccggaatttgaagcaagagacctggaatccaggtgccaacagggataattttgctccctcttccgtggagatgcttcgagttattggtgaaacgttggatgcatttttccaattgcctataccaatgcatccggctcttcttcctgatctgacagttgggctcgacagaagcctacagctttatgttgctaaagcaaaatctggctgcggagcacgaaattcttttatgccccaactacccccactaacgcgatgcgaggttggctccaagttattattcaagaaaaaggagaagccacaaaatctgcaggttcgtgtatcacaaaatggagcatcaaacggaaatgatcccttgggccttcctcaactctgtgtgcgcctgaatactcttcagtacatccgtggtgagtttgagaatctagagaagaaaattaaaacgagcttacgaaatgttgagtcagctcaggcagatatcactgatggattgaacatcaagtttgagctttgccaggcagcctgtcaagaaggcattcagcagatttgtgagacgactgcatataaggtgatgttttatgacttgggacatgtcctctgggacaccctttatgttggtgatactgcatcaaacagggttgaggtactgttgagggaacttgaccctgtccttgagacggtatctagtatggtgcacaacaaagtgcggaaccgtgctattactgcactgatgaaagcaacttttgatggtttcttgctggtgcttcttgctggtgggcctttgcgtactttcacccgtcaagactctcagataatagaagatgacttcagggccctcagagatctgtacttagcagatggggatggtttgccagaggaattagttgacaaggcatcctcccaggtcaagaatgtcctgcccctctttcgagcagactctgaaagtctcattgagcgattcaaacgcatgatggttgaatcgaatcggcctgcgtccaagaacaggttaccattgcctccaacaacagggcattggagtccaaatgagcctaacacagtcctgcgagttctgtgctaccggaatgatgagacagctacaaagttcctcaagaaaacttacaacctaccgaagaagatttgacttgtgggatagatcacaaaccatatgtacatgttcctgtcactacaaaaaggtttctctatgcctgtcacattctctggctgaggaccccgaggaaataccccctgtaaagtttccacatcaaaggtttcaagtgatcatcagcaagaaggtttattctgtggtgctgtagagatgtgactgggtgttttcggtggttcgtgtcattgataggttttgcggtgaagggtggatttacttacagctcgatttgttcattatattatatgtttgcctaatccagttcttttgctgaccttgcgctcgtgtaatttggttcattctagtctgcaacagctaaatccagcgtgtgaataagttgtgtactcgcgtgacactgtccggtgcttttgctgtgacaatatgcggggagcatttgtatattttactgcatcgtgcactccatctctctccatatcctcgttggatccgttcttcagtcaatcgatcctgttcaaagtgagaataatacgtggtcgagatgatgaaatgagtgattgttaacacatggttgagattagggatgaaagtggt

SEQ ID NO: 26487 - DNA, 611 bp, Zea Mays
ctctctctcgtctccggcggcggaagcagaagtggaaggaagcaggcggccaccatggtgaagggacgcacgggacagcgcgtcaggctctacgtccggggcaccatcctcggatacaagaggtccaagtcgaaccagtacgagaccacgtcgctcattcagatcgagggggtgaacaccaaggaggacgtcgcgtggtacgctggcaagcgcatggcgtacatctacaaggctaagaccaagagcagcgagacccgctacaggtgcatctggggcaaggtcagagtgttcatgtacccgagcagcatctaaggttaggtttttgttggagtaaaggtggactctaaatggccatgcttagttcttctctctgagcttaaaatgccatgtgttggcaacttagattgttcatgtactgaacctgttgaagttctaccaaaatttgttgtcgaacggctgaacagttgtcctaatgttatgctataaacagagcttatttccccccgtgccatcgctgtatgattgcagtattttttctctcgccaaattttatagacatattttacacttgtttgcccatgttcgtctatcacatctgaaattgttggaaa

SEQ ID NO: 26488 - DNA, 2475 bp, Zea Mays
tttcagcgttactagtagttgtagaacctgagactaccaatgcgaccggttgattcctgctaccattttctgttgacttttctgctgttacatgaaattacaacagtttagtatgccatactgacaaaagagagtcttctgacaatatgatctgaacaaacaaaagcaaaagttccatctgcagtctgagtatgactttatgcatgcatccttgaaagcatctgacaaagaccactgaagtatatatttagtccacacagtgtcttgctgaaagccgaagcaaatataaaaaaggatatcacatgaacatggcacaaccaaatagcccatgctaatagtgacttgtgtagcatacaataaatgcagtagatcatcacaccacagatagtatcagttaatgtaccaacttacaagaggtgctctaattcattattttcatttaataaatccctgttgtaaatacaaaaatgagcactttatgttcctagtaaaagtatcgaaatgctgactggcattatttcatcacacatcctccatacttttaagttcattagtcatttagttccaattatgaaaaggtgtttcgattcatactagaataaattaattgcaagctagactccatagaaatacaaatacttcttggtgtacacagttaatggacaatctattccgcagatggtaacaaacattctagagatgagtttttctctgaagtgacatttttcttattctactttcagaaatattaactaaccaatatgaccatttttactcgttagcataacaattatgtaacatatcactgagaatgaatacctaggttagtaggctccatagcatagcatagtacatcacatgaattttcgcaaactgggcttatatttctacatgagctacagtgccatactggacacaacaaacagtaaatagcaactaaaccacaactagttcaaacaccacacctgctgacattacagcatcaaaatcagagtcaggtgtatgagtctaacgcaccaacaactatttgcaatggagaaggcaataacattctttcctgcggaaagtaactccaagttcgctatacacctcaagcgaacagtattgagccaaaaccgacacatgctaatgctattctaaaattagatactcgggaaaccactaatgacgctggtccactcacacttgctcctccagaacctgaactatcatgtgtgctgctgctcagcaagaaagatgcttgttgtacaggatttgccaacaaatcggtgatcctttgtatatgctgaaggcaatcattaccagtccatccgcaaattcaatgctcaatagaaggatataactgaaagagttgtcgatcccagctgcagcctcacatatctccctcaaacaccggcgtagtaactaccgaaaactgcacacgtcctcaggaccatttacaatcgatcagctgcaagctcaacatgaggtgacaaagtgcgacatgtgtatgttacatcattacccataacgaaatgagggcttacagtacggcgtcgcaattatggtcactagacgagcaaatcccatccaccgcgcgagcaaggcagcaaagcacaatgcggagcgagtatgcgggtgacatgagagagagacgtttaccgccgtgcgtgctggcgctgctggtggaggtgtcgaccttggacctcggcggcggcggcggcggcggcggcgggcatgttccgacgggccagaggcggatgcagcaaccggtggagacggcggtgtcgtcgtcggcgcccttggggtccgcgcggcgcctactgctgccgcggcggctgcggcggcaccagccccagcgctccctctcctccccggagctctcccacccgtcgaactgccccagctccggcggcgcgagccccataagactagggacttacctcctccgcctcctcctaatcagaacccggcaatggcccccggcaccacctctccgggcggcaagagcaccagatcggcgccgggtaatctccgcctcacgcgctgacgagcaccaagcggcccgcccgctagccgcccgagccgctggggaagagaagaataaaaaagtcactggttcccgcacgcggaagcaccgcgacccagcctccccaccgaatcacgccgggtctcgggcgccggccgcgcgattccgccgcatcgggcgtgtgtctcgcacgaggagcacctcgcgaagcccagcacggaatcaggtgcgcgcgcaagcccagcagccacggacaccgccgccgcgcgtgagctgagccgagcctagtggagcgcctcccagggaaggacagcgccgtccggcggcggcggctgtggcggtgtggccgtgtggaagtggggaataaacgaagcgaaggggaaggaataatggattgtgtcaaggaaaggaagggaaggcataggagagagaaagtggtagagagagacagggcaaagaccgcagcg

SEQ ID NO: 26489 - DNA, 1153 bp, Zea Mays
cagaaagacaaaaaaaaatgcacgtcaagcaaagaccagaccagaccagacgtgtaaacagtagagtaaaagggtgtttaaatcttaagagaacagggtcgtcaaattatcccttcaatattatgaatgtgaagccaatgcaaatctaggtaaagacttcagcccccacaaacaaaaattctattgatgtcatctgaggatatgtgactgctggggtcaactcactgagaatatctacattctacatgaactatcatgcccaataccccaatacaaacataccactaatggaaacttgacatattatccaaacaagtatggcatgcggcactaaagcattattacaacgtccctcaacgagcataacttccaaccttaatagggtgtttggtttgaggaataagctagtccatcatcttctcactcttcacttttttgtttgatttttggaatagaatgagttgattcatcaccacatcattcctcatagttaattagttagtattaacatgaggaatgaagtcatcccaccaaatttgaagaatggactcatgatgcaccacctcatctacctcatcttggatgaagtgattcctcggtgcctcatctacctcatcttggatgaagtgattcctcaaaccaaacatcccctaaatgtcttcacagaagcatcaagtgatggataactgattatctcagcgtacttaaacatcgcttttaatgcacaacaagcagatattcgattttaggacaggtaaactgaatctagtgaatgggttcgttgctcactggtagcactggcagtggccagactgctcaccagagtttgatggacactcaggtgtcgcaccggtgcaggtccatggaaaaatccattgcctcgattgcgatgccatgagaatgtaatgtgacctatggagacttggttggtactgtcaacctctctaggaaagtgatcttccttgctaactgtagttctagacttctaggtccgcctctgtgtgtgtggcgggcgtggtgtgtgcgtgttgggggcgggggtgtggaaggagtatgtacgcacatgatcagatgttacagttgtactccgaaagagagggtaagaaagaaggtagagaaaatctgacaatgtgcttaccagtcatgacatatt

SEQ ID NO: 26490 - DNA, 518 bp, Zea Mays
ctttccgtttgggacatatcgagatatatacggcagattaggatcatatagtctcggtttgtctttgtctctaagggaggttgttccttaccttctaagcaataatgtactcctagataatctcatccaaggctcaacaatataatcaagcaaccaaacccaccaatttcattcattattttgcatggtatcatggattcaagttttgatttaggcccaagacaccgctttcgcaccacgtagcctctgtcagtgacaacgccaagcccttatttaggtggtacatcctattagcctgccaccctcgccatcgctacaatgacactagtagcaccaatatatccgctatcgggtcgctcctcgtcccattttcaccaaggcaacaaccgagcctagctgtgaactgtccccgcgccatcgtggtggccgatggtggccgagccaggttgcatgtcaaccatgcactctagcaaccacctttacaacaagcggtctgtgagggagttgcaggagatttc

SEQ ID NO: 26491 - DNA, 1319 bp, Zea Mays
gcaggccgaaccagctagctagcgcgttaatgcggatggccgtgcgtagcgtcgccaagcatttcccgacggcgatcgtgagcggccggtgccgcgacaaggtgttcgggttcgtgaagctggcggagctctactacgccggcagccacggcatggacatcaagggtccggccaaggcctcttcttcccggcacgagaaggccaaggcaaaaggagtcctgttccaaccggcaacggcgagcgagttcctgcccatgatagaggctgtgcacgagcgcctggtagagacgacgcgcagcatacccggggccaaggtggagaacaacaggttctgcgtctccgtccacttcagatgcgtcgacgaaaagatgtggggcgagctgtgggagtcggtgaagggcgttctgcgggagtaccccaggctgcggctgacgcaggggcggatggtgctggaggtgcggcccaccatcaagtgggacaagggcaaggcgctcgagttcctgctcgagtcgctcggcttcgcgggctgcaccaacgtcctgcccgtgtacatcggcgacgaccgcaccgacgaggacgccttcagggcgctgcggcgccggggccagggccaaggcgtcggcatcctggtgtccaagcaccccaaggagaccagcgcctcctactcgctccaggagcccgccgaggtgatggagttcttgctgcggctcgtcgagtggaagcgcctctccaggctgagtcggacgcaatgagacgatcgacgcaacggaccaagctaactgatgcggccaagtgccagttagtagggtgtgtgtaacaactaacaagcaagcatgcgcgtacattattgcccaatagctagtgcgtgttcaattattaatataccgacctgccaagagcatgggtttgttaatcgggaacatatctggtgcaaatcaactcctctgtgcaaacatgcaaacttttaatctaggccacatgatgttgataaaatggacaaaggggcgtagataattttacacttaaccacccactactaatcacactttttcaaatccccctcccactccccccgcacggctccttggaccaacattatgtggttcagattataagttttcacggttacgcggaggagttgttttgcagcagatatgttcccttgttaatcaacgtggatgcatacaagcaaacccaagggcatgcatgtacgatgcaattattgcaatggacgcgaatcatccagtttctatataatttattatactgccatatcagcattttagtgatgtggtaagagttttaatgaggaaagagaa

SEQ ID NO: 26492 - DNA, 2091 bp, Zea Mays
gcgtcaccccgtcgcctcccctcccgcaggccgcatctataaaaaaaagcgagctgcgatcctcccgcctagtctcctcaacgcatccacgacgacaacaccaatcattcctttccaatctgcagccagcctctgatcgccgtcgaccgaccgatcggatgccgatggcgaagccgagcgtggcggtggcggaggcttccggcgtcccagcgcaggcgtcgtgctcgtgcccctgcccggggacgacgctgttcccgtacccgccgccgcgcggcgccagcgggatcgcagccgccgccgtgcgccgcaagtgcttgcaggcggaggtgggcggcggcgcctgctggggcgtggagtccatgcgggcgtcgtcgcccacgcacgccagggccgcagccgcgctcgccggcgccggcgccgacgaggaggaggagcgcgccgcctggatggcgcggcacccgtcggcgctgggcaagttcgagaggatcgtggcggcgtccgagggcaggcgcatcgtcatgttcctggactacgacggcacgctgtcgcccatcgtggacgaccccgacgccgccttcatgagcgagacgatgcggatggccgtgcgtagcgtcgccaagcatttcccgacggcgatcgtgagcggccggtgccgcgacaaggtgttcgggttcgtgaagctggcggagctctactacgccggcagccacggcatggacatcaagggtccggccaaggcctcttcttcccggcacgagaaggccaaggcaaaaggagtcctgttccaaccggcaacggcgagcgagttcctgcccatgatagaggctgtgcacgagcgcctggtagagacgacgcgcagcatacccggggccaaggtggagaacaacaggttctgcgtctccgtccacttcagatgcgtcgacgaaaaggttcgcccgcccgcccgcaataattagccaaaacagccgtcgttttcagctttatctggctggctgctctcgcccccgtgcccccctccacttgtgcgtattgctgctatacgccctccattggcaaacactagacctaataaataagctacgagacgcatcgtcctaactgacatgatgatctatggtcgattcgatcgatggtgttcagatgtggggcgagctgtgggagtcggtgaagggcgttctgcgggagtaccccaggctgcggctgacgcaggggcggatggtgctggaggtgcggcccaccatcaagtgggacaagggcaaggcgctcgagttcctgctcgagtcgctcggcttcgcgggctgcaccaacgtcctgcccgtgtacatcggcgacgaccgcaccgacgaggacgccttcagggcgctgcggcgccggggccagggccaaggcgtcggcatcctggtgtccaagcaccccaaggagaccagcgcctcctactcgctccaggagcccgccgaggtgatggagttcttgctgcggctcgtcgagtggaagcgcctctccaggctgagtcggacgcaatgagacgatcgacgcaacggaccaagctaactgatgcggccaagtgccagttagtagggtgtgtgtaacaactaacaagcaagcatgcgcgtacattattgcccaatagctagtgcgtgttcaattattaatataccgacctgccaagagcatgggtttgttaatcgggaacatatctggtgcaaatcaactcctctgtgcaaacatgcaaacttttaatctaggccacatgatgttgataaaatggacaaaggggcgtagataattttacacttaaccacccactactaatcacactttttcaaatccccctcccactccccccgcacggctccttggaccaacattatgtggttcagattataagttttcacggttacgcggaggagttgttttgcagcagatatgttcccttgttaatcaacgtggatgcatacaagcaaacccaagggcatgcatgtacgatgcaattattgcaatggacgcgaatcatccagtttctatataatttattatactgccatatcagcattttagtgatgtggtaagagttttaatgaggaaagagaa

SEQ ID NO: 26493 - DNA, 299 bp, Zea Mays
tataaatacccatgaataagttcttcataaccggctgcctggtgtggatacagatagacaggaatctgatgaaccaccatcagtatatatcttcatcaacaaaagcatgtgtcaccttgcttctatagagaagtatgtgaatgctacatggtgggaataggacgttgatcagtgatcaggagaagtcgcatgcctggcgaacttgaggtgctgcacctgctcgctggatgcttttctgatttggaactgggaataatttttttcccaacgagtgtccatgtcttgttgtatgtaacaga

SEQ ID NO: 26494 - DNA, 1571 bp, Zea Mays
cttggttctagggtagcagccctaggcgcttgagagggtcattgcaagggagagagattggtttgttaatgatcttgcttgatttattccctgctgccatgcggcttataaatagccctatggctaaccaacttcccctacaaactctcaactaactcctactttcttggacttatctgatgctaaccaactctccacaattctcccatttcaatcttattctctaaccttatcccagttcgtctcaatcttattctctagccttatcccagcctggccgttgcctctcgctccctattatgcccatgacatggaacaatgtcattgctttcttttgctgtgaaatcgaacatcatggttgcatttgaataaaatctttggcttatgtgtgaacaatttcttttgaggaaatgaaccttgccttgccaatatttggcctgtatgaaaatggacaaccagtgggattttctgcaatcatttggggacatgcaacaggttaatcccatgcaatttacacaactcatgcaaatgggagtagaacctgtcagggatgcaaaccttggagacccaccagttttcccatagtcacaagcagaacaaccaagtggaaatcaaccttcaaggtgtaaccagagggggaagcaataccacttcagtattgaggagtacaaaatcttggtttcttgctggcttaatgtcagccttgatcctatatttggtgctggacaatggaaggcgtcattttggaggactatagaataaaactacaactctcagaaatcaacaggacatccagtccgcacacttaggagtttggaatggaggtaactacagctataaacctttacaatagcatcgaatgcaagcctataatcaccacccattgctgggagattcttagaaatgaggcaaaatggttggatttgtagaggaaggctactcaggtcatggaagagttggtaaagagaaagtagtatatgttccagactccataaatggcgatgacgaaactgatgacactagtcgaggaacttagaggcccatgggaatggacgctgcaaaggctacaaaaagaaacgtttccaatgaaaccttcatccaatctagctcagagtacacgagtttgatgttaaacttgcatctggagcggatttgagcatataaagaagtgcaaggtgttatggctgtgaacgttgaccaacttattacagttcaagagaaatctttcacccaaaaacaggagattgtcaagcaggtggttgaattgaaaaaggaaatgggaggtcgaagcagctgagaaggcaactctcgaagaagatagaatcatgaatcttgatcgaaacaccctaagtggtccgcaaagggcctactatgaggctcaacaatgtcgtattttgcaatgtgtttacatactttgtgagcgttatttatgttcttacatactttgttttgaattcatgcattgcaaacatttatagctggcttcgtccaactataagcttgtatttgtgagactcagttttgtgacaaattaagtatttcgaacgatggcaactatattgcatttgaat

SEQ ID NO: 26495 - DNA, 1209 bp, Zea Mays
ctcggatgaacctgtcagggatgcaaaccttggagacccaccagttttcccatagtcacaagcagaacaaccaagtggaaatcaaccttcaaggtgtaaccagagggggaagcaataccacttcagtattgaggagtacaaaatcttggtttcttgctggcttaatgtcagccttgatcctatatttggtgctggacaatggaaggcgtcattttggaggactatagaataaaactacaactctcagaaatcaacaggacatccagtccgcacacttaggagtttggaatggaggtgggagcaagacaacgaattcgaaagccattatattttagtttacatgaaaatcgaagtgggcacaacgacagggacaaactaagatttcagtccttaatgttatgcttaatgtattgtgaaataatcaagtacctacttcctattgtatgcacctattgattgcaggtaactacagctataaacctttacaatagcatcgaatgcaagcctataatcaccacccattgctgggagattcttagaaatgaggcaaaatggttggatttgtagaggaaggctactcaggtcatggaagagttggtaaagagaaagtagtatatgttccagactccataaatggcgatgacgaaactgatgacactagtcgaggaacttagaggcccatgggaatggacgctgcaaaggctacaaaaagaaacgtttccaatgaaaccttcatccaatctagctcagagtacacgagtttgatgttaaacttgcatctggagcggatttgagcatataaagaagtgcaaggtgttatggctgtgaacgttgaccaacttattacagttcaagagaaatctttcacccaaaaacaggagattgtcaagcaggtggttgaattgaaaaaggaaatgggaggtcgaagcagctgagaaggcaactctcgaagaagatagaatcatgaatcttgatcgaaacaccctaagtggtccgcaaagggcctactatgaggctcaacaatgtcgtattttgcaatgtgtttacatactttgtgagcgttatttatgttcttacatactttgttttgaattcatgcattgcaaacatttatagctggcttcgtccaactataagcttgtatttgtgagactcagttttgtgacaaattaagtatttcgaacgatggcaactatattgcatttgaat

SEQ ID NO: 26496 - DNA, 1339 bp, Zea Mays
gtgaactgatcatcccctccgcatccaatcgttcatgcacttgtctccccctccacatcgcgtgagtacttttccctatgcccggtgaactctctcaccctcgccactcggccattggtgcgcgcgggcgtcgaggaatcaccacgcaagcgacaggagtcgggactggcgtcggacgacaaggattcgaattgacgacgacaacgatcgtgtttggtgcgtcatgcggttgagttgttggctaggtgtccctcccccatcgccaccggatcgagcggcggtggtccagggaagcgcggatccggcggagtccatcggctcgcgcgactctgcaacgctagatcctcgacgccgtcgacgtccatgagctgcgtcgacgaccggcgaggtggagcgtagaagaagcattcatcgatccacacgacatcgtcgtagatctccttcctccaacaatcacggccaagcgaaacaccttcgtctcggatggtgctggacaatggaaggcgtcattttggaggactatagaataaaactacaactctcagaaatcaacaggacatccagtccgcacacttaggagtttggaatggaggtaactacagctataaacctttacaatagcatcgaatgcaagcctataatcaccacccattgctgggagattcttagaaatgaggcaaaatggttggatttgtagaggaaggctactcaggtcatggaagagttggtaaagagaaagtagtatatgttccagactccataaatggcgatgacgaaactgatgacactagtcgaggaacttagaggcccatgggaatggacgctgcaaaggctacaaaaagaaacgtttccaatgaaaccttcatccaatctagctcagagtacacgagtttgatgttaaacttgcatctggagcggatttgagcatataaagaagtgcaaggtgttatggctgtgaacgttgaccaacttattacagttcaagagaaatctttcacccaaaaacaggagattgtcaagcaggtggttgaattgaaaaaggaaatgggaggtcgaagcagctgagaaggcaactctcgaagaagatagaatcatgaatcttgatcgaaacaccctaagtggtccgcaaagggcctactatgaggctcaacaatgtcgtattttgcaatgtgtttacatactttgtgagcgttatttatgttcttacatactttgttttgaattcatgcattgcaaacatttatagctggcttcgtccaactataagcttgtatttgtgagactcagttttgtgacaaattaagtatttcgaacgatggcaactatattgcatttgaat

SEQ ID NO: 26497 - DNA, 1250 bp, Zea Mays
ctagactactcgcgtcggtgaactgatcatcccctccgcatccaatcgttcatgcacttgtctccccctccacatcgcgtgagtacttttccctatgcccggtgaactctctcaccctcgccactcggccattggtgcgcgcgggcgtcgaggaatcaccacgcaagcgacaggagtcgggactggcgtcggacgacaaggattcgaattgacgacgacaacgatcgtgtttggtgcgtcatgcggttgagttgttggctaggtgtccctcccccatcgccaccggatcgagcggcggtggtccagggaagcgcggatccggcggagtccatcggctcgcgcgactctgcaacgctagatcctcgacgccgtcgacgtccatgagctgcgtcgacgaccggcgaggtggagcgtagaagaagcattcatcgatccacacgacatcgtcgtagatctccttcctccaacaatcacggccaagcgaaacaccttcgtctcggatggtaactacagctataaacctttacaatagcatcgaatgcaagcctataatcaccacccattgctgggagattcttagaaatgaggcaaaatggttggatttgtagaggaaggctactcaggtcatggaagagttggtaaagagaaagtagtatatgttccagactccataaatggcgatgacgaaactgatgacactagtcgaggaacttagaggcccatgggaatggacgctgcaaaggctacaaaaagaaacgtttccaatgaaaccttcatccaatctagctcagagtacacgagtttgatgttaaacttgcatctggagcggatttgagcatataaagaagtgcaaggtgttatggctgtgaacgttgaccaacttattacagttcaagagaaatctttcacccaaaaacaggagattgtcaagcaggtggttgaattgaaaaaggaaatgggaggtcgaagcagctgagaaggcaactctcgaagaagatagaatcatgaatcttgatcgaaacaccctaagtggtccgcaaagggcctactatgaggctcaacaatgtcgtattttgcaatgtgtttacatactttgtgagcgttatttatgttcttacatactttgttttgaattcatgcattgcaaacatttatagctggcttcgtccaactataagcttgtatttgtgagactcagttttgtgacaaattaagtatttcgaacgatggcaactatattgcatttgaat

SEQ ID NO: 26498 - DNA, 404 bp, Zea Mays
cacagccacagcccaaccaaacagacccaaaagctctcttggagactcaaaaagttgcacgtacccgtctctctgccatcacagggaactaagcgagtgaaaccccgccgtcgctactgtccttcgccggcgtcgtgactagactttccatgctgaaacccgagggcctgttgggcgcggacaggcttcggctcccaccgaatttggcgaatcttgccccggagtcgagcaattcctcgtcgtggtgctcctctactgcggcagccgctgtaccgcgtggtcagtcctcgtcgtcgctccagcccctcggtgaagagcaggtggtccaggaggagtcctataatgaggagtacgagttgatctaggtggcgtctcccagtcaacttaatggcgccaaggaataa

SEQ ID NO: 26499 - DNA, 396 bp, Zea Mays
cccacaacaacttttttcacagccacagcccaaccaaacagacccaaaagctctcttggagactcaaaaagttgcacgtacccgtctctctgccatcacagggaactaagcgagtgaaaccccgccgtcgctactgtccttcgccggcgtcgtgactagactttccatgctgaaacccgagggcctgttgggcgcggacaggcttcggctcccaccgaatttggcgaatcttgccccggagtcgagcaattcctcgtcgtggtgctcctctactgcggcagccgctgtaccgcgtggtcagtcctcgtcgtcgctccagcccctcgacgagcaaggcacaaaagatccgggtgttcagtaggtggagactgctgagcaggagctcgttgaaggcaa

SEQ ID NO: 26500 - DNA, 3047 bp, Zea Mays
aatgtgttatgtggtactatcctagtattgctactttattcaatgatccatgatattattgaatggatgattgaatgatgctcaatcttttgtaatgatatttagattgatatacttgatgtttgtatattgtattattttgataaagttttaatctttatgagtacaagtgactcgatgggagacccatacccacatgggtatgaatatggggataaatctattgtcattagtgaatatgggtgatccgacgagtttatttttttacaggtatggatatgagatagcattgccaatgccgtctctaatcacagctccaaacgataaaaaccgaacgtctcagagctttgcctgggccaagcagcctttgttccttcgaaaccctgcctggctcgcttttggtagcccacgcgaaccgggccgcttttcagccctccgctcctgcgtcctccccttccactcgtatacaaccacccacctgagccgcacccacgctcaccgtacctcctccgaatccgccgaccgccggcgagcccctcctcctccacgacacgcgcttccccgccccctgcgcccacatcgcgcgagatgcaatctgccgccaggctcttcgctgcggccgcgccgggaagcccgcgttctctcctattcctgcgcggcctctgctctgcctcgccggctggacagccggatccgcggccctatccggccccggaccccgaccccgaccccgacccgcggctcgttggcgctctctgccgtgtgctcagcgacttccgcgggccgcggcacgacctccgcgccgcgctcagcggattcgcgccccgcctcacgcccgcggcggcggctgccgtcctgcgccgctgccgtaaccttcccgtgccctccctccggttcttcctcttcgcggctgcgatgccggggttcacacaccttccggactcgctcctcatcctcgccggctcgcttgcgggggcgcggctcttcccgcttctgcgctctctgctctccgatctcccgcggtctgcgctctcgcgggacctgtttccgctgctgttccgcgcgtacgcccgcgccggtctacccgaggatgccatccgagctttctcctccatggagaggttctgtttcctgccgacggtcgctgatctccactcgctgctcttcacgttatcgcataatggcctggtggagcacgcagaggcattctttagggagtcgccatttcagtttgatctctcggccaaaacttataccatcctgatctctgggtgggctgttgttgcgagtccagtgaaggcccaaaagctgtttgacgaaatgattgagagaggggtccaacctgatgtgcctgcctataatgcgttgattgacgccttgtgtcgaggaggggatgttgcacttgctcaggagcagctaaaagatatgcaacgcagccgtgggcttgcccctgatgctgccacttacggcccattccttcgatctgcatgtgcgtcaaaggatgcccgtgctgctcttcgagtgctagataggatgcgtgcacgcagccttacaccaaatgtattcacctataatgctgtcattcggttactgtgtgagttgggagaggttgatgaggcttataatatcctcaatgagatggcaacttatggggagaagcctgatgtctggagctacaacactctgcttaatacacattgtaagctgaaagaggtgaataaagcgttgcggctcatttcaaggatggatgatagctcatgtttgcctaatcggcactcttacaacatgattctgaaaatgttgcttgcgataggaagggttgatagggcaattgaggtttgggatgggatggaaaaacatggtttctacccaggagcagctacttatgctgttatgatccatgggctgtcttgcaagaagggtagagcagaggaggcctgcagttattttttgaggatggtagatgagggtatccctccttaccaggctacttgtcaggttctgagggataggctgctcaggcttggcttgcgagatgatcttgagatgctcactgataggatgcgacggagcacatcctgcacaatacaagatttggcaagtatcatgtgcagtaagagggcagaggaaactagaaatctgaaatgcgaccatgaattctcttgccttgatcttgctgagagccagtggatggagaaatggaaaataggagacacctcctcgtagggggaggtttaatgggtataagaatctctgttatcccgttgatgatggcactcataacttggctagttggctctgcaatttcttactgggctatcatggattcagatccatcatcacagaacccaacagatatgactgcatttgtccagaacctccttggacagatgcaaacaaggttcgagtccatgtcgcagaacattgtgtcaaagatagatgaaatgggaaccaagattgatgagctcgagcagagcatcaacgatctcaaagctgagatgggcactgagacgccggtcaagaagcctgatgagccaaagcctgctgactctgcctaacttgggtgtaacccagagattgttgtgtgaagatttgatgatggtgtgacaaatttcagcagtacgtgatcgtatctgttttcatgagtcctggcagttatgtagacacgaacccatcgtatgaaagatgaatccatgtttgggctctccagacatcaacgcatgttcttagcttttctgtcatctttcggcaactatttgtttgactgttataagatgttatgcaacatctactccatttgaagtaattgtcttgtgtagagcagtctgctgctgcttgtttgctgataactcatggcggctgttgtctgttttgtccaaatgacatcgaacgtacgagtcatatgagcttatgtcggttgtgccgtttattggcacaatctggcgctgcaatactggcaaatttaccgtgtggttgtggtggactgatactttggatatcatacgaatatcctcgacttgtggagtggggaaccatgataaaaaaag

SEQ ID NO: 26501 - DNA, 1475 bp, Zea Mays
gacgagggtgggatcttggatccaacggcggtgggggacaggcctgcacagaaaaacacactttatgcagagcaacgataaaacatttaagcatacttgtgtgttttttgtccatgacccatcactgggacaaaaatagatgtaaggtgagtaggtgaacacatactgatatattttttagaagctggaaactgacatcctttgccatgtaagctttcggatgtcacttcccttcagaccagttaaggcttcgttcgtttctacccaaccagaccaggttgaggctggattggagctcaatccagggacggtcctggattggagccaagtctccaggggtctggaacaaatcccgcgagactaaggagcggcggcggcgcaaagaagacgagtcatcctcctcgtcgtcgacgacctctactgctggcgagcttctctccgattgtccctgctccagcaagagtaggcgaggacgagcctcccccatcctaggtgttggtgcctgactcattttatcaagacaggaaatattggtcatatggagatagttctgcacagcgttctgagtctgcatgtgccagtatgagctatatatatgttgcatttctccatgtttgggctcagcatgtaatagaactgaaggaaggttgttgcaagacttgtatggcatgcttaaatttctggataaaatctagcttatactaagtctattacatgtttaaatttttgaaaaaaaatgtatcgagaattggatggaatgcttaaatttctagagaaatgacatgttctatgcttaaatttctggattaatgacatgttttatgcttaaatgttgttgattttattggcttttgttggtatttaagattagaatttaatccacatggaataaacgaacaaacatagttatttgggttttgggatataatccatatggcataaacgaacaaacattggttgattgggttttgggatttaatcccacaagggattgggtgaaagtcttggattcacccaatccatgtgggggaaaaaatcaacccgggaaagaatcccagattgccgaacaaaggcctaacatgggttacaacccaatttgcaaggtcattgtgtactgacaaggaatactattggcaaataatgttcatcagcatagcagttgcgaccaccttccatcccaggatgaatacaaattaataaaaggccacatctatattttagatcaaaaaatattgttagtgcatgtttttttggtatactctgtcaattccaaaatataggtgtggtttgatttggcacaatctcaaagcatttaaatattgtttttttgcgccgcaaaaggacaaacatgtatttggttttgatcatatactacataaagaagttagtaaatagatgacaatctcactctgcaatgaagcttgaaattagtatagtaaagactatctgcaataacctgtgcctgctggcgtttg

SEQ ID NO: 26502 - DNA, 905 bp, Zea Mays
ctgtgatctacttacatttagtgctctgtttggataggaactcctaaacttgatagcgattcttcgccgatttagcaattgatatggtagtatgaatcaactaggagcttgatgagattgtttgatgacgattgtattagagtggactaatcaggtcctgttgtattttgtaccatatctagatcatggatggacaatcatacttaacaaggacgtaacaatcggacaatttgccttatcaaggagctacatttggaagaaggctggactaacacacatgcagtattttgtttagtcatttctttaatcttttatccgataatgtatttgatgccctatccctccattgtagactcttcacatacagggtatcatctgtcctccatgtagtgaattgtcagttgtgttcatgtgccctgagaaccacttgtgctctcttcgttccttcgctcagctgatttgtttacatgactcatccatgtcttgatgccttcttttgcagtcgtttttggaatccttggcaggcgactcaattctatatatggaatccccaagggccaagtcacattctatggccatttggtgtggtgccttgcgcaactctggcggcctgataattgctttttgcaaactctcgtcctgcagatttttcgctgtgacagtccatcacgaatcactggccctttttaatttgtggtgatgatgagtgattattgctgacagccagtgtgttttagactagtgtgggctgagcataaaactgactgcttctgttcaggctctgcaaaagatccacaaaaaaaatgatagcattgccggggctcaagattgaacagccccctaataactgggcaaaagggtcatttgtggagtgagcgtcggtcggtcatcgatgaaaaggtcag

SEQ ID NO: 26503 - DNA, 1024 bp, Zea Mays
gtaacatactcttcgactggatcttgatctcgcttctcagttctaaatcctgtgatctacttacatttagtgctctgtttggataggaactcctaaacttgatagcgattcttcgccgatttagcaattgatatggtagtatgaatcaactaggagcttgatgagattgtttgatgacgattgtattagagtggactaatcagggagccccctgttttatgccaagatgatcttcttgctgcctgattttctgccatctgcttaccacccgtggtcctgttgtattttgtaccatatctagatcatggatggacaatcatacttaacaaggacgtaacaatcggacaatttgccttatcaaggagctacatttggaagaaggctggactaacacacatgcagtattttgtttagtcatttctttaatcttttatccgataatgtatttgatgccctatccctccattgtagactcttcacatacagggtatcatctgtcctccatgtagtgaattgtcagttgtgttcatgtgccctgagaaccacttgtgctctcttcgttccttcgctcagctgatttgtttacatgactcatccatgtcttgatgccttcttttgcagtcgtttttggaatccttggcaggcgactcaattctatatatggaatccccaagggccaagtcacattctatggccatttggtgtggtgccttgcgcaactctggcggcctgataattgctttttgcaaactctcgtcctgcagatttttcgctgtgacagtccatcacgaatcactggccctttttaatttgtggtgatgatgagtgattattgctgacagccagtgtgttttagactagtgtgggctgagcataaaactgactgcttctgttcaggctctgcaaaagatccacaaaaaaaatgatagcattgccggggctcaagattgaacagccccctaataactgggcaaaagggtcatttgtggagtgagcgtcggtcggtcatcgatgaaaaggtcag

SEQ ID NO: 26504 - DNA, 1612 bp, Zea Mays
cccaattcccggtcagttcgtgtttcccggaaaaaacccagcgccctccccaccgccgcccgcctccctcgcctcctatcggaatccatcccgatggcgcaaggcaccgtgccgtccgcagccggggccggcggaggcggctgcgcctcggcccccgccgtctccacgaccccccctggcacgccacgggcctccgcggcagccgcgccgccaccgcctcctccctccttcgcgactggattctactacgccgtggagctctacttcgacccggcgctagagaaccaggtgctcaaggcgtggaacgcgctggcgcggcggcaacttggcagccgcctcatcgacgcggccgctcgcccgcacctcccgctgctccacctccccgccgccgcgctcccgccgcctggcaccggcgcgggcggggacccgctcctccgcctcgcaccctcgctccgcgcgctcgcgtcgcgcctcgacccgctcgcgctcgcgctctcctcgctcgccgcgctcccggcctccgccacctcctctccacacgacaacgttctcttcctcgcgcccactccgtctgccgcgctgctcggcctccatgcgcagctctgcgaactgctgcggaaggacgctggcgtcgagatccccgacccgttccggccggaccactggctaccacggtgcgccgtcgccatcgacgtgccacgcggccgcatggccgaggccttctgcgtgctccgagagctaaagctgctccccgtctctgggtacgggatggacatcgcgcttgtcgaggtcggggcaaccgtcagggagctcgtgtgctacccgctcggcggcagcggtagcactggagccgactgagaggtcctgttgtattttgtaccatatctagatcatggatggacaatcatacttaacaaggacgtaacaatcggacaatttgccttatcaaggagctacatttggaagaaggctggactaacacacatgcagtattttgtttagtcatttctttaatcttttatccgataatgtatttgatgccctatccctccattgtagactcttcacatacagggtatcatctgtcctccatgtagtgaattgtcagttgtgttcatgtgccctgagaaccacttgtgctctcttcgttccttcgctcagctgatttgtttacatgactcatccatgtcttgatgccttcttttgcagtcgtttttggaatccttggcaggcgactcaattctatatatggaatccccaagggccaagtcacattctatggccatttggtgtggtgccttgcgcaactctggcggcctgataattgctttttgcaaactctcgtcctgcagatttttcgctgtgacagtccatcacgaatcactggccctttttaatttgtggtgatgatgagtgattattgctgacagccagtgtgttttagactagtgtgggctgagcataaaactgactgcttctgttcaggctctgcaaaagatccacaaaaaaaatgatagcattgccggggctcaagattgaacagccccctaataactgggcaaaagggtcatttgtggagtgagcgtcggtcggtcatcgatgaaaaggtcag

SEQ ID NO: 26505 - DNA, 1769 bp, Zea Mays
caagtttttatttagaagaaagaaatttggagtccgagtcagctacccccgactcggttcgtgacgactgacgacgagtgacgagatcccaattcccggtcagttcgtgtttcccggaaaaaacccagcgccctccccaccgccgcccgcctccctcgcctcctatcggaatccatcccgatggcgcaaggcaccgtgccgtccgcagccggggccggcggaggcggctgcgcctcggcccccgccgtctccacgaccccccctggcacgccacgggcctccgcggcagccgcgccgccaccgcctcctccctccttcgcgactggattctactacgccgtggagctctacttcgacccggcgctagagaaccaggtgctcaaggcgtggaacgcgctggcgcggcggcaacttggcagccgcctcatcgacgcggccgctcgcccgcacctcccgctgctccacctccccgccgccgcgctcccgccgcctggcaccggcgcgggcggggacccgctcctccgcctcgcaccctcgctccgcgcgctcgcgtcgcgcctcgacccgctcgcgctcgcgctctcctcgctcgccgcgctcccggcctccgccacctcctctccacacgacaacgttctcttcctcgcgcccactccgtctgccgcgctgctcggcctccatgcgcagctctgcgaactgctgcggaaggacgctggcgtcgagatccccgacccgttccggccggaccactggctaccacggtgcgccgtcgccatcgacgtgccacgcggccgcatggccgaggccttctgcgtgctccgagagctaaagctgctccccgtctctgggtacgggatggacatcgcgcttgtcgaggtcggggcaaccgtcagggagctcgtgtgctacccgctcggcggcagcggtagcactggagccgactgagagggagccccctgttttatgccaagatgatcttcttgctgcctgattttctgccatctgcttaccacccgtggtcctgttgtattttgtaccatatctagatcatggatggacaatcatacttaacaaggacgtaacaatcggacaatttgccttatcaaggagctacatttggaagaaggctggactaacacacatgcagtattttgtttagtcatttctttaatcttttatccgataatgtatttgatgccctatccctccattgtagactcttcacatacagggtatcatctgtcctccatgtagtgaattgtcagttgtgttcatgtgccctgagaaccacttgtgctctcttcgttccttcgctcagctgatttgtttacatgactcatccatgtcttgatgccttcttttgcagtcgtttttggaatccttggcaggcgactcaattctatatatggaatccccaagggccaagtcacattctatggccatttggtgtggtgccttgcgcaactctggcggcctgataattgctttttgcaaactctcgtcctgcagatttttcgctgtgacagtccatcacgaatcactggccctttttaatttgtggtgatgatgagtgattattgctgacagccagtgtgttttagactagtgtgggctgagcataaaactgactgcttctgttcaggctctgcaaaagatccacaaaaaaaatgatagcattgccggggctcaagattgaacagccccctaataactgggcaaaagggtcatttgtggagtgagcgtcggtcggtcatcgatgaaaaggtcag

SEQ ID NO: 26506 - DNA, 2434 bp, Zea Mays
gtcggtttcggcatttcttggccccaaagcacgcgcgcgctaatgccttcgtcgccaacatcgcctactcgcttcgcgttgtcgtcccctttacttgttggacagcacctttaggtggcgcgtctcgtcgtccttgcttcccaagagaccgtcgccttacatctatcgctcgctgccttattgcctgcacctccgtgctgtgctgtactgcacctccgtgctgcgctccgaggctgctgctgctgcagagcaagtgcttctttcctcacaaattaaagcgtatagtcctgtgcgacgcgtgtgccgacggccggagcaaggaatagatctcgggtcctggtcacgggaaggtatcttggaagagctggatacaaggaaagttgtgagggcggccgccgccggccttggaattagttcgttctttcaactggagctatactagtaggagggcatttaagatgttcaacatagtttcgtcgtggaacaagaggcggagaagcaggtcactcgaccagctaaatccctgggtgtacaagccggctgagctatggcaggcgaaggagcaggagcaccaccacccgccgcccaagaagcgcagctgcaccatggtgttcacgctcaaggagatggaggaggcgaccaacctgttcagcgaccgcaacctcatcggcaagggaggcttcggccgggtttacagaggcgtgctcaaggatggccaggtgctacgcttggcctctctctcaccattgcttttcttttttcatttttcattttttgtcggcgcgggtcttgttctcgtgtttggttaagctgcggcgttgatgtcaaataatcgagccttttgtccaatgattcagcttggaagagaagctgttgtttgttgttgcatgtgtatctgtgggacatttcgtcttaattaaatatccaccgatgaagaaaacgtagtggcaaccaccaccggtcagattttgccactcatcatcagctgattcttccacaccagagctcactagtcgctagcctcagtaataattcatgcatgaactacacgcatggttcaggagttgcgtcagctgctctgactgtatacaactgaatgtctgaatccttctgtgaagatcgtcgccgtcaagaagatggagctgccgacttgcaagcaggccgacggcgagcgcgagttccgggtggagatcgacatcctgagcaggctagaccaccccaacctggtcacgctcatcggctactgcgccgacggcaagcaccggttcgtggtgtacgagtacatgcccaggggcaacctccaggacatcctcaacggcattggggaggtgaggatggactggccgctgcgcctgcggatcgcgctgggagcggcgcgggcgctggcctacctgcactccagcacggccgtcggcgtccccgtcgtccacagggacttcaagtccagcaacatcctcctcaccgaccactacgaggcaaaggtagtaggtcaccacatcctccttcacgttccggccacggccatatatctctgctctactgctatccacatctgaatgcgtttcgccggccggccggccggatcggatcggaacccctgcccagatctcggacttcgggctcgccaagctgctgcagcaggaccaggacctgcacaccaccaccagggtgctgggcacgttcggctacttcgaccccgaatacgcgctgacagggaagctgacgctgcagagcgacgtgtacgcgttcggcgtggtgctgctggagctgctgacggggcggcgggccatcgacctgagccaggggccgcaggagcagaacctcatcgtcggcatccaccaggcggtgggcgaccgcaagaagctgcgcaaggtggtggaccgggacatgcccaggggctcctacacgctggagtcggtgtccatgttcgccgcgctcgccgcgcgctgcgtctgctttgacagcgccggccgcccgcccatgcaggactgcgtcaaggagctccagttcatcatgtacgctaacatgaagatatgatcactctcgcgggtgcaaaccgcgcgtgggttttctttacttttgagacggggggcggggcatgcggatgcggctgctggattgcaattgcaggtccgcagcttttgtttggttgatgaaacgaattgtctaaaagggctttatacagttacatagtagtgcttgtttggtagagcttgtagctctagccaaaccagttctactagtgatttctcccatgaagtagatctgtgtgactctgatttatccagttagaaaaaacgttcgttagaataatttttattggtataaaaaaatcgtgtacttacacagttgcattgactaggcatggcaatttcaaccgaaaacgttttcgatgggtatatctgacctgattcatgtgggtatggatgaagac

SEQ ID NO: 26507 - DNA, 2027 bp, Zea Mays
cagacgtccacgtcgccactcaccagttcgccacggcagcaccaccaaccaaacaagcagctctccctccctcccacttctcattcaaacaacaaagctccctgcgataaaccgtcgtcggtttcggcatttcttggccccaaagcacgcgcgcgctaatgccttcgtcgccaacatcgcctactcgcttcgcgttgtcgtcccctttacttgttggacagcacctttaggtggcgcgtctcgtcgtccttgcttcccaagagaccgtcgccttacatctatcgctcgctgccttattgcctgcacctccgtgctgtgctgtactgcacctccgtgctgcgctccgaggctgctgctgctgcagagcaagtgcttctttcctcacaaattaaagcgtatagtcctgtgcgacgcgtgtgccgacggccggagcaaggaatagatctcgggtcctggtcacgggaaggtatcttggaagagctggatacaaggaaagttgtgagggcggccgccgccggccttggaattagttcgttctttcaactggagctatactagtaggagggcatttaagatgttcaacatagtttcgtcgtggaacaagaggcggagaagcaggtcactcgaccagctaaatccctgggtgtacaagccggctgagctatggcaggcgaaggagcaggagcaccaccacccgccgcccaagaagcgcagctgcaccatggtgttcacgctcaaggagatggaggaggcgaccaacctgttcagcgaccgcaacctcatcggcaagggaggcttcggccgggtttacagaggcgtgctcaaggatggccagatcgtcgccgtcaagaagatggagctgccgacttgcaagcaggccgacggcgagcgcgagttccgggtggagatcgacatcctgagcaggctagaccaccccaacctggtcacgctcatcggctactgcgccgacggcaagcaccggttcgtggtgtacgagtacatgcccaggggcaacctccaggacatcctcaacggcattggggaggtgaggatggactggccgctgcgcctgcggatcgcgctgggagcggcgcgggcgctggcctacctgcactccagcacggccgtcggcgtccccgtcgtccacagggacttcaagtccagcaacatcctcctcaccgaccactacgaggcaaagatctcggacttcgggctcgccaagctgctgcagcaggaccaggacctgcacaccaccaccagggtgctgggcacgttcggctacttcgaccccgaatacgcgctgacagggaagctgacgctgcagagcgacgtgtacgcgttcggcgtggtgctgctggagctgctgacggggcggcgggccatcgacctgagccaggggccgcaggagcagaacctcatcgtcggcatccaccaggcggtgggcgaccgcaagaagctgcgcaaggtggtggaccgggacatgcccaggggctcctacacgctggagtcggtgtccatgttcgccgcgctcgccgcgcgctgcgtctgctttgacagcgccggccgcccgcccatgcaggactgcgtcaaggagctccagttcatcatgtacgctaacatgaagatatgatcactctcgcgggtgcaaaccgcgcgtgggttttctttacttttgagacggggggcggggcatgcggatgcggctgctggattgcaattgcaggtccgcagcttttgtttggttgatgaaacgaattgtctaaaagggctttatacagttacatagtagtgcttgtttggtagagcttgtagctctagccaaaccagttctactagtgatttctcccatgaagtagatctgtgtgactctgatttatccagttagaaaaaacgttcgttagaataatttttattggtataaaaaaatcgtgtacttacacagttgcattgactaggcatggcaatttcaaccgaaaacgttttcgatgggtatatctgacctgattcatgtgggtatggatgaagac

SEQ ID NO: 26508 - DNA, 666 bp, Zea Mays
attttctagaagggacccgaaggcactgtggaaaaaggggaaaaggggagtggcctactcatgtttctctccaccacaccgctcgtcctctggatgagaacaccagccgactagacagagtggatgtccctcccaatccaccgtcgatggccactggtctccagagaacgtgggcgacggcggagtggaggacgagcatgccgtcgcgccctgtttggagcggtgcgaggtgctggtttctgcgatcgcggggatgctggccggcgcgctgagggagcacgacaagcgggcggccatcatcgctccgatccacgacggggacgccgctgcaatcgaccacctcaacggaggtggctagatttccaatccggtaaaaaaaattggacgcaccaaataccacttgaaagcaaggattttcagcattcgcgagaggatttcaacaacgaacatgctactcaagtccatacatcaacacataaacaactttgatagaattatttatactggtgcctcagattattcatctcctgtacagaaagttgataatgaagttggatcaaggagcagaggcacgcaggcgaggagaaacgtacgacgcgattagtgcttcattaatagaggaaactgccggctaatggagaaagggagaggagaagaaacgtctgg

SEQ ID NO: 26509 - DNA, 885 bp, Zea Mays
ggaaaaaggggaaaaggggagtggcctactcatgtttctctccaccacaccgctcgtcctctggatgagaacaccagccgactagacagagtggatgtccctcccaatccaccgtcgatggccactggtctccagagaacgtgggcgacggcggagtggaggacgagcatgccgtcgcgccctgtttggagcggtgcgaggtgctggtttctgcgatcgcggggatgctggccggcgcgctgagggagcacgacaagcgggcggccatcatcgctccgatccacgacggggacgccgctgcaatcgaccacctcaacggaggtacatgcttttctggttctccccaccctagcatcgtaccattctatgcagacaactagagtatgagtactgtatcgtggagttcattcgaaccaagattagtgtcatttagatgacatactaacaactgagttactcttttctaattctgtcaccatggcgtggaaatgcggcgacatcccaaaatgtacttggcctctttgggattgaaacctatctgttgtttcttgcgactattcaggtggctagatttccaatccggtaaaaaaaattggacgcaccaaataccacttgaaagcaaggattttcagcattcgcgagaggatttcaacaacgaacatgctactcaagtccatacatcaacacataaacaactttgatagaattatttatactggtgcctcagattattcatctcctgtacagaaagttgataatgaagttggatcaaggtgcaccacttagttcaccttttttaccacttctcattgtttatcttgtgcatgttgtcaatttatagattttccccaaattttgtttaagactatcggtgttttgggtccg

SEQ ID NO: 26510 - DNA, 541 bp, Zea Mays
gaaaaggggagtggcctactcatgtttctctccaccacaccgctcgtcctctggatgagaacaccagccgactagacagagtggatgtccctcccaatccaccgtcgatggccactggtctccagagaacgtgggcgacggcggagtggaggacgagcatgccgtcgcgccctgtttggagcggtgcgaggtgctggtttctgcgatcgcggggatgctggccggcgcgctgagggagcacgacaagcgggcggccatcatcgctccgatccacgacggggacgccgctgcaatcgaccacctcaacggaggtgcatatggacctgatctcaactttgctttgtcaaactatacattgtttcttgtgactgaggatcttgattgaatctacttctgctgttcttagttgcacttaacattgttagagtatatcacgactaggatagagttagttggtgttaggatccttgtgtaccggctttggcccaagtcatgtaaactctatatagtgtctgagaggctcaatgtaaataatccaatt

SEQ ID NO: 26511 - DNA, 3311 bp, Zea Mays
cccagttcagctggcatgatgacatgtcctgattggcatgtcaggtcttgcaggaatcatggttctgaagtcgcacacaaatctgctagatatgtgttgtgaagatgtgtttgacttccaacaacctttaagatctcctcgtcatgtggtgaactctcctggcatcatatctgaccctgattgggaaagtagtaatgatggcaactcagttggttctatgcctttttgttttaagagaaagattattgttgcaaatttccttcctgtgatctgtgcaaaaaatgaagctaccggagaatggtcctttgccatggatgataatcaactgcttgttcaactcaaagatggttttccaattggtaatgaagttatttatgtgggtagtttgaatgttcaagttgatcctattgagcaagatcgagtttctcagaagctcttcaaggaacacagatgcgtacctacctttctcccagctgaactccagcatcaattctatcacatattctgcaaacagcacttatggccacttttccattatatgcttcctgtttgtcatgacaaagatgagctctttgaccgttccctttttcaagcctacgtgcgggccaacaaaatttttgctgacaaaattgtggaggcagtcaattcggatgatgattgtgtgtgggttcatgattatcacctcatgcttatcccaacccttttaagaaagaaactgcaccggatcaaagttggtttcttcctccacagcccatttccctcgtctgagatctataggacactgccagtgcgggatgaaattctaaaatcacttcttaatgctgacctcattggctttcaaacttttgactatgcccgccacttcctttcatgttgcagcaggcttttaggccttaattatgagtccaaacgtggccacataggtatagagtacttcggccgaacagtgagcctcaagattcttgctgcaggtgtacatgttggccggcttgaggctacattgaggttgcctgctacaattaaaaaggttcaagaaattgagagtagatatagtggcaagttggtaatattaggtgtagatgacatggacatctttaaaggtatcagtctaaaactgcttggcttggagcttcttctggaaagaacacctaagcttcgaggcaaggttgtccttgtacagattgttaatcctgcaagaagcatcggaaaagacattgaggaagcgaaatatgaagctgaatctgtagctcaaaggataaatgataaatatggttctgctaattacaagcctgttgtcctcattgactactcaatacctttctatgaaaagatcgcattttatgctgcatctgactgctgtattgtaaatgctgtgagggatggcatgaatttgataccgtatgagtacaccgtatgcaggcagggaaatgaggagcttgataagctcagaggtcttaataagagctcatctcacacaagcacacttattgtgtctgaatttgtgggttgctctccatcacttagtggagcattcagggtaaatccttggagtatggaagatgtggctgatgcattatacagtgtaacagacctgacacgatatgagaagaatctgcgccatgaaaagcactatcgctatgtcaggtctcatgatgttgcttactgggcacgcagctttgaccaggatctggataaagcatgcatagagcaatacagccaaagatgttggacaactgggtttggtttaaattttagagttattgccctttcacctgggtttagaagactgtctctagaacacctagcctcgtcttataagaaggctaacaggaggatgatattcctggactacgatgggacccttgtgccgcagacatcacacgacaaatctccaagcgctgaacttatctctacccttaacagcttgtgcagtgatatgaagaacacagtatttatagtcagcggacgaggaagagattccctaagcgagtggtttgcttcatgcgagaacctcggtatcgctgccgaacatggttactttatcagatggaacaaagcagctgaatgggagacaagcttctcaggtatttattctgaatggaagctcatcgcggaccctatcatgcatgtatacatggaaacaactgatgggtccttcatagagccaaaagagagcgctttggtatggcactatcagaacacggatcatgactttggctcgtgccaggcaaaggagctagtgagccatcttgagcgagtcctatcgaacgaacctgttgtcgtgaggcgtggccatcagatcgtagaagttaaacctcagggagttagcaaggggatttccgtggacaagatcatccggaccttggtcagcaaaggggaagtaccagaccttttgatgtgcatcggaaacgatcggtcggacgaggacatgttcgagagcatcaacagagccacctccctttccgagcttcctgccgctccagaagtattcgcctgttccgttggccccaaggccagcaaggcaaactactacgtcgatggctgcgacgaagtaatcagactgctgaagggtgtcacagccgtttcgctccaaaaggatactgccggccatagccatgcggcattcgaggatacgcttgaggttgtcagctgatccacacaagtagtcagtcagctcaaactagctacgtccagtgtgttcagcgtgccaatctcaaatctccactgcatgcaagccactcatcactccaaaccatatgtgccaagtggaactctaaattggacggagacaagtatcgccattgctgacacagagacagaacagcggtcacaaactgcaagttcgagcgaatggcgtcgcggttgatgattcactgacgacaacggaaatcacaaaccgcaagttttcaattcgtaggctaagacaactagtgggacgccatacattttgtaggcggctgatctggtggtgaaagggtggatgtccctgctagagccccagcttacggcatctgggagagccttggaagttggaccccgacgcttgtgctgcactgaggactgttacactattttctttgtacagaacaaacaggtgtggttaggcgattagcgctgtgacgattgattgtaattcacccacgtaccattgaggaaattaatggctgcgatggtgaagcgccgtgcgcatggcacattgtatgacgttcactcagtgttcggttcgagtttaaagtaggatgatgcggggtaacactgttgtctcgtttttaccataacaacaacaacaataaagcatttttgttctaagc

SEQ ID NO: 26512 - DNA, 3471 bp, Zea Mays
cctagatcggcacgaccagcaggcagcaggagcggcggaatcatccgagagggcccgttgcgatctacaaaaagggaatttcccccgatccgcaaacctccacgacatatactccgtttgcctgtgttgggtagagtcgtatagcgtggagaagaggcttggtgccaagaaactggcatttcgatttggggagtggctaaattcgtcgctgtggaatcatggttctgaagtcgcacacaaatctgctagatatgtgttgtgaagatgtgtttgacttccaacaacctttaagatctcctcgtcatgtggtgaactctcctggcatcatatctgaccctgattgggaaagtagtaatgatggcaactcagttggttctatgcctttttgttttaagagaaagattattgttgcaaatttccttcctgtgatctgtgcaaaaaatgaagctaccggagaatggtcctttgccatggatgataatcaactgcttgttcaactcaaagatggttttccaattggtaatgaagttatttatgtgggtagtttgaatgttcaagttgatcctattgagcaagatcgagtttctcagaagctcttcaaggaacacagatgcgtacctacctttctcccagctgaactccagcatcaattctatcacatattctgcaaacagcacttatggccacttttccattatatgcttcctgtttgtcatgacaaagatgagctctttgaccgttccctttttcaagcctacgtgcgggccaacaaaatttttgctgacaaaattgtggaggcagtcaattcggatgatgattgtgtgtgggttcatgattatcacctcatgcttatcccaacccttttaagaaagaaactgcaccggatcaaagttggtttcttcctccacagcccatttccctcgtctgagatctataggacactgccagtgcgggatgaaattctaaaatcacttcttaatgctgacctcattggctttcaaacttttgactatgcccgccacttcctttcatgttgcagcaggcttttaggccttaattatgagtccaaacgtggccacataggtatagagtacttcggccgaacagtgagcctcaagattcttgctgcaggtgtacatgttggccggcttgaggctacattgaggttgcctgctacaattaaaaaggttcaagaaattgagagtagatatagtggcaagttggtaatattaggtgtagatgacatggacatctttaaaggtatcagtctaaaactgcttggcttggagcttcttctggaaagaacacctaagcttcgaggcaaggttgtccttgtacagattgttaatcctgcaagaagcatcggaaaagacattgaggaagcgaaatatgaagctgaatctgtagctcaaaggataaatgataaatatggttctgctaattacaagcctgttgtcctcattgactactcaatacctttctatgaaaagatcgcattttatgctgcatctgactgctgtattgtaaatgctgtgagggatggcatgaatttgataccgtatgagtacaccgtatgcaggcagggaaatgaggagcttgataagctcagaggtcttaataagagctcatctcacacaagcacacttattgtgtctgaatttgtgggttgctctccatcacttagtggagcattcagggtaaatccttggagtatggaagatgtggctgatgcattatacagtgtaacagacctgacacgatatgagaagaatctgcgccatgaaaagcactatcgctatgtcaggtctcatgatgttgcttactgggcacgcagctttgaccaggatctggataaagcatgcatagagcaatacagccaaagatgttggacaactgggtttggtttaaattttagagttattgccctttcacctgggtttagaagactgtctctagaacacctagcctcgtcttataagaaggctaacaggaggatgatattcctggactacgatgggacccttgtgccgcagacatcacacgacaaatctccaagcgctgaacttatctctacccttaacagcttgtgcagtgatatgaagaacacagtatttatagtcagcggacgaggaagagattccctaagcgagtggtttgcttcatgcgagaacctcggtatcgctgccgaacatggttactttatcagatggaacaaagcagctgaatgggagacaagcttctcaggtatttattctgaatggaagctcatcgcggaccctatcatgcatgtatacatggaaacaactgatgggtccttcatagagccaaaagagagcgctttggtatggcactatcagaacacggatcatgactttggctcgtgccaggcaaaggagctagtgagccatcttgagcgagtcctatcgaacgaacctgttgtcgtgaggcgtggccatcagatcgtagaagttaaacctcagggagttagcaaggggatttccgtggacaagatcatccggaccttggtcagcaaaggggaagtaccagaccttttgatgtgcatcggaaacgatcggtcggacgaggacatgttcgagagcatcaacagagccacctccctttccgagcttcctgccgctccagaagtattcgcctgttccgttggccccaaggccagcaaggcaaactactacgtcgatggctgcgacgaagtaatcagactgctgaagggtgtcacagccgtttcgctccaaaaggatactgccggccatagccatgcggcattcgaggatacgcttgaggttgtcagctgatccacacaagtagtcagtcagctcaaactagctacgtccagtgtgttcagcgtgccaatctcaaatctccactgcatgcaagccactcatcactccaaaccatatgtgccaagtggaactctaaattggacggagacaagtatcgccattgctgacacagagacagaacagcggtcacaaactgcaagttcgagcgaatggcgtcgcggttgatgattcactgacgacaacggaaatcacaaaccgcaagttttcaattcgtaggctaagacaactagtgggacgccatacattttgtaggcggctgatctggtggtgaaagggtggatgtccctgctagagccccagcttacggcatctgggagagccttggaagttggaccccgacgcttgtgctgcactgaggactgttacactattttctttgtacagaacaaacaggtgtggttaggcgattagcgctgtgacgattgattgtaattcacccacgtaccattgaggaaattaatggctgcgatggtgaagcgccgtgcgcatggcacattgtatgacgttcactcagtgttcggttcgagtttaaagtaggatgatgcggggtaacactgttgtctcgtttttaccataacaacaacaacaataaagcatttttgttctaagc

SEQ ID NO: 26513 - DNA, 3416 bp, Zea Mays
aaaaaagcacgacgatcttatccacaggccgcagtggcgctcgcctagatcggcacgaccagcaggcagcaggagcggcggaatcatccgagagggcccgttgcgatctacaaaaagggaatttcccccgatccgcaaacctccacgacatatactccgaatcatggttctgaagtcgcacacaaatctgctagatatgtgttgtgaagatgtgtttgacttccaacaacctttaagatctcctcgtcatgtggtgaactctcctggcatcatatctgaccctgattgggaaagtagtaatgatggcaactcagttggttctatgcctttttgttttaagagaaagattattgttgcaaatttccttcctgtgatctgtgcaaaaaatgaagctaccggagaatggtcctttgccatggatgataatcaactgcttgttcaactcaaagatggttttccaattggtaatgaagttatttatgtgggtagtttgaatgttcaagttgatcctattgagcaagatcgagtttctcagaagctcttcaaggaacacagatgcgtacctacctttctcccagctgaactccagcatcaattctatcacatattctgcaaacagcacttatggccacttttccattatatgcttcctgtttgtcatgacaaagatgagctctttgaccgttccctttttcaagcctacgtgcgggccaacaaaatttttgctgacaaaattgtggaggcagtcaattcggatgatgattgtgtgtgggttcatgattatcacctcatgcttatcccaacccttttaagaaagaaactgcaccggatcaaagttggtttcttcctccacagcccatttccctcgtctgagatctataggacactgccagtgcgggatgaaattctaaaatcacttcttaatgctgacctcattggctttcaaacttttgactatgcccgccacttcctttcatgttgcagcaggcttttaggccttaattatgagtccaaacgtggccacataggtatagagtacttcggccgaacagtgagcctcaagattcttgctgcaggtgtacatgttggccggcttgaggctacattgaggttgcctgctacaattaaaaaggttcaagaaattgagagtagatatagtggcaagttggtaatattaggtgtagatgacatggacatctttaaaggtatcagtctaaaactgcttggcttggagcttcttctggaaagaacacctaagcttcgaggcaaggttgtccttgtacagattgttaatcctgcaagaagcatcggaaaagacattgaggaagcgaaatatgaagctgaatctgtagctcaaaggataaatgataaatatggttctgctaattacaagcctgttgtcctcattgactactcaatacctttctatgaaaagatcgcattttatgctgcatctgactgctgtattgtaaatgctgtgagggatggcatgaatttgataccgtatgagtacaccgtatgcaggcagggaaatgaggagcttgataagctcagaggtcttaataagagctcatctcacacaagcacacttattgtgtctgaatttgtgggttgctctccatcacttagtggagcattcagggtaaatccttggagtatggaagatgtggctgatgcattatacagtgtaacagacctgacacgatatgagaagaatctgcgccatgaaaagcactatcgctatgtcaggtctcatgatgttgcttactgggcacgcagctttgaccaggatctggataaagcatgcatagagcaatacagccaaagatgttggacaactgggtttggtttaaattttagagttattgccctttcacctgggtttagaagactgtctctagaacacctagcctcgtcttataagaaggctaacaggaggatgatattcctggactacgatgggacccttgtgccgcagacatcacacgacaaatctccaagcgctgaacttatctctacccttaacagcttgtgcagtgatatgaagaacacagtatttatagtcagcggacgaggaagagattccctaagcgagtggtttgcttcatgcgagaacctcggtatcgctgccgaacatggttactttatcagatggaacaaagcagctgaatgggagacaagcttctcaggtatttattctgaatggaagctcatcgcggaccctatcatgcatgtatacatggaaacaactgatgggtccttcatagagccaaaagagagcgctttggtatggcactatcagaacacggatcatgactttggctcgtgccaggcaaaggagctagtgagccatcttgagcgagtcctatcgaacgaacctgttgtcgtgaggcgtggccatcagatcgtagaagttaaacctcagggagttagcaaggggatttccgtggacaagatcatccggaccttggtcagcaaaggggaagtaccagaccttttgatgtgcatcggaaacgatcggtcggacgaggacatgttcgagagcatcaacagagccacctccctttccgagcttcctgccgctccagaagtattcgcctgttccgttggccccaaggccagcaaggcaaactactacgtcgatggctgcgacgaagtaatcagactgctgaagggtgtcacagccgtttcgctccaaaaggatactgccggccatagccatgcggcattcgaggatacgcttgaggttgtcagctgatccacacaagtagtcagtcagctcaaactagctacgtccagtgtgttcagcgtgccaatctcaaatctccactgcatgcaagccactcatcactccaaaccatatgtgccaagtggaactctaaattggacggagacaagtatcgccattgctgacacagagacagaacagcggtcacaaactgcaagttcgagcgaatggcgtcgcggttgatgattcactgacgacaacggaaatcacaaaccgcaagttttcaattcgtaggctaagacaactagtgggacgccatacattttgtaggcggctgatctggtggtgaaagggtggatgtccctgctagagccccagcttacggcatctgggagagccttggaagttggaccccgacgcttgtgctgcactgaggactgttacactattttctttgtacagaacaaacaggtgtggttaggcgattagcgctgtgacgattgattgtaattcacccacgtaccattgaggaaattaatggctgcgatggtgaagcgccgtgcgcatggcacattgtatgacgttcactcagtgttcggttcgagtttaaagtaggatgatgcggggtaacactgttgtctcgtttttaccataacaacaacaacaataaagcatttttgttctaagc

SEQ ID NO: 26514 - DNA, 1454 bp, Zea Mays
ttaccggttacaaacccacacgaattgccgccaccaccccacacgacatcctacaaccccagcctcattccaccgggcccgcacctcagaccacaggtggacgaggccacctgccggccagcttctccggccaccaccgtcgaccgtgtaaaacttgcactgacgaagcctaccttcttatccggcggcggggccatggggttctcgctgtaccccaccaagtcgtcgacgcgcacgccgtggagcaccagcttcttccgccacaagttcccggccgccgcggtgtccttctgatcaggctagctccggccgcccggcggtcgacctcgctccgcgcttcaagaagagtgcttggcgcatggaccccgctagtagcctgatcagcagctccgcggtaccattccctgctgccggcgatggcggcggacagcgacaggtgtttctctttggcggcggattcgttggaggagcgccgccgttggtgggtggtgcggcggacgggcggcgcaagcggccgttccagctgacggcgcacgatgagctgcagctgcagctgcagctccagctggacgacgagctgtgcggcctggactacgagctccatgggccgcagcaggagcggacaacgaagcggcggctgacggcggagcaggtgcgggagctggagctgagcttcgaggaggagaagcggaagctggagcccaagcggaagctggagcccgagcggaagagcgagctggcgcggaggctcgggatcgcgccgcgccaggtggccgtgtggttccagaaccgccgcgcgcggtggaggagcaagcagctggagcaggacttcgaccgcctcagggccgcgcacgacgacctcatcgccggccgcgacgcgctcctcgccgataacgatcgtctccgctcacaggtgatcacgttaactgagaaactgcaaacgaaagagtcggcggcggcggcggcagagcctggagagcagacagttgccgcccaagcgacagcctacgctgtcttggaaggagacaagctctgctccggcagcgctgcagcgccggcggcggcagggaccaacgacagcccggagtcgtacttcgccggggcgcgctcgccaccgtcgtcgccagaggacgacgaccgcgccttcttcttccccccggacgccctgctcaacaactgggcatgggtatggaacgatcggcagtattaggggatgcacgcatatggctaggagtgcaaagttgactaaatttgctggttctaaatgtcatatatatcacccttgatcaaacgaacatggttcttataaagtttattaattacctgttggttctgtacttgattccttgttagatacggatgttccatgtcttcattatcatcgagaagatgttctatttcatccctaacctggtaagataccataaataaatgcataatagatcccagtacag

SEQ ID NO: 26515 - DNA, 1359 bp, Zea Mays
ttaccggttacaaacccacacgaattgccgccaccaccccacacgacatcctacaaccccagcctcattccaccgggcccgcacctcagaccacaggtggacgaggccacctgccggccagcttctccggccaccaccgtcgaccgtgtaaaacttgcactgacgaagcctaccttcttatccggcggcggggccatggggttctcgctgtaccccaccaagtcgtcgacgcgcacgccgtggagcaccagcttcttccgccacaagttcccggccgccgcggtgtccttctgatcaggctagctccggccgcccggcggtcgacctcgctccgcgcttcaagaagaggtggaggagcgtacatacagacacgagcgccgccgttggtgggtggtgcggcggacgggcggcgcaagcggccgttccagctgacggcgcacgatgagctgcagctgcagctgcagctccagctggacgacgagctgtgcggcctggactacgagctccatgggccgcagcaggagcggacaacgaagcggcggctgacggcggagcaggtgcgggagctggagctgagcttcgaggaggagaagcggaagctggagcccaagcggaagctggagcccgagcggaagagcgagctggcgcggaggctcgggatcgcgccgcgccaggtggccgtgtggttccagaaccgccgcgcgcggtggaggagcaagcagctggagcaggacttcgaccgcctcagggccgcgcacgacgacctcatcgccggccgcgacgcgctcctcgccgataacgatcgtctccgctcacaggtgatcacgttaactgagaaactgcaaacgaaagagtcggcggcggcggcggcagagcctggagagcagacagttgccgcccaagcgacagcctacgctgtcttggaaggagacaagctctgctccggcagcgctgcagcgccggcggcggcagggaccaacgacagcccggagtcgtacttcgccggggcgcgctcgccaccgtcgtcgccagaggacgacgaccgcgccttcttcttccccccggacgccctgctcaacaactgggcatgggtatggaacgatcggcagtattaggggatgcacgcatatggctaggagtgcaaagttgactaaatttgctggttctaaatgtcatatatatcacccttgatcaaacgaacatggttcttataaagtttattaattacctgttggttctgtacttgattccttgttagatacggatgttccatgtcttcattatcatcgagaagatgttctatttcatccctaacctggtaagataccataaataaatgcataatagatcccagtacag

SEQ ID NO: 26516 - DNA, 708 bp, Zea Mays
aaccaacatctgggcaaggaacagataaggactgcaaaccttgtcactttgtcagggcttcggggacagccaaagaagacggacggacccagtgaggcgagcacgggcgctcaccggcgatggcgacgagggcatgggtggccgcggcggtggccttgaaccctcaactgctgcctctccgctcctgctcgcccacgaagtcggtctccccagcgcagcgctcggcgtcgatggggctccggctgcgcagcggccggccgtgcctggggaagttcgtgtgccgccgcgccaagaacgcgggatacgaggactacaagttcccggaccccatcccggagttcgccgagcaggagacgagcaagttcagggagcacatggcgtggcggctggagcagaagaaagaggactacttcggggaccatgtcgaggagatcgttgacgtctgcaccgagatcatggggacattcctggagaacgattaccgtggaccagggacgctcctggttcacccgttcctggacatgaagggcgagatcaaggagagggggctccccggcgcacctcaggcggcacgggcggcgatagcatgggccgaaaagaacgtggacaaggactggaaggcctggactggggaatactagcactagaagagggagtgtagctggcaaccaatgttggctgaggtgaacatgtcatggacacggaccg

SEQ ID NO: 26517 - DNA, 716 bp, Zea Mays
atatcggatttaaaatgtgcacaaaacctctgaggaagaaaaaaaaaaggtccctcgttcagttgttcctcaacctacctacgccgctccgcgctcgaccgcctttgcctgccttcccattccccccgtctcctcttcccttccgccatggcccagcccgctttcctctcctctctccgctcccgcctcggctccgcgccgccgcccccgccgaaccatcgcctccagcccaggcgcggctaccacgtcgagcttggggctcgcgaaaaagcgcttttggaggaggatgttgctttgaagaggttcaaatcatacaaaaacagtgtgaaacaggtctccaagatcgggaatgctctcactttagctgttgtacttgcttgcagctacgagcttgctgtgttggcgactagcacaaaatgaaggaaaactcagtcatgtggcggcacggttattccgggaagtgatccatcagcatgaactggcactctctctcttcgtgtttttttagccccgtttgttgatcactcgtaccgtgtaaaataaaataaactaggttaaccttgattggcaaataatgtctctgtttttatggcctagttgcaaacaaagtgagagaagcattccgtggtgaatcgtgaagaatgaacgccgcctgctttgtttaccacctgggagtgtatcctgctgcacattgaccgggtggatttgtgttcgag

SEQ ID NO: 26518 - DNA, 2097 bp, Zea Mays
aaaatttttgctttcactagtcacttttggggaagctcggttcattcccggagcctgtcattaagaaatacactaagcaaattttgcaaggattggagtatctgcatagcaatgcaataatacatagagatataaagggtgcaaacattcttgttgataataaagggtgcatcaaacttgctgattttggggcatctaagcaagttgcaaagttgttctgcagatatatggagtgtagggtgcacagtcattgaaatggccactggcaaaccaccatggagccagcagtatcaagaagttgctcttctatttcatgttggaactacaaaatcgcatccacctatacctgaacatctatcgccagaagccaaagattttctgctaaagtgcctgcagaaggaaccagagctgaggtctactgcaccagacttattaaagcatccttttgtcactggagaattggatgacctgcagccactcaatcatgctgcacgcaagaactcttttaatgagattccttcagatgatatgccaaatggcttgggtttgaataagtcttccaactggtccactatgaactccagtaaatcatccaaaatcaagcccttatgggagggtggctgtgatgatgatgacatgtgtgagtttgctgacaaggatgactatgcaggagttggatctagctataatcctatgtcagaaccatttgataactgggaaaacaagtttgacataagcccagagcaaaattctcatcaaccaatggaatttggtgaattggccaaacatgttgaaagcagcataactgggaatgattttacgttccctgttgggggaagttgtgaagatgatgatgtacttacagagtcaaaaataaaggcatttcttgaggagaaggctcttgacctgaaaaagctacaaacacctttgtatgaggagttctacaacactgtgcatggagggagttttcagggagctgatcaaacttccaagggaaaactcccaattagtccaaaatttccccctcgaggaaagtcgcctccatgcaagacacgtgtaggtgcatgtgatacttcgaatgacacagctcctgaaagctgcagcaagcaatttccaagaagcagtgtggtggatagcagccgaattttgagagaaattgcttctcctcaactgaatgagtttgcggataaaatccatcttgatgcccaagatagcccaagcatcagcttcaccgaaaggcagaggaagtggaaagaagagttggaccaggaacttgagagggagagagtgctgagattagctggctgtggtaaagcaccatccccaaacagaggttccaacgtgaaaaaggagtatcatgctgaccattgaacaaacagcagcgttcatcgtctctttatttcatcccacagaacacaactggatagtaactacacaatgccacagactggcagcaacatgagtacagcctgcagcgcctcaccattcgcggtattggccaagctatgactgcagatccatctcgtacaagtggcagatttacgttgaagtggactggtacataggggcactcgtcgcgaatatcaggatcattgtcgctgctaccccggaggacggcgtgctgacagtttcctgattttaaggccgcgtttgtcattctttttgatgcagtgctatacatgcgacttcggttatatttggtttctattgagaaaaaaatagtgttgtaaaaattttgtgtttgtaagcgagcttggcgtggggtttggttttgtatggagcttgtttgtgaaagcgtgtaataagatagctatgcaaattacaggtcattctgctggctgaatgaatctgagcttttcggaagctacaactgatcttctgctgttaatagttgcaatcaaattgtgaaccagcctttaggaagctcaaacctaaaactgatctccagcagatcctttatcacatctcctatctcatcctcatccttgttttaaacttcatcttataaactatcatctacagttttgtgtcaccctattttagactacctattggagacagtctaagactaatagtctaagactaagaggaataagc

SEQ ID NO: 26519 - DNA, 1098 bp, Zea Mays
atgacctgtccggactccggactcggaacccgccttcttcttgccgccaaagaaaggaaggcaaaacggttcttctttcgcgtcggcaacagcgacacccacagccggccagcccaagtctataaatcagaaaagaggtagaggggcggcgaccgatggcgcggcggggcacggaggcgttccctaacctgggcgcgcactgcgacaagccggactgcaaccagctcgacttcctgcccttcgactgcgacggctgcggcaaggtcttctgcgccgcgcaccggacctacggggaccacggctgcgccaaggcggcggaccagggccgcaccgtcgtcgtctgcccggactgcggcgacgccatcgagaggctggttccggggcagggcgagcgggagatcctggaggcgcacgtgcggtcgcggcgctgcgacccgggcaagaagcgcaagccccggtgccccgcgcggcggtgcagggagcagctcaccttctccaacacccaggactgcaagggctgcggccggaaggtgtgcctcaagcacaggttcccggccgaccacgactgcgccgccagcgcaccaggagctgccgcggcggcgaggagggccagcggggagtgcggccgcggcgcgcggaaggaagggagcggcggctgggcgctgccggcgtccatccggagcctcaagatcttctgaggcttgccaatttgccatactgtcacgttgcagccaggtcaccacagcgaaagaaactgttcctcgagatggatgcagcgaacgtatttcatatgttctttggttgatgtataaatgcattttcaggctaagaatctgaaatacagaaactggacattgaaatgttccatcaatactggtttttaaggcagatgtgaagacagacaaatttgcgttcaatatactacgggagttttttttttccacgccatcatcttggatgattgtcctacgttctgttgcgtatgttgttggatatactctgttttacttttttttcagtggtaattcatattgccacactatgggctagtttgagatgcaaaaaacccgaagtgtcttatttaaaattaaataaaaa

SEQ ID NO: 26520 - DNA, 604 bp, Zea Mays
ctatgtcgtgtgttctacattatgatcaaagggctgcatgatggttccatccgtcttgtatgggaatgacccattgagcaagccaaaaagatagatcattacatgtgctcggattgtgctgaaaaaaatggtgcaaagagaccctcaaattcatacccagtttcaccaaactctgattctaagatcgaatcaaagaggcgcaagagataaattctggcaaaggagatcgatatggcgtctgctcctcattactgatgcatattgagatgtacactgcgagagaagagccaagccaattgtaggacaaaacttgcttaacttatcattcttctgtgtattctggggacgtttcctgcagcttagacatttagtgtgatgagtaggtcagtcagtcccctcccccgctgcagcgcgcgcatgatcagctgctggtggcgggataagtcgggaaatgctagagcgctgatgattctgtcgatgtaactttatcgggttgtgtgtgtgtgtttgatgatagcttgactgctgtttcataattcagttagatgttgccaagcaaagacttgagataatattgagttcgatcttgaaacttgaaacgtgc

SEQ ID NO: 26521 - DNA, 3584 bp, Zea Mays
caacgcaaacccacaagaaagtttcaaaaaaacattcgcactccctccctctaccgccactagccaccctcccctaccccaatcccctctccccagatcgagcgccgcgtggctagggtttgcgcgaccgccggcagcgatgcccgcgtcctccgtctcggggggtagcggccccggaggcgtctccccggatgccatcatcgagtggctgcaggacgagatggggtacccctcggcccctcctgcaccggatcagctccgcaagatctgccggggcaacatgatccccgtctggtccttcctgctccgccgcgtccgctccgagcgaaccgtcgccaccgcgcgccgcaatatcctcgtccacggcgtcgcggcccggcgggcgcgggagggcggagcgatgggggcgggcgcgggtgacgctgcggccagggaggccgaggcgagggagcgggacctcgccgctgaggaggccgagcggttgcgtgggatcgtgaggaggcagcgcaaggagcttcgcgcgcgcatcgcggaggtcgccagggaggaggcggagcgcaagcgcgtcctcggtgagcgctccaatgccaggcacaagcaagttatgctccaagcatatgaacagcaatgcgatgaagcgcacaaaatatttgctgaataccagcgccggctacatcagttcgttaaccaagcaagggacgtgcgaagatcaagtataggcgtggctggagctacaggtgctcttgtggatatgcaattgcagagtgatagagatgatctttacccatcgactatcaaaagcaatagattgccagaggatcttttagaaactgcaggtgaaaggagcattcggaaggcatgtgaaactcttgctgcggatatgattgaaacaattcgaagttcattcccggcatttgaagggtgtggcattaattcaagttgccaattagatgcagaaaagctgggtattgacttggttggtgaaataccaacatatgttaaacttgttgcattggattccctaaagaatccattcatgcttctgcagtcaatcattacctacacatcacgcatgaaaacacttatacatagagaaactgacaagattgacatacgcgctgatgcagaactactgaggtgtatggaaatgggaagactggatcacaattgtcaactcgaggaacatatgatcagctactagaaagacagaaagagcatgtacaacagtttttggcaacagaagatgctttgaacaaagctgcagaagctaaagcactaagtcagaagctattgcaacgcttgtatggcactgctgacatggcaggaaataagaagctgcccactgggaacaccacacagaatgtgaccaacagtaggcatttagagttggacgtttgggccaaggaaagagaagttgcaggactaaaggcgagcttgagtacacttacatctgaggtacaacgtttgtataagttatgcgctgagtggaaggaagcagaagattcactgaagaagaagtggaagaaaatcgaagaatttgacgcccgtcgatcagagctggagttcatttacagtgctcttcagcgggccaatatggattcatcagcattttgggagcaacagccattatcagctagaggatatgcatcaactacaattatccctgcgtgccatgctgtggtagacatgtctacgaactcaagggacctcatagagcgagagttagctgcatttagccagagcttggataatagcttgtgcaggttgccagcaacccctcaggttagtagtgttatatgcttaaatcgattacttccaaataatatctgtctgctatgttcccataccagtactcgtctatatctgctttacctgaatgaactggataagcatgagccactaaaaatatgctaggcagttttctccatatattgcctttgtcatgttgacattgatgaaacatgtccaatattatcattttcaagattccagttcttagtctccctttagctgagcttttgaacctgttttttcttttgcaaaagccaaccaaaggggtgaaaagtaatagctgctttggagtttggaccaaaatttgttcttactctagtacaaaactgaaagtagctccgcgcctccgcctgcttttacctgctgtgaagacgggcaactttaaaaaaatatccacctgccactggttatgaagatattggcttgttttttcttctttcccgtctccgacttttttttttcatctgtgagactgtgacacctttctcgttccatgtggtatctctggctggtgctgacgctccgatgactcctctctctttggccttctcgaggcaaggccatccctcgagaatgcacggctgtagcccctgcctcggtgccgggcattgccatggacaccgcgcggagcctttgctgccacataggcccttttggaggctgtgggttctaacggcgtgacaggatcagaagcacttgcagctgctgagaaacatgcagctttgttgactgcaagagctggtgccagagatccatctgctgtgccgtctatatgccgcatctctgctgctcttcagtataactttggtacagaaggcacagattctggcttggcttcagtattaaattcactggagttctgcctaaaaccatgtgggtctgaagctagcatattagaggatttatcaaaatctatcaacttggtgcacacacggagaaatcttgttgagaatgaccgtgttttgctgaaccgtgcacatcgtgctcaacaagaatatgaaagagtggccaactattgtcttaaattagctggcgaacaagaaaaggtggtgagtgaaagatggcttccggaactgagaaatgcagttcaagaagctcgaaggtgttttgatgactgccagcgtgttaggggtctggttgatgagtggtacgagcagccagccgccacaattgtggattgggtaacgatagatggacagagcgttggtgcctggatcaacctcgtgaagcaactccacatggagatctccagacggacgttggccatgtcatcggtaggagacgactgaagcaaccagccgtgacctgcggctttggaagttcggaggctcctttatgggttcggtttggcgccaagatatcttctatctactcgatagccttttcccattgtagtttatacgtctctctctctggtttggtctgtaattagttcctaacatgttccttttgtatgttgtcaattgtcatgtgctggttgtcacttggctcaaacgatcagtgttggtgttgtgcctttgctgatttgggttgtttgtatgttgtcaatggtcatgtgcgtgttgtcatttggctcaaacgatcagggttggtgttgtggctttgatgatttgcgcacatgtgtgttcaatcagtccgggaattgtttcagttataacgttcatgtaacttagggtatgtttggcaccaaaatatgtttggcccattttgttatggcttgcttgttaaccttgatggttatcatcttgtcatttttttctttgaggagatagggtgtggtagccttcttgttc

SEQ ID NO: 26522 - DNA, 2928 bp, Zea Mays
caacgcaaacccacaagaaagtttcaaaaaaacattcgcactccctccctctaccgccactagccaccctcccctaccccaatcccctctccccagatcgagcgccgcgtggctagggtttgcgcgaccgccggcagcgatgcccgcgtcctccgtctcggggggtagcggccccggaggcgtctccccggatgccatcatcgagtggctgcaggacgagatggggtacccctcggcccctcctgcaccggatcagctccgcaagatctgccggggcaacatgatccccgtctggtccttcctgctccgccgcgtccgctccgagcgaaccgtcgccaccgcgcgccgcaatatcctcgtccacggcgtcgcggcccggcgggcgcgggagggcggagcgatgggggcgggcgcgggtgacgctgcggccagggaggccgaggcgagggagcgggacctcgccgctgaggaggccgagcggttgcgtgggatcgtgaggaggcagcgcaaggagcttcgcgcgcgcatcgcggaggtcgccagggaggaggcggagcgcaagcgcgtcctcggtgagcgctccaatgccaggcacaagcaagttatgctccaagcatatgaacagcaatgcgatgaagcgcacaaaatatttgctgaataccagcgccggctacatcagttcgttaaccaagcaagggacgtgcgaagatcaagtataggcgtggctggagctacaggtgctcttgtggatatgcaattgcagagtgatagagatgatctttacccatcgactatcaaaagcaatagattgccagaggatcttttagaaactgcaggtgaaaggagcattcggaaggcatgtgaaactcttgctgcggatatgattgaaacaattcgaagttcattcccggcatttgaagggtgtggcattaattcaagttgccaattagatgcagaaaagctgggtattgacttggttggtgaaataccaacatatgttaaacttgttgcattggattccctaaagaatccattcatgcttctgcagtcaatcattacctacacatcacgcatgaaaacacttatacatagagaaactgacaagattgacatacgcgctgatgcagaactactgaggtgtatggaaatgggaagactggatcacaattgtcaactcgaggaacatatgatcagctactagaaagacagaaagagcatgtacaacagtttttggcaacagaagatgctttgaacaaagctgcagaagctaaagcactaagtcagaagctattgcaacgcttgtatggcactgctgacatggcaggaaataagaagctgcccactgggaacaccacacagaatgtgaccaacagtaggcatttagagttggacgtttgggccaaggaaagagaagttgcaggactaaaggcgagcttgagtacacttacatctgaggtacaacgtttgtataagttatgcgctgagtggaaggaagcagaagattcactgaagaagaagtggaagaaaatcgaagaatttgacgcccgtcgatcagagctggagttcatttacagtgctcttcagcgggccaatatggattcatcagcattttgggagcaacagccattatcagctagaggatatgcatcaactacaattatccctgcgtgccatgctgtggtagacatgtctacgaactcaagggacctcatagagcgagagttagctgcatttagccagagcttggataatagcttgtgcaggttgccagcaacccctcaggcccttttggaggctgtgggttctaacggcgtgacaggatcagaagcacttgcagctgctgagaaacatgcagctttgttgactgcaagagctggtgccagagatccatctgctgtgccgtctatatgccgcatctctgctgctcttcagtataactttggtacagaaggcacagattctggcttggcttcagtattaaattcactggagttctgcctaaaaccatgtgggtctgaagctagcatattagaggatttatcaaaatctatcaacttggtgcacacacggagaaatcttgttgagaatgaccgtgttttgctgaaccgtgcacatcgtgctcaacaagaatatgaaagagtggccaactattgtcttaaattagctggcgaacaagaaaaggtggtgagtgaaagatggcttccggaactgagaaatgcagttcaagaagctcgaaggtgttttgatgactgccagcgtgttaggggtctggttgatgagtggtacgagcagccagccgccacaattgtggattgggtaacgatagatggacagagcgttggtgcctggatcaacctcgtgaagcaactccacatggagatctccagacggacgttggccatgtcatcggtaggagacgactgaagcaaccagccgtgacctgcggctttggaagttcggaggctcctttatgggttcggtttggcgccaagatatcttctatctactcgatagccttttcccattgtagtttatacgtctctctctctggtttggtctgtaattagttcctaacatgttccttttgtatgttgtcaattgtcatgtgctggttgtcacttggctcaaacgatcagtgttggtgttgtgcctttgctgatttgggttgtttgtatgttgtcaatggtcatgtgcgtgttgtcatttggctcaaacgatcagggttggtgttgtggctttgatgatttgcgcacatgtgtgttcaatcagtccgggaattgtttcagttataacgttcatgtaacttagggtatgtttggcaccaaaatatgtttggcccattttgttatggcttgcttgttaaccttgatggttatcatcttgtcatttttttctttgaggagatagggtgtggtagccttcttgttc

SEQ ID NO: 26523 - DNA, 3654 bp, Zea Mays
caacgcaaacccacaagaaagtttcaaaaaaacattcgcactccctccctctaccgccactagccaccctcccctaccccaatcccctctccccagatcgagcgccgcgtggctagggtttgcgcgaccgccggcagcgatgcccgcgtcctccgtctcggggggtagcggccccggaggcgtctccccggatgccatcatcgagtggctgcaggacgagatggggtacccctcggcccctcctgcaccggatcagctccgcaagatctgccggggcaacatgatccccgtctggtccttcctgctccgccgcgtccgctccgagcgaaccgtcgccaccgcgcgccgcaatatcctcgtccacggcgtcgcggcccggcgggcgcgggagggcggagcgatgggggcgggcgcgggtgacgctgcggccagggaggccgaggcgagggagcgggacctcgccgctgaggaggccgagcggttgcgtgggatcgtgaggaggcagcgcaaggagcttcgcgcgcgcatcgcggaggtcgccagggaggaggcggagcgcaagcgcgtcctcggtgagcgctccaatgccaggcacaagcaagttatgctccaagcatatgaacagcaatgcgatgaagcgcacaaaatatttgctgaataccagcgccggctacatcagttcgttaaccaagcaagggacgtgcgaagatcaagtataggcgtggctggagctacaggtgctcttgtggatatgcaattgcagagtgatagagatgatctttacccatcgactatcaaaagcaatagattgccagaggatcttttagaaactgcaggtgaaaggagcattcggaaggcatgtgaaactcttgctgcggatatgattgaaacaattcgaagttcattcccggcatttgaagggtgtggcattaattcaagttgccaattagatgcagaaaagctgggtattgacttggttggtgaaataccaacatatgttaaacttgttgcattggattccctaaagaatccattcatgcttctgcagtcaatcattacctacacatcacgcatgaaaacacttatacatagagaaactgacaagattgacatacgcgctgatgcagaactactgaggtataaatatgaaaatgagcaggttattgatgctgcttcaactgatgcaagctcacccttaccatatcaggtgtatggaaatgggaagactggatcacaattgtcaactcgaggaacatatgatcagctactagaaagacagaaagagcatgtacaacagtttttggcaacagaagatgctttgaacaaagctgcagaagctaaagcactaagtcagaagctattgcaacgcttgtatggcactgctgacatggcaggaaataagaagctgcccactgggaacaccacacagaatgtgaccaacagtaggcatttagagttggacgtttgggccaaggaaagagaagttgcaggactaaaggcgagcttgagtacacttacatctgaggtacaacgtttgtataagttatgcgctgagtggaaggaagcagaagattcactgaagaagaagtggaagaaaatcgaagaatttgacgcccgtcgatcagagctggagttcatttacagtgctcttcagcgggccaatatggattcatcagcattttgggagcaacagccattatcagctagaggatatgcatcaactacaattatccctgcgtgccatgctgtggtagacatgtctacgaactcaagggacctcatagagcgagagttagctgcatttagccagagcttggataatagcttgtgcaggttgccagcaacccctcaggttagtagtgttatatgcttaaatcgattacttccaaataatatctgtctgctatgttcccataccagtactcgtctatatctgctttacctgaatgaactggataagcatgagccactaaaaatatgctaggcagttttctccatatattgcctttgtcatgttgacattgatgaaacatgtccaatattatcattttcaagattccagttcttagtctccctttagctgagcttttgaacctgttttttcttttgcaaaagccaaccaaaggggtgaaaagtaatagctgctttggagtttggaccaaaatttgttcttactctagtacaaaactgaaagtagctccgcgcctccgcctgcttttacctgctgtgaagacgggcaactttaaaaaaatatccacctgccactggttatgaagatattggcttgttttttcttctttcccgtctccgacttttttttttcatctgtgagactgtgacacctttctcgttccatgtggtatctctggctggtgctgacgctccgatgactcctctctctttggccttctcgaggcaaggccatccctcgagaatgcacggctgtagcccctgcctcggtgccgggcattgccatggacaccgcgcggagcctttgctgccacataggcccttttggaggctgtgggttctaacggcgtgacaggatcagaagcacttgcagctgctgagaaacatgcagctttgttgactgcaagagctggtgccagagatccatctgctgtgccgtctatatgccgcatctctgctgctcttcagtataactttggtacagaaggcacagattctggcttggcttcagtattaaattcactggagttctgcctaaaaccatgtgggtctgaagctagcatattagaggatttatcaaaatctatcaacttggtgcacacacggagaaatcttgttgagaatgaccgtgttttgctgaaccgtgcacatcgtgctcaacaagaatatgaaagagtggccaactattgtcttaaattagctggcgaacaagaaaaggtggtgagtgaaagatggcttccggaactgagaaatgcagttcaagaagctcgaaggtgttttgatgactgccagcgtgttaggggtctggttgatgagtggtacgagcagccagccgccacaattgtggattgggtaacgatagatggacagagcgttggtgcctggatcaacctcgtgaagcaactccacatggagatctccagacggacgttggccatgtcatcggtaggagacgactgaagcaaccagccgtgacctgcggctttggaagttcggaggctcctttatgggttcggtttggcgccaagatatcttctatctactcgatagccttttcccattgtagtttatacgtctctctctctggtttggtctgtaattagttcctaacatgttccttttgtatgttgtcaattgtcatgtgctggttgtcacttggctcaaacgatcagtgttggtgttgtgcctttgctgatttgggttgtttgtatgttgtcaatggtcatgtgcgtgttgtcatttggctcaaacgatcagggttggtgttgtggctttgatgatttgcgcacatgtgtgttcaatcagtccgggaattgtttcagttataacgttcatgtaacttagggtatgtttggcaccaaaatatgtttggcccattttgttatggcttgcttgttaaccttgatggttatcatcttgtcatttttttctttgaggagatagggtgtggtagccttcttgttc

SEQ ID NO: 26524 - DNA, 3635 bp, Zea Mays
caacgcaaacccacaagaaagtttcaaaaaaacattcgcactccctccctctaccgccactagccaccctcccctaccccaatcccctctccccagatcgagcgccgcgtggctagggtttgcgcgaccgccggcagcgatgcccgcgtcctccgtctcggggggtagcggccccggaggcgtctccccggatgccatcatcgagtggctgcaggacgagatggggtacccctcggcccctcctgcaccggatcagctccgcaagatctgccggggcaacatgatccccgtctggtccttcctgctccgccgcgtccgctccgagcgaaccgtcgccaccgcgcgccgcaatatcctcgtccacggcgtcgcggcccggcgggcgcgggagggcggagcgatgggggcgggcgcgggtgacgctgcggccagggaggccgaggcgagggagcgggacctcgccgctgaggaggccgagcggttgcgtgggatcgtgaggaggcagcgcaaggagcttcgcgcgcgcatcgcggaggtcgccagggaggaggcggagcgcaagcgcgtcctcggcacaagcaagttatgctccaagcatatgaacagcaatgcgatgaagcgcacaaaatatttgctgaataccagcgccggctacatcagttcgttaaccaagcaagggacgtgcgaagatcaagtataggcgtggctggagctacaggtgctcttgtggatatgcaattgcagagtgatagagatgatctttacccatcgactatcaaaagcaatagattgccagaggatcttttagaaactgcaggtgaaaggagcattcggaaggcatgtgaaactcttgctgcggatatgattgaaacaattcgaagttcattcccggcatttgaagggtgtggcattaattcaagttgccaattagatgcagaaaagctgggtattgacttggttggtgaaataccaacatatgttaaacttgttgcattggattccctaaagaatccattcatgcttctgcagtcaatcattacctacacatcacgcatgaaaacacttatacatagagaaactgacaagattgacatacgcgctgatgcagaactactgaggtataaatatgaaaatgagcaggttattgatgctgcttcaactgatgcaagctcacccttaccatatcaggtgtatggaaatgggaagactggatcacaattgtcaactcgaggaacatatgatcagctactagaaagacagaaagagcatgtacaacagtttttggcaacagaagatgctttgaacaaagctgcagaagctaaagcactaagtcagaagctattgcaacgcttgtatggcactgctgacatggcaggaaataagaagctgcccactgggaacaccacacagaatgtgaccaacagtaggcatttagagttggacgtttgggccaaggaaagagaagttgcaggactaaaggcgagcttgagtacacttacatctgaggtacaacgtttgtataagttatgcgctgagtggaaggaagcagaagattcactgaagaagaagtggaagaaaatcgaagaatttgacgcccgtcgatcagagctggagttcatttacagtgctcttcagcgggccaatatggattcatcagcattttgggagcaacagccattatcagctagaggatatgcatcaactacaattatccctgcgtgccatgctgtggtagacatgtctacgaactcaagggacctcatagagcgagagttagctgcatttagccagagcttggataatagcttgtgcaggttgccagcaacccctcaggttagtagtgttatatgcttaaatcgattacttccaaataatatctgtctgctatgttcccataccagtactcgtctatatctgctttacctgaatgaactggataagcatgagccactaaaaatatgctaggcagttttctccatatattgcctttgtcatgttgacattgatgaaacatgtccaatattatcattttcaagattccagttcttagtctccctttagctgagcttttgaacctgttttttcttttgcaaaagccaaccaaaggggtgaaaagtaatagctgctttggagtttggaccaaaatttgttcttactctagtacaaaactgaaagtagctccgcgcctccgcctgcttttacctgctgtgaagacgggcaactttaaaaaaatatccacctgccactggttatgaagatattggcttgttttttcttctttcccgtctccgacttttttttttcatctgtgagactgtgacacctttctcgttccatgtggtatctctggctggtgctgacgctccgatgactcctctctctttggccttctcgaggcaaggccatccctcgagaatgcacggctgtagcccctgcctcggtgccgggcattgccatggacaccgcgcggagcctttgctgccacataggcccttttggaggctgtgggttctaacggcgtgacaggatcagaagcacttgcagctgctgagaaacatgcagctttgttgactgcaagagctggtgccagagatccatctgctgtgccgtctatatgccgcatctctgctgctcttcagtataactttggtacagaaggcacagattctggcttggcttcagtattaaattcactggagttctgcctaaaaccatgtgggtctgaagctagcatattagaggatttatcaaaatctatcaacttggtgcacacacggagaaatcttgttgagaatgaccgtgttttgctgaaccgtgcacatcgtgctcaacaagaatatgaaagagtggccaactattgtcttaaattagctggcgaacaagaaaaggtggtgagtgaaagatggcttccggaactgagaaatgcagttcaagaagctcgaaggtgttttgatgactgccagcgtgttaggggtctggttgatgagtggtacgagcagccagccgccacaattgtggattgggtaacgatagatggacagagcgttggtgcctggatcaacctcgtgaagcaactccacatggagatctccagacggacgttggccatgtcatcggtaggagacgactgaagcaaccagccgtgacctgcggctttggaagttcggaggctcctttatgggttcggtttggcgccaagatatcttctatctactcgatagccttttcccattgtagtttatacgtctctctctctggtttggtctgtaattagttcctaacatgttccttttgtatgttgtcaattgtcatgtgctggttgtcacttggctcaaacgatcagtgttggtgttgtgcctttgctgatttgggttgtttgtatgttgtcaatggtcatgtgcgtgttgtcatttggctcaaacgatcagggttggtgttgtggctttgatgatttgcgcacatgtgtgttcaatcagtccgggaattgtttcagttataacgttcatgtaacttagggtatgtttggcaccaaaatatgtttggcccattttgttatggcttgcttgttaaccttgatggttatcatcttgtcatttttttctttgaggagatagggtgtggtagccttcttgttc

SEQ ID NO: 26525 - DNA, 2998 bp, Zea Mays
caacgcaaacccacaagaaagtttcaaaaaaacattcgcactccctccctctaccgccactagccaccctcccctaccccaatcccctctccccagatcgagcgccgcgtggctagggtttgcgcgaccgccggcagcgatgcccgcgtcctccgtctcggggggtagcggccccggaggcgtctccccggatgccatcatcgagtggctgcaggacgagatggggtacccctcggcccctcctgcaccggatcagctccgcaagatctgccggggcaacatgatccccgtctggtccttcctgctccgccgcgtccgctccgagcgaaccgtcgccaccgcgcgccgcaatatcctcgtccacggcgtcgcggcccggcgggcgcgggagggcggagcgatgggggcgggcgcgggtgacgctgcggccagggaggccgaggcgagggagcgggacctcgccgctgaggaggccgagcggttgcgtgggatcgtgaggaggcagcgcaaggagcttcgcgcgcgcatcgcggaggtcgccagggaggaggcggagcgcaagcgcgtcctcggtgagcgctccaatgccaggcacaagcaagttatgctccaagcatatgaacagcaatgcgatgaagcgcacaaaatatttgctgaataccagcgccggctacatcagttcgttaaccaagcaagggacgtgcgaagatcaagtataggcgtggctggagctacaggtgctcttgtggatatgcaattgcagagtgatagagatgatctttacccatcgactatcaaaagcaatagattgccagaggatcttttagaaactgcaggtgaaaggagcattcggaaggcatgtgaaactcttgctgcggatatgattgaaacaattcgaagttcattcccggcatttgaagggtgtggcattaattcaagttgccaattagatgcagaaaagctgggtattgacttggttggtgaaataccaacatatgttaaacttgttgcattggattccctaaagaatccattcatgcttctgcagtcaatcattacctacacatcacgcatgaaaacacttatacatagagaaactgacaagattgacatacgcgctgatgcagaactactgaggtataaatatgaaaatgagcaggttattgatgctgcttcaactgatgcaagctcacccttaccatatcaggtgtatggaaatgggaagactggatcacaattgtcaactcgaggaacatatgatcagctactagaaagacagaaagagcatgtacaacagtttttggcaacagaagatgctttgaacaaagctgcagaagctaaagcactaagtcagaagctattgcaacgcttgtatggcactgctgacatggcaggaaataagaagctgcccactgggaacaccacacagaatgtgaccaacagtaggcatttagagttggacgtttgggccaaggaaagagaagttgcaggactaaaggcgagcttgagtacacttacatctgaggtacaacgtttgtataagttatgcgctgagtggaaggaagcagaagattcactgaagaagaagtggaagaaaatcgaagaatttgacgcccgtcgatcagagctggagttcatttacagtgctcttcagcgggccaatatggattcatcagcattttgggagcaacagccattatcagctagaggatatgcatcaactacaattatccctgcgtgccatgctgtggtagacatgtctacgaactcaagggacctcatagagcgagagttagctgcatttagccagagcttggataatagcttgtgcaggttgccagcaacccctcaggcccttttggaggctgtgggttctaacggcgtgacaggatcagaagcacttgcagctgctgagaaacatgcagctttgttgactgcaagagctggtgccagagatccatctgctgtgccgtctatatgccgcatctctgctgctcttcagtataactttggtacagaaggcacagattctggcttggcttcagtattaaattcactggagttctgcctaaaaccatgtgggtctgaagctagcatattagaggatttatcaaaatctatcaacttggtgcacacacggagaaatcttgttgagaatgaccgtgttttgctgaaccgtgcacatcgtgctcaacaagaatatgaaagagtggccaactattgtcttaaattagctggcgaacaagaaaaggtggtgagtgaaagatggcttccggaactgagaaatgcagttcaagaagctcgaaggtgttttgatgactgccagcgtgttaggggtctggttgatgagtggtacgagcagccagccgccacaattgtggattgggtaacgatagatggacagagcgttggtgcctggatcaacctcgtgaagcaactccacatggagatctccagacggacgttggccatgtcatcggtaggagacgactgaagcaaccagccgtgacctgcggctttggaagttcggaggctcctttatgggttcggtttggcgccaagatatcttctatctactcgatagccttttcccattgtagtttatacgtctctctctctggtttggtctgtaattagttcctaacatgttccttttgtatgttgtcaattgtcatgtgctggttgtcacttggctcaaacgatcagtgttggtgttgtgcctttgctgatttgggttgtttgtatgttgtcaatggtcatgtgcgtgttgtcatttggctcaaacgatcagggttggtgttgtggctttgatgatttgcgcacatgtgtgttcaatcagtccgggaattgtttcagttataacgttcatgtaacttagggtatgtttggcaccaaaatatgtttggcccattttgttatggcttgcttgttaaccttgatggttatcatcttgtcatttttttctttgaggagatagggtgtggtagccttcttgttc

SEQ ID NO: 26526 - DNA, 2992 bp, Zea Mays
caacgcaaacccacaagaaagtttcaaaaaaacattcgcactccctccctctaccgccactagccaccctcccctaccccaatcccctctccccagatcgagcgccgcgtggctagggtttgcgcgaccgccggcagcgatgcccgcgtcctccgtctcggggggtagcggccccggaggcgtctccccggatgccatcatcgagtggctgcaggacgagatggggtacccctcggcccctcctgcaccggatcagctccgcaagatctgccggggcaacatgatccccgtctggtccttcctgctccgccgcgtccgctccgagcgaaccgtcgccaccgcgcgccgcaatatcctcgtccacggcgtcgcggcccggcgggcgcgggagggcggagcgatgggggcgggcgcgggtgacgctgcggccagggaggccgaggcgagggagcgggacctcgccgctgaggaggccgagcggttgcgtgggatcgtgaggaggcagcgcaaggagcttcgcgcgcgcatcgcggaggtcgccagggaggaggcggagcgcaagcgcgtcctcggtgagcgctccaatgccaggcacaagcaagttatgctccaagcatatgaacagcaatgcgatgaagcgcacaaaatatttgctgaataccagcgccggctacatcagttcgttaaccaagcaagggacgtgcgaagatcaagtataggcgtggctggagctacaggtgctcttgtggatatgcaattgcagagtgatagagatgatctttacccatcgactatcaaaagcaatagattgccagaggatcttttagaaactgcaggtgaaaggagcattcggaaggcatgtgaaactcttgctgcggatatgattgaaacaattcgaagttcattcccggcatttgaagggtgtggcattaattcaagttgccaattagatgcagaaaagctgggtattgacttggttggtgaaataccaacatatgttaaacttgttgcattggattccctaaagaatccattcatgcttctgcagtcaatcattacctacacatcacgcatgaaaacacttatacatagagaaactgacaagattgacatacgcgctgatgcagaactactgaggtataaatatgaaaatgagcaggttattgatgctgcttcaactgatgcaagctcacccttaccatatcaggtgtatggaaatgggaagactggatcacaattgtcaactcgaggaacatatgatcagctactagaaagacagaaagagcatgtacaacagtttttggcaacagaagatgctttgaacaaagctgcagaagctaaagcactaagtcagaagctattgcaacgcttgtatggcactgctgacatggcaggaaataagaagctgcccactgggaacaccacacagaatgtgaccaacagtaggcatttagagttggacgtttgggccaaggaaagagaagttgcaggactaaaggcgagcttgagtacacttacatctgaggtacaacgtttgtataagttatgcgctgagtggaaggaagcagaagattcactgaagaagaagtggaagaaaatcgaagaatttgacgcccgtcgatcagagctggagttcatttacagtgctcttcagcgggccaatatggattcatcagcattttgggagcaacagccattatcagctagaggatatgcatcaactacaattatccctgcgtgccatgctgtggtagacatgtctacgaactcaagggacctcatagagcgagagttagctgcatttagccagagcttggataatagcttgtgcaggttgccagcaacccctcaggcccttttggaggctgtgggttctaacggcgtgacaggatcagaagcacttgcagctgctgagaaacatgcagctttgttgactgcaagagctggtgccagagatccatctgctgtgccgtctatatgccgcatctctgctgctcttcagtataactttgaaggcacagattctggcttggcttcagtattaaattcactggagttctgcctaaaaccatgtgggtctgaagctagcatattagaggatttatcaaaatctatcaacttggtgcacacacggagaaatcttgttgagaatgaccgtgttttgctgaaccgtgcacatcgtgctcaacaagaatatgaaagagtggccaactattgtcttaaattagctggcgaacaagaaaaggtggtgagtgaaagatggcttccggaactgagaaatgcagttcaagaagctcgaaggtgttttgatgactgccagcgtgttaggggtctggttgatgagtggtacgagcagccagccgccacaattgtggattgggtaacgatagatggacagagcgttggtgcctggatcaacctcgtgaagcaactccacatggagatctccagacggacgttggccatgtcatcggtaggagacgactgaagcaaccagccgtgacctgcggctttggaagttcggaggctcctttatgggttcggtttggcgccaagatatcttctatctactcgatagccttttcccattgtagtttatacgtctctctctctggtttggtctgtaattagttcctaacatgttccttttgtatgttgtcaattgtcatgtgctggttgtcacttggctcaaacgatcagtgttggtgttgtgcctttgctgatttgggttgtttgtatgttgtcaatggtcatgtgcgtgttgtcatttggctcaaacgatcagggttggtgttgtggctttgatgatttgcgcacatgtgtgttcaatcagtccgggaattgtttcagttataacgttcatgtaacttagggtatgtttggcaccaaaatatgtttggcccattttgttatggcttgcttgttaaccttgatggttatcatcttgtcatttttttctttgaggagatagggtgtggtagccttcttgttc

SEQ ID NO: 26527 - DNA, 2922 bp, Zea Mays
caacgcaaacccacaagaaagtttcaaaaaaacattcgcactccctccctctaccgccactagccaccctcccctaccccaatcccctctccccagatcgagcgccgcgtggctagggtttgcgcgaccgccggcagcgatgcccgcgtcctccgtctcggggggtagcggccccggaggcgtctccccggatgccatcatcgagtggctgcaggacgagatggggtacccctcggcccctcctgcaccggatcagctccgcaagatctgccggggcaacatgatccccgtctggtccttcctgctccgccgcgtccgctccgagcgaaccgtcgccaccgcgcgccgcaatatcctcgtccacggcgtcgcggcccggcgggcgcgggagggcggagcgatgggggcgggcgcgggtgacgctgcggccagggaggccgaggcgagggagcgggacctcgccgctgaggaggccgagcggttgcgtgggatcgtgaggaggcagcgcaaggagcttcgcgcgcgcatcgcggaggtcgccagggaggaggcggagcgcaagcgcgtcctcggtgagcgctccaatgccaggcacaagcaagttatgctccaagcatatgaacagcaatgcgatgaagcgcacaaaatatttgctgaataccagcgccggctacatcagttcgttaaccaagcaagggacgtgcgaagatcaagtataggcgtggctggagctacaggtgctcttgtggatatgcaattgcagagtgatagagatgatctttacccatcgactatcaaaagcaatagattgccagaggatcttttagaaactgcaggtgaaaggagcattcggaaggcatgtgaaactcttgctgcggatatgattgaaacaattcgaagttcattcccggcatttgaagggtgtggcattaattcaagttgccaattagatgcagaaaagctgggtattgacttggttggtgaaataccaacatatgttaaacttgttgcattggattccctaaagaatccattcatgcttctgcagtcaatcattacctacacatcacgcatgaaaacacttatacatagagaaactgacaagattgacatacgcgctgatgcagaactactgaggtgtatggaaatgggaagactggatcacaattgtcaactcgaggaacatatgatcagctactagaaagacagaaagagcatgtacaacagtttttggcaacagaagatgctttgaacaaagctgcagaagctaaagcactaagtcagaagctattgcaacgcttgtatggcactgctgacatggcaggaaataagaagctgcccactgggaacaccacacagaatgtgaccaacagtaggcatttagagttggacgtttgggccaaggaaagagaagttgcaggactaaaggcgagcttgagtacacttacatctgaggtacaacgtttgtataagttatgcgctgagtggaaggaagcagaagattcactgaagaagaagtggaagaaaatcgaagaatttgacgcccgtcgatcagagctggagttcatttacagtgctcttcagcgggccaatatggattcatcagcattttgggagcaacagccattatcagctagaggatatgcatcaactacaattatccctgcgtgccatgctgtggtagacatgtctacgaactcaagggacctcatagagcgagagttagctgcatttagccagagcttggataatagcttgtgcaggttgccagcaacccctcaggcccttttggaggctgtgggttctaacggcgtgacaggatcagaagcacttgcagctgctgagaaacatgcagctttgttgactgcaagagctggtgccagagatccatctgctgtgccgtctatatgccgcatctctgctgctcttcagtataactttgaaggcacagattctggcttggcttcagtattaaattcactggagttctgcctaaaaccatgtgggtctgaagctagcatattagaggatttatcaaaatctatcaacttggtgcacacacggagaaatcttgttgagaatgaccgtgttttgctgaaccgtgcacatcgtgctcaacaagaatatgaaagagtggccaactattgtcttaaattagctggcgaacaagaaaaggtggtgagtgaaagatggcttccggaactgagaaatgcagttcaagaagctcgaaggtgttttgatgactgccagcgtgttaggggtctggttgatgagtggtacgagcagccagccgccacaattgtggattgggtaacgatagatggacagagcgttggtgcctggatcaacctcgtgaagcaactccacatggagatctccagacggacgttggccatgtcatcggtaggagacgactgaagcaaccagccgtgacctgcggctttggaagttcggaggctcctttatgggttcggtttggcgccaagatatcttctatctactcgatagccttttcccattgtagtttatacgtctctctctctggtttggtctgtaattagttcctaacatgttccttttgtatgttgtcaattgtcatgtgctggttgtcacttggctcaaacgatcagtgttggtgttgtgcctttgctgatttgggttgtttgtatgttgtcaatggtcatgtgcgtgttgtcatttggctcaaacgatcagggttggtgttgtggctttgatgatttgcgcacatgtgtgttcaatcagtccgggaattgtttcagttataacgttcatgtaacttagggtatgtttggcaccaaaatatgtttggcccattttgttatggcttgcttgttaaccttgatggttatcatcttgtcatttttttctttgaggagatagggtgtggtagccttcttgttc

SEQ ID NO: 26528 - DNA, 3391 bp, Zea Mays
caacgcaaacccacaagaaagtttcaaaaaaacattcgcactccctccctctaccgccactagccaccctcccctaccccaatcccctctccccagatcgagcgccgcgtggctagggtttgcgcgaccgccggcagcgatgcccgcgtcctccgtctcggggggtagcggccccggaggcgtctccccggatgccatcatcgagtggctgcaggacgagatggggtacccctcggcccctcctgcaccggatcagctccgcaagatctgccggggcaacatgatccccgtctggtccttcctgctccgccgcgtccgctccgagcgaaccgtcgccaccgcgcgccgcaatatcctcgtccacggcgtcgcggcccggcgggcgcgggagggcggagcgatgggggcgggcgcgggtgacgctgcggccagggaggccgaggcgagggagcgggacctcgccgctgaggaggccgagcggttgcgtgggatcgtgaggaggcagcgcaaggagcttcgcgcgcgcatcgcggaggtcgccagggaggaggcggagcgcaagcgcgtcctcggtgagcgctccaatgccaggcacaagcaagttatgctccaagcatatgaacagcaatgcgatgaagcgcacaaaatatttgctgaataccagcgccggctacatcagttcgttaaccaagcaagggacgtgcgaagatcaagtataggcgtggctggagctacaggtgctcttgtggatatgcaattgcagagtgatagagatgatctttacccatcgactatcaaaagcaatagattgccagaggatcttttagaaactgcaggtgaaaggagcattcggaaggcatgtgaaactcttgctgcggatatgattgaaacaattcgaagttcattcccggcatttgaagggtgtggcattaattcaagttgccaattagatgcagaaaagctgggtattgacttggttggtgaaataccaacatatgttaaacttgttgcattggattccctaaagaatccattcatgcttctgcagtcaatcattacctacacatcacgcatgaaaacacttatacatagagaaactgacaagattgacatacgcgctgatgcagaactactgaggtataaatatgaaaatgagcaggttattgatgctgcttcaactgatgcaagctcacccttaccatatcaggtgtatggaaatgggaagactggatcacaattgtcaactcgaggaacatatgatcagctactagaaagacagaaagagcatgtacaacagtttttggcaacagaagatgctttgaacaaagctgcagaagctaaagcactaagtcagaagctattgcaacgcttgtatggcactgctgacatggcaggaaataagaagctgcccactgggaacaccacacagaatgtgaccaacagtaggcatttagagttggacgtttgggccaaggaaagagaagttgcaggactaaaggcgagcttgagtacacttacatctgaggtacaacgtttgtataagttatgcgctgagtggaaggaagcagaagattcactgaagaagaagtggaagaaaatcgaagaatttgacgcccgtcgatcagagctggagttcatttacagtgctcttcagcgggccaatatggattcatcagcattttgggagcaacagccattatcagctagaggatatgcatcaactacaattatccctgcgtgccatgctgtggtagacatgtctacgaactcaagggacctcatagagcgagagttagctgcatttagccagagcttggataatagcttgtgcaggttgccagcaacccctcagccaaccaaaggggtgaaaagtaatagctgctttggagtttggaccaaaatttgttcttactctagtacaaaactgaaagtagctccgcgcctccgcctgcttttacctgctgtgaagacgggcaactttaaaaaaatatccacctgccactggttatgaagatattggcttgttttttcttctttcccgtctccgacttttttttttcatctgtgagactgtgacacctttctcgttccatgtggtatctctggctggtgctgacgctccgatgactcctctctctttggccttctcgaggcaaggccatccctcgagaatgcacggctgtagcccctgcctcggtgccgggcattgccatggacaccgcgcggagcctttgctgccacataggcccttttggaggctgtgggttctaacggcgtgacaggatcagaagcacttgcagctgctgagaaacatgcagctttgttgactgcaagagctggtgccagagatccatctgctgtgccgtctatatgccgcatctctgctgctcttcagtataactttggtacagaaggcacagattctggcttggcttcagtattaaattcactggagttctgcctaaaaccatgtgggtctgaagctagcatattagaggatttatcaaaatctatcaacttggtgcacacacggagaaatcttgttgagaatgaccgtgttttgctgaaccgtgcacatcgtgctcaacaagaatatgaaagagtggccaactattgtcttaaattagctggcgaacaagaaaaggtggtgagtgaaagatggcttccggaactgagaaatgcagttcaagaagctcgaaggtgttttgatgactgccagcgtgttaggggtctggttgatgagtggtacgagcagccagccgccacaattgtggattgggtaacgatagatggacagagcgttggtgcctggatcaacctcgtgaagcaactccacatggagatctccagacggacgttggccatgtcatcggtaggagacgactgaagcaaccagccgtgacctgcggctttggaagttcggaggctcctttatgggttcggtttggcgccaagatatcttctatctactcgatagccttttcccattgtagtttatacgtctctctctctggtttggtctgtaattagttcctaacatgttccttttgtatgttgtcaattgtcatgtgctggttgtcacttggctcaaacgatcagtgttggtgttgtgcctttgctgatttgggttgtttgtatgttgtcaatggtcatgtgcgtgttgtcatttggctcaaacgatcagggttggtgttgtggctttgatgatttgcgcacatgtgtgttcaatcagtccgggaattgtttcagttataacgttcatgtaacttagggtatgtttggcaccaaaatatgtttggcccattttgttatggcttgcttgttaaccttgatggttatcatcttgtcatttttttctttgaggagatagggtgtggtagccttcttgttc

SEQ ID NO: 26529 - DNA, 2937 bp, Zea Mays
caacgcaaacccacaagaaagtttcaaaaaaacattcgcactccctccctctaccgccactagccaccctcccctaccccaatcccctctccccagatcgagcgccgcgtggctagggtttgcgcgaccgccggcagcgatgcccgcgtcctccgtctcggggggtagcggccccggaggcgtctccccggatgccatcatcgagtggctgcaggacgagatggggtacccctcggcccctcctgcaccggatcagctccgcaagatctgccggggcaacatgatccccgtctggtccttcctgctccgccgcgtccgctccgagcgaaccgtcgccaccgcgcgccgcaatatcctcgtccacggcgtcgcggcccggcgggcgcgggagggcggagcgatgggggcgggcgcgggtgacgctgcggccagggaggccgaggcgagggagcgggacctcgccgctgaggaggccgagcggttgcgtgggatcgtgaggaggcagcgcaaggagcttcgcgcgcgcatcgcggaggtcgccagggaggaggcggagcgcaagcgcgtcctcggtgagcgctccaatgccaggcacaagcaagttatgctccaagcatatgaacagcaatgcgatgaagcgcacaaaatatttgctgaataccagcgccggctacatcagttcgttaaccaagcaagggacgtgcgaagatcaagtataggcgtggctggagctacaggtgctcttgtggatatgcaattgcagagtgatagagatgatctttacccatcgactatcaaaagcaatagattgccagaggatcttttagaaactgcaggtgaaaggagcattcggaaggcatgtgaaactcttgctgcggatatgattgaaacaattcgaagttcattcccggcatttgaagggtgtggcattaattcaagttgccaattagatgcagaaaagctgggtattgacttggttggtgaaataccaacatatgttaaacttgttgcattggattccctaaagaatccattcatgcttctgcagtcaatcattacctacacatcacgcatgaaaacacttatacatagagaaactgacaagattgacatacgcgctgatgcagaactactgaggtgtatggaaatgggaagactggatcacaattgtcaactcgaggaacatatgatcagctactagaaagacagaaagagcatgtacaacagtttttggcaacagaagatgctttgaacaaagctgcagaagctaaagcactaagtcagaagctattgcaacgcttgtatggcactgctgacatggcaggaaataagaagctgcccactgggaacaccacacagaatgtgaccaacagtaggcatttagagttggacgtttgggccaaggaaagagaagttgcaggactaaaggcgagcttgagtacacttacatctgaggtacaacgtttgtataagttatgcgctgagtggaaggaagcagaagattcactgaagaagaagtggaagaaaatcgaagaatttgacgcccgtcgatcagagctggagttcatttacagtgctcttcagcgggccaatatggattcatcagcattttgggagcaacagccattatcagctagaggatatgcatcaactacaattatccctgcgtgccatgctgtggtagacatgtctacgaactcaagggacctcatagagcgagagttagctgcatttagccagagcttggataatagcttgtgcaggttgccagcaacccctcaggcccttttggaggctgtgggttctaacggcgtgacaggatcagaagcacttgcagctgctgagaaacatgcagctttgttgactgcaagagctggtgccagagatccatctgctgtgccgtctatatgccgcatctctgctgctcttcagtataactttgtttcaccaggtacagaaggcacagattctggcttggcttcagtattaaattcactggagttctgcctaaaaccatgtgggtctgaagctagcatattagaggatttatcaaaatctatcaacttggtgcacacacggagaaatcttgttgagaatgaccgtgttttgctgaaccgtgcacatcgtgctcaacaagaatatgaaagagtggccaactattgtcttaaattagctggcgaacaagaaaaggtggtgagtgaaagatggcttccggaactgagaaatgcagttcaagaagctcgaaggtgttttgatgactgccagcgtgttaggggtctggttgatgagtggtacgagcagccagccgccacaattgtggattgggtaacgatagatggacagagcgttggtgcctggatcaacctcgtgaagcaactccacatggagatctccagacggacgttggccatgtcatcggtaggagacgactgaagcaaccagccgtgacctgcggctttggaagttcggaggctcctttatgggttcggtttggcgccaagatatcttctatctactcgatagccttttcccattgtagtttatacgtctctctctctggtttggtctgtaattagttcctaacatgttccttttgtatgttgtcaattgtcatgtgctggttgtcacttggctcaaacgatcagtgttggtgttgtgcctttgctgatttgggttgtttgtatgttgtcaatggtcatgtgcgtgttgtcatttggctcaaacgatcagggttggtgttgtggctttgatgatttgcgcacatgtgtgttcaatcagtccgggaattgtttcagttataacgttcatgtaacttagggtatgtttggcaccaaaatatgtttggcccattttgttatggcttgcttgttaaccttgatggttatcatcttgtcatttttttctttgaggagatagggtgtggtagccttcttgttc

SEQ ID NO: 26530 - DNA, 2304 bp, Zea Mays
cgctcttccatatcggcacgctcccaggtcccagcactgctgacaacctcctcctccctctcagctccacgcccctagacccagcaccaccggcgagcatcccctccacgcctctcacgccggcctctaagctctccactttgactcttcccagtccggcccaacccctcccgatgccgacggactccgcgccgccgaacgcagcgtcgctgtccgaagacgaccgactgctcgtcgcccactgcgccacgctctccttcccctccagctcccccacagccgccgccgccactacccattccgcctcctccttccaggtacaccatgcgtcccacccctacccctgcgccgccttcgtcttcccgccctcctggtccgctgccgactggatgggaggcgatggcggccatccgccgttcggggacgccgaggtggacccggccctgttcccgtcactccgcgctgtcgggagcggcatccccgcgcgcaccaacgccgccttcctcgggaacttccgtcggctgctcgacggatcgacgctccagtccgaggtatcaagagctgttgcggaggagaaacgtgtagtattcacaggccattcatcaggaggttcaatagccacacttgctgctatatggtttcttgagaagtgcaccagacgaggaagtgttaatcaagcacatccattttgtgtgacctttggggctccccttattggagacaatatcttcaatcatgctgttaaaagagagggctggtcacagtgtattttgcatttccttcttccactagacattgtcccacgcataccactgactccacttgcatccttcagagaagaaactcaagctgttctggatcggttatcttctcagacgccaaacaactctcctgctgggaggtcccttgttatacctgaatattatgaaactttattgagaagcacactatctattgccagttatgaggcctgttctttcatgggatgtaccagctccatcctggggacattgacttctttcattgacctctccccttacagaccttgtgggacttatcatttcttgacaagcagtgagcaattgattgttctcgcaaattcagatgctgtactgcagttgttattctactgccttcagttggatccccagcaacaactgcttgatgctgctgctagaagcttaagtgctcactggcagtacgaaccaattaaatactgcatacaggatatagtttgtgtggattacctgggaacaatctcatcagctgttcctggtaggcaggcaggcagagtggcccttggaagcattgaactgggaagctatactgcacctttctgcagctgctcaatgggagaagcaaagacagagaaaccaaacaaaaatagatgaaagctgccaaaagattcaggaagctctcaggtccctaaacgagtacaaaagatcaagggaactcgatggcgtgagctactacgattccttcaagctccaacgtgaggtgcatgacttcaatgcaaacgtgaaaaggctagagctagctggcctctgggacgagatagtggagatgctgcggaggcgtgagctgccggacggcttcgaggctcgtgaggagtgggtgagcctggggaccttgttccgtcgcctggtcgagccgctggacatcgccaactactaccggcactccaagaacgaggacaccggctcctacctctccaaggggcggccgaggcggtacaagtacacgcagaagtggcacgagcagctgcagcgcgttcccgtcgggtccagcctcgagtcctgcttctgggcggtggtcgaggagctccaggccgagatggccgacggtagggcgttcgaggatctgagagaacggttggttaaacttgagaacgatgcgcatggctggtataattctggaagtttgggcaaggacgtgtttctggggagctcgtctttcgtggcgtggtggaggacgctcccagagcagcatagggcggcgtcgagcattgcgaaacttgtatctctataaagggattttggctgaggaactagcgtttctagatctttgtaattatgctgctctatatgtacttcccaagttcaataagaagactagcatagttcttagggttcgtttggatgtagatattgaagatgttagaattaaattatatcaatatcaaatatgtctagtattggaaatgagtttcaatgtaaatctgttatttggatgtatctggaattacaattccatccaatacctagagtcttgactctgaattgtgagagacaccttttagttaaa

SEQ ID NO: 26531 - DNA, 1803 bp, Zea Mays
atttctcctctcgcttcttccattttgaggcgctacttcgaacaggtatcaagagctgttgcggaggagaaacgtgtagtattcacaggccattcatcaggaggttcaatagccacacttgctgctatatggtttcttgagaagtgcaccagacgaggaagtgttaatcaagcacatccattttgtgtgacctttggggctccccttattggagacaatatcttcaatcatgctgttaaaagagagggctggtcacagtgtattttgcatttccttcttccactagacattgtcccacgcataccactgactccacttgcatccttcagagaagaaactcaagctgttctggatcggttatcttctcagacgccaaacaactctcctgctgggaggtcccttgttatacctgaatattatgaaactttattgagaagcacactatctattgccagttatgaggcctgttctttcatgggatgtaccagctccatcctggggacattgacttctttcattgacctctccccttacagaccttgtgggacttatcatttcttgacaagcagtgagcaattgattgttctcgcaaattcagatgctgtactgcagttgttattctactgccttcagttggatccccagcaacaactgcttgatgctgctgctagaagcttaagtgctcactggcagtacgaaccaattaaatactgcatacaggatatagtttgtgtggattacctgggaacaatctcatcagctgttcctggtaggcaggcaggcagagtggcccttggaagcattgaactgagcagggaagctatactgcacctttctgcagctgctcaatgggagaagcaaagacagagaaaccaaacaaaaatagatgaaagctgccaaaagattcaggaagctctcaggtccctaaacgagtacaaaagatcaagggaactcgatggcgtgagctactacgattccttcaagctccaacgtgaggtgcatgacttcaatgcaaacgtgaaaaggctagagctagctggcctctgggacgagatagtggagatgctgcggaggcgtgagctgccggacggcttcgaggctcgtgaggagtgggtgagcctggggaccttgttccgtcgcctggtcgagccgctggacatcgccaactactaccggcactccaagaacgaggacaccggctcctacctctccaaggggcggccgaggcggtacaagtacacgcagaagtggcacgagcagctgcagcgcgttcccgtcgggtccagcctcgagtcctgcttctgggcggtggtcgaggagctccaggccgagatggccgacggtagggcgttcgaggatctgagagaacggttggttaaacttgagaacgatgcgcatggctggtataattctggaagtttgggcaaggacgtgtttctggggagctcgtctttcgtggcgtggtggaggacgctcccagagcagcatagggcggcgtcgagcattgcgaaacttgtatctctataaagggattttggctgaggaactagcgtttctagatctttgtaattatgctgctctatatgtacttcccaagttcaataagaagactagcatagttcttagggttcgtttggatgtagatattgaagatgttagaattaaattatatcaatatcaaatatgtctagtattggaaatgagtttcaatgtaaatctgttatttggatgtatctggaattacaattccatccaatacctagagtcttgactctgaattgtgagagacaccttttagttaaa

SEQ ID NO: 26532 - DNA, 940 bp, Zea Mays
cacctcaccttctcatttcccagccgtaagcctcttcctcacgcacgcccttctatcttcaacctctagcaactcccttgttcctggtggctggcgccctacacgacttccccctccctgcaccctctcagcgcccaagccctcctccatcccctccgctcgacaccctccccttccctggcgtcttcccctaggcagccagccaccgccatgggaactcatctccctagagctcggctcccctgcaccttcaccaatttcgtcggtttcccctagtctttatcgacctcggcgtctactgagctctggtccatggcgccccatcttcttctccatttgcgagaccctgctcctctgcacctgtgcacccattccatggatgtgtcgttcctttcctcatccatggcgcccccatgccatttccccacctccgacaactgttgtatccgcggctgaccagcagcagggacgctggcttgggacaccaacagctgacacaggaagctctccagtagggcgccccttcccagccaacccctgcaacgcacggctcctgctcgccctgttgatgctcgacataatgcctaggacgagcattgcgttgcatacaaccaacgtttcatccaagtgacccatcctccacaaccaaggtccctcgtcatgccccctgcaaatcgcgcaccttgttatcccacgccttgtccttgctattccttgctatgtgctcaccatttcgtgccccgtcacagtctgcgcggcgtagcggcagccttgccgtcgcttcgcgtcgtgcgcgcaacacgtcatcgtggctcgccactagctcatctggctgtctaccgtcgttgcgagatcgtgatttgttcccgcgcttcgaggaatcgatgatcaagcttcgacgatcaagtgatctagctcttcgagttccatgaggctgaag

SEQ ID NO: 26533 - DNA, 808 bp, Zea Mays
aatctcttctctcttgcccgtcatggggaaatccatgcggccggcctccccaacgtccctaaccctcgccgcccatccagtggacagtaccacgggtactatagtattgttcatccgtgtgaacagtaccgtgcctccccatccaacagcccgacggcgtccaagcgtcggggtcctggttctagaccccaaacctaccactcgtacaacctccatatcaccttccctcttgcttggtcatggacaaggctcctgggtggcccctcgcgctcccccaaccttgcctccgccataacattacgaacaagctgatggaaaacaagggattgaactattgcaagatatactgaaatcaagacagtgggtaaagtctgacaaattatctgctgcattaaaatcacctcttatgcgtttatgtgcaaggtatcttgccagagagaagaagcgaggaaaagctctagacgctgttgcaaattttcacttgcaaaatggagcaatgattgagagaattaattggatggctgaccaatcagagaagggcattcaacaaagtggaggtatcatggtcaattatctttacagattagagaacatagaagagtatgcattgtcatattcgagtacagggctcatccattcttcacctagcctgtctgagtatcttgagccgaaggatttatgagacaaaatatttctggaacggacttttgcttcctgaggtcttaaaagcttctggcatatgtttctgagttggtcctcgtgtatacttaactagtttgtaaaagggtgacaaattgactgctgtaac

SEQ ID NO: 26534 - DNA, 896 bp, Zea Mays
ggaaggcttgccttggtttttcccttctccagaccccgctcatgtgggagcctccagcactaggaggtcttgtgggatgaccccccaactcctgaatctgaagctagttgtgcactattttactcaatatcgtcaacccaggtattaatctagggaagtttcttctcaagcgtgtgattgacatgttgagaagagatatgccatcagtacagaattttgcaacacttagcccaatccctggtttgatgcaatggcttcttgctaagctggcctcccaaataaaattatcagaggcagaatcacgggaggggaattcactaggagcctgttctactttcaaagaatccatccttcttcctgatgaagagagaatgattcatgatgccatcgaacaagctgatggaaaacaagggattgaactattgcaagatatactgaaatcaagacagtgggtaaagtctgacaaattatctgctgcattaaaatcacctcttatgcgtttatgtgcaaggtatcttgccagagagaagaagcgaggaaaagctctagacgctgttgcaaattttcacttgcaaaatggagcaatgattgagagaattaattggatggctgaccaatcagagaagggcattcaacaaagtggaggtatcatggtcaattatctttacagattagagaacatagaagagtatgcattgtcatattcgagtacagggctcatccattcttcacctagcctgtctgagtatcttgagccgaaggatttatgagacaaaatatttctggaacggacttttgcttcctgaggtcttaaaagcttctggcatatgtttctgagttggtcctcgtgtatacttaactagtttgtaaaagggtgacaaattgactgctgtaac

SEQ ID NO: 26535 - DNA, 927 bp, Zea Mays
ctgttactagtcatgctacaagctaatctagttttgggaaccactgattttcattgaagttgctttactcaaagatatggaagcatctatacaggaggtcttgtgggatgaccccccaactcctgaatctgaagctagttgtgcactattttactcaatatcgtcaacccaggtattaatctagggaagtttcttctcaagcgtgtgattgacatgttgagaagagatatgccatcagtacagaattttgcaacacttagcccaatccctggtttgatgcaatggcttcttgctaagctggcctcccaaataaaattatcagaggcagaatcacgggaggggaattcactaggagcctgttctactttcaaagaatccatccttcttcctgatgaagagagaatgattcatgatgccatcgaacaagctgatggaaaacaagggattgaactattgcaagatatactgaaatcaagacagtgggtaaagtctgacaaattatctgctgcattaaaatcacctcttatgcgtttatgtgcaaggtatcttgccagagagaagaagcgaggaaaagctctagacgctgttgcaaattttcacttgcaaaatggagcaatgattgagagaattaattggatggctgaccaatcagagaagggcattcaacaaagtggaggtatcatggtcaattatctttacagattagagaacatagaagagtatgcattgtcatattcgagtacagggctcatccattcttcacctagcctgtctgagtatcttgagccgaaggatttatgagacaaaatatttctggaacggacttttgcttcctgaggtcttaaaagcttctggcatatgtttctgagttggtcctcgtgtatacttaactagtttgtaaaagggtgacaaattgactgctgtaac

SEQ ID NO: 26536 - DNA, 1930 bp, Zea Mays
atgacaagacacaacatatcgaagtcgctcgccgtcgtcctccgcgcccgcatgcagcccaatcccatctcctccccgcctccgccgacccctccgccgccgcccacggaccccgaccccgccgccccgcttgtggcttccgtcagccactggctccacgtatctgcctccgccgcctccccgccccccgcggcgctcgacagcttctccgatgggtaccgctccctcgaccttgtcgggcgccgcgaggtcctccgttccctcgccgtcgactacgatgtgccccgcgcgcgtgtccgggatctcatgaaacagtacatgagcgtcacctccgccgaaccatcaggcgtggatgacgtggaggcggaggaggggaaggagggcgccgcgtcggccctgtaccggatggagagggggctccgggatgcactccggccccggtacgccggattccttgaggccatgaacgcgcagccaggtgggctcaagctcctcgccgtgctccgtgccgatctcctcgccttgctgggagaggagaacgtttcagcgctgcgggctctggactcgtacttgaaggagaaactggtgacttggcttagtcctgctgcattgacgctccaccagataacctgggatgatcctgcctcgttgctagagaagattgtggcatatgaagccgtacatccaatcaggaatctgatagacttgaagagaagattgggcattggtcgccgatgctttgggtacttccatccagcaataccaggggaaccactgattttcattgaagttgctttactcaaagatatggaagcatctatacaggaggtcttgtgggatgaccccccaactcctgaatctgaagctagttgtgcactattttactcaatatcgtcaacccaggtattaatctagggaagtttcttctcaagcgtgtgattgacatgttgagaagagatatgccatcagtacagaattttgcaacacttagcccaatccctggtttgatgcaatggcttcttgctaagctggcctcccaaataaaattatcagaggcagaatcacgggaggggaattcactaggagcctgttctactttcaaagaatccatccttcttcctgatgaagagagaatgattcatgatgccatcgaacaagctgatggaaaacaagggattgaactattgcaagatatactgaaatcaagacagtgggtaaagtctgacaaattatctgctgcattaaaatcacctcttatgcgtttatgtgcaaggtatcttgccagagagaagaagcgaggaaaagctctagacgctgttgcaaattttcacttgcaaaatggagcagtaagctactatcacaaattcagtttgaaatggtgctgctgaagaacagatgtggttttgtcatgtttggttgacctgtacctgaaaaaaataaacaaagggcagacccggtgatttttttaaataaaattgtaaaacgatgttgtagtaccttctttactatgtaagacattatatgatatttttcatgtgtaaacttggggcctaatcaaatcagataactagctatttgaaacaaccgcttcacataacagcacttgctattttggtagatgattgagagaattaattggatggctgaccaatcagagaagggcattcaacaaagtggaggtatcatggtcaattatctttacagattagagaacatagaagagtatgcattgtcatattcgagtacagggctcatccattcttcacctagcctgtctgagtatcttgagccgaaggatttatgagacaaaatatttctggaacggacttttgcttcctgaggtcttaaaagcttctggcatatgtttctgagttggtcctcgtgtatacttaactagtttgtaaaagggtgacaaattgactgctgtaac

SEQ ID NO: 26537 - DNA, 1888 bp, Zea Mays
ctccctggctccggccttcagccgcctcgccagcgacgaccacggctgcgtcacatgacaagacacaacatatcgaagtcgctcgccgtcgtcctccgcgcccgcatgcagcccaatcccatctcctccccgcctccgccgacccctccgccgccgcccacggaccccgaccccgccgccccgcttgtggcttccgtcagccactggctccacgtatctgcctccgccgcctccccgccccccgcggcgctcgacagcttctccgatgggtaccgctccctcgaccttgtcgggcgccgcgaggtcctccgttccctcgccgtcgactacgatgtgccccgcgcgcgtgtccgggatctcatgaaacagtacatgagcgtcacctccgccgaaccatcaggcgtggatgacgtggaggcggaggaggggaaggagggcgccgcgtcggccctgtaccggatggagagggggctccgggatgcactccggccccggtacgccggattccttgaggccatgaacgcgcagccaggtgggctcaagctcctcgccgtgctccgtgccgatctcctcgccttgctgggagaggagaacgtttcagcgctgcgggctctggactcgtacttgaaggagaaactggtgacttggcttagtcctgctgcattgacgctccaccagataacctgggatgatcctgcctcgttgctagagaagattgtggcatatgaagccgtacatccaatcaggaatctgatagacttgaagagaagattgggcattggtcgccgatgctttgggtacttccatccagcaataccaggggaaccactgattttcattgaagttgctttactcaaagatatggaagcatctatacaggaggtcttgtgggatgaccccccaactcctgaatctgaagctagttgtgcactattttactcaatatcgtcaacccagccgggtttatcaggtattaatctagggaagtttcttctcaagcgtgtgattgacatgttgagaagagatatgccatcagtacagaattttgcaacacttagcccaatccctggtttgatgcaatggcttcttgctaagctggcctcccaaataaaattatcagaggcagaatcacgggaggggaattcactaggagcctgttctactttcaaagaatccatccttcttcctgatgaagagagaatgattcatgatgccatcgaacaagctgatggaaaacaagggattgaactattgcaagatatactgaaatcaagacagtgggtaaagtctgacaaattatctgctgcattaaaatcacctcttatgcgtttatgtgcaaggtatcttgccagagagaagaagcgaggaaaagctctagacgctgttgcaaattttcacttgcaaaatggagcagtaagctactatcacaaattcagtttgaaatggtgctgctgaagaacagatgtggttttgtcatgtttggttgacctgtacctgaaaaaaataaacaaagggcagacccggtgatttttttaaataaaattgtaaaacgatgttgtagtaccttctttactatatgattgagagaattaattggatggctgaccaatcagagaagggcattcaacaaagtggaggtatcatggtcaattatctttacagattagagaacatagaagagtatgcattgtcatattcgagtacagggctcatccattcttcacctagcctgtctgagtatcttgagccgaaggatttatgagacaaaatatttctggaacggacttttgcttcctgaggtcttaaaagcttctggcatatgtttctgagttggtcctcgtgtatacttaactagtttgtaaaagggtgacaaattgactgctgtaac

SEQ ID NO: 26538 - DNA, 1789 bp, Zea Mays
gccgaacccaaccgcaaaagttggcaccgcggcacggcggcaccgcccgcgaaaacgcaaccaccggcgccgtcaccctccctggctccggccttcagccgcctcgccagcgacgaccacggctgcgtcacatgacaagacacaacatatcgaagtcgctcgccgtcgtcctccgcgcccgcatgcagcccaatcccatctcctccccgcctccgccgacccctccgccgccgcccacggaccccgaccccgccgccccgcttgtggcttccgtcagccactggctccacgtatctgcctccgccgcctccccgccccccgcggcgctcgacagcttctccgatgggtaccgctccctcgaccttgtcgggcgccgcgaggtcctccgttccctcgccgtcgactacgatgtgccccgcgcgcgtgtccgggatctcatgaaacagtacatgagcgtcacctccgccgaaccatcaggcgtggatgacgtggaggcggaggaggggaaggagggcgccgcgtcggccctgtaccggatggagagggggctccgggatgcactccggccccggtacgccggattccttgaggccatgaacgcgcagccaggtgggctcaagctcctcgccgtgctccgtgccgatctcctcgccttgctgggagaggagaacgtttcagcgctgcgggctctggactcgtacttgaaggagaaactggtgacttggcttagtcctgctgcattgacgctccaccagataacctgggatgatcctgcctcgttgctagagaagattgtggcatatgaagccgtacatccaatcaggaatctgatagacttgaagagaagattgggcattggtcgccgatgctttgggtacttccatccagcaataccaggggaaccactgattttcattgaagttgctttactcaaagatatggaagcatctatacaggaggtcttgtgggatgaccccccaactcctgaatctgaagctagttgtgcactattttactcaatatcgtcaacccaggtattaatctagggaagtttcttctcaagcgtgtgattgacatgttgagaagagatatgccatcagtacagaattttgcaacacttagcccaatccctggtttgatgcaatggcttcttgctaagctggcctcccaaataaaattatcagaggcagaatcacgggaggggaattcactaggagcctgttctactttcaaagaatccatccttcttcctgatgaagagagaatgattcatgatgccatcgaacaagctgatggaaaacaagggattgaactattgcaagatatactgaaatcaagacagtgggtaaagtctgacaaattatctgctgcattaaaatcacctcttatgcgtttatgtgcaaggtatcttgccagagagaagaagcgaggaaaagctctagacgctgttgcaaattttcacttgcaaaatggagcaatgattgagagaattaattggatggctgaccaatcagagaagggcattcaacaaagtggaggtatcatggtcaattatctttacagattagagaacatagaagagtatgcattgtcatattcgagtacagggctcatccattcttcacctagcctgtctgagtatcttgagccgaaggatttatgagacaaaatatttctggaacggacttttgcttcctgaggtcttaaaagcttctggcatatgtttctgagttggtcctcgtgtatacttaactagtttgtaaaagggtgacaaattgactgctgtaac

SEQ ID NO: 26539 - DNA, 1823 bp, Zea Mays
cgcgacacctaccggtcaccggccgaacccaaccgcaaaagttggcaccgcggcacggcggcaccgcccgcgaaaacgcaaccaccggcgccgtcaccctccctggctccggccttcagccgcctcgccagcgacgaccacggctgcgtcacatgacaagacacaacatatcgaagtcgctcgccgtcgtcctccgcgcccgcatgcagcccaatcccatctcctccccgcctccgccgacccctccgccgccgcccacggaccccgaccccgccgccccgcttgtggcttccgtcagccactggctccacgtatctgcctccgccgcctccccgccccccgcggcgctcgacagcttctccgatgggtaccgctccctcgaccttgtcgggcgccgcgaggtcctccgttccctcgccgtcgactacgatgtgccccgcgcgcgtgtccgggatctcatgaaacagtacatgagcgtcacctccgccgaaccatcaggcgtggatgacgtggaggcggaggaggggaaggagggcgccgcgtcggccctgtaccggatggagagggggctccgggatgcactccggccccggtacgccggattccttgaggccatgaacgcgcagccaggtgggctcaagctcctcgccgtgctccgtgccgatctcctcgccttgctgggagaggagaacgtttcagcgctgcgggctctggactcgtacttgaaggagaaactggtgacttggcttagtcctgctgcattgacgctccaccagataacctgggatgatcctgcctcgttgctagagaagattgtggcatatgaagccgtacatccaatcaggaatctgatagacttgaagagaagattgggcattggtcgccgatgctttgggtacttccatccagcaataccaggggaaccactgattttcattgaagttgctttactcaaagatatggaagcatctatacaggaggtcttgtgggatgaccccccaactcctgaatctgaagctagttgtgcactattttactcaatatcgtcaacccagccgggtttatcaggtattaatctagggaagtttcttctcaagcgtgtgattgacatgttgagaagagatatgccatcagtacagaattttgcaacacttagcccaatccctggtttgatgcaatggcttcttgctaagctggcctcccaaataaaattatcagaggcagaatcacgggaggggaattcactaggagcctgttctactttcaaagaatccatccttcttcctgatgaagagagaatgattcatgatgccatcgaacaagctgatggaaaacaagggattgaactattgcaagatatactgaaatcaagacagtgggtaaagtctgacaaattatctgctgcattaaaatcacctcttatgcgtttatgtgcaaggtatcttgccagagagaagaagcgaggaaaagctctagacgctgttgcaaattttcacttgcaaaatggagcaatgattgagagaattaattggatggctgaccaatcagagaagggcattcaacaaagtggaggtatcatggtcaattatctttacagattagagaacatagaagagtatgcattgtcatattcgagtacagggctcatccattcttcacctagcctgtctgagtatcttgagccgaaggatttatgagacaaaatatttctggaacggacttttgcttcctgaggtcttaaaagcttctggcatatgtttctgagttggtcctcgtgtatacttaactagtttgtaaaagggtgacaaattgactgctgtaac

SEQ ID NO: 26540 - DNA, 1826 bp, Zea Mays
cgcgacacctaccggtcaccggccgaacccaaccgcaaaagttggcaccgcggcacggcggcaccgcccgcgaaaacgcaaccaccggcgccgtcaccctccctggctccggccttcagccgcctcgccagcgacgaccacggctgcgtcacatgacaagacacaacatatcgaagtcgctcgccgtcgtcctccgcgcccgcatgcagcccaatcccatctcctccccgcctccgccgacccctccgccgccgcccacggaccccgaccccgccgccccgcttgtggcttccgtcagccactggctccacgtatctgcctccgccgcctccccgccccccgcggcgctcgacagcttctccgatgggtaccgctccctcgaccttgtcgggcgccgcgaggtcctccgttccctcgccgtcgactacgatgtgccccgcgcgcgtgtccgggatctcatgaaacagtacatgagcgtcacctccgccgaaccatcaggcgtggatgacgtggaggcggaggaggggaaggagggcgccgcgtcggccctgtaccggatggagagggggctccgggatgcactccggccccggtacgccggattccttgaggccatgaacgcgcagccaggtgggctcaagctcctcgccgtgctccgtgccgatctcctcgccttgctgggagaggagaacgtttcagcgctgcgggctctggactcgtacttgaaggagaaactggtgacttggcttagtcctgctgcattgacgctccaccagataacctgggatgatcctgcctcgttgctagagaagattgtggcatatgaagccgtacatccaatcaggaatctgatagacttgaagagaagattgggcattggtcgccgatgctttgggtacttccatccagcaataccaggggaaccactgattttcattgaagttgctttactcaaagatatggaagcatctatacaggaggtcttgtgggatgaccccccaactcctgaatctgaagctagttgtgcactattttactcaatatcgtcaacccagccgggtttatcaggtattaatctagggaagtttcttctcaagcgtgtgattgacatgttgagaagagatatgccatcagtacagaattttgcaacacttagcccaatccctggtttgatgcaatggcttcttgctaagctggcctcccaaataaaattatcagaggcagaatcacgggaggggaattcactaggagcctgttctactttcaaagaatccatccttcttcctgatgaagagagaatgattcatgatgccatcgaacaagctgatggaaaacaagggattgaactattgcaagatatactgaaatcaagacagtgggtaaagtctgacaaattatctgctgcattaaaatcacctcttatgcgtttatgtgcaaggtatcttgccagagagaagaagcgaggaaaagctctagacgctgttgcaaattttcacttgcaaaatggagcaatgattgagagaattaattggatggctgaccaatcagagaagggcattcaacaaagtggaggtatcatggtcaattatctttacagattagagaacatagaagagtatgcattgtcatattcgagtacagggctcatccattcttcacctagcctgtctgagtatcttgagcagccgaaggatttatgagacaaaatatttctggaacggacttttgcttcctgaggtcttaaaagcttctggcatatgtttctgagttggtcctcgtgtatacttaactagtttgtaaaagggtgacaaattgactgctgtaac

SEQ ID NO: 26541 - DNA, 546 bp, Zea Mays
gatggttttactggtcgcttttacaagcgaacaagctgatggaaaacaagggattgaactattgcaagatatactgaaatcaagacagtgggtaaagtctgacaaattatctgctgcattaaaatcacctcttatgcgtttatgtgcaaggtatcttgccagagagaagaagcgaggaaaagctctagacgctgttgcaaattttcacttgcaaaatggagcaatgattgagagaattaattggatggctgaccaatcagagaagggcattcaacaaagtggaggtatcatggtcaattatctttacagattagagaacatagaagagtatgcattgtcatattcgagtacagggctcatccattcttcacctagcctgtctgagtatcttgaggttagtaatattggcttgtgccttatactgatatatatatattttgattgaaccacccccatttattacttctgctatttttgtcatcctgcttttatatctcactgagaattctgtagcagccgaaggatttatgagacaaaatatttctg

SEQ ID NO: 26542 - DNA, 1580 bp, Zea Mays
caaccaccggcgccgtcaccctccctggctccggccttcagccgcctcgccagcgacgaccacggctgcgtcacatgacaagacacaacatatcgaagtcgctcgccgtcgtcctccgcgcccgcatgcagcccaatcccatctcctccccgcctccgccgacccctccgccgccgcccacggaccccgaccccgccgccccgcttgtggcttccgtcagccactggctccacgtatctgcctccgccgcctccccgccccccgcggcgctcgacagcttctccgatgggtaccgctccctcgaccttgtcgggcgccgcgaggtcctccgttccctcgccgtcgactacgatgtgccccgcgcgcgtgtccgggatctcatgaaacagtacatgagcgtcacctccgccgaaccatcaggcgtggatgacgtggaggcggaggaggggaaggagggcgccgcgtcggccctgtaccggatggagagggggctccgggatgcactccggccccggtacgccggattccttgaggccatgaacgcgcagccaggtgggctcaagctcctcgccgtgctccgtgccgatctcctcgccttgctgggagaggagaacgtttcagcgctgcgggctctggactcgtacttgaaggagaaactggtgacttggcttagtcctgctgcattgacgctccaccagataacctgggatgatcctgcctcgttgctagagaagattgtggcatatgaagccgtacatccaatcaggaatctgatagacttgaagagaagattgggcattggtcgccgatgctttgggtacttccatccagcaataccaggggaaccactgattttcattgaagttgctttactcaaagatatggaagcatctatacaggaggtcttgtgggatgaccccccaactcctgaatctgaagctagttgtgcactattttactcaatatcgtcaacccagccgggtttatcaggtattaatctagggaagtttcttctcaagcgtgtgattgacatgttgagaagagatatgccatcagtacagcgaacaagctgatggaaaacaagggattgaactattgcaagatatactgaaatcaagacagtgggtaaagtctgacaaattatctgctgcattaaaatcacctcttatgcgtttatgtgcaaggtatcttgccagagagaagaagcgaggaaaagctctagacgctgttgcaaattttcacttgcaaaatggagcaatgattgagagaattaattggatggctgaccaatcagagaagggcattcaacaaagtggaggtatcatggtcaattatctttacagattagagaacatagaagagtatgcattgtcatattcgagtacagggctcatccattcttcacctagcctgtctgagtatcttgaggttagtaatattggcttgtgccttatactgatatatatatattttgattgaaccacccccatttattacttctgctatttttgtcatcctgcttttatatctcactgagaattctgtagcagccgaaggatttatgagacaaaatatttctg

SEQ ID NO: 26543 - DNA, 340 bp, Zea Mays
tgctatttatacccaaatgcggcgctcgttgtgcatgtttttgcgcccgcaccggagcaacaagagaacctcgcccgccataagcaaatcacgccgaagtcgcgtccctgcatcctgacgaagttctcggcatcgtcgataggcgggagcaacattatcgcaccttgaaacgctcaccggtgtggggatggatcacgaatccacccctcatcgtggtcgggggttctgcgcgtctaccgccggtcaagaataggcaccgcaggatgaggcgcatgaaggatgtcgcgatgatgttcgtgagaggtctaggccgtcgtctcccggtcaactttggttgcta

SEQ ID NO: 26544 - DNA, 276 bp, Zea Mays
atttgggttggtatctacttatacttagtaactgctaataaaattttgaccaactctaaaaacaatgctcaactttaaccatctcctttggtaagccttacacttcacatgagctcccacctttggtgagttcatgcatattattccccacaacttgttgagcgattaacgtatgtgagctcacccttgttgtactcacatcccccaggtcaagaataggcaccgcaggatgaggcgcatgaaggatgtcgcgatgatgttcgtgagaggtctagg

SEQ ID NO: 26545 - DNA, 104 bp, Zea Mays
gaggaggcagtgggcgacggcgggttcgcgaaggagacgaagagaagcgcagtcgagtcggggaaaacctacccgacgttacgaggccgggggcgaaagcccgc

SEQ ID NO: 26546 - DNA, 790 bp, Zea Mays
tgaattggatcagcacatctgtaataaagggaagcatatatagctggaactaacacaaaaaataactcatcatcatcatcctcctcctgtttcaaatgtttctttatcaactcaattctagaacccatttgttagtatacctaaaacaagagaacatgtttgagaaatatgacaagaagtgtgtacatggttgcaccaaattatttttaaaaagttcagagaaatactttgtcagagaaatagtctacgctaaccattatgaaatggttgcaccaaattcttcttattgatttagtagttgagaaaacaatctagaagaaatacgtagcattgatactgaagtgaattcttatatataagaaatttggaatcaatttgctctaacggaatttggaatcaatctggaagaaatatacgaccagaccagcagtaattaacaatattatgatatgtctctcaacagcaatctaagctaaaaaaaaccagcaagtactccctgcgtaatgaaccagcagtaattaacaatattattgatttgttgttttcgtcaaactgaacagtcctgcgcaacttggggcaagggatcaggatcctggtgaccaagattccgaaggagacccgtaatgaaccagcgctactagtagataaagcaacactacccaccgctactagtagataaagcaacgagataaagaaagaatcagcaagaacgtaatgaaccagcaagtactcacctgaggcgattcacttcttgagatgagggtgcacgagccgagaaggcagcaacgag

SEQ ID NO: 26547 - DNA, 1372 bp, Zea Mays
gtcttagggactccacgttcagactcgcaccacgcaacggcaaagcatagcaacggcggcggcgcagcaagcagttcagctcagcacctcgccggctcacccatcccctgccggccgactctacctggtccccagcacagcaagcagttcaccggagccggcgcagcaagtagtcagcaattagttcctattgcaggttgattaacaaggtcatggatgatgggattgagatcactcaagctcctaagctctcacaaccaccagtgagcgccatggatgtggatgtgcaagctctatgtgtggagggtggcgatgctggtaggaatgaccaaactacaggagaacatgaacctgctattgatgcctctgttgataaagatgatgctagcccgcttgttggaaagaaaaagaaatccatgagtgtagaccatcgtgtagtcaaacaacgaaccattactcctacaagcaagtataggacatcgaaagatattgttttagtgcaaacacttgcaaaagttgtgcaaggtgcaggcgcaagtgcaagtgcaagcacaagcgcggctgcaacaagcataggtgcaagtgcccaatgccaaggaagtgttggagacaatgaatgcaacaaatattagcaagtgtttgaaaaaattctatgatgtcacattgctttttttctagcacttcatatcctactgcaaatcatttctttcggaggttttctgagattaagatggctattgcaagatggtgtgatagtagtgatctggtaatttgcacaatggcattttctatgagacacaagtttgataaatattgggaaatgaacaatttagctttgacagtgggagcatttcttgatcctagatacaaacataggatgattaggctatatatgtctaagatgtatgacagtgataaagccgagttagagaaattggtattcatgaatgttaacaatgaattatttgcatattattcagcagtcatcaatgcaaaaatcaaccagaaaaggttctagttcaagagagagtgagtttgttccacataaacatacttgtttggtggatgaggaggatgaggttgatcttgatgagttgtatgcaacaacaagcaatgacaagaaggtgtcagagttagaattgtacatgagcaaggacctagtgaaggtcaatgacaatgaagcaacgtttgatatcctatcatggtggaaaggacaagtgacaaatttgcctattctttctacccttgttcgtgatgtgttgtctatgcaagtgtctattgttgcttcagagtctgcatttagttccggtggactcattgttgatgcattccgttcaaggctcaaaccagaaattatcgaggcattggtttg

SEQ ID NO: 26548 - DNA, 1453 bp, Zea Mays
gccaaatcagacaagtctccaaacccaatgtcgacatgctagtatccgctgcctgcctgcctcacagggtcacgtacagccgcagggtgccagggttagggtcttagggactccacgttcagactcgcaccacgcaacggcaaagcatagcaacggcggcggcgcagcaagcagttcagctcagcacctcgccggctcacccatcccctgccggccgactctacctggtccccagcacagcaagcagttcaccggagccggcgcagcaagtagtcaggttgattaacaaggtcatggatgatgggattgagatcactcaagctcctaagctctcacaaccaccagtgagcgccatggatgtggatgtgcaagctctatgtgtggagggtggcgatgctggtaggaatgaccaaactacaggagaacatgaacctgctattgatgcctctgttgataaagatgatgctagcccgcttgttggaaagaaaaagaaatccatgagtgtagaccatcgtgtagtcaaacaacgaaccattactcctacaagcaagtataggacatcgaaagatattgttttagtgcaaacacttgcaaaagttgtgcaaggtgcaggcgcaagtgcaagtgcaagcacaagcgcggctgcaacaagcataggtgcaagtgcccaatgccaaggaagtgttggagacaatgaatgcaacaaatattagcaagtgtttgaaaaaattctatgatgtcacattgctttttttctagcacttcatatcctactgcaaatcatttctttcggaggttttctgagattaagatggctattgcaagatggtgtgatagtagtgatctggtaatttgcacaatggcattttctatgagacacaagtttgataaatattgggaaatgaacaatttagctttgacagtgggagcatttcttgatcctagatacaaacataggatgattaggctatatatgtctaagatgtatgacagtgataaagccgagttagagaaattggtattcatgaatgttaacaatgaattatttgcatattattcagcagtcatcaatgcaaaaatcaaccagaaaaggttctagttcaagagagagtgagtttgttccacataaacatacttgtttggtggatgaggaggatgaggttgatcttgatgagttgtatgcaacaacaagcaatgacaagaaggtgtcagagttagaattgtacatgagcaaggacctagtgaaggtcaatgacaatgaagcaacgtttgatatcctatcatggtggaaaggacaagtgacaaatttgcctattctttctacccttgttcgtgatgtgttgtctatgcaagtgtctattgttgcttcagagtctgcatttagttccggtggactcattgttgatgcattccgttcaaggctcaaaccagaaattatcgaggcattggtttg

SEQ ID NO: 26549 - DNA, 1930 bp, Zea Mays
gcccgatccggtcaccgcggctcgggcccgccgcctctagtcgccagtcgccatgcggaccactcaattatctcctccgtttccttagccattgtcagctgagtaatctaataccctcgtttccaattaagaaaggatcgcaggccattaaacaagcacacacgggaggcctacaaagacgagaggggagaggagaacggtcaaggctgccgcgcgcatcgtcatcagttcactagtcagtcgaggtcgaggggcggacgaggagctgaggagagagaagcttcaaggagttggggacttgggggttgccgagctgtccgtctttcccctcccctccacccaccagctacctcgggagggcaaggcaaacatctgcggcctcctttcccgaacccgggttggatggagcgggacttcctggccgcgatcggcaaggagcagcagcacccgcgcaaggagaaggcagcagccgtcccggcgatggactggtccttcgcgagcaagccctgcgccgccccggcgctgatgtcgttccggtcggcggcgagggaggagccttcgttcccgcagttctccgccttggacggcaccaagaacacagcccctcgtatgctcacgcaccagagatcgttcggccccgacagcacgcagtacgccgcgctgcaccgcgcgcagaacggggctagagtcgttccggtctcgtcgccgttcagccagagcaacccgatgttcagggtccagagctcgcccagccttccgaacagtaccgcgttcaagcagccgcctttcgccatcagcaacgccgtggccagttcgactgtgggttcctatggcggaacaagggatgcggtgaggccaaggacggcacaactgacgatcttctacgccggttccgtcaatgtgttcaacaacgtctcagctgagaaggctcaggagctcatgttcctagccagcagaggaagctcagcccccgtggcctgtaagccagaggctcctcctactctcgctccagcgaaggtcacagcgcctgaggttcttctgcctgcgaagcagatgctgtttcaaaaaccacagcatctctcgccgcctccatccagtgtccctggcatcttgcagtctgcagctctccccaggagcgcctcatctagctctaaccttgactccccagctccaaaatcttcggtcccgttagctgttcctcctgtaagccaggctccgccagcaacactgatcgccactacaactgcagcagcaataatgcctagagctgtccctcaagctaggaaggcgtcccttgctcgattcttggagaaaaggaaggaaagggtgacaactgccgcgccttacccatcagccaagagcccactggagagcagcgacacgttcggcagcgggagcgccagcgccaacgccaacgacaagtcctcgtgcacagacattgccctctccagcaaccatgaagagtccctgtgtttaggggggcagcccaggagcatcatcagcttcagcgaagagtcccccagcaccaagctacagatctgatcgtgccgtgcccagtgttcatagatttgtccaggctgaccgatgcagaaaaccataagaatacttttttccactcaagaggaagagattactatcgatgccgttgttgtttaccgtgatgctgttttgccgtgttaggttactgtactgctggtacagatggtagtgccccccacccacctaactaacaagagagctgtcacttgcagactcttgatttttttttgccatttctcttggaaatgaactcagatgtgttattctagcagtaatcaaattatacaggcatacaaattctgcgccatttgtatggccaaagtgtaatacacttgttcttgaattatgaacctctctcaagctgcagaatgcaattctcgatggtgttctc

SEQ ID NO: 26550 - DNA, 413 bp, Zea Mays
tagctttgccgtggttttctagaagccgccgctcagtttgccgtggttttctagcctctaggagaagccgccgccgcccccaactgcaggctgcaggcgctgctcctttcgccctccgctagcgagcgaatcgctggctcgaggcggcactccggctggcgggcgtcgggccgtcggctgctgtccacggctgtcgacaagcaagcaccgtccagcgtccacctcggcacctcctgttcggctgttcctagccgctggctgagaagctaattagccaagacccaagaagcgagcaggcaagcagccacgaagacgaagataaatgaggagattttttcaaccactttcaagggggtccgcaattggtggtcaggataataataatgccaataatgtcaataattaatggtttg

SEQ ID NO: 26551 - DNA, 2504 bp, Zea Mays
caaaaatatgattgatttgagttgacagaaagttttaagtgtacgtaggcttatttcactttcaaggtatcatctgaagaaagagaaagacaggttcttggaagccaaatcaagagttgatgatgccttcagaagaaaggaataccttgcattagtggattcttacatgaaggtaactaagatggaatgattttcccacaaagaaagagcacaaaataaattgaattctagaagttaattttgtacaatttaatttttctgcatgtaataatgattaacatgcatattttcctttggggggaggcaaaggacctgtttgttgaagttgatgtgttcttttagttgggtttgtttcttcaatgctgtgttcgtgaagatcaacaaggcttactattaacatgcttcgcagggttgagccatatgttgcacactggtaagttttcttagctaatttagttcatgtcttcctgcttattctggtagatcatcccctgcaagtacccagctgaaaacagattatgctgttgtacttgtgtcttgtatgtgaatttacaatagaatttgtctccttttgtttgtttaaatgcatgagtagtattgatccagggtttcagagaacctgaactaataaataaataaataaataatcctagtgaaagtaggccttttggaatttctttcaaaggatagaaatgcctgcaggctgcagctatatatccaagccagtgggtaaggtgagtccatatacttttaattgattttgacgttgttctgatgagcgcactatgctctttcttagcttgcatgcagaatgagctgttatgtgctgaacttgaatatgtgcaaatagggaacatattaggtgcaaaccaattatttggtgcaaatcgtgtaaacaattatgataatttttttaaaacaactctcccaccatcatcagttttcaaaatgacccttccatctttcacctccaccaacgtgtttgtttttgtacagtttgcaccaagtggttgatttgcacataatatatatgttctctaaacatgttagtctttacttattttccctgctagctagtttgctcttgttggccgtgtcataaattttgttctcaggagatagatctacacagtgacaacatgtacctcaggagcacaagatatatatgcagatgtaatagcttgttcctgaccaattcctcgctgtattatgctgattgtgggagcacagtgttctgtagtggtcaggcgctaaagaacattgcgccaaccttattcatgaaagcatgccaagcccttacaaataatcgctggatgcacttttgttctccttacacacatgaggaagagataaaagaattcatttccctccggcaagacaacctacaaaagcgaggatggccttgcaatccaatttgttgtctttgcaacttatcacaagaaactatgcctcatttaggcaaagactgcccgtttttgtagagttgtatgattggtggaagagattaaggaatcgttgctgcaaggagtcaaagaagattttcgatggactcctcatctctttctggtggaatatatggttagaaagaaataacagaatctttcatagacttcaaagatctgctatccaggttatgcaattggtgaaagatcaaattgtgagttttagtgtatgcaattggtgaaagatcaaattgtgagttttagtgtatgttagattgagttagtgtatgtttttctctttttttgttttttcttttgctcagtcttcagtatctatttctcttctaatatattgatgaggcaagtcttttgccgcttcctttaaaaaaagagtaattctaatcttcatacactagttttcagtgtagcctttttcctatgtggttaactgtccatagattatgccatacctctcctaaactggacttcaacgatgtgaggtccaatcttattcatctcgagcggctagattttcatatcatagaagtgatgatttatctcaagtttgctcttactcatcttttgtttatttatattttttatttttggattcagagaaacgtcatattcacaactgcaactagtgcgtggtgatctggatgaaaacagtcaggggaaggcagaggtttttgtctaacatggagtttttttcagtgattttagatattcttacaagctgtaacacaatcaagcagataagatcctgctgatatatatgaattaagcttcttatctttttagttccagtagcaaagtacgtttacttgcagtttgttggagggacttgtgatggcttttgatattacttcatgagtcaattgctaattagcaattggctactatatataatctgatgccatgtatgatatatataagaccacaatttttttttcttttgttttttaatttgtcatcacaggcgcgcgttgtctttgcactgtctgtgatacgtgctcatcacaggcgcggtgttttttgcacgtatgtgataggttgcggtcc

SEQ ID NO: 26552 - DNA, 2382 bp, Zea Mays
cgcgtgcgtgatggtttttttcttgttagcacctctatttgctctcctcccgacgagtgtgattaacggaaagcactgtttgactagtccttgctagccctcctctctctctctctctcttacttatctactcgtttcctcttcctttccgtaaagattgcacacaaaaactattggatcttttcccctttcgatgtgctcatctcatgtgtggttctgtgactgttgagagagaggtgggcgaggcagccatacgaagttggtggtcggagccagatctgcttggatgcatagtgaaagggccggagatcggcacggcacctacctccggcggcgggcgacggctgcttcttctagatctggaaactaatgtttcttctccgatccagcagttttagcaaacaccatatatagcaatatgtggacatgctcattgtacctttccccctactaatcatgcaaagggagcaagaaaatgtaatgcttgggaccataagatgctagagcctgacgtgtcatatagtaaggtatcatctgaagaaagagaaagacaggttcttggaagccaaatcaagagttgatgatgccttcagaagaaaggaataccttgcattagtggattcttacatgaaggcaaaggacctgtttgttgaagttgatgtgttcttttagttgggtttgtttcttcaatgctgtgttcgtgaagatcaacaaggcttactattaacatgcttcgcagggttgagccatatgttgcacactggagcacaagatatatatgcagatgtaatagcttgttcctgaccaattcctcgctgtattatgctgattgtgggagcacagtgttctgtagtggtcaggcgctaaagaacattgcgccaaccttattcatgaaagcatgccaagcccttacaaataatcgctggatgcacttttgttctccttacacacatgaggaagagataaaagaattcatttccctccggcaaggtatcaacagcactcaatgatctcgacgatactattttatggaggtggagttacagttcaagtagtgcatacaaaattcagttcacaacgaatttttgtaaaatcaaaatttctcctatatggaaagcgagaattgagccaaaatgtcgttttttcgtatggaccatgttgtataacataattttgactgcagacaacctacaaaagcgaggatggccttgcaatccaatttgttgtctttgcaacttatcacaagaaactatgcctcatttaggcaaagactgcccgtttttgtagaggtttggaacatgatcctatcttgggccaatctgttctttctaagtgtcgtttctaaccccgggtcgttgtagttgtatgattggtggaagagattaaggaatcgttgctgcaaggagtcaaagaagattttcgatggactcctcatctctttctggtggaatatatggttagaaagaaataacagaatctttcatagacttcaaagatctgctatccaggttatgcaattggtgaaagatcaaattgtgagttttagtgtatgcaattggtgaaagatcaaattgtgagttttagtgtatgttagattgagttagtgtatgtttttctctttttttgttttttcttttgctcagtcttcagtatctatttctcttctaatatattgatgaggcaagtcttttgccgcttcctttaaaaaaagagtaattctaatcttcatacactagttttcagtgtagcctttttcctatgtggttaactgtccatagattatgccatacctctcctaaactggacttcaacgatgtgaggtccaatcttattcatctcgagcggctagattttcatatcatagaagtgatgatttatctcaagtttgctcttactcatcttttgtttatttatattttttatttttggattcagagaaacgtcatattcacaactgcaactagtgcgtggtgatctggatgaaaacagtcaggggaaggcagaggtttttgtctaacatggagtttttttcagtgattttagatattcttacaagctgtaacacaatcaagcagataagatcctgctgatatatatgaattaagcttcttatctttttagttccagtagcaaagtacgtttacttgcagtttgttggagggacttgtgatggcttttgatattacttcatgagtcaattgctaattagcaattggctactatatataatctgatgccatgtatgatatatataagaccacaatttttttttcttttgttttttaatttgtcatcacaggcgcgcgttgtctttgcactgtctgtgatacgtgctcatcacaggcgcggtgttttttgcacgtatgtgataggttgcggtcc

SEQ ID NO: 26553 - DNA, 2458 bp, Zea Mays
cgcgtgcgtgatggtttttttcttgttagcacctctatttgctctcctcccgacgagtgtgattaacggaaagcactgtttgactagtccttgctagccctcctctctctctctctctcttacttatctactcgtttcctcttcctttccgtaaagattgcacacaaaaactattggatcttttcccctttcgatgtgctcatctcatgtgtggttctgtgactgttgagagagaggtgggcgaggcagccatacgaagttggtggtcggagccagatctgcttggatgcatagtgaaagggccggagatcggcacggcacctacctccggcggcgggcgacggctgcttcttctagatctggaaactaatgtttcttctccgatccagcagttttagcaaacaccatatatagcaatatgtggacatgctcattgtacctttccccctactaatcatgcaaaggtatcatctgaagaaagagaaagacaggttcttggaagccaaatcaagagttgatgatgccttcagaagaaaggaataccttgcattagtggattcttacatgaagggttgagccatatgttgcacactggtaagttttcttagctaatttagttcatgtcttcctgcttattctggtagatcatcccctgcaagtacccagctgaaaacagattatgctgttgtacttgtgtcttgtatgtgaatttacaatagaatttgtctccttttgtttgtttaaatgcatgagtagtattgatccagggtttcagagaacctgaactaataaataaataaataaataatcctagtgaaagtaggccttttggaatttctttcaaaggatagaaatgcctgcaggctgcagctatatatccaagccagtgggtaaggtgagtccatatacttttaattgattttgacgttgttctgatgagcgcactatgctctttcttagcttgcatgcagaatgagctgttatgtgctgaacttgaatatgtgcaaatagggaacatattaggtgcaaaccaattatttggtgcaaatcgtgtaaacaattatgataatttttttaaaacaactctcccaccatcatcagttttcaaaatgacccttccatctttcacctccaccaacgtgtttgtttttgtacagtttgcaccaagtggttgatttgcacataatatatatgttctctaaacatgttagtctttacttattttccctgctagctagtttgctcttgttggccgtgtcataaattttgttctcaggagatagatctacacagtgacaacatgtacctcaggagcacaagatatatatgcagatgtaatagcttgttcctgaccaattcctcgctgtattatgctgattgtgggagcacagtgttctgtagtggtcaggcgctaaagaacattgcgccaaccttattcatgaaagcatgccaagcccttacaaataatcgctggatgcacttttgttctccttacacacatgaggaagagataaaagaattcatttccctccggcaaggtatcaacagcactcaatgatctcgacgatactattttatggaggtggagttacagttcaagtagtgcatacaaaattcagttcacaacgaatttttgtaaaatcaaaatttctcctatatggaaagcgagaattgagccaaaatgtcgttttttcgtatggaccatgttgtataacataattttgactgcagacaacctacaaaagcgaggatggccttgcaatccaatttgttgtctttgcaacttatcacaagaaactatgcctcatttaggcaaagactgcccgtttttgtagagttgtatgattggtggaagagattaaggaatcgttgctgcaaggagtcaaagaagattttcgatggactcctcatctctttctggtggaatatatggttagaaagaaataacagaatctttcatagacttcaaagatctgctatccaggttatgcaattggtgaaagatcaaattagaaacgtcatattcacaactgcaactagtgcgtggtgatctggatgaaaacagtcaggggaaggcagaggtttttgtctaacatggagtttttttcagtgattttagatattcttacaagctgtaacacaatcaagcagataagatcctgctgatatatatgaattaagcttcttatctttttagttccagtagcaaagtacgtttacttgcagtttgttggagggacttgtgatggcttttgatattacttcatgagtcaattgctaattagcaattggctactatatataatctgatgccatgtatgatatatataagaccacaatttttttttcttttgttttttaatttgtcatcacaggcgcgcgttgtctttgcactgtctgtgatacgtgctcatcacaggcgcggtgttttttgcacgtatgtgataggttgcggtcc

SEQ ID NO: 26554 - DNA, 2378 bp, Zea Mays
cgcgtgcgtgatggtttttttcttgttagcacctctatttgctctcctcccgacgagtgtgattaacggaaagcactgtttgactagtccttgctagccctcctctctctctctctctcttacttatctactcgtttcctcttcctttccgtaaagattgcacacaaaaactattggatcttttcccctttcgatgtgctcatctcatgtgtggttctgtgactgttgagagagaggtgggcgaggcagccatacgaagttggtggtcggagccagatctgcttggatgcatagtgaaagggccggagatcggcacggcacctacctccggcggcgggcgacggctgcttcttctagatctggaaactaatgtttcttctccgatccagcaggtatcatctgaagaaagagaaagacaggttcttggaagccaaatcaagagttgatgatgccttcagaagaaaggaataccttgcattagtggattcttacatgaaggtaactaagatggaatgattttcccacaaagaaagagcacaaaataaattgaattctagaagttaattttgtacaatttaatttttctgcatgtaataatgattaacatgcatattttcctttggggggaggcaaaggacctgtttgttgaagttgatgtgttcttttagttgggtttgtttcttcaatgctgtgttcgtgaagatcaacaaggcttactattaacatgcttcgcagggttgagccatatgttgcacactggagcacaagatatatatgcagatgtaatagcttgttcctgaccaattcctcgctgtattatgctgattgtgggagcacagtgttctgtagtggtcaggcgctaaagaacattgcgccaaccttattcatgaaagcatgccaagcccttacaaataatcgctggatgcacttttgttctccttacacacatgaggaagagataaaagaattcatttccctccggcaaggtatcaacagcactcaatgatctcgacgatactattttatggaggtggagttacagttcaagtagtgcatacaaaattcagttcacaacgaatttttgtaaaatcaaaatttctcctatatggaaagcgagaattgagccaaaatgtcgttttttcgtatggaccatgttgtataacataattttgactgcagacaacctacaaaagcgaggatggccttgcaatccaatttgttgtctttgcaacttatcacaagaaactatgcctcatttaggcaaagactgcccgtttttgtagaggtttggaacatgatcctatcttgggccaatctgttctttctaagtgtcgtttctaaccccgggtcgttgtagttgtatgattggtggaagagattaaggaatcgttgctgcaaggagtcaaagaagattttcgatggactcctcatctctttctggtggaatatatggttagaaagaaataacagaatctttcatagacttcaaagatctgctatccaggttatgcaattggtgaaagatcaaattgtgagttttagtgtatgcaattggtgaaagatcaaattgtgagttttagtgtatgttagattgagttagtgtatgtttttctctttttttgttttttcttttgctcagtcttcagtatctatttctcttctaatatattgatgaggcaagtcttttgccgcttcctttaaaaaaagagtaattctaatcttcatacactagttttcagtgtagcctttttcctatgtggttaactgtccatagattatgccatacctctcctaaactggacttcaacgatgtgaggtccaatcttattcatctcgagcggctagattttcatatcatagaagtgatgatttatctcaagtttgctcttactcatcttttgtttatttatattttttatttttggattcagagaaacgtcatattcacaactgcaactagtgcgtggtgatctggatgaaaacagtcaggggaaggcagaggtttttgtctaacatggagtttttttcagtgattttagatattcttacaagctgtaacacaatcaagcagataagatcctgctgatatatatgaattaagcttcttatctttttagttccagtagcaaagtacgtttacttgcagtttgttggagggacttgtgatggcttttgatattacttcatgagtcaattgctaattagcaattggctactatatataatctgatgccatgtatgatatatataagaccacaatttttttttcttttgttttttaatttgtcatcacaggcgcgcgttgtctttgcactgtctgtgatacgtgctcatcacaggcgcggtgttttttgcacgtatgtgataggttgcggtcc

SEQ ID NO: 26555 - DNA, 2298 bp, Zea Mays
cgcgtgcgtgatggtttttttcttgttagcacctctatttgctctcctcccgacgagtgtgattaacggaaagcactgtttgactagtccttgctagccctcctctctctctctctctcttacttatctactcgtttcctcttcctttccgtaaagattgcacacaaaaactattggatcttttcccctttcgatgtgctcatctcatgtgtggttctgtgactgttgagagagaggtgggcgaggcagccatacgaagttggtggtcggagccagatctgcttggatgcatagtgaaagggccggagatcggcacggcacctacctccggcggcgggcgacggctgcttcttctagatctggaaactaatgtttcttctccgatccagcagttttagcaaacaccatatatagcaatatgtggacatgctcattgtacctttccccctactaatcatgcaaaggtatcatctgaagaaagagaaagacaggttcttggaagccaaatcaagagttgatgatgccttcagaagaaaggaataccttgcattagtggattcttacatgaaggtaactaagatggaatgattttcccacaaagaaagagcacaaaataaattgaattctagaagttaattttgtacaatttaatttttctgcatgtaataatgattaacatgcatattttcctttggggggaggcaaaggacctgtttgttgaagttgatgtgttcttttagttgggtttgtttcttcaatgctgtgttcgtgaagatcaacaaggcttactattaacatgcttcgcagggttgagccatatgttgcacactgtgttctgtagtggtcaggcgctaaagaacattgcgccaaccttattcatgaaagcatgccaagcccttacaaataatcgctggatgcacttttgttctccttacacacatgaggaagagataaaagaattcatttccctccggcaaggtatcaacagcactcaatgatctcgacgatactattttatggaggtggagttacagttcaagtagtgcatacaaaattcagttcacaacgaatttttgtaaaatcaaaatttctcctatatggaaagcgagaattgagccaaaatgtcgttttttcgtatggaccatgttgtataacataattttgactgcagacaacctacaaaagcgaggatggccttgcaatccaatttgttgtctttgcaacttatcacaagaaactatgcctcatttaggcaaagactgcccgtttttgtagagttgtatgattggtggaagagattaaggaatcgttgctgcaaggagtcaaagaagattttcgatggactcctcatctctttctggtggaatatatggttagaaagaaataacagaatctttcatagacttcaaagatctgctatccaggttatgcaattggtgaaagatcaaattgtgagttttagtgtatgcaattggtgaaagatcaaattgtgagttttagtgtatgttagattgagttagtgtatgtttttctctttttttgttttttcttttgctcagtcttcagtatctatttctcttctaatatattgatgaggcaagtcttttgccgcttcctttaaaaaaagagtaattctaatcttcatacactagttttcagtgtagcctttttcctatgtggttaactgtccatagattatgccatacctctcctaaactggacttcaacgatgtgaggtccaatcttattcatctcgagcggctagattttcatatcatagaagtgatgatttatctcaagtttgctcttactcatcttttgtttatttatattttttatttttggattcagagaaacgtcatattcacaactgcaactagtgcgtggtgatctggatgaaaacagtcaggggaaggcagaggtttttgtctaacatggagtttttttcagtgattttagatattcttacaagctgtaacacaatcaagcagataagatcctgctgatatatatgaattaagcttcttatctttttagttccagtagcaaagtacgtttacttgcagtttgttggagggacttgtgatggcttttgatattacttcatgagtcaattgctaattagcaattggctactatatataatctgatgccatgtatgatatatataagaccacaatttttttttcttttgttttttaatttgtcatcacaggcgcgcgttgtctttgcactgtctgtgatacgtgctcatcacaggcgcggtgttttttgcacgtatgtgataggttgcggtcc

SEQ ID NO: 26556 - DNA, 2660 bp, Zea Mays
cgcgtgcgtgatggtttttttcttgttagcacctctatttgctctcctcccgacgagtgtgattaacggaaagcactgtttgactagtccttgctagccctcctctctctctctctctcttacttatctactcgtttcctcttcctttccgtaaagattgcacacaaaaactattggatcttttcccctttcgatgtgctcatctcatgtgtggttctgtgactgttgagagagaggtgggcgaggcagccatacgaagttggtggtcggagccagatctgcttggatgcatagtgaaagggccggagatcggcacggcacctacctccggcggcgggcgacggctgcttcttctagatctggaaactaatgtttcttctccgatccagcagttttagcaaacaccatatatagcaatatgtggacatgctcattgtacctttccccctactaatcatgcaaagggagcaagaaaatgtaatgcttgggaccataagatgctagagcctgacgtgtcatatagtaaggtatcatctgaagaaagagaaagacaggttcttggaagccaaatcaagagttgatgatgccttcagaagaaaggaataccttgcattagtggattcttacatgaagttgggtttgtttcttcaatgctgtgttcgtgaagatcaacaaggcttactattaacatgcttcgcagggttgagccatatgttgcacactggtaagttttcttagctaatttagttcatgtcttcctgcttattctggtagatcatcccctgcaagtacccagctgaaaacagattatgctgttgtacttgtgtcttgtatgtgaatttacaatagaatttgtctccttttgtttgtttaaatgcatgagtagtattgatccagggtttcagagaacctgaactaataaataaataaataaataatcctagtgaaagtaggccttttggaatttctttcaaaggatagaaatgcctgcaggctgcagctatatatccaagccagtgggtaaggtgagtccatatacttttaattgattttgacgttgttctgatgagcgcactatgctctttcttagcttgcatgcagaatgagctgttatgtgctgaacttgaatatgtgcaaatagggaacatattaggtgcaaaccaattatttggtgcaaatcgtgtaaacaattatgataatttttttaaaacaactctcccaccatcatcagttttcaaaatgacccttccatctttcacctccaccaacgtgtttgtttttgtacagtttgcaccaagtggttgatttgcacataatatatatgttctctaaacatgttagtctttacttattttccctgctagctagtttgctcttgttggccgtgtcataaattttgttctcaggagatagatctacacagtgacaacatgtacctcaggagcacaagatatatatgcagatgtaatagcttgttcctgaccaattcctcgctgtattatgctgattgtgggagcacagtgttctgtagtggtcaggcgctaaagaacattgcgccaaccttattcatgaaagcatgccaagcccttacaaataatcgctggatgcacttttgttctccttacacacatgaggaagagataaaagaattcatttccctccggcaaggtatcaacagcactcaatgatctcgacgatactattttatggaggtggagttacagttcaagtagtgcatacaaaattcagttcacaacgaatttttgtaaaatcaaaatttctcctatatggaaagcgagaattgagccaaaatgtcgttttttcgtatggaccatgttgtataacataattttgactgcagacaacctacaaaagcgaggatggccttgcaatccaatttgttgtctttgcaacttatcacaagaaactatgcctcatttaggcaaagactgcccgtttttgtagaggtttggaacatgatcctatcttgggccaatctgttctttctaagtgtcgtttctaaccccgggtcgttgtagttgtatgattggtggaagagattaaggaatcgttgctgcaaggagtcaaagaagattttcgatggactcctcatctctttctggtggaatatatggttagaaagaaataacagaatctttcatagacttcaaagatctgctatccaggttatgcaattggtgaaagatcaaattagaaacgtcatattcacaactgcaactagtgcgtggtgatctggatgaaaacagtcaggggaaggcagaggtttttgtctaacatggagtttttttcagtgattttagatattcttacaagctgtaacacaatcaagcagataagatcctgctgatatatatgaattaagcttcttatctttttagttccagtagcaaagtacgtttacttgcagtttgttggagggacttgtgatggcttttgatattacttcatgagtcaattgctaattagcaattggctactatatataatctgatgccatgtatgatatatataagaccacaatttttttttcttttgttttttaatttgtcatcacaggcgcgcgttgtctttgcactgtctgtgatacgtgctcatcacaggcgcggtgttttttgcacgtatgtgataggttgcggtcc

SEQ ID NO: 26557 - DNA, 2893 bp, Zea Mays
cgcgtgcgtgatggtttttttcttgttagcacctctatttgctctcctcccgacgagtgtgattaacggaaagcactgtttgactagtccttgctagccctcctctctctctctctctcttacttatctactcgtttcctcttcctttccgtaaagattgcacacaaaaactattggatcttttcccctttcgatgtgctcatctcatgtgtggttctgtgactgttgagagagaggtgggcgaggcagccatacgaagttggtggtcggagccagatctgcttggatgcatagtgaaagggccggagatcggcacggcacctacctccggcggcgggcgacggctgcttcttctagatctggaaactaatgtttcttctccgatccagcagggagcaagaaaatgtaatgcttgggaccataagatgctagagcctgacgtgtcatatagtaaggtatcatctgaagaaagagaaagacaggttcttggaagccaaatcaagagttgatgatgccttcagaagaaaggaataccttgcattagtggattcttacatgaaggtaactaagatggaatgattttcccacaaagaaagagcacaaaataaattgaattctagaagttaattttgtacaatttaatttttctgcatgtaataatgattaacatgcatattttcctttggggggaggcaaaggacctgtttgttgaagttgatgtgttcttttagttgggtttgtttcttcaatgctgtgttcgtgaagatcaacaaggcttactattaacatgcttcgcagggttgagccatatgttgcacactggtaagttttcttagctaatttagttcatgtcttcctgcttattctggtagatcatcccctgcaagtacccagctgaaaacagattatgctgttgtacttgtgtcttgtatgtgaatttacaatagaatttgtctccttttgtttgtttaaatgcatgagtagtattgatccagggtttcagagaacctgaactaataaataaataaataaataatcctagtgaaagtaggccttttggaatttctttcaaaggatagaaatgcctgcaggctgcagctatatatccaagccagtgggtaaggtgagtccatatacttttaattgattttgacgttgttctgatgagcgcactatgctctttcttagcttgcatgcagaatgagctgttatgtgctgaacttgaatatgtgcaaatagggaacatattaggtgcaaaccaattatttggtgcaaatcgtgtaaacaattatgataatttttttaaaacaactctcccaccatcatcagttttcaaaatgacccttccatctttcacctccaccaacgtgtttgtttttgtacagtttgcaccaagtggttgatttgcacataatatatatgttctctaaacatgttagtctttacttattttccctgctagctagtttgctcttgttggccgtgtcataaattttgttctcaggagatagatctacacagtgacaacatgtacctcaggagcacaagatatatatgcagatgtaatagcttgttcctgaccaattcctcgctgtattatgctgattgtgggagcacagtgttctgtagtggtcaggcgctaaagaacattgcgccaaccttattcatgaaagcatgccaagcccttacaaataatcgctggatgcacttttgttctccttacacacatgaggaagagataaaagaattcatttccctccggcaagacaacctacaaaagcgaggatggccttgcaatccaatttgttgtctttgcaacttatcacaagaaactatgcctcatttaggcaaagactgcccgtttttgtagagttgtatgattggtggaagagattaaggaatcgttgctgcaaggagtcaaagaagattttcgatggactcctcatctctttctggtggaatatatggttagaaagaaataacagaatctttcatagacttcaaagatctgctatccaggttatgcaattggtgaaagatcaaattgtgagttttagtgtatgcaattggtgaaagatcaaattgtgagttttagtgtatgttagattgagttagtgtatgtttttctctttttttgttttttcttttgctcagtcttcagtatctatttctcttctaatatattgatgaggcaagtcttttgccgcttcctttaaaaaaagagtaattctaatcttcatacactagttttcagtgtagcctttttcctatgtggttaactgtccatagattatgccatacctctcctaaactggacttcaacgatgtgaggtccaatcttattcatctcgagcggctagattttcatatcatagaagtgatgatttatctcaagtttgctcttactcatcttttgtttatttatattttttatttttggattcagagaaacgtcatattcacaactgcaactagtgcgtggtgatctggatgaaaacagtcaggggaaggcagaggtttttgtctaacatggagtttttttcagtgattttagatattcttacaagctgtaacacaatcaagcagataagatcctgctgatatatatgaattaagcttcttatctttttagttccagtagcaaagtacgtttacttgcagtttgttggagggacttgtgatggcttttgatattacttcatgagtcaattgctaattagcaattggctactatatataatctgatgccatgtatgatatatataagaccacaatttttttttcttttgttttttaatttgtcatcacaggcgcgcgttgtctttgcactgtctgtgatacgtgctcatcacaggcgcggtgttttttgcacgtatgtgataggttgcggtcc

SEQ ID NO: 26558 - DNA, 2220 bp, Zea Mays
cgcgtgcgtgatggtttttttcttgttagcacctctatttgctctcctcccgacgagtgtgattaacggaaagcactgtttgactagtccttgctagccctcctctctctctctctctcttacttatctactcgtttcctcttcctttccgtaaagattgcacacaaaaactattggatcttttcccctttcgatgtgctcatctcatgtgtggttctgtgactgttgagagagaggtgggcgaggcagccatacgaagttggtggtcggagccagatctgcttggatgcatagtgaaagggccggagatcggcacggcacctacctccggcggcgggcgacggctgcttcttctagatctggaaactaatgtttcttctccgatccagcagttttagcaaacaccatatatagcaatatgtggacatgctcattgtacctttccccctactaatcatgcaaaggtatcatctgaagaaagagaaagacaggttcttggaagccaaatcaagagttgatgatgccttcagaagaaaggaataccttgcattagtggattcttacatgaaggtaactaagatggaatgattttcccacaaagaaagagcacaaaataaattgaattctagaagttaattttgtacaatttaatttttctgcatgtaataatgattaacatgcatattttcctttggggggaggcaaaggacctgtttgttgaagttgatgtgttcttttagttgggtttgtttcttcaatgctgtgttcgtgaagatcaacaaggcttactattaacatgcttcgcagggttgagccatatgttgcacactggagatagatctacacagtgacaacatgtacctcaggagcacaagatatatatgcagatgtaatagcttgttcctgaccaattcctcgctgtattatgctgattgtgggagcacagtgttctgtagtggtcaggcgctaaagaacattgcgccaaccttattcatgaaagcatgccaagcccttacaaataatcgctggatgcacttttgttctccttacacacatgaggaagagataaaagaattcatttccctccggcaagacaacctacaaaagcgaggatggccttgcaatccaatttgttgtctttgcaacttatcacaagaaactatgcctcatttaggcaaagactgcccgtttttgtagagttgtatgattggtggaagagattaaggaatcgttgctgcaaggagtcaaagaagattttcgatggactcctcatctctttctggtggaatatatggttagaaagaaataacagaatctttcatagacttcaaagatctgctatccaggttatgcaattggtgaaagatcaaattgtgagttttagtgtatgcaattggtgaaagatcaaattgtgagttttagtgtatgttagattgagttagtgtatgtttttctctttttttgttttttcttttgctcagtcttcagtatctatttctcttctaatatattgatgaggcaagtcttttgccgcttcctttaaaaaaagagtaattctaatcttcatacactagttttcagtgtagcctttttcctatgtggttaactgtccatagattatgccatacctctcctaaactggacttcaacgatgtgaggtccaatcttattcatctcgagcggctagattttcatatcatagaagtgatgatttatctcaagtttgctcttactcatcttttgtttatttatattttttatttttggattcagagaaacgtcatattcacaactgcaactagtgcgtggtgatctggatgaaaacagtcaggggaaggcagaggtttttgtctaacatggagtttttttcagtgattttagatattcttacaagctgtaacacaatcaagcagataagatcctgctgatatatatgaattaagcttcttatctttttagttccagtagcaaagtacgtttacttgcagtttgttggagggacttgtgatggcttttgatattacttcatgagtcaattgctaattagcaattggctactatatataatctgatgccatgtatgatatatataagaccacaatttttttttcttttgttttttaatttgtcatcacaggcgcgcgttgtctttgcactgtctgtgatacgtgctcatcacaggcgcggtgttttttgcacgtatgtgataggttgcggtcc

SEQ ID NO: 26559 - DNA, 2728 bp, Zea Mays
cgcgtgcgtgatggtttttttcttgttagcacctctatttgctctcctcccgacgagtgtgattaacggaaagcactgtttgactagtccttgctagccctcctctctctctctctctcttacttatctactcgtttcctcttcctttccgtaaagattgcacacaaaaactattggatcttttcccctttcgatgtgctcatctcatgtgtggttctgtgactgttgagagagaggtgggcgaggcagccatacgaagttggtggtcggagccagatctgcttggatgcatagtgaaagggccggagatcggcacggcacctacctccggcggcgggcgacggctgcttcttctagatctggaaactaatgtttcttctccgatccagcagggagcaagaaaatgtaatgcttgggaccataagatgctagagcctgacgtgtcatatagtaaggtatcatctgaagaaagagaaagacaggttcttggaagccaaatcaagagttgatgatgccttcagaagaaaggaataccttgcattagtggattcttacatgaagggttgagccatatgttgcacactggtaagttttcttagctaatttagttcatgtcttcctgcttattctggtagatcatcccctgcaagtacccagctgaaaacagattatgctgttgtacttgtgtcttgtatgtgaatttacaatagaatttgtctccttttgtttgtttaaatgcatgagtagtattgatccagggtttcagagaacctgaactaataaataaataaataaataatcctagtgaaagtaggccttttggaatttctttcaaaggatagaaatgcctgcaggctgcagctatatatccaagccagtgggtaaggtgagtccatatacttttaattgattttgacgttgttctgatgagcgcactatgctctttcttagcttgcatgcagaatgagctgttatgtgctgaacttgaatatgtgcaaatagggaacatattaggtgcaaaccaattatttggtgcaaatcgtgtaaacaattatgataatttttttaaaacaactctcccaccatcatcagttttcaaaatgacccttccatctttcacctccaccaacgtgtttgtttttgtacagtttgcaccaagtggttgatttgcacataatatatatgttctctaaacatgttagtctttacttattttccctgctagctagtttgctcttgttggccgtgtcataaattttgttctcaggagatagatctacacagtgacaacatgtacctcaggagcacaagatatatatgcagatgtaatagcttgttcctgaccaattcctcgctgtattatgctgattgtgggagcacagtgttctgtagtggtcaggcgctaaagaacattgcgccaaccttattcatgaaagcatgccaagcccttacaaataatcgctggatgcacttttgttctccttacacacatgaggaagagataaaagaattcatttccctccggcaagacaacctacaaaagcgaggatggccttgcaatccaatttgttgtctttgcaacttatcacaagaaactatgcctcatttaggcaaagactgcccgtttttgtagaggtttggaacatgatcctatcttgggccaatctgttctttctaagtgtcgtttctaaccccgggtcgttgtagttgtatgattggtggaagagattaaggaatcgttgctgcaaggagtcaaagaagattttcgatggactcctcatctctttctggtggaatatatggttagaaagaaataacagaatctttcatagacttcaaagatctgctatccaggttatgcaattggtgaaagatcaaattgtgagttttagtgtatgcaattggtgaaagatcaaattgtgagttttagtgtatgttagattgagttagtgtatgtttttctctttttttgttttttcttttgctcagtcttcagtatctatttctcttctaatatattgatgaggcaagtcttttgccgcttcctttaaaaaaagagtaattctaatcttcatacactagttttcagtgtagcctttttcctatgtggttaactgtccatagattatgccatacctctcctaaactggacttcaacgatgtgaggtccaatcttattcatctcgagcggctagattttcatatcatagaagtgatgatttatctcaagtttgctcttactcatcttttgtttatttatattttttatttttggattcagagaaacgtcatattcacaactgcaactagtgcgtggtgatctggatgaaaacagtcaggggaaggcagaggtttttgtctaacatggagtttttttcagtgattttagatattcttacaagctgtaacacaatcaagcagataagatcctgctgatatatatgaattaagcttcttatctttttagttccagtagcaaagtacgtttacttgcagtttgttggagggacttgtgatggcttttgatattacttcatgagtcaattgctaattagcaattggctactatatataatctgatgccatgtatgatatatataagaccacaatttttttttcttttgttttttaatttgtcatcacaggcgcgcgttgtctttgcactgtctgtgatacgtgctcatcacaggcgcggtgttttttgcacgtatgtgataggttgcggtcc

SEQ ID NO: 26560 - DNA, 3233 bp, Zea Mays
agagtgagcacgcatcggccagactgcatctatatacggctgccccaaagcgacggatcgatggatgcctagcctaggcctaggcgcagctgctgttgcgtgctcacttctctttctgtcagctctctctctcatccttgggacttgttccgccgtatacatccatcaccgccgtcccacttccgtccatcgctgcgcgccgatgatgcgtcgccgtcgtcgtgcagtgcaggctgtgcagcctcacatcggtcgccgtggtggcactgtttgctctgaggcgcctgccggcctggtcgtgtccctacctgaaaccttatcttgtgccctgctcggattacgatgagctctgctagctctttggaataagagaggtgggcgaggcagccatacgaagttggtggtcggagccagatctgcttggatgcatagtgaaagggccggagatcggcacggcacctacctccggcggcgggcgacggctgcttcttctagatctggaaactaatgtttcttctccgatccagcagttttagcaaacaccatatatagcaatatgtggacatgctcattgtacctttccccctactaatcatgcaaaggtatcatctgaagaaagagaaagacaggttcttggaagccaaatcaagagttgatgatgccttcagaagaaaggaataccttgcattagtggattcttacatgaaggtaactaagatggaatgattttcccacaaagaaagagcacaaaataaattgaattctagaagttaattttgtacaatttaatttttctgcatgtaataatgattaacatgcatattttcctttggggggaggcaaaggacctgtttgttgaagttgatgtgttcttttagttgggtttgtttcttcaatgctgtgttcgtgaagatcaacaaggcttactattaacatgcttcgcagggttgagccatatgttgcacactggtaagttttcttagctaatttagttcatgtcttcctgcttattctggtagatcatcccctgcaagtacccagctgaaaacagattatgctgttgtacttgtgtcttgtatgtgaatttacaatagaatttgtctccttttgtttgtttaaatgcatgagtagtattgatccagggtttcagagaacctgaactaataaataaataaataaataatcctagtgaaagtaggccttttggaatttctttcaaaggatagaaatgcctgcaggctgcagctatatatccaagccagtgggtaaggtgagtccatatacttttaattgattttgacgttgttctgatgagcgcactatgctctttcttagcttgcatgcagaatgagctgttatgtgctgaacttgaatatgtgcaaatagggaacatattaggtgcaaaccaattatttggtgcaaatcgtgtaaacaattatgataatttttttaaaacaactctcccaccatcatcagttttcaaaatgacccttccatctttcacctccaccaacgtgtttgtttttgtacagtttgcaccaagtggttgatttgcacataatatatatgttctctaaacatgttagtctttacttattttccctgctagctagtttgctcttgttggccgtgtcataaattttgttctcaggagatagatctacacagtgacaacatgtacctcaggagcacaagatatatatgcagatgtaatagcttgttcctgaccaattcctcgctgtattatgctgattgtgggagcacagtgttctgtagtggtcaggcgctaaagaacattgcgccaaccttattcatgaaagcatgccaagcccttacaaataatcgctggatgcacttttgttctccttacacacatgaggaagagataaaagaattcatttccctccggcaaggtatcaacagcactcaatgatctcgacgatactattttatggaggtggagttacagttcaagtagtgcatacaaaattcagttcacaacgaatttttgtaaaatcaaaatttctcctatatggaaagcgagaattgagccaaaatgtcgttttttcgtatggaccatgttgtataacataattttgactgcagacaacctacaaaagcgaggatggccttgcaatccaatttgttgtctttgcaacttatcacaagaaactatgcctcatttaggcaaagactgcccgtttttgtagagttgtatgattggtggaagagattaaggaatcgttgctgcaaggagtcaaagaagattttcgatggactcctcatctctttctggtggaatatatggttagaaagaaataacagaatctttcatagacttcaaagatctgctatccaggttatgcaattggtgaaagatcaaattgtgagttttagtgtatgcaattggtgaaagatcaaattgtgagttttagtgtatgttagattgagttagtgtatgtttttctctttttttgttttttcttttgctcagtcttcagtatctatttctcttctaatatattgatgaggcaagtcttttgccgcttcctttaaaaaaagagtaattctaatcttcatacactagttttcagtgtagcctttttcctatgtggttaactgtccatagattatgccatacctctcctaaactggacttcaacgatgtgaggtccaatcttattcatctcgagcggctagattttcatatcatagaagtgatgatttatctcaagtttgctcttactcatcttttgtttatttatattttttatttttggattcagagaaacgtcatattcacaactgcaactagtgcgtggtgatctggatgaaaacagtcaggggaaggcagaggtttttgtctaacatggagtttttttcagtgattttagatattcttacaagctgtaacacaatcaagcagataagatcctgctgatatatatgaattaagcttcttatctttttagttccagtagcaaagtacgtttacttgcagtttgttggagggacttgtgatggcttttgatattacttcatgagtcaattgctaattagcaattggctactatatataatctgatgccatgtatgatatatataagaccacaatttttttttcttttgttttttaatttgtcatcacaggcgcgcgttgtctttgcactgtctgtgatacgtgctcatcacaggcgcggtgttttttgcacgtatgtgataggttgcggtcc

SEQ ID NO: 26561 - DNA, 3741 bp, Zea Mays
gaaagaacaaggtaatttggggaccgtctcctctatataagccctcttccaccagaacgagtgaagaaacccagtcaagctgccagtaggatagcctcccagatctagctggacggctgcctcctcctccttccccaattcgggaaagatgacatgaagatcagtttgtgtaaacgtgttgccccctctctctctctctctcttcgtgtccagttcttgttgcgtctgctttgtactgttgcagcggtggtcgacggcgggatgggcggatgaggggcctggctgctagatggtgtggctgacagaagagagtgagcacgcatcggccagactgcatctatatacggctgccccaaagcgacggatcgatggatgcctagcctaggcctaggcgcagctgctgttgcgtgctcacttctctttctgtcagctctctctctcatccttgggacttgttccgccgtatacatccatcaccgccgtcccacttccgtccatcgctgcgcgccgatgatgcgtcgccgtcgtcgtgcagtgcaggctgtgcagcctcacatcggtcgccgtggtggcactgtttgctctgaggcgcctgccggcctggtcgtgtccctacctgaaaccttatcttgtgccctgctcggattacgatgagctctgctagctctttggaataaggtactctttatggaagccgcccagcgcatgtacgccatggattcttacgctggcaacgtttcttttcttttatcggcgaggttctcgttgccatctttgaggcttccgatgatggaattttagccagccttcagccttggggggggggggggggggagggacgcgtgcgtgatggtttttttcttgttagcacctctatttgctctcctcccgacgagtgtgattaacggaaagcactgtttgactagtccttgctagccctcctctctctctctctctcttacttatctactcgtttcctcttcctttccgtaaagattgcacacaaaaactattggatcttttcccctttcgatgtgctcatctcatgtgtggttctgtgactgttgagagagaggtgggcgaggcagccatacgaagttggtggtcggagccagatctgcttggatgcatagtgaaagggccggagatcggcacggcacctacctccggcggcgggcgacggctgcttcttctagatctggaaactaatgtttcttctccgatccagcagttttagcaaacaccatatatagcaatatgtggacatgctcattgtacctttccccctactaatcatgcaaaggtatcatctgaagaaagagaaagacaggttcttggaagccaaatcaagagttgatgatgccttcagaagaaaggaataccttgcattagtggattcttacatgaaggtaactaagatggaatgattttcccacaaagaaagagcacaaaataaattgaattctagaagttaattttgtacaatttaatttttctgcatgtaataatgattaacatgcatattttcctttggggggaggcaaaggacctgtttgttgaagttgatgtgttcttttagttgggtttgtttcttcaatgctgtgttcgtgaagatcaacaaggcttactattaacatgcttcgcagggttgagccatatgttgcacactggtaagttttcttagctaatttagttcatgtcttcctgcttattctggtagatcatcccctgcaagtacccagctgaaaacagattatgctgttgtacttgtgtcttgtatgtgaatttacaatagaatttgtctccttttgtttgtttaaatgcatgagtagtattgatccagggtttcagagaacctgaactaataaataaataaataaataatcctagtgaaagtaggccttttggaatttctttcaaaggatagaaatgcctgcaggctgcagctatatatccaagccagtgggtaaggtgagtccatatacttttaattgattttgacgttgttctgatgagcgcactatgctctttcttagcttgcatgcagaatgagctgttatgtgctgaacttgaatatgtgcaaatagggaacatattaggtgcaaaccaattatttggtgcaaatcgtgtaaacaattatgataatttttttaaaacaactctcccaccatcatcagttttcaaaatgacccttccatctttcacctccaccaacgtgtttgtttttgtacagtttgcaccaagtggttgatttgcacataatatatatgttctctaaacatgttagtctttacttattttccctgctagctagtttgctcttgttggccgtgtcataaattttgttctcaggagatagatctacacagtgacaacatgtacctcaggagcacaagatatatatgcagatgtaatagcttgttcctgaccaattcctcgctgtattatgctgattgtgggagcacagtgttctgtagtggtcaggcgctaaagaacattgcgccaaccttattcatgaaagcatgccaagcccttacaaataatcgctggatgcacttttgttctccttacacacatgaggaagagataaaagaattcatttccctccggcaagacaacctacaaaagcgaggatggccttgcaatccaatttgttgtctttgcaacttatcacaagaaactatgcctcatttaggcaaagactgcccgtttttgtagagttgtatgattggtggaagagattaaggaatcgttgctgcaaggagtcaaagaagattttcgatggactcctcatctctttctggtggaatatatggttagaaagaaataacagaatctttcatagacttcaaagatctgctatccaggttatgcaattggtgaaagatcaaattgtgagttttagtgtatgcaattggtgaaagatcaaattgtgagttttagtgtatgttagattgagttagtgtatgtttttctctttttttgttttttcttttgctcagtcttcagtatctatttctcttctaatatattgatgaggcaagtcttttgccgcttcctttaaaaaaagagtaattctaatcttcatacactagttttcagtgtagcctttttcctatgtggttaactgtccatagattatgccatacctctcctaaactggacttcaacgatgtgaggtccaatcttattcatctcgagcggctagattttcatatcatagaagtgatgatttatctcaagtttgctcttactcatcttttgtttatttatattttttatttttggattcagagaaacgtcatattcacaactgcaactagtgcgtggtgatctggatgaaaacagtcaggggaaggcagaggtttttgtctaacatggagtttttttcagtgattttagatattcttacaagctgtaacacaatcaagcagataagatcctgctgatatatatgaattaagcttcttatctttttagttccagtagcaaagtacgtttacttgcagtttgttggagggacttgtgatggcttttgatattacttcatgagtcaattgctaattagcaattggctactatatataatctgatgccatgtatgatatatataagaccacaatttttttttcttttgttttttaatttgtcatcacaggcgcgcgttgtctttgcactgtctgtgatacgtgctcatcacaggcgcggtgttttttgcacgtatgtgataggttgcggtcc

SEQ ID NO: 26562 - DNA, 1106 bp, Zea Mays
ctccttctcctttctcctctctcgcgatcgtgggtgactcggtttggcgatttttgtgctgtcgcccgccgttagcgcgtgctggcggccggcgccaatggagaagaactctgactggtgctaatcttcctcttcctctctcgctccatactctcctcttcctttctcgctccgcttggtcactgtaaccctaaccctaaacctcaatctgctaagctcgctcctcttcctctaccgtctgtcctgtggttggtggatccgttgcttcggtgttgcaggtgtgcgtcatgtgtgtgtgtgcgacgcgcaccatgaggagccggagaagccaacagaggcggtggccatgtccacggactcggctgacgatgagctcagtctcgatgccgtggtcgaggagcggcggcttgaagcacataatgaggcagacgatgctcggtgcctcctccttggtaccatcgatttggacgacgccgggcccaaacgggcacagggacgacttgaacagacacgcacacgggctccacaagcccgacgctgacgcgaacacctctgtccctatgcaagataaatgttctaggaggagagctccgacctctaaggtatggctgcactttgaggaggtaactacgatgcaaaatggtaaggaggtaagaatatctgccatttgtattcactgcaagaatagcatgtctgctaaatcttcatctggaactggccatttgatctgacacctggatctttgccttgctaagaaagaaaaggatagatttggaaaaactcaatctttgcttaaatataatgcagatggatctgttaatcactgggagtattccccttctattgctagaactgagctttgttgcttaatagctaggctagacctgccactttgtttttgccaatctagtgcttttcaggagtatataactcgtgcccataatccaaggtttattaaatcttctaggcaaactactattagagacttgatctgactgttaatgatcgtgttgaactacttattgaagtccttaaacatgtttcatctattgctttgacatctgatatacagcctagtaaagctaaagaggactatataactgttg

SEQ ID NO: 26563 - DNA, 1267 bp, Zea Mays
gtgacccggccctcggaccacacgcgcttttctttccatccgcagttccatggatcctctcggtcccgctctcgccgtctcgcggctgcgtagccccgtatgggccaccctagtctctacttgggatctggctcccgtcaactccgcgatggagtggggatacaggcaaggaggttggaagctcagttagatgaccaaatgattgcataccgtaaattggtttctatgaaatcagacggttcagaggacaacattgagtctgatatagaaagatcactgaagcagttacagcaagtgaattcgcaaatgcaaacttgggtatcatcaggaggttctgaagttctttctcatactctgactcgtcatatggagattttgcaagaccttactcaggaattctatcggcttcgatcaagtctcagggcaaaacaacagcatacttctctccttgacttgagagattttgacagagcaaagtttgatgttgaggagccgtcagactcagctgatcaagttcttctcagggaacaagctgcgattggcaggagtactggacagatggataacgtgatatcacaagctcaggcaacacttggttctctcatgacccaacggtcaacattcggtggcatcactacaaagataagcaacgtcagcagccagcttccaacaattaaccacgtcctctcatcgatcagaaggaagaaatccatggataccatcattctttcgctcgttgcatctgtctgcacgtttctcatcttcatctactggctgtcgaagtaggtttaccagagcaaagatattacagtgttgtaagcttgggaccacaccaccagtaccggtacagatagtcttcattggtgtttgtacaatattattggttgattgaatgctgttacgattcgggcgtgctgtagccaccgtgtctccagctgtgcaactgctgccaatactgtgaactgaactctgtacctcgtgtacttcggcataactaagggtggagcaactggcgttgctttagctgccccatgttggcatgttgctcagatgtcggcttaaaggtggatcttcacctatgactatagttgacaatataggctctatattttatacaataaaatataaggatgaggctctatttgtttttatttttgaactaaaaataatttagaaccctatcaatttgtaaagaaacatttggatcacgatctattaccacccctacctatgtcgtaagcctctgttatcagacattttcgagtca

SEQ ID NO: 26564 - DNA, 1178 bp, Zea Mays
gcgcgttgtgcatttgtgcacgggcggtcgtttgtggacccgatacgagccctcgccaaacacatcggcgcatcaggcaaggaggttggaagctcagttagatgaccaaatgattgcataccgtaaattggtttctatgaaatcagacggttcagaggacaacattgagtctgatatagaaagatcactgaagcagttacagcaagtgaattcgcaaatgcaaacttgggtatcatcaggaggttctgaagttctttctcatactctgactcgtcatatggagattttgcaagaccttactcaggaattctatcggcttcgatcaagtctcagggcaaaacaacagcatacttctctccttgacttgagagattttgacagagcaaagtttgatgttgaggagccgtcagactcagctgatcaagttcttctcagggaacaagctgcgattggcaggagtactggacagatggataacgtgatatcacaagctcaggcaacacttggttctctcatgacccaacggtcaacattcggtggcatcactacaaagataagcaacgtcagcagccagcttccaacaattaaccacgtcctctcatcgatcagaaggaagaaatccatggataccatcattctttcgctcgttgcatctgtctgcacgtttctcatcttcatctactggctgtcgaagtaggtttaccagagcaaagatattacagtgttgtaagcttgggaccacaccaccagtaccggtacagatagtcttcattggtgtttgtacaatattattggttgattgaatgctgttacgattcgggcgtgctgtagccaccgtgtctccagctgtgcaactgctgccaatactgtgaactgaactctgtacctcgtgtacttcggcataactaagggtggagcaactggcgttgctttagctgccccatgttggcatgttgctcagatgtcggcttaaaggtggatcttcacctatgactatagttgacaatataggctctatattttatacaataaaatataaggatgaggctctatttgtttttatttttgaactaaaaataatttagaaccctatcaatttgtaaagaaacatttggatcacgatctattaccacccctacctatgtcgtaagcctctgttatcagacattttcgagtca

SEQ ID NO: 26565 - DNA, 2429 bp, Zea Mays
cgcccctacgccgttctcctcgcccacccccgttctcagctgtcgtcgcaccttgacctggtcgccgcgcccccggtcctttgccgcacccacgccctaagcctagagctcgcctacaccgtctcggccctaagcttgcccgttgcctcaacctcaagctcgcccacaccgtcccgaccctaagcttgctcgccgcctcgccccctaacctcacccttggcccttgcgcatagtcgcctcgttcgccgctccccgccttgagttcgtcgcagtgccactttacttctcgccccaagacaacacagttccacttgttggaccctcactatgacgagcaccataggggacgactcatcgcagaagggcaggtgttgcccgttctgcggtccaggacccatgacaggtttctagacatgcggtacgacgacaggtacactcctctccttgagagggctggcttggacgtcgtatcgttccaggttcgccgcgggttgcccacaatcaacattgcggcgatcacagctttggtcgataggtggcggccggagactcacactttccatcttccttgcggcgagatgaccgtgacactgcgagacagccagaagcaacttggtctcagtattcgtgggcgtccagtgaccggtcaggcagcgcccggtggctggagacagagagtcgaggcctttcttggaagggaggttcccacagacacaccaggtagccacacatctggggtttctctcgcctggcttaggcagtcgttcggggagtgtccagctgcagcagatgaccagacggttagctactactgccgagcttgggtcctacacttgtttggctccgtcctttttccagacgcgacgggtgatagcgcgtcctggatgttccttccttgcctcactgattgggacatggcaggaggctacagctgggcttctgcagtgctatccttcctgtacagacaactttgtgaggcttgtcgtcggacggcaaagaacgcaagtttaggcggttgcgtgtacctactccagttgtggatgtggtcgcacctaccggttggtcgccctattgagtttgctcctcgaccttggttcgacgtcgtcggcttgcgactacgaccgacggcggcttaccgttgggaccaggtccaggctccgttcgcacgtcaccagcgcgcctacgtcgagtactcaaacgagctggacgcacttacaccgtcgatggttagctggcaaccatatgatgagccaccgttgccacacattcagttgagctccgcgtgcacgacagatgaagacatttatttattaaggtgtccactgatttgtttctatgccgttgagtaccacttgcctcatagagtagcacgccagttcggtctacgtcaggagttccctgtggagcccttctcgacatcggtagaactccacaagttcgaccgccaaaagcagaagaagatcactgactttgaggcgcaccaccaagtgtacattgacgaatgggaccaaatgcatgacctcctctaccagagcgatcagtcccacaccaactacaactttcgcgagtacatctcttggtatgtcggtgtaactcggtgcaagttgaagggccagtggacatcagcggactacgccgaactagagtcttcagatgacgaagacacatcctatgacctagttactcggcatgggacacacgtggaggctgcaccaatcctagatagagtgggcaactccatgatgcagtctgtggtcgacatcgagcatttctctaagaccacttctgacgacaggacacttgcctttctctcaaggctatcacgtcgcctacgttgtgctgctgctcgttgtggttgcaggattagcgccgtagttaacatacaacatactctgcagcaccatggtgacacctcgctaggacttggagctatcaccgttgcacagggctcgtcacgtacgacacgagatgcgtttgcgagccacaaggaggacgaggatgacattaagattcctctcgacaagattggaccataggatgctcctaagacaaccttcacagcctataccacgcagacgatggcgacgatcgcgcaaccctaacaccccaggcatcaacgctcttggggccaagggcaacggtaactagaaggatgcgagggaaacatgatggtgcatgtcttctgctttggcttttttgtgctatggactatggatgacgatatagactttctgcgttgtacactttggttgatgatatagattatctgtggtatgcactttgtttgatctagttgtgtgatgcgctatttagagatatatatgctcatatcatattagttttttttataattgtggatgttactaaaaccatgtccagtagtctatccatactttagctgttgttctgcactgtagattgcactgttc

SEQ ID NO: 26566 - DNA, 2876 bp, Zea Mays
gcagtctcgtccgtttctcttctcctgtgtctatctccacctctcctccacccgggcgatctgctctttggacttcagcgaccccatcgttctatctctccgtcgtcatctatctgtgctccccacctcccgctcccttttcgttgcgcctcggggccgctgcgctggtgatttgcgtcgcctccccccctggggttaatgtgacggccctgccgacgatcttgcctgacgactagtttcttctctagctgggctactctccattcagtggttatggagcctcccaggaagaataagtccagtggcatgcaagtcaaggaggaagtgaagttagaagatggaaatgatttgttagtcaagcgcaggaggactgaacttccaggttccattgttcaactacaacagaaaattgaagtatttgacatggagaacaaagtgccagatggtctttcagttgaagattctactggcaaggatcccatggatgtgctcactagatatgcagcacagaactctggtcaagggaatagttgcagtaacgaacctgcaatctcgagactgacaaaaatatgcaaggcaattggctggaaagaaccatcatatgactttgaagaacaaggacctccgcataacagaattttgccccctggacgacatattatcgtttttggacccttagctcggcgccacaagccacgacgtcaatgtaacacgtctcggcgacgtgagttatggcatcgaggacaacacagttccacttgttggaccctcactatgacgagcaccataggggacgactcatcgcagaagggcaggtgttgcccgttctgcggtccaggacccatgacaggtttctagacatgcggtacgacgacaggtacactcctctccttgagagggctggcttggacgtcgtatcgttccaggttcgccgcgggttgcccacaatcaacattgcggcgatcacagctttggtcgataggtggcggccggagactcacactttccatcttccttgcggcgagatgaccgtgacactgcgagacagccagaagcaacttggtctcagtattcgtgggcgtccagtgaccggtcaggcagcgcccggtggctggagacagagagtcgaggcctttcttggaagggaggttcccacagacacaccaggtagccacacatctggggtttctctcgcctggcttaggcagtcgttcggggagtgtccagctgcagcagatgaccagacggttagctactactgccgagcttgggtcctacacttgtttggctccgtcctttttccagacgcgacgggtgatagcgcgtcctggatgttccttccttgcctcactgattgggacatggcaggaggctacagctgggcttctgcagtgctatccttcctgtacagacaactttgtgaggcttgtcgtcggacggcaaagaacgcaagtttaggcggttgcgtgtacctactccagttgtggatgtggtcgcacctaccggttggtcgccctattgagtttgctcctcgaccttggttcgacgtcgtcggcttgcgactacgaccgacggcggcttaccgttgggaccaggtccaggctccgttcgcacgtcaccagcgcgcctacgtcgagtactcaaacgagctggacgcacttacaccgtcgatggttagctggcaaccatatgatgagccaccgttgccacacattcagttgagctccgcgtgcacgacagatgaagacatttatttattaaggtgtccactgatttgtttctatgccgttgagtaccacttgcctcatagagtagcacgccagttcggtctacgtcaggagttccctgtggagcccttctcgacatcggtagaactccacaagttcgaccgccaaaagcagaagaagatcactgactttgaggcgcaccaccaagtgtacattgacgaatgggaccaaatgcatgacctcctctaccagagcgatcagtcccacaccaactacaactttcgcgagtacatctcttggtatgtcggtgtaactcggtgcaagttgaagggccagtggacatcagcggactacgccgaactagagtcttcagatgacgaagacacatcctatgacctagttactcggcatgggacacacgtggaggctgcaccaatcctagatagagtgggcaactccatgatgcagtctgtggtcgacatcgagcatttctctaagaccacttctgacgacaggacacttgcctttctctcaaggctatcacgtcgcctacgttgtgctgctgctcgttgtggttgcaggattagcgccgtagttaacatacaacatactctgcagcaccatggtgacacctcgctaggacttggagctatcaccgttgcacagggctcgtcacgtacgacacgagatgcgtttgcgagccacaaggaggacgaggatgacattaagattcctctcgacaagattggaccataggatgctcctaagacaaccttcacagcctataccacgcagacgatggcgacgatcgcgcaaccctaacaccccaggcatcaacgctcttggggccaagggcaacggtaactagaaggatgcgagggaaacatgatggtgcatgtcttctgctttggcttttttgtgctatggactatggatgacgatatagactttctgcgttgtacactttggttgatgatatagattatctgtggtatgcactttgtttgatctagttgtgtgatgcgctatttagagatatatatgctcatatcatattagttttttttataattgtggatgttactaaaaccatgtccagtagtctatccatactttagctgttgttctgcactgtagattgcactgttc

SEQ ID NO: 26567 - DNA, 2734 bp, Zea Mays
ctcgcagtctcgtccgtttctcttctcctgtgtctatctccacctctcctccacccgggcgatctgctctttggacttcagcggtttagcccaaacccttcttcctcctcggtgcactccaatgcgtcgcattccgtccttctaatcccgacgcattctctcgttgcagaccccatcgttctatctctccgtcgtcatctatctgtgctccccacctcccgctcccttttcgttgcgcctcggggccgctgcgctggtgatttgcgtcgcctccccccctggggttaatgtgacggccctgccgacgatcttgcctgacgactagtttcttctctagctgggctactctccattcagtggttatggagcctcccaggaagaataagtccagtggcatgcaagtcaaggaggaagtgaagttagaagatggaaatgatttgttagtcaagcgcaggaggactgaacttccaggttccattgttcaactacaacagaaaattgaagtatttgacatggagaacaaagtgccagatggtctttcagttgaagattctactggcaaggatcccatggatgtgctcactagatatgcagcacagaactctggtcaagggaatagttgcagtaacgaacctgcaatctcgagactgacaaaaatatgcaaggcaattggctggaaagaaccatcatatgactttgaagaacaaggacctccgcataacagaataaatagattgacaggtgaacactataaagctctatccaatctagatggctgaaagtacaaacatacaaacaaaggacaacacagttccacttgttggaccctcactatgacgagcaccataggggacgactcatcgcagaagggcaggtgttgcccgttctgcggtccaggacccatgacaggtttctagacatgcggtacgacgacaggtacactcctctccttgagagggctggcttggacgtcgtatcgttccaggttcgccgcgggttgcccacaatcaacattgcggcgatcacagctttggtcgataggtggcggccggagactcacactttccatcttccttgcggcgagatgaccgtgacactgcgagacagccagaagcaacttggtctcagtattcgtgggcgtccagtgaccggtcaggcagcgcccggtggctggagacagagagtcgaggcctttcttggaagggaggttcccacagacacaccaggaggctacagctgggcttctgcagtgctatccttcctgtacagacaactttgtgaggcttgtcgtcggacggcaaagaacgcaagtttaggcggttgcgtgtacctactccagttgtggatgtggtcgcacctaccggttggtcgccctattgagtttgctcctcgaccttggttcgacgtcgtcggcttgcgactacgaccgacggcggcttaccgttgggaccaggtccaggctccgttcgcacgtcaccagcgcgcctacgtcgagtactcaaacgagctggacgcacttacaccgtcgatggttagctggcaaccatatgatgagccaccgttgccacacattcagttgagctccgcgtgcacgacagatgaagacatttatttattaaggtgtccactgatttgtttctatgccgttgagtaccacttgcctcatagagtagcacgccagttcggtctacgtcaggagttccctgtggagcccttctcgacatcggtagaactccacaagttcgaccgccaaaagcagaagaagatcactgactttgaggcgcaccaccaagtgtacattgacgaatgggaccaaatgcatgacctcctctaccagagcgatcagtcccacaccaactacaactttcgcgagtacatctcttggtatgtcggtgtaactcggtgcaagttgaagggccagtggacatcagcggactacgccgaactagagtcttcagatgacgaagacacatcctatgacctagttactcggcatgggacacacgtggaggctgcaccaatcctagatagagtgggcaactccatgatgcagtctgtggtcgacatcgagcatttctctaagaccacttctgacgacaggacacttgcctttctctcaaggctatcacgtcgcctacgttgtgctgctgctcgttgtggttgcaggattagcgccgtagttaacatacaacatactctgcagcaccatggtgacacctcgctaggacttggagctatcaccgttgcacagggctcgtcacgtacgacacgagatgcgtttgcgagccacaaggaggacgaggatgacattaagattcctctcgacaagattggaccataggatgctcctaagacaaccttcacagcctataccacgcagacgatggcgacgatcgcgcaaccctaacaccccaggcatcaacgctcttggggccaagggcaacggtaactagaaggatgcgagggaaacatgatggtgcatgtcttctgctttggcttttttgtgctatggactatggatgacgatatagactttctgcgttgtacactttggttgatgatatagattatctgtggtatgcactttgtttgatctagttgtgtgatgcgctatttagagatatatatgctcatatcatattagttttttttataattgtggatgttactaaaaccatgtccagtagtctatccatactttagctgttgttctgcactgtagattgcactgttc

SEQ ID NO: 26568 - DNA, 3381 bp, Zea Mays
cgagttctcgcagtctcgtccgtttctcttctcctgtgtctatctccacctctcctccacccgggcgatctgctctttggacttcagcggtttagcccaaacccttcttcctcctcggtgcactccaatgcgtcgcattccgtccttctaatcccgacgcattctctcgttgcagaccccatcgttctatctctccgtcgtcatctatctgtgctccccacctcccgctcccttttcgttgcgcctcggggccgctgcgctggtgatttgcgtcgcctccccccctggggttaatgtgacggccctgccgacgatcttgcctgacgactagtttcttctctagctgggctactctccattcagtggttatggagcctcccaggaagaataagtccagtggcatgcaagtcaaggaggaagtgaagttagaagatggaaatgatttgttagtcaagcgcaggaggactgaacttccaggttccattgttcaactacaacagaaaattgaagtatttgacatggagaacaaagtgccagatggtctttcagttgaagattctactggcaaggatcccatggatgtgctcactagatatgcagcacagaactctggtcaagggaatagttgcagtaacgaacctgcaatctcgagactgacaaaaatatgcaaggcaattggctggaaagaaccatcatatgactttgaagaacaaggacctccgcataacagaattttgccccctggacgacatattatcgtttttggacccttagctcggcgccacaagccacgacgtcaatgtaacacgtctcggcgacgtgagttatggcatcgaggtaccgttccagcagtgctgatctgtgctgcactggcgcccgtcgtgacacctagctcggcaccataaatcttgacgctgagatctatggcgttaagctcggcaatattgccctgtgtgtgcttcctcttcccccgtgctagcttcttccactgcgtcgccgtgctaaccgccattgtcgcaacaccgtcgcagcacctcgcccctacgccgttctcctcgcccacccccgttctcagctgtcgtcgcaccttgacctggtcgccgcgcccccggtcctttgccgcacccacgccctaagcctagagctcgcctacaccgtctcggccctaagcttgcccgttgcctcaacctcaagctcgcccacaccgtcccgaccctaagcttgctcgccgcctcgccccctaacctcacccttggcccttgcgcatagtcgcctcgttcgccgctccccgccttgagttcgtcgcagtgccactttacttctcgccccaagacaacacagttccacttgttggaccctcactatgacgagcaccataggggacgactcatcgcagaagggcaggtgttgcccgttctgcggtccaggacccatgacaggtttctagacatgcggtacgacgacaggtacactcctctccttgagagggctggcttggacgtcgtatcgttccaggttcgccgcgggttgcccacaatcaacattgcggcgatcacagctttggtcgataggtggcggccggagactcacactttccatcttccttgcggcgagatgaccgtgacactgcgagacagccagaagcaacttggtctcagtattcgtgggcgtccagtgaccggtcaggcagcgcccggtggctggagacagagagtcgaggcctttcttggaagggaggttcccacagacacaccaggtagccacacatctggggtttctctcgcctggcttaggcagtcgttcggggagtgtccagctgcagcagatgaccagacggttagctactactgccgagcttgggtcctacacttgtttggctccgtcctttttccagacgcgacgggtgatagcgcgtcctggatgttccttccttgcctcactgattgggacatggcaggaggctacagctgggcttctgcagtgctatccttcctgtacagacaactttgtgaggcttgtcgtcggacggcaaagaacgcaagtttaggcggttgcgtgtacctactccagttgtggatgtggtcgcacctaccggttggtcgccctattgagtttgctcctcgaccttggttcgacgtcgtcggcttgcgactacgaccgacggcggcttaccgttgggaccaggtccaggctccgttcgcacgtcaccagcgcgcctacgtcgagtactcaaacgagctggacgcacttacaccgtcgatggttagctggcaaccatatgatgagccaccgttgccacacattcagttgagctccgcgtgcacgacagatgaagacatttatttattaaggtgtccactgatttgtttctatgccgttgagtaccacttgcctcatagagtagcacgccagttcggtctacgtcaggagttccctgtggagcccttctcgacatcggtagaactccacaagttcgaccgccaaaagcagaagaagatcactgactttgaggcgcaccaccaagtgtacattgacgaatgggaccaaatgcatgacctcctctaccagagcgatcagtcccacaccaactacaactttcgcgagtacatctcttggtatgtcggtgtaactcggtgcaagttgaagggccagtggacatcagcggactacgccgaactagagtcttcagatgacgaagacacatcctatgacctagttactcggcatgggacacacgtggaggctgcaccaatcctagatagagtgggcaactccatgatgcagtctgtggtcgacatcgagcatttctctaagaccacttctgacgacaggacacttgcctttctctcacaccatggtgacacctcgctaggacttggagctatcaccgttgcacagggctcgtcacgtacgacacgagatgcgtttgcgagccacaaggaggacgaggatgacattaagattcctctcgacaagattggaccataggatgctcctaagacaaccttcacagcctataccacgcagacgatggcgacgatcgcgcaaccctaacaccccaggcatcaacgctcttggggccaagggcaacggtaactagaaggatgcgagggaaacatgatggtgcatgtcttctgctttggcttttttgtgctatggactatggatgacgatatagactttctgcgttgtacactttggttgatgatatagattatctgtggtatgcactttgtttgatctagttgtgtgatgcgctatttagagatatatatgctcatatcatattagttttttttataattgtggatgttactaaaaccatgtccagtagtctatccatactttagctgttgttctgcactgtagattgcactgttc

SEQ ID NO: 26569 - DNA, 2666 bp, Zea Mays
ctcagtcgagttctcgcagtctcgtccgtttctcttctcctgtgtctatctccacctctcctccacccgggcgatctgctctttggacttcagcgaccccatcgttctatctctccgtcgtcatctatctgtgctccccacctcccgctcccttttcgttgcgcctcggggccgctgcgctggtgatttgcgtcgcctccccccctggggttaatgtgacggccctgccgacgatcttgcctgacgactagtttcttctctagctgggctactctccattcagtggttatggagcctcccaggaagaataagtccagtggcatgcaagtcaaggaggaagtgaagttagaagatggaaatgatttgttagtcaagcgcaggaggactgaacttccaggttccattgttcaactacaacagaaaattgaagtatttgacatggagaacaaagtgccagatggtctttcagttgaagattctactggcaaggatcccatggatgtgctcactagatatgcagcacagaactctggtcaagggaatagttgcagtaacgaacctgcaatctcgagactgacaaaaatatgcaaggcaattggctggaaagaaccatcatatgactttgaagaacaaggacctccgcataacagaatgacaacacagttccacttgttggaccctcactatgacgagcaccataggggacgactcatcgcagaagggcaggtgttgcccgttctgcggtccaggacccatgacaggtttctagacatgcggtacgacgacaggtacactcctctccttgagagggctggcttggacgtcgtatcgttccaggttcgccgcgggttgcccacaatcaacattgcggcgatcacagctttggtcgataggtggcggccggagactcacactttccatcttccttgcggcgagatgaccgtgacactgcgagacagccagaagcaacttggtctcagtattcgtgggcgtccagtgaccggtcaggcagcgcccggtggctggagacagagagtcgaggcctttcttggaagggaggttcccacagacacaccaggtagccacacatctggggtttctctcgcctggcttaggcagtcgttcggggagtgtccagctgcagcagatgaccagacggaggctacagctgggcttctgcagtgctatccttcctgtacagacaactttgtgaggcttgtcgtcggacggcaaagaacgcaagtttaggcggttgcgtgtacctactccagttgtggatgtggtcgcacctaccggttggtcgccctattgagtttgctcctcgaccttggttcgacgtcgtcggcttgcgactacgaccgacggcggcttaccgttgggaccaggtccaggctccgttcgcacgtcaccagcgcgcctacgtcgagtactcaaacgagctggacgcacttacaccgtcgatggttagctggcaaccatatgatgagccaccgttgccacacattcagttgagctccgcgtgcacgacagatgaagacatttatttattaaggtgtccactgatttgtttctatgccgttgagtaccacttgcctcatagagtagcacgccagttcggtctacgtcaggagttccctgtggagcccttctcgacatcggtagaactccacaagttcgaccgccaaaagcagaagaagatcactgactttgaggcgcaccaccaagtgtacattgacgaatgggaccaaatgcatgacctcctctaccagagcgatcagtcccacaccaactacaactttcgcgagtacatctcttggtatgtcggtgtaactcggtgcaagttgaagggccagtggacatcagcggactacgccgaactagagtcttcagatgacgaagacacatcctatgacctagttactcggcatgggacacacgtggaggctgcaccaatcctagatagagtgggcaactccatgatgcagtctgtggtcgacatcgagcatttctctaagaccacttctgacgacaggacacttgcctttctctcaaggctatcacgtcgcctacgttgtgctgctgctcgttgtggttgcaggattagcgccgtagttaacatacaacatactctgcagcaccatggtgacacctcgctaggacttggagctatcaccgttgcacagggctcgtcacgtacgacacgagatgcgtttgcgagccacaaggaggacgaggatgacattaagattcctctcgacaagattggaccataggatgctcctaagacaaccttcacagcctataccacgcagacgatggcgacgatcgcgcaaccctaacaccccaggcatcaacgctcttggggccaagggcaacggtaactagaaggatgcgagggaaacatgatggtgcatgtcttctgctttggcttttttgtgctatggactatggatgacgatatagactttctgcgttgtacactttggttgatgatatagattatctgtggtatgcactttgtttgatctagttgtgtgatgcgctatttagagatatatatgctcatatcatattagttttttttataattgtggatgttactaaaaccatgtccagtagtctatccatactttagctgttgttctgcactgtagattgcactgttc

SEQ ID NO: 26570 - DNA, 2656 bp, Zea Mays
ctcagtcgagttctcgcagtctcgtccgtttctcttctcctgtgtctatctccacctctcctccacccgggcgatctgctctttggacttcagcgaccccatcgttctatctctccgtcgtcatctatctgtgctccccacctcccgctcccttttcgttgcgcctcggggccgctgcgctggtgatttgcgtcgcctccccccctggggttaatgtgacggccctgccgacgatcttgcctgacgactagtttcttctctagctgggctactctccattcagtggttatggagcctcccaggaagaataagtccagtggcatgcaagtcaaggaggaagtgaagttagaagatggaaatgatttgttagtcaagcgcaggaggactgaacttccaggttccattgttcaactacaacagaaaattgaagtatttgacatggagaacaaagtgccagatggtctttcagttgaagattctactggcaaggatcccatggatgtgctcactagatatgcagcacagaactctggtcaagggaatagttgcagtaacgaacctgcaatctcgagactgacaaaaatatgcaaggcaattggctggaaagaaccatcatatgactttgaagaacaaggacctccgcataacagaatgacaacacagttccacttgttggaccctcactatgacgagcaccataggggacgactcatcgcagaagggcaggtgttgcccgttctgcggtccaggacccatgacaggtttctagacatgcggtacgacgacaggtacactcctctccttgagagggctggcttggacgtcgtatcgttccaggttcgccgcgggttgcccacaatcaacattgcggcgatcacagctttggtcgataggtggcggccggagactcacactttccatcttccttgcggcgagatgaccgtgacactgcgagacagccagaagcaacttggtctcagtattcgtgggcgtccagtgaccggtcaggcagcgcccggtggctggagacagagagtcgaggcctttcttggaagggaggttcccacagacacaccaggtagccacacatctggggtttctctcgcctggcttaggcagtcgttcggggagtgtccagctgcagcagatgaccagacgctgggcttctgcagtgctatccttcctgtacagacaactttgtgaggcttgtcgtcggacggcaaagaacgcaagtttaggcggttgcgtgtacctactccagttgtggatgtggtcgcacctaccggttggtcgccctattgagtttgctcctcgaccttggttcgacgtcgtcggcttgcgactacgaccgacggcggcttaccgttgggaccaggtccaggctccgttcgcacgtcaccagcgcgcctacgtcgagtactcaaacgagctggacgcacttacaccgtcgatggttagctggcaaccatatgatgagccaccgttgccacacattcagttgagctccgcgtgcacgacagatgaagacatttatttattaaggtgtccactgatttgtttctatgccgttgagtaccacttgcctcatagagtagcacgccagttcggtctacgtcaggagttccctgtggagcccttctcgacatcggtagaactccacaagttcgaccgccaaaagcagaagaagatcactgactttgaggcgcaccaccaagtgtacattgacgaatgggaccaaatgcatgacctcctctaccagagcgatcagtcccacaccaactacaactttcgcgagtacatctcttggtatgtcggtgtaactcggtgcaagttgaagggccagtggacatcagcggactacgccgaactagagtcttcagatgacgaagacacatcctatgacctagttactcggcatgggacacacgtggaggctgcaccaatcctagatagagtgggcaactccatgatgcagtctgtggtcgacatcgagcatttctctaagaccacttctgacgacaggacacttgcctttctctcaaggctatcacgtcgcctacgttgtgctgctgctcgttgtggttgcaggattagcgccgtagttaacatacaacatactctgcagcaccatggtgacacctcgctaggacttggagctatcaccgttgcacagggctcgtcacgtacgacacgagatgcgtttgcgagccacaaggaggacgaggatgacattaagattcctctcgacaagattggaccataggatgctcctaagacaaccttcacagcctataccacgcagacgatggcgacgatcgcgcaaccctaacaccccaggcatcaacgctcttggggccaagggcaacggtaactagaaggatgcgagggaaacatgatggtgcatgtcttctgctttggcttttttgtgctatggactatggatgacgatatagactttctgcgttgtacactttggttgatgatatagattatctgtggtatgcactttgtttgatctagttgtgtgatgcgctatttagagatatatatgctcatatcatattagttttttttataattgtggatgttactaaaaccatgtccagtagtctatccatactttagctgttgttctgcactgtagattgcactgttc

SEQ ID NO: 26571 - DNA, 2768 bp, Zea Mays
ctcagtcgagttctcgcagtctcgtccgtttctcttctcctgtgtctatctccacctctcctccacccgggcgatctgctctttggacttcagcgaccccatcgttctatctctccgtcgtcatctatctgtgctccccacctcccgctcccttttcgttgcgcctcggggccgctgcgctggtgatttgcgtcgcctccccccctggggttaatgtgacggccctgccgacgatcttgcctgacgactagtttcttctctagctgggctactctccattcagtggttatggagcctcccaggaagaataagtccagtggcatgcaagtcaaggaggaagtgaagttagaagatggaaatgatttgttagtcaagcgcaggaggactgaacttccaggttccattgttcaactacaacagaaaattgaagtatttgacatggagaacaaagtgccagatggtctttcagttgaagattctactggcaaggatcccatggatgtgctcactagatatgcagcacagaactctggtcaagggaatagttgcagtaacgaacctgcaatctcgagactgacaaaaatatgcaaggcaattggctggaaagaaccatcatatgactttgaagaacaaggacctccgcataacagaatgacaacacagttccacttgttggaccctcactatgacgagcaccataggggacgactcatcgcagaagggcaggtgttgcccgttctgcggtccaggacccatgacaggtttctagacatgcggtacgacgacaggtacactcctctccttgagagggctggcttggacgtcgtatcgttccaggttcgccgcgggttgcccacaatcaacattgcggcgatcacagctttggtcgataggtggcggccggagactcacactttccatcttccttgcggcgagatgaccgtgacactgcgagacagccagaagcaacttggtctcagtattcgtgggcgtccagtgaccggtcaggcagcgcccggtggctggagacagagagtcgaggcctttcttggaagggaggttcccacagacacaccaggtagccacacatctggggtttctctcgcctggcttaggcagtcgttcggggagtgtccagctgcagcagatgaccagacggttagctactactgccgagcttgggtcctacacttgtttggctccgtcctttttccagacgcgacgggtgatagcgcgtcctggatgttccttccttgcctcactgattgggacatggcaggaggctacagctgggcttctgcagtgctatccttcctgtacagacaactttgtgaggcttgtcgtcggacggcaaagaacgcaagtttaggcggttgcgtgtacctactccagttgtggatgtggtcgcacctaccggttggtcgccctattgagtttgctcctcgaccttggttcgacgtcgtcggcttgcgactacgaccgacggcggcttaccgttgggaccaggtccaggctccgttcgcacgtcaccagcgcgcctacgtcgagtactcaaacgagctggacgcacttacaccgtcgatggttagctggcaaccatatgatgagccaccgttgccacacattcagttgagctccgcgtgcacgacagatgaagacatttatttattaaggtgtccactgatttgtttctatgccgttgagtaccacttgcctcatagagtagcacgccagttcggtctacgtcaggagttccctgtggagcccttctcgacatcggtagaactccacaaaagaagatcactgactttgaggcgcaccaccaagtgtacattgacgaatgggaccaaatgcatgacctcctctaccagagcgatcagtcccacaccaactacaactttcgcgagtacatctcttggtatgtcggtgtaactcggtgcaagttgaagggccagtggacatcagcggactacgccgaactagagtcttcagatgacgaagacacatcctatgacctagttactcggcatgggacacacgtggaggctgcaccaatcctagatagagtgggcaactccatgatgcagtctgtggtcgacatcgagcatttctctaagaccacttctgacgacaggacacttgcctttctctcaaggctatcacgtcgcctacgttgtgctgctgctcgttgtggttgcaggattagcgccgtagttaacatacaacatactctgcagcaccatggtgacacctcgctaggacttggagctatcaccgttgcacagggctcgtcacgtacgacacgagatgcgtttgcgagccacaaggaggacgaggatgacattaagattcctctcgacaagattggaccataggatgctcctaagacaaccttcacagcctataccacgcagacgatggcgacgatcgcgcaaccctaacaccccaggcatcaacgctcttggggccaagggcaacggtaactagaaggatgcgagggaaacatgatggtgcatgtcttctgctttggcttttttgtgctatggactatggatgacgatatagactttctgcgttgtacactttggttgatgatatagattatctgtggtatgcactttgtttgatctagttgtgtgatgcgctatttagagatatatatgctcatatcatattagttttttttataattgtggatgttactaaaaccatgtccagtagtctatccatactttagctgttgttctgcactgtagattgcactgttc

SEQ ID NO: 26572 - DNA, 1954 bp, Zea Mays
ctccatcgcgctgtgcgtgtatatatatgcatcctgcccccaccccccttttacctccccactcgtctgcaccgaatcggtcgatcggtgcttttaatctctgagcaagcgatcgagctcaccaacaaccaccgcgctcaagagtagcagcccgccggccgcgccggagccgaaaacgacgaggcggtggcatggggaggccgccgtgctgcgacaaggtgggagtgaagaaagggccgtggacccccgaggaggacctcatgctcgtctcctatgtccaggagcacggccccgggaactggcgcgccgtgccgaccaacaccgggctgatgcggtgcagcaagagctgcaggttgcggtggacaaactacctccggccgggaatcaagcgcggcaactttaccgaccaggaggagaagctcatcatccacctccaggctctccttggcaaccggtgggcggcgatagcgtcctacttgccggagaggacggacaacgacatcaagaactactggaacacgcacctcaagaagaagctgaagaagatgcaggccggcgaagggggcgggggagacggcgacggcgcagcaggtgcctcggaaggcggcgccgtcgccaccgcaggcgcgggagggaagcgcccggcggtgcccaaggggcagtgggagcggcggctgcagaccgacatccacacggcgcggcaggctctgcgcgacgcgctctcgctggaaccttcgccttcggcttcggcgccgccgccggctaaggtggagcctctgccggcgaccgccccggggtacacgacgtacgcgtctagcgccgagaacatcgcgcggctgctggaggggtggctgcgccccggcagcggagggggcaaggggcccgaggcgtcgggctcgacgtcgacgacggccacgacgcagcagcggccgcagtgctccggtgagggcgcggcgtccgcgtcggcgagccacagcggcggagcgcccgcgaacgcggcggcgcagacgcccgagtgctcgacggagaccagcaaggtggccggcgcgggcgccgcgccgccggcgttctcgatgctggagagctggctcctcgacgacggcatggggcacggcgaggacgggctcatgaccgacgtggtgccactaggggaccccagtgagttcttttaatcaaggccgctgtacaagtaccactaaaagcaaattaatcaagtagagatgcaagaacaaaagggaaaaaaataatcgccgagttattaggtaataactagtgaagcagaaatccaacgaaccaaatttctttgaattctcggtgatatggatcgagttgagtgtcgatctagtttgttttaattccctcttttatcttttttacgctgttgtttctctgatgttagggattggaactgatcgtgtaagcttatactaatgacaggttcctaaaggaccatgcatgagagtgaccgatagaaagaagtgtacatcttatataaattattaaaagatctatatatttagaagttataatagatgctcaatcctcaattatattactccaatatttttccttcatcaagctctatatatttttcgtgttattcttactctactacacgaatggggaataaaacattatagtactccctagtagttcagatcaaccatgtctaagtgatgcttgcttttgtagaattatcttgtgtaattttcatgaaatccttgcatattgcaaatccaaatgtaaataattgaatggttcttttccaaaagttacttgagttattactctgccatgtgcttgatataaataaaagcagcaggcctttcgatcaagatattgcaagagatttcaagatgcatgtgatgcatccaattcatgaatcatttttatgtgaattgtatagtttttttaacatgtgggggcaccgagaggaaataaatttagtgcgttt

SEQ ID NO: 26573 - DNA, 1369 bp, Zea Mays
gttgctataaagctccatcgcgctgtgcgtgtatatatatgcatcctgcccccaccccccttttacctccccactcgtctgcaccgaatcggtcgatcggtgcttttaatctctgagcaagcgatcgagctcaccaacaaccaccgcgctcaagagtagcagcccgccggccgcgccggagccgaaaacgacgaggcggtggcatggggaggccgccgtgctgcgacaaggtgggagtgaagaaagggccgtggacccccgaggaggacctcatgctcgtctcctatgtccaggagcacggccccgggaactggcgcgccgtgccgaccaacaccgggctgatgcggtgcagcaagagctgcaggttgcggtggacaaactacctccggccgggaatcaagcgcggcaactttaccgaccaggaggagaagctcatcatccacctccaggctctccttggcaaccggtgggcggcgatagcgtcctacttgccggagaggacggacaacgacgacggcatggggcacggcgaggacgggctcatgaccgacgtggtgccactaggggaccccagtgagttcttttaatcaaggccgctgtacaagtaccactaaaagcaaattaatcaagtagagatgcaagaacaaaagggaaaaaaataatcgccgagttattaggtaataactagtgaagcagaaatccaacgaaccaaatttctttgaattctcggtgatatggatcgagttgagtgtcgatctagtttgttttaattccctcttttatcttttttacgctgttgtttctctgatgttagggattggaactgatcgtgtaagcttatactaatgacaggttcctaaaggaccatgcatgagagtgaccgatagaaagaagtgtacatcttatataaattattaaaagatctatatatttagaagttataatagatgctcaatcctcaattatattactccaatatttttccttcatcaagctctatatatttttcgtgttattcttactctactacacgaatggggaataaaacattatagtactccctagtagttcagatcaaccatgtctaagtgatgcttgcttttgtagaattatcttgtgtaattttcatgaaatccttgcatattgcaaatccaaatgtaaataattgaatggttcttttccaaaagttacttgagttattactctgccatgtgcttgatataaataaaagcagcaggcctttcgatcaagatattgcaagagatttcaagatgcatgtgatgcatccaattcatgaatcatttttatgtgaattgtatagtttttttaacatgtgggggcaccgagaggaaataaatttagtgcgttt

SEQ ID NO: 26574 - DNA, 1483 bp, Zea Mays
ctttgtcttgtttctaaaaaactgtttcgaagcgttgtagtttatttgtttataaaacagtttattcgtttggaaggtatctgcttgcgaattgcgatagcgagactcatgcaggcacacaagggggagttcccgagtccacggctgcacacgtcgtcgcctcctctccactcgcacactcgcaccctgcgtccgcctgccgcctaccccaggcggccccctcccatcgccatgcctccgtccgccgccgccaccgccgccgccttcctcttcccggccgtcgcgatcccctgccgcgtgttccctcaacggcgggcgaggagcctcgccgtccgtgccgtcgcctcccctccagccttcgcggtcaagcccgccccgctgccctccaagactggaaagtgggagtggaaattcgagaacaagccggtaaacatatactatgaggaacatgagcaggaggttgctgagaatatgaagaacattctcatgatccctacgatctctgatgtgagcactgtggaggagtggagggtggttgccaaagatattgttgggcggaaaggagaacttggctaccgtgttacaattgtcgattggcctggtcttggttattcagataggccatcactgaactacaatgctgatgtgatggagagctttctggttgaactaatgaattcaccaaacagtccagtcgcaaatgcagatgatgaactgatcattgttggaggtggtcatgcagcaaccatagctgttcgtgcagctggtaaagaccttataaaaccatctgctgttgctgctgttgcacctacttgggctggaccccttcccatcgtatttggccgcggttctgatatggaaactaggtatgggcttctacgaggaaccctcagggctccagccctgggctggatgatgtacaatgttctggtgagcaatgaaaagtcgatccagtctcagtacaagtcccacgtctacgccaaccctgacaacgtgacgccagctatcatcgagagccgatacgagttaaccaaaagaaaaggcgcacggttcgtccccgcggccttcctgacaggcctccttgatcctgtccaatcgagggaggagtttctgcagttgttcgccaagttagacggagacgtaccagttctggtagtgtcaacggtcaatgctcccaagagatccaaggccgagatggaggctctaaggggctctaaaggggtgacgaagtttgtggaggtcgcaggcgctcttctaccgcaggaagaataccccttggcagtcgcggaggaactctacagcttcctgcaggaatcattcgcagcaagaaggtgaatgtgcgtgcgtgcgtgcgcacaactgtgccagaagacaggttctcaagtcccacacatcgtgagtaaattcgttagcctgctacagtgtactggaggtttttagcaacaataaagcggcatcactcgttcacttccctaaaaaaata

SEQ ID NO: 26575 - DNA, 2918 bp, Zea Mays
cttatggttaattaattagtaacataatggctatttccgttatcttcgagtctatactatacactagccctattctcattcgctgaaatatgggggtgggtggtgcaggtcctgaagaaattgccatgtccacaaaatgaaaatgcaataactctttagctcttatcttgtagggaatacattatacgctttaatgttagttttaggtttgaaacgctaccggcaggcaacatgcatcatacatggttaaccttagtcggggtttgtgattgtaatatatcttctcttcttcacattttgggaaatcattggaaagagggtgagtgttgaaatatgaagtgtacaaatataaagtgaactgccaccttccccatcagcttattggtttgaattaatcatgtatgtaacttaatagtaataataaatgattgttaaccagatatttctttgattccttagaagaactgagcacttagggccaggggagctcagccaaatgatattttacagagaagttatggtagagtatgatcctatgtaatgaactgagcggttgggagctgagaaaactaggggcatatttggatgtgcagtaagctttgcttgcctggcctcgctgctagtcaaggctaaccttgcccattgtggcaagccaattcggctctctcgctccagcaagaaaaactagcttgtacaagtatggaggcaacacgacaaggtaaccaaacatgtttctatatcctgtttctggctggtcaaggcgaggcaaggctcacatatggaaccaaaagtgctctcacttgtcctaattcttttcctacatagtttatcatagagaaccatttctccctgagaatcacttcctacatataatcaggagtagaagccttagcagccatgttaccggaagggaatgggaacatggactgatactttataatgtttttatactgtgggaatgtaattgttcctggtaatgtgaatgttcttgcaacgatgttcccgaaatggggaacgtggccatgttccacgtttccggctgctaaggcaggagccctagtaaactggcctcaagttttacatcatttgaaccacgaacttaagaactttcaagtttgttgtctccatttctattattctatattgtcttactgttagttatcatgaaaccttccataactgaaaaataaccagtttgactttggttaagatatttggcaggaagcctagtgtgagttaaagtatgatttgactgcttagctgaatgctactggagtctggatctcttaggctgtcattagagctgtggtataacatgcacttgaatggcagcattagcttccaacaaaaccacacaaagcattttttgtttccccctttgaattgtgggattgaagggcagcctctccgcatttgtagggggaaggcttgccttgatttatcccttacctagaccccaccattgtaggagcctccgacactagactggaaagtgggagtggaaattcgagaacaagccggtaaacatatactatgaggaacatgagcaggaggttgctgagaatatgaagaacattctcatgatccctacgatctctgatgtgagcactgtggaggagtggagggtggttgccaaagatattgttgggcggaaaggagaacttggctaccgtgttacaattgtcgattggcctggtcttggttattcagataggccatcactgaactacaatgctgatgtgatggagagctttctggttgaactaatgaattcaccaaacagtccagtcgcaaatgcagatgatgaactgatcattgttggaggtggtcatgcagcaaccatagctgttcgtgcagctggtaaagaccttataaaaccatctgctgttgctgctgttgcacctacttgggctggaccccttcccatcgtatttggccgcggttctgatatggaaactaggtatgggcttctacgaggaaccctcagggctccagccctgggctggatgatgtacaatgttctggtgagcaatgaaaagtcgatccagtctcagtacaagtcccacgtctacgccaaccctgacaacgtgacgccagctatcatcgagagccgatacgagttaaccaaaagaaaaggcgcacggttcgtccccgcggccttcctgacaggcctccttgatcctgtccaatcgagggaggagtttctgcagttgttcgccaagttagacggagacgtaccagttctggtagtgtcaacggtcaatgctcccaagagatccaaggccgagatggaggctctaaggggctctaaaggggtgacgaagtttgtggaggtcgcaggcgctcttctaccgcaggaagaataccccttggcagtcgcggaggaactctacagcttcctgcaggaatcattcgcagcaagaaggtgaatgtgcgtgcgtgcgtgcgcacaactgtgccagaagacaggttctcaagtcccacacatcgtgagtaaattcgttagcctgctacagtgtactggaggtttttagcaacaataaagcggcatcactcgttcacttccctagtgccacgattcaatagcctgcgacagagcagacagcagacaatcgcatgacatcgccggtgtgcgcaaagcatgccgccgtgataccagatttcgatcaggcacgtcgtggttcgtgtctgatctgcatcagagcctaacccttcggtccggtggagcccattcattgcacatggtcgcagcaggttcgtggtcgtaaaattttctcaggtcctggtcctggttcttggtaattgatggccgaagtacaaggcctcgacgacgccggtcagtggtctcctgaggtagacgtttctcccctctccctcccctcctccagtacatttcaacagctaggttggaggcgttg

SEQ ID NO: 26576 - DNA, 3624 bp, Zea Mays
ctttgtcttgtttctaaaaaactgtttcgaagcgttgtagtttatttgtttataaaacagtttattcgtttggaaggtatctgcttgcgaattgcgatagcgagactcatgcaggcacacaagggggagttcccgagtccacggctgcacacgtcgtcgcctcctctccactcgcacactcgcaccctgcgtccgcctgccgcctaccccaggcggccccctcccatcgccatgcctccgtccgccgccgccaccgccgccgccttcctcttcccggccgtcgcgatcccctgccgcgtgttccctcaacggcgggcgaggagcctcgccgtccgtgccgtcgcctcccctccagccttcgcggtcaagcccgccccgctgccctccaaggtagcggaataagcccagattcgttgcgcttggttggaatgcgaactgcttcgatgtgctttgagatcccatattgcagggcacatggggttgcgattccgaacttcttatggttaattaattagtaacataatggctatttccgttatcttcgagtctatactatacactagccctattctcattcgctgaaatatgggggtgggtggtgcaggtcctgaagaaattgccatgtccacaaaatgaaaatgcaataactctttagctcttatcttgtagggaatacattatacgctttaatgttagttttaggtttgaaacgctaccggcaggcaacatgcatcatacatggttaaccttagtcggggtttgtgattgtaatatatcttctcttcttcacattttgggaaatcattggaaagagggtgagtgttgaaatatgaagtgtacaaatataaagtgaactgccaccttccccatcagcttattggtttgaattaatcatgtatgtaacttaatagtaataataaatgattgttaaccagatatttctttgattccttagaagaactgagcacttagggccaggggagctcagccaaatgatattttacagagaagttatggtagagtatgatcctatgtaatgaactgagcggttgggagctgagaaaactaggggcatatttggatgtgcagtaagctttgcttgcctggcctcgctgctagtcaaggctaaccttgcccattgtggcaagccaattcggctctctcgctccagcaagaaaaactagcttgtacaagtatggaggcaacacgacaaggtaaccaaacatgtttctatatcctgtttctggctggtcaaggcgaggcaaggctcacatatggaaccaaaagtgctctcacttgtcctaattcttttcctacatagtttatcatagagaaccatttctccctgagaatcacttcctacatataatcaggagtagaagccttagcagccatgttaccggaagggaatgggaacatggactgatactttataatgtttttatactgtgggaatgtaattgttcctggtaatgtgaatgttcttgcaacgatgttcccgaaatggggaacgtggccatgttccacgtttccggctgctaaggcaggagccctagtaaactggcctcaagttttacatcatttgaaccacgaacttaagaactttcaagtttgttgtctccatttctattattctatattgtcttactgttagttatcatgaaaccttccataactgaaaaataaccagtttgactttggttaagatatttggcaggaagcctagtgtgagttaaagtatgatttgactgcttagctgaatgctactggagtctggatctcttaggctgtcattagagctgtggtataacatgcacttgaatggcagcattagcttccaacaaaaccacacaaagcattttttgtttccccctttgaattgtgggattgaagggcagcctctccgcatttgtagggggaaggcttgccttgatttatcccttacctagaccccaccattgtaggagcctccgacactaggtctgccttttcattgtttcaactgactccattgtgtatctatttgttaaactgttaatgttaatgtgaatacaattactctagtggaagataccctacattagacttaagaatgttagaatgatataccttgacaaaaaggtcatattaccaattttgtcatgtctctctgctgttacctgtgctataacattgtcgatgtgtttccagactggaaagtgggagtggaaattcgagaacaagccggtaaacatatactatgaggaacatgagcaggaggttgctgagaatatgaagaacattctcatgatccctacgatctctgatgtgagcactgtggaggagtggagggtggttgccaaagatattgttgggcggaaaggagaacttggctaccgtgttacaattgtcgattggcctggtcttggttattcagataggccatcactgaactacaatgctgatgtgatggagagctttctggttgaactaatgaattcaccaaacagtccagtcgcaaatgcagatgatgaactgatcattgttggaggtggtcatgcagcaaccatagctgttcgtgcagctggtaaagaccttataaaaccatctgctgttgctgctgttgcacctacttgggctggaccccttcccatcgtatttggccgcggttctgatatggaaactaggtatgggcttctacgaggaaccctcagggctccagccctgggctggatgatgtacaatgttctggtgagcaatgaaaagtcgatccagtctcagtacaagtcccacgtctacgccaaccctgacaacgtgacgccagctatcatcgagagccgatacgagttaaccaaaagaaaaggcgcacggttcgtccccgcggccttcctgacaggcctccttgatcctgtccaatcgagggaggagtttctgcagttgttcgccaagttagacggagacgtaccagttctggtagtgtcaacggtcaatgctcccaagagatccaaggccgagatggaggctctaaggggctctaaaggggtgacgaagtttgtggaggtcgcaggcgctcttctaccgcaggaagaataccccttggcagtcgcggaggaactctacagcttcctgcaggaatcattcgcagcaagaaggtgaatgtgcgtgcgtgcgtgcgcacaactgtgccagaagacaggttctcaagtcccacacatcgtgagtaaattcgttagcctgctacagtgtactggaggtttttagcaacaataaagcggcatcactcgttcacttccctagtgccacgattcaatagcctgcgacagagcagacagcagacaatcgcatgacatcgccggtgtgcgcaaagcatgccgccgtgataccagatttcgatcaggcacgtcgtggttcgtgtctgatctgcatcagagcctaacccttcggtccggtggagcccattcattgcacatggtcgcagcaggttcgtggtcgtaaaattttctcaggtcctggtcctggttcttggtaattgatggccgaagtacaaggcctcgacgacgccggtcagtggtctcctgaggtagacgtttctcccctctccctcccctcctccagtacatttcaacagctaggttggaggcgttg

SEQ ID NO: 26577 - DNA, 2648 bp, Zea Mays
ctttgtcttgtttctaaaaaactgtttcgaagcgttgtagtttatttgtttataaaacagtttattcgtttggaaggtatctgcttgcgaattgcgatagcgagactcatgcaggcacacaagggggagttcccgagtccacggctgcacacgtcgtcgcctcctctccactcgcacactcgcaccctgcgtccgcctgccgcctaccccaggcggccccctcccatcgccatgcctccgtccgccgccgccaccgccgccgccttcctcttcccggccgtcgcgatcccctgccgcgtgttccctcaacggcgggcgaggagcctcgccgtccgtgccgtcgcctcccctccagccttcgcggtcaagcccgccccgctgccctccaaggtagcggaataagcccagattcgttgcgcttggttggaatgcgaactgcttcgatgtgctttgagatcccatattgcagggcacatggggttgcgattccgaacttcttatggttaattaattagtaacataatggctatttccgttatcttcgagtctatactatacactagccctattctcattcgctgaaatatgggggtgggtggtgcaggtcctgaagaaattgccatgtccacaaaatgaaaatgcaataactctttagctcttatcttgtagggaatacattatacgctttaatgttagttttaggtttgaaacgctaccggcaggcaacatgcatcatacatggttaaccttagtcggggtttgtgattgtaatatatcttctcttcttcacattttgggaaatcattggaaagagggtgagtgttgaaatatgaagtgtacaaatataaagtgaactgccaccttccccatcagcttattggtttgaattaatcatgtatgtaacttaatagtaataataaatgattgttaaccagatatttctttgattccttagaagaactgagcacttagggccaggggagctcagccaaatgatattttacagagaagttatggtagagtatgatcctatgtaatgaactgagcggttgggagctgagaaaactaggggcatatttggatgtgcagtaagctttgcttgcctggcctcgctgctagtcaaggctaaccttgcccattgtggcaagccaattcggctctctcgctccagcaagaaaaactagcttgtacaagtatggaggcaacacgacaagactggaaagtgggagtggaaattcgagaacaagccggtaaacatatactatgaggaacatgagcaggaggttgctgagaatatgaagaacattctcatgatccctacgatctctgatgtgagcactgtggaggagtggagggtggttgccaaagatattgttgggcggaaaggagaacttggctaccgtgttacaattgtcgattggcctggtcttggttattcagataggccatcactgaactacaatgctgatgtgatggagagctttctggttgaactaatgaattcaccaaacagtccagtcgcaaatgcagatgatgaactgatcattgttggaggtggtcatgcagcaaccatagctgttcgtgcagctggtaaagaccttataaaaccatctgctgttgctgctgttgcacctacttgggctggaccccttcccatcgtatttggccgcggttctgatatggaaactaggtatgggcttctacgaggaaccctcagggctccagccctgggctggatgatgtacaatgttctggtgagcaatgaaaagtcgatccagtctcagtacaagtcccacgtctacgccaaccctgacaacgtgacgccagctatcatcgagagccgatacgagttaaccaaaagaaaaggcgcacggttcgtccccgcggccttcctgacaggcctccttgatcctgtccaatcgagggaggagtttctgcagttgttcgccaagttagacggagacgtaccagttctggtagtgtcaacggtcaatgctcccaagagatccaaggccgagatggaggctctaaggggctctaaaggggtgacgaagtttgtggaggtcgcaggcgctcttctaccgcaggaagaataccccttggcagtcgcggaggaactctacagcttcctgcaggaatcattcgcagcaagaaggtgaatgtgcgtgcgtgcgtgcgcacaactgtgccagaagacaggttctcaagtcccacacatcgtgagtaaattcgttagcctgctacagtgtactggaggtttttagcaacaataaagcggcatcactcgttcacttccctagtgccacgattcaatagcctgcgacagagcagacagcagacaatcgcatgacatcgccggtgtgcgcaaagcatgccgccgtgataccagatttcgatcaggcacgtcgtggttcgtgtctgatctgcatcagagcctaacccttcggtccggtggagcccattcattgcacatggtcgcagcaggttcgtggtcgtaaaattttctcaggtcctggtcctggttcttggtaattgatggccgaagtacaaggcctcgacgacgccggtcagtggtctcctgaggtagacgtttctcccctctccctcccctcctccagtacatttcaacagctaggttggaggcgttg

SEQ ID NO: 26578 - DNA, 1711 bp, Zea Mays
ctttgtcttgtttctaaaaaactgtttcgaagcgttgtagtttatttgtttataaaacagtttattcgtttggaaggtatctgcttgcgaattgcgatagcgagactcatgcaggcacacaagggggagttcccgagtccacggctgcacacgtcgtcgcctcctctccactcgcacactcgcaccctgcgtccgcctgccgcctaccccaggcggccccctcccatcgccatgcctccgtccgccgccgccaccgccgccgccttcctcttcccggccgtcgcgatcccctgccgcgtgttccctcaacggcgggcgaggagcctcgccgtccgtgccgtcgcctcccctccagccttcgcggtcaagcccgccccgctgccctccaaggtagcggaataagcccagattcgttgcgcttggttggaatgcgaactgcttcgatgtgctttgagatcccatattgcagggcacatggggttgcgattccgaacttcttatggttaattaattagtaacataatggctatttccgttatcttcgagtctatactatacactagccctattctcattcgctgaaatatgggggtgggtggtgcaggtcctgaagaaattgccatgtccacaaaatgaaaatgcaataactctttagctcttatcttgtagggaatacattatacgctttaatgttagttttaggtttgaaacgctaccggcaggcaacatgcatcatacatggttaaccttagtcggggtttgtgattgtaatatatcttctcttcttcacattttgggaaatcattggaaagagggtgagtgttgaaatatgaagtgtacaaatataaagtgaactgccaccttccccatcagcttattggtttgaattaatcatgtatgtaacttaatagtaataataaatgattgttaaccagatatttctttgattccttagaagaactgagcacttagggccaggggagctcagccaaatgatattttacagagaagttatggtagagtatgatcctatgtaatgaactgagcggttgggagctgagaaaactaggggcatatttggatgtgcagtaagctttgcttgcctggcctcgctgctagtcaaggctaaccttgcccattgtggcaagccaattcggctctctcgctccagcaagaaaaactagcttgtacaagtatggaggcaacacgacaagactggaaagtgggagtggaaattcgagaacaagccggtaaacatatactatgaggaacatgagcaggaggttgctgagaatatgaagaacattctcatgatccctacgatctctgatgtgagcactgtggaggagtggagggtggttgccaaagatattgttgggcggaaaggagaacttggctaccgtgttacaattgtcgattggcctggtcttggttattcagataggccatcactgaactacaatgctgatgtgatggagagctttctggttgaactaatgaattcaccaaacagtccagtcgcaaatgcagatgatgaactgatcattgttggaggtggtcatgcagcaaccatagctgttcgtgcagctggtaaagaccttataaaaccatctgctgttgctgctgttgcacctacttgggctggaccccttcccatcgtatttggccgcggttctgatatggaaactagacagtggcattagcatgttcc

SEQ ID NO: 26579 - DNA, 1779 bp, Zea Mays
cgagctcgtcgccgcctgttgcgttcgcccctccttttaccttctcccattcacgccccgtctctttcgtggccttccttttccggcggccacaagtgggcgagcggcggcgcccttcaccaggtcttcgtcgggcccttcaccggcgacgagcatccaccaggagggaattgcgaagttgttttgtgatgatatatataatatattgggcagaaacgtggagctcagagcattggtgcctctttcctctttcaccaaggattccggtgccttatttcacaagacaaaaaaagtctcaagggtcttgattcttgtatgaactcaagatttatggtggatcttggagctgtgggatgctaagcctggtctagctactagattatgaactctctgctgatctaatagcatttctacaagaattcttttgctggaaggtttattagttatttgcaacaatgaaggaacatctaatgcttaatattgatgacctaagcattcttgagcctaacgaggtcattgggacagtcaagaataaatcatctggggaaaccattgcacatccaccctccatggctcatgccattttagcagtgggagaaagcatggtttctgaagcggaacctcttctgcaagtggtggagtgtcgcatttgtcaggaggaagatagtatcaaaaatttagagagtccatgtgcttgcactggcagtctaaagtatgctcataggacttgtgtacaacgatggtgcaatgagaaaggagatgtaacatgtgaaatatgtcatgagccttatgaacatgggtacactgcacctcccagaggccatcctgatgaaactaccattgatataagtggtgggtggacaattaccggtaccgcatttgacttgcgtgatcctaggatacttgcagtggcacaaaaccacatcatggaagctgaatatgatgattattctgccacaaatgcgagcactgctgccttctgccgctctgctgctcttgttttaatggctctcttattgttgagacacgcactgactctaactgatgaagatgacgacgacacttcagcgatgttttcactttttctgttgcgtgctgctggtttcctgcttccgttctacatcatggcttgggcaatcagtatcttgcagcgccgcagacagagacagctgctctagctgcagcggaggtggcattcatcctgcagtcaggccaaggaaggggagtgcatttcaccatcgcaccggactccccggccacaccacagcatgaaccaccacaaccataattacatctatctaggagtggctgtggccgccgccgatcgattatttccatgggttacccaaggatttatggctgtctagtgcagaagcagataatttctgcccaagtttcctgtcattaatgtacttgcgtgttcgtgcgagttggctagtgcattttgcatgtcgtcccgggactaacgggatgtgtatataatatattttgtaacagagacatctgggttctatgatctccacaatgtcaaaaattgaactatcgcctgaattgtcagtcatcaacaacaaaaccttttagtccggaatatattagagttgaattctactcccgaaaggctagcatcgaaagtggaataggttagagttgaaagctactcaaaagggtagcattgaaactcaatagaaaccaaatcaggtttagacacatgattgttttttcatgccctccaagtcagctttaagcacatatatagctgtgatgtatgctctcttattc

SEQ ID NO: 26580 - DNA, 1717 bp, Zea Mays
cgagctcgtcgccgcctgttgcgttcgcccctccttttaccttctcccattcacgccccgtctctttcgtggccttccttttccggcggccacaagtgggcgagcggcggcgcccttcaccaggtcttcgtcgggcccttcaccggcgacgagcatccaccaggagggaattgcgaagttgttttgtgatgatatatataatatattgggcagaaacgtggagctcagagcattggtgcctctttcctctttcaccaaggattccggtgccttatttcacaagacaaaaaaagtctcaagggtcttgattcttgtatgaactcaagatttatggtggatcttggagctgtgggatgctaagcctggtctagctactagattatgaactctctgctgatctaatagcatttctacaagaattcttttgctggaaggtttattagttatttgcaacaatgaaggaacatctaatgcttaatattgatgacctaagcattcttgagcctaacgaggtcattgggacagtcaagaataaatcatctggggaaaccattgcacatccaccctccatggctcatgccattttagcagtgggagaaagcatggtttctgaagcggaacctcttctgcaagtggtggagtgtcgcatttgtcaggaggaagatagtatcaaaaatttagagagtccatgtgcttgcactggcagtctaaagtatgctcataggacttgtgtacaacgatggtgcaatgagaaaggagatgtaacatgtgaaatatgtcatgagccttatgaacatgggtacactgcacctcccagaggccatcctgatgaaactaccattgatataagtggtgggtggacaattaccggtaccgcatttgacttgcgtgatcctaggatacttgcagtggcacaaaaccacatcatggaagctgaatatgatgattattctgccacaaatgcgagcactgctgccttctgccgctctgctgctcttgttttaatggctctcttattgttgagacacgcactgactctaactgatgaagatgacgacgacacttcagcgatgttttcatatcttgcagcgccgcagacagagacagctgctctagctgcagcggaggtggcattcatcctgcagtcaggccaaggaaggggagtgcatttcaccatcgcaccggactccccggccacaccacagcatgaaccaccacaaccataattacatctatctaggagtggctgtggccgccgccgatcgattatttccatgggttacccaaggatttatggctgtctagtgcagaagcagataatttctgcccaagtttcctgtcattaatgtacttgcgtgttcgtgcgagttggctagtgcattttgcatgtcgtcccgggactaacgggatgtgtatataatatattttgtaacagagacatctgggttctatgatctccacaatgtcaaaaattgaactatcgcctgaattgtcagtcatcaacaacaaaaccttttagtccggaatatattagagttgaattctactcccgaaaggctagcatcgaaagtggaataggttagagttgaaagctactcaaaagggtagcattgaaactcaatagaaaccaaatcaggtttagacacatgattgttttttcatgccctccaagtcagctttaagcacatatatagctgtgatgtatgctctcttattc

SEQ ID NO: 26581 - DNA, 1349 bp, Zea Mays
cgagctcgtcgccgcctgttgcgttcgcccctccttttaccttctcccattcacgccccgtctctttcgtggccttccttttccggcggccacaagtgggcgagcggcggcgcccttcaccaggtcttcgtcgggcccttcaccggcgacgagcatccaccaggagggaattgcgaagttgttttgtgatgatatatataatatattgggcagaaacgtggagctcagagcattggtgcctctttcctctttcaccaaggattccggtgccttatttcacaagtatgctcataggacttgtgtacaacgatggtgcaatgagaaaggagatgtaacatgtgaaatatgtcatgagccttatgaacatgggtacactgcacctcccagaggccatcctgatgaaactaccattgatataagtggtgggtggacaattaccggtaccgcatttgacttgcgtgatcctaggatacttgcagtggcacaaaaccacatcatggaagctgaatatgatgattattctgccacaaatgcgagcactgctgccttctgccgctctgctgctcttgttttaatggctctcttattgttgagacacgcactgactctaactgatgaagatgacgacgacacttcagcgatgttttcactttttctgttgcgtgctgctggtttcctgcttccgttctacatcatggcttgggcaatcagtatcttgcagcgccgcagacagagacagctgctctagctgcagcggaggtggcattcatcctgcagtcaggccaaggaaggggagtgcatttcaccatcgcaccggactccccggccacaccacagcatgaaccaccacaaccataattacatctatctaggagtggctgtggccgccgccgatcgattatttccatgggttacccaaggatttatggctgtctagtgcagaagcagataatttctgcccaagtttcctgtcattaatgtacttgcgtgttcgtgcgagttggctagtgcattttgcatgtcgtcccgggactaacgggatgtgtatataatatattttgtaacagagacatctgggttctatgatctccacaatgtcaaaaattgaactatcgcctgaattgtcagtcatcaacaacaaaaccttttagtccggaatatattagagttgaattctactcccgaaaggctagcatcgaaagtggaataggttagagttgaaagctactcaaaagggtagcattgaaactcaatagaaaccaaatcaggtttagacacatgattgttttttcatgccctccaagtcagctttaagcacatatatagctgtgatgtatgctctcttattc

SEQ ID NO: 26582 - DNA, 1688 bp, Zea Mays
cgagctcgtcgccgcctgttgcgttcgcccctccttttaccttctcccattcacgccccgtctctttcgtggccttccttttccggcggccacaagtgggcgagcggcggcgcccttcaccaggtcttcgtcgggcccttcaccggcgacgagcatccaccagaaacgtggagctcagagcattggtgcctctttcctctttcaccaaggattccggtgccttatttcacaagacaaaaaaagtctcaagggtcttgattcttgtatgaactcaagatttatggtggatcttggagctgtgggatgctaagcctggtctagctactagattatgaactctctgctgatctaatagcatttctacaagaattcttttgctggaaggtttattagttatttgcaacaatgaaggaacatctaatgcttaatattgatgacctaagcattcttgagcctaacgaggtcattgggacagtcaagaataaatcatctggggaaaccattgcacatccaccctccatggctcatgccattttagcagtgggagaaagcatggtttctgaagcggaacctcttctgcaagtggtggagtgtcgcatttgtcaggaggaagatagtatcaaaaatttagagagtccatgtgcttgcactggcagtctaaagtatgctcataggacttgtgtacaacgatggtgcaatgagaaaggagatgtaacatgtgaaatatgtcatgagccttatgaacatgggtacactgcacctcccagaggccatcctgatgaaactaccattgatataaggatacttgcagtggcacaaaaccacatcatggaagctgaatatgatgattattctgccacaaatgcgagcactgctgccttctgccgctctgctgctcttgttttaatggctctcttattgttgagacacgcactgactctaactgatgaagatgacgacgacacttcagcgatgttttcactttttctgttgcgtgctgctggtttcctgcttccgttctacatcatggcttgggcaatcagtatcttgcagcgccgcagacagagacaggaggcagctgctctagctgcagcggaggtggcattcatcctgcagtcaggccaaggaaggggagtgcatttcaccatcgcaccggactccccggccacaccacagcatgaaccaccacaaccataattacatctatctaggagtggctgtggccgccgccgatcgattatttccatgggttacccaaggatttatggctgtctagtgcagaagcagataatttctgcccaagtttcctgtcattaatgtacttgcgtgttcgtgcgagttggctagtgcattttgcatgtcgtcccgggactaacgggatgtgtatataatatattttgtaacagagacatctgggttctatgatctccacaatgtcaaaaattgaactatcgcctgaattgtcagtcatcaacaacaaaaccttttagtccggaatatattagagttgaattctactcccgaaaggctagcatcgaaagtggaataggttagagttgaaagctactcaaaagggtagcattgaaactcaatagaaaccaaatcaggtttagacacatgattgttttttcatgccctccaagtcagctttaagcacatatatagctgtgatgtatgctctcttattc

SEQ ID NO: 26583 - DNA, 2127 bp, Zea Mays
ctcaagcctagtttattttcaccaatgctcttgtttgtttataacaggcttctttcttgatatgtggcctctgaccttgcaacagatgttgtggtgcatgttcgtgaagtaaagttttacttacacaagtttcccctcatttccaagagcagcaggcttcaaaggttagttcttaaggccaccgaggagacgaccgatgaggtccgcatagatgaccttccagggggagcaaaatcgtttgaaatatgtgccaagttctgctacgggatggtggtcaccctcagtccacacaacgttgtagcagcaagatgcgcagcggagtatcttgaaatgaccgaggagatggagaaggggaatctgatatttaaaatcgaggtcttcatgaactctagcatacttcgcagctggaaggattctatcatcgtcctccagagaacgaaggccctgtcgccgtggtctgaggagctgaaggttgtgggcagatgcatcgatgccatcgcttccaagacatctgtggatcctgccaatgtgacctggtcatacagccataataacagcaagaagggaggagcttgtgctgaaatagtcgagtcggcaggaaaaccatcgatagctcccaaagattggtgggttgaggacttgtgtgaattggatgttgacctgtataggagagtcatggttgctatcaaatccaaggggagaatgtcacctgaactgataggagaggcacttaaggcatatgcggttagatggctgccagactcctacgatgcactggttgccgagggtcacatgaggaggaaccaatgtctggtcgagacactaatatggttgttgccttctgataagagctcaggctgttcttgcaggtttctcttgaaactgctgaaggtggctatactagtgggaggcggggagcacgtgaaggaagaactcatcagaaggatcagcttccagttgcacaaagctactgtgaaggatctcttgctacctgctacctcgccgcctaatgatggtacatatgatgttcggttggtgcatgatcttgtgcagagatttgttgcgagaaccgcgctgtctcataatggcggtttcattgagaagtctgatgagaagatgatcgagctcaactttgagcaagaatcaaccttggcggtgggagagcttgttgatggctacctgtctgaagtagcttcagatcaagccccttcactgcctatgtttgttgaactagcgacagccgtgcccgaagcggctaggccagttcatgacaccctttactatgcagttgatgcatatctcaagcaacacccggacataaataaatccgagaagaagaagatctgcagtctggtggatgtgaagaagctcagcacggacgcgtccatgcacgccacgcaaaacgaccgcctgcctctccggttggtggttcaggtcctcttcttccagcagctgagggccggctcgggcaaagaactcgccctggttgacaacggagaacacgcttgcacacggcctacgcaggatcagtgcgaaccctgcgaaaggcggataccgaagcatccagagtcactagataagcaggtgacgagcctgagcgcgagggagagccgccagcaccaccggaccagcgacagcgagcacaggggcggcggcaggaacagcttcaaagaccagctcgggggcctcctgccgcagtcgcggtccaggaggatcttcgacaagctgtggagcagcaaggggcaaggcgagcatggcggcaaaggctcggagacgtctggcagctcccagagcccaccgttgtcagcaaagcctgcagaagtgaagccctcccctcttcccgctgttaggaacaggaggtactctgtttcatagttttttttggctctcctagtttagagctctgggttaggttgctgtacagaaggaagctaatcactgctgcccatcctttttgtaagcagatcaacctgctgttctcaatgtgatcatccatgctgtagcttttactctagtgtaattccaactgggagcagagattcgccagggcctgcgttcttgaaaatgttattttttgaagtgaagttgtttttgtggcaaagataaaagaaataacatggtcaacac

SEQ ID NO: 26584 - DNA, 2460 bp, Zea Mays
agcaagcaacgagaagggcggctttggcaggccgaggaggccagagaagagcagcagcagagagagagagagagagagagagagacgagttgggtgcagtgcagagaccagggcggctttgggttcaataatatcccatcactcacacgccacggcatcattggccgcgctccctccttcctcctcctgctctgctcgtctcctccgacagcagcagcagcaccacaccagcgcggagctgcaaagctcctcacggctgctttctcgtggcgcggtgcatgggagcgcggctctgagaggaaaagaagaggagaaaggcgcgcagggaggatgaagttcatgaagctgggctccaagcccgatgctttccagtccgacggcgccgacgtccgatatgtggcctctgaccttgcaacagatgttgtggtgcatgttcgtgaagtaaagttttacttacacaagtttcccctcatttccaagagcagcaggcttcaaaggttagttcttaaggccaccgaggagacgaccgatgaggtccgcatagatgaccttccagggggagcaaaatcgtttgaaatatgtgccaagttctgctacgggatggtggtcaccctcagtccacacaacgttgtagcagcaagatgcgcagcggagtatcttgaaatgaccgaggagatggagaaggggaatctgatatttaaaatcgaggtcttcatgaactctagcatacttcgcagctggaaggattctatcatcgtcctccagagaacgaaggccctgtcgccgtggtctgaggagctgaaggttgtgggcagatgcatcgatgccatcgcttccaagacatctgtggatcctgccaatgtgacctggtcatacagccataataacagcaagaagggaggagcttgtgctgaaatagtcgagtcggcaggaaaaccatcgatagctcccaaagattggtgggttgaggacttgtgtgaattggatgttgacctgtataggagagtcatggttgctatcaaatccaaggggagaatgtcacctgaactgataggagaggcacttaaggcatatgcggttagatggctgccagactcctacgatgcactggttgccgagggtcacatgaggaggaaccaatgtctggtcgagacactaatatggttgttgccttctgataagagctcaggctgttcttgcaggtttctcttgaaactgctgaaggtggctatactagtgggaggcggggagcacgtgaaggaagaactcatcagaaggatcagcttccagttgcacaaagctactgtgaaggatctcttgctacctgctacctcgccgcctaatgatggtacatatgatgttcggttggtgcatgatcttgtgcagagatttgttgcgagaaccgcgctgtctcataatggcggtttcattgagaagtctgatgagaagatgatcgagctcaactttgagcaagaatcaaccttggcggtgggagagcttgttgatggctacctgtctgaagtagcttcagatcaagccccttcactgcctatgtttgttgaactagcgacagccgtgcccgaagcggctaggccagttcatgacaccctttactatgcagttgatgcatatctcaagcaacacccggacataaataaatccgagaagaagaagatctgcagtctggtggatgtgaagaagctcagcacggacgcgtccatgcacgccacgcaaaacgaccgcctgcctctccggttggtggttcaggtcctcttcttccagcagctgagggccggctcgggcaaagaactcgccctggttgacaacggagaacacgcttgcacacggcctacgcaggatcagtgcgaaccctgcgaaaggcggataccgaagcatccagagtcactagataagcaggtgacgagcctgagcgcgagggagagccgccagcaccaccggaccagcgacagcgagcacaggggcggcggcaggaacagcttcaaagaccagctcgggggcctcctgccgcagtcgcggtccaggaggatcttcgacaagctgtggagcagcaaggggcaaggcgagcatggcggcaaaggctcggagacgtctggcagctcccagagcccaccgttgtcagcaaagcctgcagaagtgaagccctcccctcttcccgctgttaggaacaggaggtactctgtttcatagttttttttggctctcctagtttagagctctgggttaggttgctgtacagaaggaagctaatcactgctgcccatcctttttgtaagcagatcaacctgctgttctcaatgtgatcatccatgctgtagcttttactctagtgtaattccaactgggagcagagattcgccagggcctgcgttcttgaaaatgttattttttgaagtgaagttgtttttgtggcaaagataaaagaaataacatggtcaacac

SEQ ID NO: 26585 - DNA, 2468 bp, Zea Mays
agcaagcaacgagaagggcggctttggcaggccgaggaggccagagaagagcagcagcagagagagagagagagagagagagagacgagttgggtgcagtgcagagaccagggcggctttgggttcaataatatcccatcactcacacgccacggcatcattggccgcgctccctccttcctcctcctgctctgctcgtctcctccgagtgagtcccaacagcagcagcaccacaccagcgcggagctgcaaagctcctcacggctgctttctcgtggcgcggtgcatgggagcgcggctctgagaggaaaagaagaggagaaaggcgcgcagggaggatgaagttcatgaagctgggctccaagcccgatgctttccagtccgacggcgccgacgtccgatatgtggcctctgaccttgcaacagatgttgtggtgcatgttcgtgaagtaaagttttacttacacaagtttcccctcatttccaagagcagcaggcttcaaaggttagttcttaaggccaccgaggagacgaccgatgaggtccgcatagatgaccttccagggggagcaaaatcgtttgaaatatgtgccaagttctgctacgggatggtggtcaccctcagtccacacaacgttgtagcagcaagatgcgcagcggagtatcttgaaatgaccgaggagatggagaaggggaatctgatatttaaaatcgaggtcttcatgaactctagcatacttcgcagctggaaggattctatcatcgtcctccagagaacgaaggccctgtcgccgtggtctgaggagctgaaggttgtgggcagatgcatcgatgccatcgcttccaagacatctgtggatcctgccaatgtgacctggtcatacagccataataacagcaagaagggaggagcttgtgctgaaatagtcgagtcggcaggaaaaccatcgatagctcccaaagattggtgggttgaggacttgtgtgaattggatgttgacctgtataggagagtcatggttgctatcaaatccaaggggagaatgtcacctgaactgataggagaggcacttaaggcatatgcggttagatggctgccagactcctacgatgcactggttgccgagggtcacatgaggaggaaccaatgtctggtcgagacactaatatggttgttgccttctgataagagctcaggctgttcttgcaggtttctcttgaaactgctgaaggtggctatactagtgggaggcggggagcacgtgaaggaagaactcatcagaaggatcagcttccagttgcacaaagctactgtgaaggatctcttgctacctgctacctcgccgcctaatgatggtacatatgatgttcggttggtgcatgatcttgtgcagagatttgttgcgagaaccgcgctgtctcataatggcggtttcattgagaagtctgatgagaagatgatcgagctcaactttgagcaagaatcaaccttggcggtgggagagcttgttgatggctacctgtctgaagtagcttcagatcaagccccttcactgcctatgtttgttgaactagcgacagccgtgcccgaagcggctaggccagttcatgacaccctttactatgcagttgatgcatatctcaagcaacacccggacataaataaatccgagaagaagaagatctgcagtctggtggatgtgaagaagctcagcacggacgcgtccatgcacgccacgcaaaacgaccgcctgcctctccggttggtggttcaggtcctcttcttccagcagctgagggccggctcgggcaaagaactcgccctggttgacaacggagaacacgcttgcacacggcctacgcaggatcagtgcgaaccctgcgaaaggcggataccgaagcatccagagtcactagataagcaggtgacgagcctgagcgcgagggagagccgccagcaccaccggaccagcgacagcgagcacaggggcggcggcaggaacagcttcaaagaccagctcgggggcctcctgccgcagtcgcggtccaggaggatcttcgacaagctgtggagcagcaaggggcaaggcgagcatggcggcaaaggctcggagacgtctggcagctcccagagcccaccgttgtcagcaaagcctgcagaagtgaagccctcccctcttcccgctgttaggaacaggaggtactctgtttcatagttttttttggctctcctagtttagagctctgggttaggttgctgtacagaaggaagctaatcactgctgcccatcctttttgtaagcagatcaacctgctgttctcaatgtgatcatccatgctgtagcttttactctagtgtaattccaactgggagcagagattcgccagggcctgcgttcttgaaaatgttattttttgaagtgaagttgtttttgtggcaaagataaaagaaataacatggtcaacac

SEQ ID NO: 26586 - DNA, 750 bp, Zea Mays
attttttccaacatgatgatggatggaagcatgcaaggggatgtagataactataccaacacaagtgttgcacagtattcacaagcaaaacctgttgggacaccagctcttattgcaaggccaaaccataagacatccaaaaaagttgtgaaggcatgtgccttatataaatctgaagatgaacaacataaggcatttcaattcatgcattgttggaaaaagttgaggacacaaccaaaatggcttgctaaatttgacaaattggttgctgctaaaacttagaacaagagacagaagactagtcctgatggtgatgctactgcaagggtaccaagtgaaacatgagcaggtgaggtccaaggcgtagaggatattcagttgacaaggcctagtggaaagaaaaaaaagctaaagcaacaccgttacaagagaagaagaaaagtgtgacaacaacattggaaaatatgtgggcacaaaagagagaaactgatgttgagaaagagctaaaaaagaggagtggttcaataaagcctttgcacttgaacaggagtgagttaacaatgaaaaagaacttgtggaggtgaggaaagaggaggttcaattgcagaaacaaagagatgaagagtggattatgactatatgtcctccatgtgtaactaatatacttgtgcatatgtatcatgtttttgtgtatgcatcatttgcaggctctagtacctagggagaacacgaacctgttatgggaaggag

SEQ ID NO: 26587 - DNA, 1473 bp, Zea Mays
aagaagtcttctctaccgcgtccaacaactcccgtatttctcccaatcttttggcgattacacaaaccgagctcatcctcccgcaaatatccaggagggatcgaaggagctatggagcggtgccgtgaggggcgtctgcggcgctggtgtgagggtttgattcggaggcagcagtggatcggcttaggagacaatgtggcctagctcgacaagaacaagtccgtcgcattggcgaccagttcctttgtcgggtccaatcgcccgacggcgatagaaggtttgaaagatccgatggtgaagacctaggctttaccggcgttgaagaaattgcaggtgagatgcaaggtcatgtttcgttgcaaaaaatcctggttttacgccgccgtaccggggcaacggcgcctcctcagcaagatttcaacacatagacatgggcaacacatttatcaatgggaatggattttttccaacatgatgatggatggaagcatgcaaggggatgtagataactataccaacacaagtgttgcacagtattcacaagcaaaacctgttgggacaccagctcttattgcaaggccaaaccataagacatccaaaaaagttagtgatcagaaagatgaagtactggtttccgcatggttgaatgtaagtttggatcctgtggtagggaaatataaaaaaggtggcaggtattggtctcatatttatgagtacttcaatgaacacaagccatgccaatcacagtgtaccattaattctttaatgcaccgatgggagaccattcagaaatgcaagaataatttttgtggttgtcttgcacggattgagctacgacattagagtggcaccacaatgccggataaggttgtgaaggcatgtgccttatataaatctgaagatgaacaacataaggcatttcaattcatgcattgttggaaaaagttgaggacacaaccaaaatggcttgctaaatttgacaaattggttgctgctaaaacttagaacaagagacagaagactagtcctgatggtgatgctactgcaagggtaccaagtgaaacatgagcaggtgaggtccaaggcgtagaggatattcagttgacaaggcctagtggaaagaaaaaaaagctaaagcaacaccgttacaagagaagaagaaaagtgtgacaacaacattggaaaatatgtgggcacaaaagagagaaactgatgttgagaaagagctaaaaaagaggagtggttcaataaagcctttgcacttgaacaggagtgagttaacaatgaaaaagaacttgtggaggtgaggaaagaggaggttcaattgcagaaacaaagagatgaagagtggattatgactatatgtcctccatgtgtaactaatatacttgtgcatatgtatcatgtttttgtgtatgcatcatttgcaggctctagtacctagggagaacacgaacctgttatgggaaggag

SEQ ID NO: 26588 - DNA, 4618 bp, Zea Mays
ataaattgttcacaatcctctccctatgagcaaatacaagtgttgagaaggagaagtagaagactgatccaatttgactggctggcggtcctctgaattcctgattcgttctgtgctcgataaaccaaactataaaacctgtgaagacaacgaaggatccagttccaaaccatagatcagctgttaaaggttctaggaatgtccatgcagtcttctgtctctggtcccgaactggaaccagcatgcgtacccctgactcagtataaggaagagtgtagtccacatatagagaacggttggccaaaattgttatgtcacctactaccgcatcaaattcctgccagcaattaacataaaactggttgatagactttggaaaaatataaaccattttgcacaaaataaactgcaaatcatttggggacaacaagatgttgccagttgcaactgatgtcgctcatattaaacaggaaagccagctaaatactacaagttctacttgctatttaaataaaacgcttaatagtattagcgacggttcattgatgtcattcgacaacaatgattacgtgctggatctgacccttttgcaatggtttacatccgtaagctaccttaggcattaacattgttaacaatatgtagacaaatcacatcctgtcagttctgtacactcataagagcaacaaggagtcaaggataataaattgccaagttcagatcacttttaaccatgtaataaatgctgaacacctctggttttactgtaagaaggaacaaaatgcaagaaaaataggttcatgcataccttaagataaactttgtacacgagttcatcataagtcccattactttctccttctccatttccaaactccacatagtgcttgggaactttgtaagtcagattactgataacttcctcaaatacatcaatgcagaaccccttcgggataccatcttcagatcttataaaactgccaaacccaggtttcacaggtactcctactttgagttctttatttgctggcaaaagccatcctctaggtgtgttttcactgcctcctggccatatgatagtactgataccatctttcttttctagaattttggacatgttcaatcctggagtccaaacaccgactgctctcttctcccgaccagctatattgataattttgtaagttgttgatactaactggaactgcatatcctgaatgacaaattgcccactaatgcctgtgaaattaaccttcaagaatgcaccacgaaatttttcagcagccttataagcacttattttgtcgaaatcagtggacccgttgtttgtttcggacagcacaaagtctgaattaacaaatccggcctgctctgctgctaatgctattgcccatactgtatcatatgcatatagaccagacgttataggctcattaattgatgtaccaggattttccgacctatatttctcacgccatctccgtctaaatttgtttagtttcacagtttctggaacataaggctcgatcccaactacaccttccatcacttcaagtgcaggataaccaactacattgaagatatctgtcagaccatatgccgtaatccagacatagccctggcccatcattccctcatccttagcaagctggaaaaacttaagggctaactgatatgacatgcgcacaacaaagacacttgtccaattttcttttaggcctgatatagcacgctttatctcatcctctccagctgaaggatggatcttgcacctgtacggaacacgagtatcaacatgtcccagggcatcaacgaggtcagggatgaaccttgcgttggaatcatcgtcctcgatgatagggatgacctccctccaattgtagttctggacaagtgaagcaatagcttcagcttggcaggagtcgttccatgccgtcctgatgaaatatggggtctggctgggtgaacgggatgggctgtttgcagaaaaggaaatgattggaactgatgccttgttcccaagctctgcaagaaatttagcttgagtagatgtctgtggcccgacgattgcttgcacatggacatttttcagtagatcaacacctgcagtgtttcccaaagacgcgcaacatatgtcagctagtaaccattcatgaaactgaaaaagttcggtgctattcattcatcctaccgggacatgcaaaatcagtttgaaaccttcgagcattcttagactaggatgcgaaagggaaacttcagaagggaaaaaaaaggtgtccttaaagtacgaatctatgtgtttatccaaaaagaaagcaaggatgagcaacgttatagaatgcatgtagtgggcttgggcatcgtaagttcgtaactctcacggggagaaccatgggaaaccccaaatttgtgtaatcctacaaacccaaatgtggccgcggagtagaaggataccttcttaaaatgccgagaaaaagcaaacgacgagggcgacaggagcggatcggtagagcccccggcggcgcgggacgggagacagagaaccctccgccgccggaagcgtcgccacccgaaaagtgccggtgcgggagcgggatgttggcatgttcctacgggctcgaattccgtgtgcagccgctttgggctgagtcaggctatctccatcaacgtcctctaaattttatcctctaaataaatattctttatactttacagtactctctaaatgattctgtactctatattttctccatctccaacaacatcccctaaattcgatcatctatatcttaatactctctaatgtaccaacttaattaatataatttatcgttcggggccagcttgtctgacaatgttgcgtgtcttcaggaggaagacgagcgagcgctagtgggagtgtgggaccacctcgatgtggcaagaagagagaactagcatttagcggatagcagagagccgctacctttggggtgtgcaagtacgtcctctaaatttatcgaaaaattcagcactctttgttgaatgaagagaggaggtcgtcgtctgctaaatttagcggacagaaccatttagcggtccttgttggacacagcttagtgtcgggtttcgttaacggcgggccgtcagtcggacctgacacaccacaatgactattgggccttcctggcttgggtcgacccgaccacaaccgcgcgcgcggatgtgcggcctttctacgagcccagcatgcgagttttcgtaagctcaattctagtgttaaaagtatatttgttttgggacaaagactgtacaatatctgcagacggtgccaaaaaggaatcggtaagcatcgcgccctctctatcgagtattcctcgtcttcattcttctccggcctcgcgttctctgtcaccggccagtagctcgatgaggcttgttcttgtccggcgaggccgcgagctgggcccccacgccggtggccgatgtctcatccttctatgagcattgggtggtggagccagctcgcactcactccccccacaccgatcgcggtgtctcgtcctcgaccactctatatacgcggcttgtcttatttaaaaatcttcataattattactaattttactgcgatgtcagttattttcagattggtagctggacacgtgtcgccgagagaaggttacaaccgtctgtagaactgtgtataaaaattgcttgtctaatagtgctatcctaacatttagtttgttagggaattgctttgcgatatatacctttcacgatcgtcacgtcgggcgttcagagttcctaaccaccaacaatgacctcaactcaagatggctagctctcgcaagtcgtcgctccctgcccgcgcgcggcctaggcctaaccaccaacggggtacaagaaccgtatagtacagctagctgataatgtgagctcttcccatgaggccatgaagcccggacaagctgattcgattacatcgcagtgtggatttatttgcaagtcttagtgcggatgctgaaataaagcaggacatcgtacgtacctgcggacgcggcgtcgacggcgctgggcccggccggggcgtccctgaggtgcagcctgacccgggtgctgtagccggcgtcgtcgtcgtcggcgtagaagtcctggagggccagctccatgcacgcccagctgatgttccctagccatgtcgtgcggtccaagatcacacccacgtccacgtccacgcgccgcctctctccggcggcaccgggtgtaggggccgcctgctcggcgccgacgaggcagaggaggaggaggaggaggaggaggaggagagcgagaggacgagacgggagcgccgcggaaccagacgagcgcgcgccccccgctacgaccagcagctgacctgcagccgccgctcccgctatcatggggacagtcacctgaaggagaaaccgactagctagctagtagtttgccctgagtagcaggcacggacgcacggtgcggcggtgcctgcctatgtacactactacagggccagatgcagcaacatgccgcgccacgcctcgacgatctcagcttccgtttctcacaagctaagctagcacacggagactgagtgacgcgctcaacggtacgg

SEQ ID NO: 26589 - DNA, 1082 bp, Zea Mays
cttttagctccgaactccgattttgatgatcttggactttttggaaagcttataaaattgtctacatctcagagttgaagccatgtcagtttgaatagatttgatgttgtgaaacacttctaattcagtcatcccttcctctcaactttatcaacttcacttttgttttgtagctttgtatctcacttctacttcttgatgtgttggactcttagcatatataaagtgtcttcaatattactttgtaatgtcttctatgagtcttataatgtcttctttgaggtgttgcatcctcagagcctcaatccaatccacttcgcatcctgtgaactacaacacacaaacatttggaaaatacattagttcacatgttgtgttaatcatcaaacaccaaaatctattaagccaaatgacccggggtccattttccttacaatgacactataggattatataatctagcttatggagtcatatataactatataagcacataatgagttgcttatagattatcataatataatctaggtgcctaaattatatcatccacctaataagctgtgttgtttgtttgtctctcagcttatttaatctagattatataatttagaagataaacaaacatgaccttagtattatacagttttgcactgagtaaagcctggtgacacttgtgtatgaaaatggtatcttttctttggttaggcgtttgtatattgtatgcatcttatagtgaccatcaacaagacaacaaagctttgactcggtgacagtatttgatcaattgctcaagaggtgactaataaactggacagtctaattttatgttcaaataatgctcacttaaaaacgccatagtacaatggtacttaaggtcctgtttgtttaccctacagattaaataattctgcttaaataagttaaagaaataaataaacaacacaaattattaggtggattatataatttagatacctagattatgataatctgtaagcaggtcattaggtgtttatataattctataagctggattatataattctggagggaaacaaacaaggtcttagcaatggctt

SEQ ID NO: 26590 - DNA, 721 bp, Zea Mays
gattttgagcccaggatgtacgacctcaactggttcatggacaacttccgcccggacaccatcgccgtgcacatgctcaaggacaaccgccgatgggcggccacgttcacctacttcaacgtcaccgccgggatccacaccaacagcctgccgtgatcaaccagttatttcagttcgatttttttttccctgaggttgacgttggctgattgtgccaaggtggcgtgcgtaagccacattcttttcttgtatttattatattacatatcgttagtcttctgattggtcatcgtcaacgatcaacgtgccatactgacatgaaactttgctcggccccaccttgagtatttaagccacaatctgtgcttaaatacctcatacctgacagtactccaaactgcatagttctctgttaaactgtttttagcaatgttatttatatctatcatctatatctgtcctttacaattttctctaaaatatttcatcatctacatctattctctctctaacaatgttctcaaaatcacgtactctatacgcaaataactatattagagatattttttatttttaaatttttttcatacgtatttatcatactctaaaatgtattgtacatattttagttttgttaaaccggttgtttaaaatattaaaatggatagagaaccattttaaaaagttatatatatagaagatctagcagcgttctctaaat

SEQ ID NO: 26591 - DNA, 891 bp, Zea Mays
aagatatttgatgaacatcaagttgtgtttgaattagaagatgttcgtagtgagttagaaaaaactctatggggattttgaggtgcagcatagaaagagaaaagagtctcaaagcaaatataatgcttcctcatctttgagtattgaaagatcatgtaggttgccatcctcttcatgtcaatttcagtctttcttgtcatcaactcagtataacccatcaaagagcgagttgcttatctatttggaggagactaatgtcagtttatcggacaaagagcttgatttgctgaattggtggaaggttaattcacatagatttccagtggtgtcgagaatggcaaagaaattcctaactatatctgcgacatctgtatcttcggagtctacttttagcacgggaggtagaactctagatgattatcatagttctctaaggccttcaatggtagaggcattggtatatatgctcttctagctggatccgaggaacacatgatggaggcatgatatatgtgatatgctgatcttgtatatttcttaaagttgtattatttcacacgttaattgaactttgtattttatcaagaagaagatgacgaggacaatgttgagaacattctgtttccaaaaagcttggtggaaagcaactaaatttggaagaattggatggagacaagacaagctaagctaaggacgtcaagagaaaagatgcatcatttgaattatttttgtcattgaaactttgagatactgaatattttctgcttatcaatggattatgcattactcttgtagactttaagatactgctgctggtttaaatgtcttcttgtatgttttgaggagtagtgtatcttcttgtatgttttgagctgattttatggaatatat

SEQ ID NO: 26592 - DNA, 759 bp, Zea Mays
gttttttcatacaaacttgaaacctcggttttcgttgtagacttgatgattcccttgccatatatgtttgattaaatcatcatcttacatgctaatgttccatacttccatacagtggcgaatgcaggacggaaattcatggagccaagaagaataattgacagaatcaataagggcgagggcactgggaaagatgtgacaggtgatgtctctggctgagagccagggctcgttagttcgccaagctcaccgatgacgatgacaacgagcgaaacaagagcatcgagaaggggctgatgttgcgcattgatgaggggtggtggcatcgaggcggactggctcgagcgacgtcaggaagaatgggaccaggcgaattgatgttgtaagagtgattggatcaacaacactttatattgatctcaagtgtaatatttatacatatacaaacaatgtctaatgcatcatgcggtcattgcgcaagcgagcaccgcgagcaggtgacatggtcctcttagttagaagagtcatatgagcattgggcattgggtcgttgtagttgttaacagatgtgaggactagtccgaagagtaggacaatagttaggagaactagagcaatctaatgagaagacctataatgatattgttttagccgactcaaatatttatttttttctatacatgacattaaataaacatatttataaaaggttataagaatttgaggggcgcatggcctactttgcccccctccctctcg

SEQ ID NO: 26593 - DNA, 4699 bp, Zea Mays
ccatgtccaatagagttcgattcttcctctccactacaccattttgttgtggagtgtaaggagaagagaactcatgcttgatgccctcctcctcaaggaagccttcaatttgagagttcttgaactccgttccgttgttgcttctaattttcttgatccttaagccgaactcattttgagcccgtctcaagaatccctttaaggtctcttgggtatgggatttttcctgcaaaaagaacacccaagtgaagcaagaataatcatccactattacaagacaatacttactcctgccgatgcttatgtaagcaatcgggccgaatagatccatgtggagtagctcaagtggcctgtcggtcatcatgatgttcttgtgtggatgttgggacccaacttgctttcctgcttggcatgcgctacaaatcctgtctttctcaaaatgaacatttgttagtcctaaaatgtgctctccctttagaagcttatgaagattcttcatcccaacgtgggctagtcggcgatgccagagccaacccatgttagtcttagcaattaagcaagtgtcgagttcagctctatcaaagtctaccaagtatagctgaccctctaacactcccttaaatgctattgaatcatcacttcttctaaagacagtgacacctacatcagtaaatagacagttgtagcccatttgatataattgagatacggaaagcaaattgtaatctaaagaatctacaagaaaaacattggaaatggaatggtcaggagatatagctattttacccaaacctttgaccaaaccttggtttccatccccgaatgtgatagttcgttggggatcttggtttttctcgtaggaggagaacattttcttctccccagtcatgtggtttgtgcacccgctgtcgagtatccaacttgagcccccggatgcataaacctacaaaacaattttagttcttgactttaggtacccaaacggttttgggtcctttagcattagaaacaagaactttgggtacccaaacacaagtcttggaacccttgtgtttgcccccaacaaacttggcaactaccttgccggatttgttagtcaaaacataagatgcatcaaaagttttaaatgaaatgtcatgatcatttgatgcattaggagttttccttttaggcaacttggcacgggttggttgcctagagctagatgtctcacccttatacataaaagcatgattagggccagagtgagacttcctagaatgagttttcctaattttgctctcgggataaccggcagggtacaaaatgtaaccctcgttatcctgaggcatgggagccttgcccttaacaaaattagacaatcttttaggaggggcactaagtttgacattgtctcccttttggtagccaatgtcatccttgataccagagcgtctcccattatagagcatacttctagcaaatttaaacttttcattttctaagttatgctcggcaattttagcatctaatattgctatatgatcattttgttatttaattaaagccatgtgatcatgaatagcattgatatcaacatctctacatctatcacaaatagacacatgctcaatagtagatgtagagggtttgcaggaattaagttcaacaatcttagcacgcaaaatatcattgttatctctaagattggaaattgtaacattgcaaacatcaaaatctttagccttagcaatcaaattttcattttctactctaaggctagcaagagaatcattcaatttcttgatcttagcaagcaaatcatcattatcatttctaagattggaaattgaagcatcacaaacatgagaatcaaccttagcaattaatctagcattttcatttctaaggttgtcaatagtcccatggcaagtgcttagctcactagacaatttttcacatttttcaacttgtagagcataagcatttttaaccttaacatgttttttgttttccttaataaggaagtcctcttgagagtccaagagatcatccttctcatgaatagcactaatcaattcatttaatttttccttttttccatgttaaggttggcaaaaagggtacgcaagttatcctcctcatcactagcattttcatcactagaagactcatatctagtggaggatttagatttaaccttcttatttttgtcgtcctttgccatgaggcacatgtggccgacgttggggaagaggagtccccttggtgacggcgatgttggcggcgtcctcgtcggaggaggactcggtggagctctcgtcggagtcccactcgcggcacacgtgggcatcgcctcccctcttcttgtggtacctcttcttttctctcctcttgcccttcttgtcgttatccctgtcactgtcacttgataatggacatttagcaataaagtgaccgggcttaccacacttgtagcaaaccttcttgggacgggatttgtaatccttccccttccgttgcttgaggatttggcgaaagcttttgatgattaaagccatctcctcattatcgagcttggaggcatcaattggttgtctactcggtgtagactcctccttcttctcctccgtcgccttaaaagccatcggttgtgctttggacgtggagggatcatcaagctcgttgatcttctttgagcccttgatcatacattcaaagctcacaaaattcccgataacttcctcgggggtcattagtgtatatcttgggttgccacgaattaattgaacttgagtggggttaaggaaaatgagagatcttagaataaccttaaccacctcgtggtcatcccatttcttgctcctgaggttgcgcacttggttcaccaaggttttgagccggttgtacatatcttgtggctcctccccttggcgaagacggaagcgaccgagctccccctcgatcgtttcccgcttggtgatcttggtgagttcatcaccttcgtgtgcggtcttgagtaagtcccaaatctcctttgcattcttcaacccttgcaccttgttgtattcctccttgcttagagaggcgaggagtatggttgtagcttgagagttgaagtgctcgatttgggccacctcatcctcatcataattttcatcccctacggatggtacctgtgcaccaaactcaacaacatcccatatacttttgtggagcgaggttagatgaaatcgcattaaatcactccacctagcgtaatcttcaccatcaaaagttggtggtttgcctaatgggacggaaagtaaaggtgtatgtttagaaatgtgagggtagcgtaggggaatcttactatacttcttgcgctcttggcgcttagaagtgacggacgccgcgtcggagccggaggtggatgttgacgaagaatcggtctcgtagtagaccaccttcctcatcctcttcttcttgtccccactccgatgcggcttgtgggaagaagatttctccttcttctctttgtggtgagaagaggatttcttctccttccctttggagtgtgaagaagacttcttccctttggaggagtccttcttcttctcctttctcttgatgcgggactcttccgatgaagtgctcccgtgactcgtagtgggcttgtcgccggtctccatctccctcttggtgtgatctcccgacatcacttcgagcggttaggctctaatgaagcatcgtgctttgataccaattgaaagtcgcctagagggggggtgaatagggcgaaactgaaattctcaaaaataatcacaactacaagccgggttagcgttagaaatataatagagtccgcgagagagggtgcaaaacaaatcgcaagcgaaatgaagtgagacatgcggatttgttttatcgaggttcggttctctcaaacctactccccgttgaagaggccacaaaggtcgggtctctttcaacccttaccctctctcaaacggtccctcggaccgagtgagctttctcttcttaatcacttagaacacaaagttcccacaaggaccaccacaagtttggtgtctcttgcctcaattacaagtgagtttgatcgcaatgaaagaatcaagaaagaagaaagcaatccaagtgcaagagctcgaaagaacacaggcaaatctctctttctaatcactagggcgttgtgtggaatttggagaggatttgatctctttggtgtgcctagaattgaatgctagagctcttgtaagtagttgggaagtggaaaacttggatgcaatgaatggtggatggttgggggtatttatagccccaaccaccaaactagccgtttggtgaggctgtctgttcgatggcgcaccggacagtccggtgcacaccggacatgtccggtgcgacatccacgtcaccaaaagtcgttgggttcgaccgttggagatctgtcttctgggcccgcctggatgtccggtggcacaccggacatgcactgtagattgtccggtgcgccagcatgggcgtgtctgacctctgcgcgcgcaacgcgcgcatttaatgcgtcgcaggtagccgttggcgccgaagtagtcgttgccccgcggtcacaccggacagtccggtgtacaccggacagtccggtgaattatagcggagcagctgaaatgaatacccgaggctggcgagttcctgaggccgctcttccttggagcaccgg

SEQ ID NO: 26594 - DNA, 1224 bp, Zea Mays
gagttgcttgacttgaaatcctagaaaatacttcaactcccccatcatcgacatctcgaatttctgtgtcatgatcctactaaattcttcacatgtagattcgttagtagacccaaatatgatgtcatcaacataaatttggtatacaaacaaatcattgtcaagagttttagtgaataaagtaggatcggccttgccgactttgaagccatttgcaataaggaagtctctaaggcattcataccatgctcttggggcttgcttgagcccataaagcgccttagagagcttatagacatgattaggatactcactgtttttaaagccgggaggttgctcaacatagacctcttccttgattggtccattgaggaaggcactcttcacgtccatttggtaaagcttgaagccatggtaagtagcataggctaataatatgcgaattgactcaagcctagctacgggtgcataggtttcaccaaaatccaaaccttcgacttgtgaataccccttggccacgagtcgagctttgttccttgtcaccacaccatgctcgtcttgtttgttgcggaagacccacttggttcctacaacattttggttaggacgtggtactaaatgccatacctcgttcctagtgaagttgttgagctcctcttgcattgccatcacccaatccgaatcttggagtgcttcctctaccctgtgtggctcaatagaggaaacaaaagagtaatgctcacaaaaatgtgcaacacgagatctagtggttacccccttgtgaatgtcgccgaggatggtgtcgacggggtgatctcgttgtattgcttgatggactcttgggtgtggcggccttggttgttcatcatcctccttgtcttcatcatttgcatctcccccttgatcattgccgtcatcttgaggtggctcatcatgttgttcttcctttttatcaacttgagcctcgtcctcaatttgggttggtggagatgcttgcgtggaggaggatggttgatcttgtgcatgtggaggcacttcggattccttaggacacacatccccaatggacatgttccttagcgcgatgcacggagcctgttcttcacctatctcatcaagatcaatttgctctacttgagagccgttagtctcatcaaacacaacgtcacaagaaacttcaactagtcctgaggacttgttaaagactctatatgcccttgtgtt

SEQ ID NO: 26595 - DNA, 1449 bp, Zea Mays
gcatccccagccgcccagccgctctccatcttccttctcggcaatcccctctgctccgacttcctctgcgcgcgcgtctgtgttttgcgccgcgtcctcagctctaggccatggcgcactcccgctccagcttgcctctgctcggccgcgctgttcggcgatggaagacgcgccacacgccctgttcccgtgtcgcggcgccttgcttctcgcgcgcgcgcctggcttgccccagctcgctcggcctcctttccatggcggtttcccctcgatccctcccagcgcgccgttcctgctcgcgctctgctttccatagccggcgtcctctgctccagccgcgcgctcaggtgcctggacgtcgcgcccctagcactggcctctgctcgaagctccttccttcccctcccatggcatcctagcccctgctctgctcatccatggccgcgtctccctggcgtccagctctgcttttccctggtcgagctcccagcactgcgttcttctctcctccctagcgccgtccctctgtttctttctgccgcaagcagctccctggtgctcggacccagctccgcgcgcttccagctcccatggcagcacatcctcgcgctttggtcaagttcatcccatggcgcccggatttctgctcgccccagctctctgtgtcgcgcgctgccgtcgtctagttcgcattcgtcgagtctgccaaagccctgttacgagtgccgaactatacctataaagcatcgccggtgaagtctgccgctgtcccctaatctcagcttgcctctcttttcaagctgatgtagcgctccttcctattcatcgcacctagtttgtgtgcgttaccgaagccgttcgcctcaccctcatgttcatggaaatgacgtgtcgtcgatcgttaagctctgctcagctgtctattctcaacgccgtgagctcacctcccctttgcacacatctctgtaaacaccgccaacatcgacttcgtctcaaatatcacctcgactttgcaacaagagtccagtgtttctgatgtcgccctgagcttattccgtgtgccacgatgtcttgtttacctccacaccaaggcataaccgaggtaactgtggatttcttaatgtgttataattgtgtctatgattatacgtgtgaatcgcagtaatggatgctcattaaggtgttcgataaattgtgtaagtcacgaaactctcgttgacttcgcagttcttgcgattatcgagtcaggttcagttatagcgagttatttcgctatttcgatcaattagcggaattagtgtaccgagtagaatatgagtaggcctgtgtgatgataaaatattttaatcacttctatagatgtatatatatatatatacttacgataaagaaatgtttgagtaattgttgacatgaaaaacatgtgaggagtaaaataaaattaaaata

SEQ ID NO: 26596 - DNA, 619 bp, Zea Mays
tttccaatcatcttttttccttatatattattcctttccatttcaatggttcattcaggtcattgctcacactgccacccatggtgatgggtgacactacgttactcatcgccgctaaatgagtaaactagcgagctaggtagctagccagcggctccattacattattactacagtacatagtttcctcagtagtagacaccgccggcagctgcgttgcaagggcagggacctggctgctgcagctgcaggaaggactgcaggaccacaccgtatgtcgcctggtaccggtgcagcggctccacctgcctgatctggtggcagcactgctgctgcagcgcctggcactgtggcgagccgtagggcgtcgccgccgggctgcactggtgcctcaggaactcgacgcactggcccaggaacgggctgccgacgctgccgacgccgcaggatccgaactgctggcacgggcttagctgcggtggttgagtggggtattgccatggctgcggctgctgctgcggcggcagatagaacggaggcggcatatagaacggaggcggtagatgaaacggtggtgtctggcagccacagccgccgcttgtactggaggcggcgctcg

SEQ ID NO: 26597 - DNA, 379 bp, Zea Mays
tttccaatcatcttttttccttatatattattcctttccatttcaatggttcattcaggtcattgctcacactgccacccatggtgatgggtgacactacgttactcatcgccgctaaatgagtaaactagcgagctaggtagctagccagcggctccattacattattactacagtacatagtttcctcagtagtagacaccgccggatccgaactgctggcacgggcttagctgcggtggttgagtggggtattgccatggctgcggctgctgctgcggcggcagatagaacggaggcggcatatagaacggaggcggtagatgaaacggtggtgtctggcagccacagccgccgcttgtactggaggcggcgctcg

SEQ ID NO: 26598 - DNA, 3789 bp, Zea Mays
gctattaggaacacgcataaacggatcaaacgggccatttgctcccacgatcccacgaacacaggcacccccacccaaatggccaaagccgccgcgatcgcgagctgcaatacacgcgcacacccaccctgcatgctcgaccgctcgagcggcgagcgccaagcagcccaagctggatcacaaccctacgcggccacgccacaccacaggccacaccgtatcgatctgcacagcaaaagcagtagcagcatgccagcatccgatattccgatcccagcaaaaacaattctcacagaaagagattattttgccccctcaccaatcctgctcccaaaactcctaatcttttaatccgcgtttgttttcctccggccgtccctggcttgcagcagtaatgaagcggaggaggaaaaaggagaaaacgaaaaggcgcagggaaaacaacgcaccagcaacagcagagagcaggcgcacatcaactcatctaatctcctcatcaagctgggcgatgcgtgtgagcaggcaggcggttagggcgaaaatctgagaagtccgggagaatctccggactgacctccccgtacccgtcaaaaatccaatcttgacgcctccctggtcgagccgagactgttccaaagtttctgtctctgtgatgcgtgattgtttgccgctgctaatgaggcccgctcgcctgatccccgtggtcgtcgtcgcccgttaatccgcttcagctctggttccggttcttggacagattttttcgcccctcttggttgtggattgcgctgtttttgtttgtctggatctgcataagggcgtgggccgattcgccaccaccacaagcagagacggctcctcttttttattgcctccacagtgggatttgctttcgcgttgttgcagtatctatctatttctgcgaatcatcttctagggctccgtttgttctcgcgcactttacccttcgctgcccccatctcccagcaccgaatccgcccccttcccggccgtcgattgagggcgtgccgctgccgattgcgccgcaaaatcgcgtcttgggtttggtccatgaagaagtggggttgatttctgatttcaaggggaggtttttctcctgcgcggccgccgccagggaggctccggcctgccagccatgtctcaaatccaaagcttctcgcggaacaactgtgtgctccttgtggtgctgtgtgggaagtatgctgagaagcgagcaccagcagcgaagtctgggctggaggcgaagcggccacggccgtcttacccattcccggagctcagctcagctgggcgattggaggtccacacactgtttaatcctacaccagagcagttcctcgaggcgcagcgggtggtgcagcccaacttcttgtacatccagggtcagcagcttgaggatgagaaggagattggctcacttgtgtggggggacgccgatgtctctgatccgcaggcgtttagcactcttatcagcccaccattcccaacgatagtatatctggaagttcctattggtgaaaaacttgcccaagcagttcactcaaaggggatcccatatgtaatttactggagaaattcattctcgtcttatgccgcatctcattttcgccatgcattgatgtcagtagttcaaagttcggtgagccatacttgggatgcttttcagcttgctcacgcatcctttcgtctatattgtgtaagaaacaatcatgtgcaaagtgttaaacttggtcctcgtctccttggggattctccaaaaataaatataagtccacctggcactgaaatggttgatgaagaaggttcatctgaagtgaccccagctataaaaatatatgatgaagaaatcaacatgaagttacttctatgtggagtgtcatgcaccttggatccttgtttattgggctctttagaggacggtctgaatgcacttctgaatattgaaattcgtgggagcaaactgcagaatcgaatcagctgcatctctaccacgtgggatggttactatgcgctgtgatatcactacttgcagctcttcccatgtgtcactcctcgtttctggtagcgcacagacttgtttcgatgaccagcttctagagagccacataaaaaatgaaattattgagaaaagccagttagtccgggctctctcaaatagtgaggacaagttaccatcaagtgagcctttaacttccatgtctacggcttgtggggcttctacctttgaagtttggatgtcccttcctaagtgggcagcacaggttctgaagcatctagcgccagatatatcatacaggagtttggttgcacttggtattggttgtataaatggtactcctgttgcttcatttgagaggcgagatgcagaccgtcttcttttcttttgcacaagccagtgcaaagatttggctaatgaaaacggtccatattttcatctgccaagatggtcagcctcccttaccaaggacagaacaaagttgggttcagaatcaaaacaaaatctgttgggtgcaaatggagttttggaagacaagaagcatatgatggaagggccttcctcattttcagccgtcaaggctaaattaaagcctgcaactatgaggccaattcctcactctcaaaagcaacaaatgcatccttttatgtgtttacctgaaacttcctttcatgaaactagtattgtgaagccaagcttgacagttgcgccaactgtgaagcacaattcagtttcttatgccccaaccacgcacagaaaatcaacatcagggccatctcatactccttcagtcattcagttgaatcctctgcctatgaagaaacatggatgtgataggttgtctatacaagtatgctctgaggaggacttcttgaaggatgtcatgcagtttttaatccagaggggccacaatcgacttgtacctcacggaggactagctgaatttcctgatgcagtccttaacgccaagcgccttgacctttataacctgtacaaagaggtggtgtctagaggtggattttatgtgggtaacggcataaactggaagggtcaagtcttctcaaagatgcgtaaccatactgcaacaaacagaatgactggtgtaggtaacacattaaaaaggcattacgagacatacttgttggaatatgagttagcacatgatgatgtggatggcgaatgctgcttgctttgtcacagtagcgcacctggagattgggtgaactgcggtttatgtggcgaatgggctcactttggttgcgacagacgacaagggctaggcactttcaaggattacgctaagacagacggtttggaatacatctgcccccactgtagcttagcaaactacaagaagccaccactaccaccaaaagtagctaatggtttctcaaatacagcatatgtaccacgaagtgtttaatttcttgtttttttcttttcctttggtcccgtgtttgtgggaagaagtcattagagtagggaatagcctgatggaaagatgggcaaggccttcagggtaggtatcgaaggtatcatctcgctaatttagtggctatgagttttttatagatgtacaattgataacacattcaagttcctaagtagttttttagtggttatgaggtttatatagcatgcatttgaatgcgggtgttacttgtttatattaatctccactgtgtttttaatttcgctgtctggttccccgaaacacttgatggaacaacatgaagaagccctgaagctgctggtgcaatgatgcacgcttaagt

SEQ ID NO: 26599 - DNA, 1242 bp, Zea Mays
cgcctaccgctgtgtttctttcctctcctccaagccagcgcgcggcgcaagcctccggcgaccggcacccgcctttcttttatacctccgccgcggcgacccacgccaaccttcgacccccctaacccaaccaaagcccgaactctcgagatcacaggacgcggatccaaaccagaggcccctgcctgccctcccccaccacaccacagcctaccgccatgtcggcgaccgctacggacgaggccgcggtggaggcgcgcctccaggagctgcgggggaggctcgggaagaagcagcacttcgaggaggccgtaaacgagctcgccgccgccgtccgggaccgctacgccggcgcctctccagccctccgcaaagcgatgtattcaacggtttgccgcgttgcaacagtgcttcaaaccagatatacagctccaggattctggcatgttggtctgaacctcttcgttggaatagagaagctggtaagtaatcctgctgaaaaggagcacctgaagacctgcatttcgagggcccgtgagcatcttgatgaaaaggaaaatgaggattctgtgccaagcaacagagaagcagacaccagatttctttttgaagggcaccttactgtgggacaggaacctccacctccagcatggcttgttgcccagaatttaacgagggaattgagcatactaactgaatcctctggtgatcaagatgggagcaacaacagaacagtgcctagagccgaggagattacacctgctataatgaacctcctagaaaccatatcaggcgacagggatctagaaactgctttggaagaatcactgcagggaatcattgagtatccacagagggcacccccggcttcaaaggaagttgtcgccaatcttcctgtcattgctgttaccgaggaagtcatgtctagattgggtagtgagacggagtgtgctgtctgccgcgaaaacttggttgtggatgacaagatgcaggagcttccctgcaagcatctcttccatcctctttgtctgaagccatggctggacgagaacaactcctgccctatctgccggcatgagctgaggacggatgaccatgtgtatgagagcaggaaggagcgtgaaagggaagaggaagaagatagaaggggtgcggcaaatgctgttaggggtggagaattcatttatatctgaactcaacagttccagaatgcctagacgcatagcaggtcatcaataaaag

SEQ ID NO: 26600 - DNA, 824 bp, Zea Mays
ggaagacctacgatgatactcgaagcggtagcaacgtatgatctatggatttggcatgcattttttggcatgtctgggacaaataatgacgtaaacgtgcttcaccgatcaccagtatttgaccccatgacaagcggtcgaatgccacccgtgaattacacaatcaacgatcatgcttacaacttcggttattacctagccgatggcatttaccccaactggccaacttttgtcaaagctattagacacccttatgaggaaaagaatgtatatttcacacaaatgcaggaaagttgcagaaaggatattgagcgcgcatttggagttattcaagcacggtgggcagtgctacgtggtcctacgtatggttgggatcataatcgtttaaccgagataataacagcatgcatcatcatgcacaacatgattgtcaaagacgaaggtgagtttgcaggaaacacagatttcggagacaatagttcaggcattgaaccatctcaactaattcaagaaggacggtccgaatgggtgatcaatcatttcgatctccgtcgccaagaaaggtcttcgacactacaaaatgagcttgtggagcatttgtgggctcggcgtggaagcatgtgagcgtatgtttacataactacgtagttgcatcttaaattgaataagttaaatgtccgaagtggcttattggttttagtcgtgttatgtcatgttatgcttctacaattcaataagtgtaaggtgtacaagttagtagtcgatgtcatttgttcatggactaagtgatgcaaatgtattctatcacattacacatgtacaac

SEQ ID NO: 26601 - DNA, 625 bp, Zea Mays
gcatgtctcgtacgccggatcggacgagacgagagaaagatcaatcaacctgcgctgcggcgtgccatacccacatgtgatgatggtgatgattggaaagttgcagaaaggatattgagcgcgcatttggagttattcaagcacggtgggcagtgctacgtggtcctacgtatggttgggatcataatcgtttaaccgagataataacagcatgcatcatcatgcacaacatgattgtcaaagacgaaggtgagtttgcaggaaacacagatttcggagacaatagttcaggcattgaaccatctcaactaattcaagaaggacggtccgaatgggtgatcaatcatttcgatctccgtcgccaagaaaggtcttcgacactacaaaatgagcttgtggagcatttgtgggctcggcgtggaagcatgtgagcgtatgtttacataactacgtagttgcatcttaaattgaataagttaaatgtccgaagtggcttattggttttagtcgtgttatgtcatgttatgcttctacaattcaataagtgtaaggtgtacaagttagtagtcgatgtcatttgttcatggactaagtgatgcaaatgtattctatcacattacacatg

SEQ ID NO: 26602 - DNA, 615 bp, Zea Mays
ggacgagacgagagaaagatcaatcaacctgcgctgcggcgtgccatacccacatgtgatgatggtgatgattgactacgatgaacacggcttactgatggtagagaggaaacctctctgaagaatgactagcccatatcaatgttgatggcttggacagcagtgacctcacttgtatccaaagagcccgctagcactcactctccaagctttttttcatcgttgattttttacacctctctctctctctctctctctctctctctctctctctctgcgatcagcacggatctactttatctgagctgactaataatcatcctcgtcacatcagccattatatacgaaacagtgacatgcgcctttaattggtcagaatagtatgtgtgtgtatgtatatgaaaagaatagaacaacttataatttaaaatagaatgagcacttaatcgtacctcttcatggaatcaatggtcagtactaatcaatgctctctgttttttctaaactagcttgtatatactctccgtgcgccattgcagcgcatgacaatatccaattcagtcttgtgggccctaatcaacaactaaagcttgtcgtgaattgttcagactgcag

SEQ ID NO: 26603 - DNA, 1279 bp, Zea Mays
ccttcttccttttgtctattatttgtttagctttattatttacttctttcaagaacctgcatctgcatggatggagtctgccaaaagtgaccaccgatcgactctatacatgcattgcgtgaagcgacgccaacggtccgcgcgctacagccatgcatgcccgggcgtgagctagcgggataagctaaactagtcaccatccatatacagcgactgatccagccagacgttgttacattacattgcgtatctttaaagactggattaacaaatttgtaagagtaacctccagatgccgcgaaaagaagctaaggtatatacattacggaatatttattacttgggccttcgaccgagccgaaaagaagctttgcccatggaccctccaggtccacaggagacgcggccacgcggaggtctctgtcgacctgtaggcgctgatgtggcacacaccaagtcacggcatgatcccctttcaggataaaaagaaagaactaaagaaggggcgcaaaattaattaaagcgcatgccagcgccaaaacgtataaagaagtgagggtgcgcctgaagctatttttctgacgatgaacacgactcaggatacgtttacgtgatagttagttttagccttgtaggcttggttgtagtctgttagcttcctgtttggatacgctagcgctaattttagctggttgacaactaatcctttgatatctaatataaacatgcccggaattgcgcagactacgatgaacacggcttactgatggtagagaggaaacctctctgaagaatgactagcccatatcaatgttgatggcttggacagcagtgacctcacttgtatccaaagagcccgctagcactcactctccaagctttttttcatcgttgattttttacacctctctctctctctctctctctctctctctctctctctctgcgatcagcacggatctactttatctgagctgactaataatcatcctcgtcacatcagccattatatacgaaacagtgacatgcgcctttaattggtcagaatagtatgtgtgtgtatgtatatgaaaagaatagaacaacttataatttaaaatagaatgagcacttaatcgtacctcttcatggaatcaatggtcagtactaatcaatgctctctgttttttctaaactagcttgtatatactctccgtgcgccattgcagcgcatgacaatatccaattcagtcttgtgggccctaatcaacaactaaagcttgtcgtgaattgttcagac

SEQ ID NO: 26604 - DNA, 1139 bp, Zea Mays
ttgcctcatagcacaacagctcgtgtatacgtccataaaaccattgggagacagagtacttgtgaagatcaaaacctctgaggctaaatctgatggaggtattttacttccagtatcagttcagacaagaccacaaggaggggagattgttgcggttggagaagggagaagttttggaagtaaccgcattgagatcagtgttccggttggtgcacaagttgtctactcgaaatatgcaggcacagaattgaaattcaatgacgccgaccatctcattttgaaagaagatgacataattggtattcttgacagtgatgatgtgaaggatatgaaaccactgaatgatcgcattctgattaaggttgctgaagctgaagaacgaactgctggtggtttgctattgacgcaggcaactaaggagaaaccttctgttggatcagtggtagccgttggcccagggccgttgggcgaggacggcagcaggaatcccctgtcgatcactcctggaagcaacgtgatgtattccaagtatgcggggagtgagttcaagggcgaggacggtgagtacatcgtgctcagggcgtctgacgtgatggctgttctttcctgatccccaaaccatacagcgccaggtgcgcgataggaagttttgatgttgaggccgaaccttatcttttatttgctcttgtttggaattggtggaggcttttgaactgtaatctggtgcgaattataaggaaaataagccgagttgtgtagacttgagacaggactgtgctgtgctgtttggctggtaggtgagctaaccagtgttcagctggtgggtgagctgaccagcacgtcgggttcggctgttcttcctgatgtcagcgttgtacgccaaggttggccaacggcatcaatattactaatagcatctaggctaccgtttgagtttttcatggattaatgacaacacaagatgtgactattatatacttcctctgtttttttatttgtcatgttttagttcaaaaataaacctgttttagttcaaaaatgaactagcggacgacaaatattcaagaatagaagatagtattttgcaaagataactaggcttatagttgggctttgatgttaaaaatttctgattaatt

SEQ ID NO: 26605 - DNA, 4809 bp, Zea Mays
atgccggcgaatggcaagctctcggcgaagccctccccctcgccgatggttgctcccgcctcgcgccccaaatttacagctgttacctttctcggtgactgcgacgacgacgatgacttccaacctcctcgcccccgccccttgaagccttgcattggcgccgccgcacttcggttccgtaagaagctcaaggctccatcctccgggaaggagaatagttccgccgccggtggtgccgttactgtggtgggggtcgcttcgacggccgtgaaggatgccgaaaccctagccgccggctctagggttagtggcgacgttcccaaaacgaagagacgaaagaccggtgaaagttgcggcctgtcgaggtacggatctgatagcactaaactaagctgtaaaccgaagatagaattggatagatacggatatggcaaagggtgctgcagtttcttgcccagtgcgatagactcgacggttttggcgctcggtgcggtatgtgattttggagttaggcgttgtgatgaggctcaaatagctgtctccaggcattgtacctcagttcttgaggcggggcacgccacagaagagctgacaccgacaggctctgggtgtgatccacccaaaacggagaagaagccgggcagttctgaagctgtggagggacatcacgactccaggttgattgaaccgaggcttgttgaatcagatgcaaacctcgagtttgtaactgggattcttggctcactgactgataaacaggacacgaagaaagcaaacggggtggtatttggatgtggtgttggatttcagaatgggaactatcacttggattctctacagccagagcttctaacgtcgaactcaaagtatgattctagagtttgtgttagcaatgaaatccaagagcctggtttgggagcctgtaacttgatttcacaggagaggaaagtagcagctggacattctgcatgtgcaacccctgaaaatgtgactgcagagaataaatcaagtgcacctgaggcttgtaaggggcaatgccactccgattcatctgcatcaaagcttccagaatcccatatgatccatgactttgaagttgatggttgcgataattttgagattgggacccagctcagtgagctcattaacttgtgtatgaaggattccatagagggacaatcaaactttggtgcagctcccatggaacagaacactttagactctaagagactcagttcagactatgaagcgaaatgccctctatgtggatcggatatttctgatttaagcgaggagctccggcagctgcatactaacaattgccttgacgaaccagctaagggcaagcatggtgtagtggtgagagctgtctcactagttccctcggtcgtgggtttgaagcagtctctccgcatttgtggaaggaaggaatctagtcccaaccataaaaaagagcccagtgttggacaaaatgttgaaactggacgtgttgtcgaatggttaagaaaccttgggttatccaagtatgaggaagtttttatcagagaagaagttgactgggaaaccttgcagtggctcactgaagaggacctgttgggtattgggatcagctctcttggaccaagaaagaaaattatccatgctctaggagagttactgaagaaacatgatgatcccagtgaaatggaagctgtgttaaattcaggaaatactaagaagactaaacttccgatgaatggtaataaattaattaccgaatactttcaatgttcctcatttgatcaaagacaaagaagggtatgcaaagcaaacaagccatctaatctgaacgagaagaaaatttctagtgctaaagtacccactagaagaactgctggtaaaggaaagattaaggatacgcctctttggtgttgcatcccagggaccccttttcgagtggatgcatttcgctacttgagaggtgattgttctcactggtttctcacacactttcatgtggatcattatcaaggcttgactagaagcttttgtcatgggaagatatactgttcgtcaattacagcgagtcttgtgcatcataagattggtatcccatgggatagattgcatgtattgaccctaaatgaaaagctcaatattgctggagttaatttgatatgttttgatgccaaccattgcccaggatcaatcattattctctttgagcctccaaatggtaaagctgttttgcacactggagatttccgtttttcttccaagatggccaacaatcctgttttgcagtcttcctgtgtccacactctaatacttgacacaacctattgcaatccacggtatgatttcccaagtcaagaaatcgtaatacagttcgtcattgaggccatccaagcagaagctttcaatccaaaaacattgtttttgattggaagctacacaattggaaaagaaagattgtttatggaggttgctcgtttgcttcagaagaaagtatatgttggagctgcaaagctgcaaatactgaaacatttagagcttcctcaggagattatgcactggtttacagccaatgaagcagaaagtcacatacatgttgtccccatgtggactctagcaagcttcaagcggatgaaatatctatcgaatcaatatgctggccggtatgaccttatagtggcgttttgtcctactggttgggcatttggcaaaggtaggaaaaagacaccaggcaaaaggtggcaacaaggatcaatcattagatatgaagtgccctacagtgaacacagcagtttcacggaactgcagcagtttgtcaagttcatatcaccagagcacataatccctagcgtaaacaacgacggccctgagagtgcaaacgctatgcttgcccagctgttaaacgagtagaggaattcgttcgtcgcttcaatatcttcggcttggctacagttttctcttcgaaaaccatttgatgaaagggatggacgctggacgagctaacttccaaggactaatacagtgatggcggaagcattcctgatggtgccacccagagttctgacgtggaaatccagagatacagggtgcatagatgcgcacgcagacacccgttggcgccgtggaggtgctggttgacaaatcgtcagccaagattctgtactggaatgggtaccggcgatagcgtgtattgccgaaaccatgtgaaccgtgatttgtgactgtcaagccaagcgagtgaacttgcatgtcattatgagcccatttgtacacgaacttgtccagggtttttctagtgatggtgaaaagtcctgccatgagtgtcacctttctttaaaaaaaaacgtcgatcaaactggcaaaatccgtaggagacccacttgtcagctaaccaccccttgcagtcatccgcaccagggcaccaccaccactccagatgttctagaactatcaggcggcttcctccccctaaccgcaacagttaaaacgccgtagcaactagcaacgctaccacagtgcgcgcttgaagatagttcccggtagcagccatggcgtcggtgcagctgtctgggccgcgggtggtggcggctgcgaaaccggctgcgttgggcgggctcctcctgacgccgtcccttgcggtgccaaaggggcggagggccaggggcctcgtggtgagggccgccacggtcgtgtcacctaagtatacgtccataaaaccattgggagacagagtacttgtgaagatcaaaacctctgaggctaaatctgatggaggtattttacttccagtatcagttcagacaagaccacaaggaggggagattgttgcggttggagaagggagaagttttggaagtaaccgcattgagatcagtgttccggttggtgcacaagttgtctactcgaaatatgcaggcacagaattgaaattcaatgacgccgaccatctcattttgaaagaagatgacataattggtattcttgacagtgatgatgtgaaggatatgaaaccactgaatgatcgcattctgattaaggttgctgaagctgaagaacgaactgctggtggtttgctattgacgcaggcaactaaggagaaaccttctgttggatcagtggtagccgttggcccagggccgttgggcgaggacggcagcaggaatcccctgtcgatcactcctggaagcaacgtgatgtattccaagtatgcggggagtgagttcaagggcgaggacggtgagtacatcgtgctcagggcgtctgacgtgatggctgttctttcctgatccccaaaccatacagcgccaggtgcgcgataggaagttttgatgttgaggccgaaccttatcttttatttgctcttgtttggaattggtggaggcttttgaactgtaatctggtgcgaattataaggaaaataagccgagttgtgtagacttgagacaggactgtgctgtgctgtttggctggtaggtgagctaaccagtgttcagctggtgggtgagctgaccagcacgtcgggttcggctgttcttcctgatgtcagcgttgtacgccaaggttggccaacggcatcaatattactaatagcatctaggctaccgtttgagtttttcatggattaatgacaacacaagatgtgactattatatacttcctctgtttttttatttgtcatgttttagttcaaaaataaacctgttttagttcaaaaatgaactagcggacgacaaatattcaagaatagaagatagtattttgcaaagataactaggcttatagttgggctttgatgttaaaaatttctgattaatt

SEQ ID NO: 26606 - DNA, 3524 bp, Zea Mays
agcagatgccggcgaatggcaagctctcggcgaagccctccccctcgccgatggttgctcccgcctcgcgccccaaatttacagctgttacctttctcggtgactgcgacgacgacgatgacttccaacctcctcgcccccgccccttgaagccttgcattggcgccgccgcacttcggttccgtaagaagctcaaggctccatcctccgggaaggagaatagttccgccgccggtggtgccgttactgtggtgggggtcgcttcgacggccgtgaaggatgccgaaaccctagccgccggctctagggttagtggcgacgttcccaaaacgaagagacgaaagaccggtgaaagttgcggcctgtcgaggtacggatctgatagcactaaactaagctgtaaaccgaagatagaattggatagatacggatatggcaaagggtgctgcagtttcttgcccagtgcgatagactcgacggttttggcgctcggtgcggtatgtgattttggagttaggcgttgtgatgaggctcaaatagctgtctccaggcattgtacctcagttcttgaggcggggcacgccacagaagagctgacaccgacaggctctgggtgtgatccacccaaaacggagaagaagccgggcagttctgaagctgtggagggacatcacgactccaggttgattgaaccgaggcttgttgaatcagatgcaaacctcgagtttgtaactgggattcttggctcactgactgataaacaggacacgaagaaagcaaacggggtggtatttggatgtggtgttggatttcagaatgggaactatcacttggattctctacagccagagcttctaacgtcgaactcaaagtatgattctagagtttgtgttagcaatgaaatccaagagcctggtttgggagcctgtaacttgatttcacaggagaggaaagtagcagctggacattctgcatgtgcaacccctgaaaatgtgactgcagagaataaatcaagtgcacctgaggcttgtaaggggcaatgccactccgattcatctgcatcaaagcttccagaatcccatatgatccatgactttgaagttgatggttgcgataattttgagattgggacccagctcagtgagctcattaacttgtgtatgaaggattccatagagggacaatcaaactttggtgcagctcccatggaacagaacactttagactctaagagactcagttcagactatgaagcgaaatgccctctatgtggatcggatatttctgatttaagcgaggagctccggcagctgcatactaacaattgccttgacgaaccagctaaggaatctagtcccaaccataaaaaagagcccagtgttggacaaaatgttgaaactggacgtgttgtcgaatggttaagaaaccttgggttatccaagtatgaggaagtttttatcagagaagaagttgactgggaaaccttgcagtggctcactgaagaggacctgttgggtattgggatcagctctcttggaccaagaaagaaaattatccatgctctaggagagttactgaagaaacatgatgatcccagtgaaatggaagctgtgttaaattcaggaaatactaagaagactaaacttccgatgaatgattatcaaggcttgactagaagcttttgtcatgggaagatatactgttcgtcaattacagcgagtcttgtgcatcataagattggtatcccatgggatagattgcatgtattgaccctaaatgaaaagctcaatattgctggagttaatttgatatgttttgatgccaaccattgcccaggatcaatcattattctctttgagcctccaaatggtaaagctgttttgcacactggagatttccgtttttcttccaagatggccaacaatcctgttttgcagtcttcctgtgtccacactctaatacttgacacaacctattgcaatccacggtatgatttcccaagtcaagaaatcgtaatacagttcgtcattgaggccatccaagcagaagctttcaatccaaaaacattgtttttgattggaagctacacaattggaaaagaaagattgtttatggaggttgctcgtttgcttcagaagaaagtatatgttggagctgcaaagctgcaaatactgaaacatttagagcttcctcaggagattatgcactggtttacagccaatgaagcagaaagtcacatacatgttgtccccatgtggactctagcaagcttcaagcggatgaaatatctatcgaatcaatatgctggccggtatgaccttatagtggcgttttgtcctactggttgggcatttggcaaaggtaggaaaaagacaccaggcaaaaggtggcaacaaggatcaatcattagtatacgtccataaaaccattgggagacagagtacttgtgaagatcaaaacctctgaggctaaatctgatggaggtattttacttccagtatcagttcagacaagaccacaaggaggggagattgttgcggttggagaagggagaagttttggaagtaaccgcattgagatcagtgttccggttggtgcacaagttgtctactcgaaatatgcaggcacagaattgaaattcaatgacgccgaccatctcattttgaaagaagatgacataattggtattcttgacagtgatgatgtgaaggatatgaaaccactgaatgatcgcattctgattaaggttgctgaagctgaagaacgaactgctggtggtttgctattgacgcaggcaactaaggagaaaccttctgttggatcagtggtagccgttggcccagggccgttgggcgaggacggcagcaggaatcccctgtcgatcactcctggaagcaacgtgatgtattccaagtatgcggggagtgagttcaagggcgaggacggtgagtacatcgtgctcagggcgtctgacgtgatggctgttctttcctgatccccaaaccatacagcgccaggtgcgcgataggaagttttgatgttgaggccgaaccttatcttttatttgctcttgtttggaattggtggaggcttttgaactgtaatctggtgcgaattataaggaaaataagccgagttgtgtagacttgagacaggactgtgctgtgctgtttggctggtaggtgagctaaccagtgttcagctggtgggtgagctgaccagcacgtcgggttcggctgttcttcctgatgtcagcgttgtacgccaaggttggccaacggcatcaatattactaatagcatctaggctaccgtttgagtttttcatggattaatgacaacacaagatgtgactattatatacttcctctgtttttttatttgtcatgttttagttcaaaaataaacctgttttagttcaaaaatgaactagcggacgacaaatattcaagaatagaagatagtattttgcaaagataactaggcttatagttgggctttgatgttaaaaatttctgattaatt

SEQ ID NO: 26607 - DNA, 4742 bp, Zea Mays
cttccacgagcagatgccggcgaatggcaagctctcggcgaagccctccccctcgccgatggttgctcccgcctcgcgccccaaatttacagctgttacctttctcggtgactgcgacgacgacgatgacttccaacctcctcgcccccgccccttgaagccttgcattggcgccgccgcacttcggttccgtaagaagctcaaggctccatcctccgggaaggagaatagttccgccgccggtggtgccgttactgtggtgggggtcgcttcgacggccgtgaaggatgccgaaaccctagccgccggctctagggttagtggcgacgttcccaaaacgaagagacgaaagaccggtgaaagttgcggcctgtcgaggtacggatctgatagcactaaactaagctgtaaaccgaagatagaattggatagatacggatatggcaaagggtgctgcagtttcttgcccagtgcgatagactcgacggttttggcgctcggtgcggtatgtgattttggagttaggcgttgtgatgaggctcaaatagctgtctccaggcattgtacctcagttcttgaggcggggcacgccacagaagagctgacaccgacaggctctgggtgtgatccacccaaaacggagaagaagccgggcagttctgaagctgtggagggacatcacgactccaggttgattgaaccgaggcttgttgaatcagatgcaaacctcgagtttgtaactgggattcttggctcactgactgataaacaggacacgaagaaagcaaacggggtggtatttggatgtggtgttggatttcagaatgggaactatcacttggattctctacagccagagcttctaacgtcgaactcaaagtatgattctagagtttgtgttagcaatgaaatccaagagcctggtttgggagcctgtaacttgatttcacaggagaggaaagtagcagctggacattctgcatgtgcaacccctgaaaatgtgactgcagagaataaatcaagtgcacctgaggcttgtaaggggcaatgccactccgattcatctgcatcaaagcttccagaatcccatatgatccatgactttgaagttgatggttgcgataattttgagattgggacccagctcagtgagctcattaacttgtgtatgaaggattccatagagggacaatcaaactttggtgcagctcccatggaacagaacactttagactctaagagactcagttcagactatgaagcgaaatgccctctatgtggatcggatatttctgatttaagcgaggagctccggcagctgcatactaacaattgccttgacgaaccagctaaggaatctagtcccaaccataaaaaagagcccagtgttggacaaaatgttgaaactggacgtgttgtcgaatggttaagaaaccttgggttatccaagtatgaggaagtttttatcagagaagaagttgactgggaaaccttgcagtggctcactgaagaggacctgttgggtattgggatcagctctcttggaccaagaaagaaaattatccatgctctaggagagttactgaagaaacatgatgatcccagtgaaatggaagctgtgttaaattcaggaaatactaagaagactaaacttccgatgaatggtaataaattaattaccgaatactttcaatgttcctcatttgatcaaagacaaagaagggtatgcaaagcaaacaagccatctaatctgaacgagaagaaaatttctagtgctaaagtacccactagaagaactgctggtaaaggaaagattaaggatacgcctctttggtgttgcatcccagggaccccttttcgagtggatgcatttcgctacttgagaggtgattgttctcactggtttctcacacactttcatgtggatcattatcaaggcttgactagaagcttttgtcatgggaagatatactgttcgtcaattacagcgagtcttgtgcatcataagattggtatcccatgggatagattgcatgtattgaccctaaatgaaaagctcaatattgctggagttaatttgatatgttttgatgccaaccattgcccaggatcaatcattattctctttgagcctccaaatggctgttttgcacactggagatttccgtttttcttccaagatggccaacaatcctgttttgcagtcttcctgtgtccacactctaatacttgacacaacctattgcaatccacggtatgatttcccaagtcaagaaatcgtaatacagttcgtcattgaggccatccaagcagaagctttcaatccaaaaacattgtttttgattggaagctacacaattggaaaagaaagattgtttatggaggttgctcgtttgcttcagaagaaagtatatgttggagctgcaaagctgcaaatactgaaacatttagagcttcctcaggagattatgcactggtttacagccaatgaagcagaaagtcacatacatgttgtccccatgtggactctagcaagcttcaagcggatgaaatatctatcgaatcaatatgctggccggtatgaccttatagtggcgttttgtcctactggttgggcatttggcaaaggtaggaaaaagacaccaggcaaaaggtggcaacaaggatcaatcattagatatgaagtgccctacagtgaacacagcagtttcacggaactgcagcagtttgtcaagttcatatcaccagagcacataatccctagcgtaaacaacgacggccctgagagtgcaaacgctatgcttgcccagctgttaaacgagtagaggaattcgttcgtcgcttcaatatcttcggcttggctacagttttctcttcgaaaaccatttgatgaaagggatggacgctggacgagctaacttccaaggactaatacagtgatggcggaagcattcctgatggtgccacccagagttctgacgtggaaatccagagatacagggtgcatagatgcgcacgcagacacccgttggcgccgtggaggtgctggttgacaaatcgtcagccaagattctgtactggaatgggtaccggcgatagcgtgtattgccgaaaccatgtgaaccgtgatttgtgactgtcaagccaagcgagtgaacttgcatgtcattatgagcccatttgtacacgaacttgtccagggtttttctagtgatggtgaaaagtcctgccatgagtgtcacctttctttaaaaaaaaacgtcgatcaaactggcaaaatccgtaggagacccacttgtcagctaaccaccccttgcagtcatccgcaccagggcaccaccaccactccagatgttctagaactatcaggcggcttcctccccctaaccgcaacagttaaaacgccgtagcaactagcaacgctaccacagtgcgcgcttgaagatagtgtcatttgcagttcccggtagcagccatggcgtcggtgcagctgtctgggccgcgggtggtggcggctgcgaaaccggctgcgttgggcgggctcctcctgacgccgtcccttgcggtgccaaaggggcggagggccaggggcctcgtggtgagggccgccacggtcgtgtcacctaagtatacgtccataaaaccattgggagacagagtacttgtgaagatcaaaacctctgaggctaaatctgatggaggtattttacttccagtatcagttcagacaagaccacaaggaggggagattgttgcggttggagaagggagaagttttggaagtaaccgcattgagatcagtgttccggttggtgcacaagttgtctactcgaaatatgcaggcacagaattgaaattcaatgacgccgaccatctcattttgaaagaagatgacataattggtattcttgacagtgatgatgtgaaggatatgaaaccactgaatgatcgcattctgattaaggttgctgaagctgaagaacgaactgctggtggtttgctattgacgcaggcaactaaggagaaaccttctgttggatcagtggtagccgttggcccagggccgttgggcgaggacggcagcaggaatcccctgtcgatcactcctggaagcaacgtgatgtattccaagtatgcggggagtgagttcaagggcgaggacggtgagtacatcgtgctcagggcgtctgacgtgatggctgttctttcctgatccccaaaccatacagcgccaggtgcgcgataggaagttttgatgttgaggccgaaccttatcttttatttgctcttgtttggaattggtggaggcttttgaactgtaatctggtgcgaattataaggaaaataagccgagttgtgtagacttgagacaggactgtgctgtgctgtttggctggtaggtgagctaaccagtgttcagctggtgggtgagctgaccagcacgtcgggttcggctgttcttcctgatgtcagcgttgtacgccaaggttggccaacggcatcaatattactaatagcatctaggctaccgtttgagtttttcatggattaatgacaacacaagatgtgactattatatacttcctctgtttttttatttgtcatgttttagttcaaaaataaacctgttttagttcaaaaatgaactagcggacgacaaatattcaagaatagaagatagtattttgcaaagataactaggcttatagttgggctttgatgttaaaaatttctgattaatt

SEQ ID NO: 26608 - DNA, 3743 bp, Zea Mays
cttccgcttccacgagcagatgccggcgaatggcaagctctcggcgaagccctccccctcgccgatggttgctcccgcctcgcgccccaaatttacagctgttacctttctcggtgactgcgacgacgacgatgacttccaacctcctcgcccccgccccttgaagccttgcattggcgccgccgcacttcggttccgtaagaagctcaaggctccatcctccgggaaggagaatagttccgccgccggtggtgccgttactgtggtgggggtcgcttcgacggccgtgaaggatgccgaaaccctagccgccggctctagggttagtggcgacgttcccaaaacgaagagacgaaagaccggtgaaagttgcggcctgtcgaggtacggatctgatagcactaaactaagctgtaaaccgaagatagaattggatagatacggatatggcaaagggtgctgcagtttcttgcccagtgcgatagactcgacggttttggcgctcggtgcggtatgtgattttggagttaggcgttgtgatgaggctcaaatagctgtctccaggcattgtacctcagttcttgaggcggggcacgccacagaagagctgacaccgacaggctctgggtgtgatccacccaaaacggagaagaagccgggcagttctgaagctgtggagggacatcacgactccaggttgattgaaccgaggcttgttgaatcagatgcaaacctcgagtttgtaactgggattcttggctcactgactgataaacaggacacgaagaaagcaaacggggtggtatttggatgtggtgttggatttcagaatgggaactatcacttggattctctacagccagagcttctaacgtcgaactcaaagtatgattctagagtttgtgttagcaatgaaatccaagagcctggtttgggagcctgtaacttgatttcacaggagaggaaagtagcagctggacattctgcatgtgcaacccctgaaaatgtgactgcagagaataaatcaagtgcacctgaggcttgtaaggggcaatgccactccgattcatctgcatcaaagcttccagaatcccatatgatccatgactttgaagttgatggttgcgataattttgagattgggacccagctcagtgagctcattaacttgtgtatgaaggattccatagagggacaatcaaactttggtgcagctcccatggaacagaacactttagactctaagagactcagttcagactatgaagcgaaatgccctctatgtggatcggatatttctgatttaagcgaggagctccggcagctgcatactaacaattgccttgacgaaccagctaagggcaagcatggtgtagtggtgagagctgtctcactagttccctcggtcgtgggtttgaagcagtctctccgcatttgtggaaggaaggaatctagtcccaaccataaaaaagagcccagtgttggacaaaatgttgaaactggacgtgttgtcgaatggttaagaaaccttgggttatccaagtatgaggaagtttttatcagagaagaagttgactgggaaaccttgcagtggctcactgaagaggacctgttgggtattgggatcagctctcttggaccaagaaagaaaattatccatgctctaggagagttactgaagaaacatgatgatcccagtgaaatggaagctgtgttaaattcaggaaatactaagaagactaaacttccgatgaatggtaataaattaattaccgaatactttcaatgttcctcatttgatcaaagacaaagaagggtatgcaaagcaaacaagccatctaatctgaacgagaagaaaatttctagtgctaaagtacccactagaagaactgctggtaaaggaaagattaaggatacgcctctttggtgttgcatcccagggaccccttttcgagtggatgcatttcgctacttgagagattatcaaggcttgactagaagcttttgtcatgggaagatatactgttcgtcaattacagcgagtcttgtgcatcataagattggtatcccatgggatagattgcatgtattgaccctaaatgaaaagctcaatattgctggagttaatttgatatgttttgatgccaaccattgcccaggatcaatcattattctctttgagcctccaaatggtaaagctgttttgcacactggagatttccgtttttcttccaagatggccaacaatcctgttttgcagtcttcctgtgtccacactctaatacttgacacaacctattgcaatccacggtatgatttcccaagtcaagaaatcgtaatacagttcgtcattgaggccatccaagcagaagctttcaatccaaaaacattgtttttgattggaagctacacaattggaaaagaaagattgtttatggaggttgctcgtttgcttcagaagaaagtatatgttggagctgcaaagctgcaaatactgaaacatttagagcttcctcaggagattatgcactggtttacagccaatgaagcagaaagtcacatacatgttgtccccatgtggactctagcaagcttcaagcggatgaaatatctatcgaatcaatatgcttatacgtccataaaaccattgggagacagagtacttgtgaagatcaaaacctctgaggctaaatctgatggaggtattttacttccagtatcagttcagacaagaccacaaggaggggagattgttgcggttggagaagggagaagttttggaagtaaccgcattgagatcagtgttccggttggtgcacaagttgtctactcgaaatatgcaggcacagaattgaaattcaatgacgccgaccatctcattttgaaagaagatgacataattggtattcttgacagtgatgatgtgaaggatatgaaaccactgaatgatcgcattctgattaaggttgctgaagctgaagaacgaactgctggtggtttgctattgacgcaggcaactaaggagaaaccttctgttggatcagtggtagccgttggcccagggccgttgggcgaggacggcagcaggaatcccctgtcgatcactcctggaagcaacgtgatgtattccaagtatgcggggagtgagttcaagggcgaggacggtgagtacatcgtgctcagggcgtctgacgtgatggctgttctttcctgatccccaaaccatacagcgccaggtgcgcgataggaagttttgatgttgaggccgaaccttatcttttatttgctcttgtttggaattggtggaggcttttgaactgtaatctggtgcgaattataaggaaaataagccgagttgtgtagacttgagacaggactgtgctgtgctgtttggctggtaggtgagctaaccagtgttcagctggtgggtgagctgaccagcacgtcgggttcggctgttcttcctgatgtcagcgttgtacgccaaggttggccaacggcatcaatattactaatagcatctaggctaccgtttgagtttttcatggattaatgacaacacaagatgtgactattatatacttcctctgtttttttatttgtcatgttttagttcaaaaataaacctgttttagttcaaaaatgaactagcggacgacaaatattcaagaatagaagatagtattttgcaaagataactaggcttatagttgggctttgatgttaaaaatttctgattaatt

SEQ ID NO: 26609 - DNA, 5021 bp, Zea Mays
cgcattttcccactcttccgcttccacgagcagatgccggcgaatggcaagctctcggcgaagccctccccctcgccgatggttgctcccgcctcgcgccccaaatttacagctgttacctttctcggtgactgcgacgacgacgatgacttccaacctcctcgcccccgccccttgaagccttgcattggcgccgccgcacttcggttccgtaagaagctcaaggctccatcctccgggaaggagaatagttccgccgccggtggtgccgttactgtggtgggggtcgcttcgacggccgtgaaggatgccgaaaccctagccgccggctctagggttagtggcgacgttcccaaaacgaagagacgaaagaccggtgaaagttgcggcctgtcgaggtacggatctgatagcactaaactaagctgtaaaccgaagatagaattggatagatacggatatggcaaagggtgctgcagtttcttgcccagtgcgatagactcgacggttttggcgctcggtgcggtatgtgattttggagttaggcgttgtgatgaggctcaaatagctgtctccaggcattgtacctcagttcttgaggcggggcacgccacagaagagctgacaccgacaggctctgggtgtgatccacccaaaacggagaagaagccgggcagttctgaagctgtggagggacatcacgactccaggttgattgaaccgaggcttgttgaatcagatgcaaacctcgagtttgtaactgggattcttggctcactgactgataaacaggacacgaagaaagcaaacggggtggtatttggatgtggtgttggatttcagaatgggaactatcacttggattctctacagccagagcttctaacgtcgaactcaaagtatgattctagagtttgtgttagcaatgaaatccaagagcctggtttgggagcctgtaacttgatttcacaggagaggaaagtagcagctggacattctgcatgtgcaacccctgaaaatgtgactgcagagaataaatcaagtgcacctgaggcttgtaaggggcaatgccactccgattcatctgcatcaaagcttccagaatcccatatgatccatgactttgaagttgatggttgcgataattttgagattgggacccagctcagtgagctcattaacttgtgtatgaaggattccatagagggacaatcaaactttggtgcagctcccatggaacagaacactttagactctaagagactcagttcagactatgaagcgaaatgccctctatgtggatcggatatttctgatttaagcgaggagctccggcagctgcatactaacaattgccttgacgaaccagctaaggaatctagtcccaaccataaaaaagagcccagtgttggacaaaatgttgaaactggacgtgttgtcgaatggttaagaaaccttgggttatccaagtatgaggaagtttttatcagagaagaagttgactgggaaaccttgcagtggctcactgaagaggacctgttgggtattgggatcagctctcttggaccaagaaagaaaattatccatgctctaggagagttactgaagaaacatgatgatcccagtgaaatggaagctgtgttaaattcaggaaatactaagaagactaaacttccgatgaatggtaataaattaattaccgaatactttcaatgttcctcatttgatcaaagacaaagaagggtatgcaaagcaaacaagccatctaatctgaacgagaagaaaatttctagtgctaaagtacccactagaagaactgctggtaaaggaaagattaaggatacgcctctttggtgttgcatcccagggaccccttttcgagtggatgcatttcgctacttgagaggtgattgttctcactggtttctcacacactttcatgtggatcattatcaaggcttgactagaagcttttgtcatgggaagatatactgttcgtcaattacagcgagtcttgtgcatcataagattggtatcccatgggatagattgcatgtattgaccctaaatgaaaagctcaatattgctggagttaatttgatatgttttgatgccaaccattgcccaggatcaatcattattctctttgagcctccaaatggtaaagctgttttgcacactggagatttccgtttttcttccaagatggccaacaatcctgttttgcagtcttcctgtgtccacactctaatacttgacacaacctattgcaatccacggtatgatttcccaagtcaagaaatcgtaatacagttcgtcattgaggccatccaagcagaagctttcaatccaaaaacattgtttttgattggaagctacacaattggaaaagaaagattgtttatggaggttgctcgtttgcttcagaagaaagtatatgttggagctgcaaagctgcaaatactgaaacatttagagcttcctcaggagattatgcactggtttacagccaatgaagcagaaagtcacatacatgttgtccccatgtggactctagcaagcttcaagcggatgaaatatctatcgaatcaatatgctggccggtatgaccttatagtggcgttttgtcctactggttgggcatttggcaaaggtaggaaaaagacaccaggcaaaaggtggcaacaaggatcaatcattagatatgaagtgccctacagtgaacacagcagtttcacggaactgcagcagtttgtcaagttcatatcaccagagcacataatccctagcgtaaacaacgacggccctgagagtgcaaacgctatgcttgcccagctgttaaacgagtagaggaattcgttcgtcgcttcaatatcttcggcttggctacagttttctcttcgaaaaccatttgatgaaagggatggacgctggacgagctaacttccaaggactaatacagtgatggcggaagcattcctgatggtgccacccagagttctgacgtggaaatccagagatacagggtgcatagatgcgcacgcagacacccgttggcgccgtggaggtgctggttgacaaatcgtcagccaagattctgtactggaatgggtaccggcgatagcgtgtattgccgaaaccatgtgaaccgtgatttgtgactgtcaagccaagcgagtgaacttgcatgtcattatgagcccatttgtacacgaacttgtccagggtttttctagtgatggtgaaaagtcctgccatgagtgtcacctttctttaaaaaaaaacgtcgatcaaactggcaaaatccgtaggagacccacttgtcagctaaccaccccttgcagtcatccgcaccagggcaccaccaccactccagatgttctagaactatcaggcggcttcctccccctaaccgcaacagttaaaacgccgtagcaactagcaacgctaccacagtgcgcgcttgaagatagttcccggtagcagccatggcgtcggtgcagctgtctgggccgcgggtggtggcggctgcgaaaccggctgcgttgggcgggctcctcctgacgccgtcccttgcggtgccaaaggggcggagggccaggggcctcgtggtgagggccgccacggtcgtgtcacctaagtatcagttcagacaagaccacaaggaggggagattgttgcggttggagaagggagaagttttggaagtaaccgcattgagatcagtgttccggtatttacttttacacagctaactgagctaagtttattttgtataagcagacatgtctgtaattctatacttgtgtatttaaagttttaaacatttacgtcaacgaactaaaagtgctattgctgctgcactgccacccatgacaaaaaggtaagaaagtagctgtatgttttctatgctgagattttttctgtatccaaaatcttcttctaggtttgaacttctaattttggaagacaattttcctcatggccttgtcaccagacaccagtaacatgtttttttccgttgtaacacacttgtactgtcctaagccaattgagtaatttgacatcgaattataatcttgtacaggttggtgcacaagttgtctactcgaaatatgcaggcacagaattgaaattcaatgacgccgaccatctcattttgaaagaagatgacataattggtattcttgacagtgatgatgtgaaggatatgaaaccactgaatgatcgcattctgattaaggttgctgaagctgaagaacgaactgctggtggtttgctattgacgcaggcaactaaggagaaaccttctgttggatcagtggtagccgttggcccagggccgttgggcgaggacggcagcaggaatcccctgtcgatcactcctggaagcaacgtgatgtattccaagtatgcggggagtgagttcaagggcgaggacggtgagtacatcgtgctcagggcgtctgacgtgatggctgttctttcctgatccccaaaccatacagcgccaggtgcgcgataggaagttttgatgttgaggccgaaccttatcttttatttgctcttgtttggaattggtggaggcttttgaactgtaatctggtgcgaattataaggaaaataagccgagttgtgtagacttgagacaggactgtgctgtgctgtttggctggtaggtgagctaaccagtgttcagctggtgggtgagctgaccagcacgtcgggttcggctgttcttcctgatgtcagcgttgtacgccaaggttggccaacggcatcaatattactaatagcatctaggctaccgtttgagtttttcatggattaatgacaacacaagatgtgactattatatacttcctctgtttttttatttgtcatgttttagttcaaaaataaacctgttttagttcaaaaatgaactagcggacgacaaatattcaagaatagaagatagtattttgcaaagataactaggcttatagttgggctttgatgttaaaaatttctgattaatt

SEQ ID NO: 26610 - DNA, 4695 bp, Zea Mays
aaaaagttcactgcctcgcattttcccactcttccgcttccacgagcagatgccggcgaatggcaagctctcggcgaagccctccccctcgccgatggttgctcccgcctcgcgccccaaatttacagctgttacctttctcggtgactgcgacgacgacgatgacttccaacctcctcgcccccgccccttgaagccttgcattggcgccgccgcacttcggttccgtaagaagctcaaggctccatcctccgggaaggagaatagttccgccgccggtggtgccgttactgtggtgggggtcgcttcgacggccgtgaaggatgccgaaaccctagccgccggctctagggttagtggcgacgttcccaaaacgaagagacgaaagaccggtgaaagttgcggcctgtcgaggtacggatctgatagcactaaactaagctgtaaaccgaagatagaattggatagatacggatatggcaaagggtgctgcagtttcttgcccagtgcgatagactcgacggttttggcgctcggtgcggtatgtgattttggagttaggcgttgtgatgaggctcaaatagctgtctccaggcattgtacctcagttcttgaggcggggcacgccacagaagagctgacaccgacaggctctgggtgtgatccacccaaaacggagaagaagccgggcagttctgaagctgtggagggacatcacgactccaggttgattgaaccgaggcttgttgaatcagatgcaaacctcgagtttgtaactgggattcttggctcactgactgataaacaggacacgaagaaagcaaacggggtggtatttggatgtggtgttggatttcagaatgggaactatcacttggattctctacagccagagcttctaacgtcgaactcaaagtatgattctagagtttgtgttagcaatgaaatccaagagcctggtttgggagcctgtaacttgatttcacaggagaggaaagtagcagctggacattctgcatgtgcaacccctgaaaatgtgactgcagagaataaatcaagtgcacctgaggcttgtaaggggcaatgccactccgattcatctgcatcaaagcttccagaatcccatatgatccatgactttgaagttgatggttgcgataattttgagattgggacccagctcagtgagctcattaacttgtgtatgaaggattccatagagggacaatcaaactttggtgcagctcccatggaacagaacactttagactctaagagactcagttcagactatgaagcgaaatgccctctatgtggatcggatatttctgatttaagcgaggagctccggcagctgcatactaacaattgccttgacgaaccagctaaggaatctagtcccaaccataaaaaagagcccagtgttggacaaaatgttgaaactggacgtgttgtcgaatggttaagaaaccttgggttatccaagtatgaggaagtttttatcagagaagaagttgactgggaaaccttgcagtggctcactgaagaggacctgttgggtattgggatcagctctcttggaccaagaaagaaaattatccatgctctaggagagttactgaagaaacatgatgatcccagtgaaatggaagctgtgttaaattcaggaaatactaagaagactaaacttccgatgaatggtaataaattaattaccgaatactttcaatgttcctcatttgatcaaagacaaagaagggtatgcaaagcaaacaagccatctaatctgaacgagaagaaaatttctagtgctaaagtacccactagaagaactgctggtaaaggaaagattaaggatacgcctctttggtgttgcatcccagggaccccttttcgagtggatgcatttcgctacttgagaggtgattgttctcactggtttctcacacactttcatgtggatcattatcaaggcttgactagaagcttttgtcatgggaagatatactgttcgtcaattacagcgagtcttgtgcatcataagattggtatcccatgggatagattgcatgtattgaccctaaatgaaaagctcaatattgctggagttaatttgatatgttttgatgccaaccattgcccaggatcaatcattattctctttgagcctccaaatggtaaagctgttttgcacactggagatttccgtttttcttccaagatggccaacaatcctgttttgcagtcttcctgtgtccacactctaatacttgacacaacctattgcaatccacggtatgatttcccaagtcaagaaatcgtaatacagttcgtcattgaggccatccaagcagaagctttcaatccaaaaacattgtttttgattggaagctacacaattggaaaagaaagattgtttatggaggttgctcgtttgcttcagaagaaagtatatgttggagctgcaaagctgcaaatactgaaacatttagagcttcctcaggagattatgcactggtttacagccaatgaagcagaaagtcacatacatgttgtccccatgtggactctagcaagcttcaagcggatgaaatatctatcgaatcaatatgctggccggtatgaccttatagtggcgttttgtcctactggttgggcatttggcaaaggtaggaaaaagacaccaggcaaaaggtggcaacaaggatcaatcattagatatgaagtgccctacagtgaacacagcagtttcacggaactgcagcagtttgtcaagttcatatcaccagagcacataatccctagcgtaaacaacgacggccctgagagtgcaaacgctatgcttgcccagctgttaaacgagtagaggaattcgttcgtcgcttcaatatcttcggcttggctacagttttctcttcgaaaaccatttgatgaaagggatggacgctggacgagctaacttccaaggactaatacagtgatggcggaagcattcctgatggtgccacccagagttctgacgtggaaatccagagatacagggtgcatagatgcgcacgcagacacccgttggcgccgtggaggtgctggttgacaaatcgtcagccaagattctgtactggaatgggtaccggcgatagcgtgtattgccgaaaccatgtgaaccgtgatttgtgactgtcaagccaagcgagtgaacttgcatgtcattatgagcccatttgtacacgaacttgtccagggtttttctagtgatggtgaaaagtcctgccatgagtgtcacctttctttaaaaaaaaacgtcgatcaaactggcaaaatccgtaggagacccacttgtcagctaaccaccccttgcagtcatccgcaccagggcaccaccaccactccagatgttctagaactatcaggcggcttcctccccctaaccgcaacagttaaaacgccgtagcaactagcaacgctaccacagtgcgcgcttgaagatagtgtcatttgcagttcccggtagcagccatggcgtcggtgcagctgtctgggccgcgggtggtggcggctgcgaaaccggctgcgttgggcgggctcctcctgacgccgtcccttgcggtgccaaaggggcggagggccaggggcctcgtggtgagggccgccacggtcgtgtcacctaagtatcagttcagacaagaccacaaggaggggagattgttgcggttggagaagggagaagttttggaagtaaccgcattgagatcagtgttccggttggtgcacaagttgtctactcgaaatatgcaggcacagaattgaaattcaatgacgccgaccatctcattttgaaagaagatgacataattggtattcttgacagtgatgatgtgaaggatatgaaaccactgaatgatcgcattctgattaaggttgctgaagctgaagaacgaactgctggtggtttgctattgacgcaggcaactaaggagaaaccttctgttggatcagtggtagccgttggcccagggccgttgggcgaggacggcagcaggaatcccctgtcgatcactcctggaagcaacgtgatgtattccaagtatgcggggagtgagttcaagggcgaggacggtgagtacatcgtgctcagggcgtctgacgtgatggctgttctttcctgatccccaaaccatacagcgccaggtgcgcgataggaagttttgatgttgaggccgaaccttatcttttatttgctcttgtttggaattggtggaggcttttgaactgtaatctggtgcgaattataaggaaaataagccgagttgtgtagacttgagacaggactgtgctgtgctgtttggctggtaggtgagctaaccagtgttcagctggtgggtgagctgaccagcacgtcgggttcggctgttcttcctgatgtcagcgttgtacgccaaggttggccaacggcatcaatattactaatagcatctaggctaccgtttgagtttttcatggattaatgacaacacaagatgtgactattatatacttcctctgtttttttatttgtcatgttttagttcaaaaataaacctgttttagttcaaaaatgaactagcggacgacaaatattcaagaatagaagatagtattttgcaaagataactaggcttatagttgggctttgatgttaaaaatttctgattaatt

SEQ ID NO: 26611 - DNA, 4877 bp, Zea Mays
aaaaaataaaaagttcactgcctcgcattttcccactcttccgcttccacgagcagatgccggcgaatggcaagctctcggcgaagccctccccctcgccgatggttgctcccgcctcgcgccccaaatttacagctgttacctttctcggtgactgcgacgacgacgatgacttccaacctcctcgcccccgccccttgaagccttgcattggcgccgccgcacttcggttccgtaagaagctcaaggctccatcctccgggaaggagaatagttccgccgccggtggtgccgttactgtggtgggggtcgcttcgacggccgtgaaggatgccgaaaccctagccgccggctctagggttagtggcgacgttcccaaaacgaagagacgaaagaccggtgaaagttgcggcctgtcgaggtacggatctgatagcactaaactaagctgtaaaccgaagatagaattggatagatacggatatggcaaagggtgctgcagtttcttgcccagtgcgatagactcgacggttttggcgctcggtgcggtatgtgattttggagttaggcgttgtgatgaggctcaaatagctgtctccaggcattgtacctcagttcttgaggcggggcacgccacagaagagctgacaccgacaggctctgggtgtgatccacccaaaacggagaagaagccgggcagttctgaagctgtggagggacatcacgactccaggttgattgaaccgaggcttgttgaatcagatgcaaacctcgagtttgtaactgggattcttggctcactgactgataaacaggacacgaagaaagcaaacggggtggtatttggatgtggtgttggatttcagaatgggaactatcacttggattctctacagccagagcttctaacgtcgaactcaaagtatgattctagagtttgtgttagcaatgaaatccaagagcctggtttgggagcctgtaacttgatttcacaggagaggaaagtagcagctggacattctgcatgtgcaacccctgaaaatgtgactgcagagaataaatcaagtgcacctgaggcttgtaaggggcaatgccactccgattcatctgcatcaaagcttccagaatcccatatgatccatgactttgaagttgatggttgcgataattttgagattgggacccagctcagtgagctcattaacttgtgtatgaaggattccatagagggacaatcaaactttggtgcagctcccatggaacagaacactttagactctaagagactcagttcagactatgaagcgaaatgccctctatgtggatcggatatttctgatttaagcgaggagctccggcagctgcatactaacaattgccttgacgaaccagctaagggcaagcatggtgtagtggtgagagctgtctcactagttccctcggtcgtgggtttgaagcagtctctccgcatttgtggaaggaaggaatctagtcccaaccataaaaaagagcccagtgttggacaaaatgttgaaactggacgtgttgtcgaatggttaagaaaccttgggttatccaagtatgaggaagtttttatcagagaagaagttgactgggaaaccttgcagtggctcactgaagaggacctgttgggtattgggatcagctctcttggaccaagaaagaaaattatccatgctctaggagagttactgaagaaacatgatgatcccagtgaaatggaagctgtgttaaattcaggaaatactaagaagactaaacttccgatgaatggtaataaattaattaccgaatactttcaatgttcctcatttgatcaaagacaaagaagggtatgcaaagcaaacaagccatctaatctgaacgagaagaaaatttctagtgctaaagtacccactagaagaactgctggtaaaggaaagattaaggatacgcctctttggtgttgcatcccagggaccccttttcgagtggatgcatttcgctacttgagaggtgattgttctcactggtttctcacacactttcatgtggatcattatcaaggcttgactagaagcttttgtcatgggaagatatactgttcgtcaattacagcgagtcttgtgcatcataagattggtatcccatgggatagattgcatgtattgaccctaaatgaaaagctcaatattgctggagttaatttgatatgttttgatgccaaccattgcccaggatcaatcattattctctttgagcctccaaatggtaaagctgttttgcacactggagatttccgtttttcttccaagatggccaacaatcctgttttgcagtcttcctgtgtccacactctaatacttgacacaacctattgcaatccacggtatgatttcccaagtcaagaaatcgtaatacagttcgtcattgaggccatccaagcagaagctttcaatccaaaaacattgtttttgattggaagctacacaattggaaaagaaagattgtttatggaggttgctcgtttgcttcagaagaaagtatatgttggagctgcaaagctgcaaatactgaaacatttagagcttcctcaggagattatgcactggtttacagccaatgaagcagaaagtcacatacatgttgtccccatgtggactctagcaagcttcaagcggatgaaatatctatcgaatcaatatgctggccggtatgaccttatagtggcgttttgtcctactggttgggcatttggcaaaggtaggaaaaagacaccaggcaaaaggtggcaacaaggatcaatcattagatatgaagtgccctacagtgaacacagcagtttcacggaactgcagcagtttgtcaagttcatatcaccagagcacataatccctagcgtaaacaacgacggccctgagagtgcaaacgctatgcttgcccagctgttaaacgagtagaggaattcgttcgtcgcttcaatatcttcggcttggctacagttttctcttcgaaaaccatttgatgaaagggatggacgctggacgagctaacttccaaggactaatacagtgatggcggaagcattcctgatggtgccacccagagttctgacgtggaaatccagagatacagggtgcatagatgcgcacgcagacacccgttggcgccgtggaggtgctggttgacaaatcgtcagccaagattctgtactggaatgggtaccggcgatagcgtgtattgccgaaaccatgtgaaccgtgatttgtgactgtcaagccaagcgagtgaacttgcatgtcattatgagcccatttgtacacgaacttgtccagggtttttctagtgatggtgaaaagtcctgccatgagtgtcacctttctttaaaaaaaaacgtcgatcaaactggcaaaatccgtaggagacccacttgtcagctaaccaccccttgcagtcatccgcaccagggcaccaccaccactccagatgttctagaactatcaggcggcttcctccccctaaccgcaacagttaaaacgccgtagcaactagcaacgctaccacagtgcgcgcttgaagatagtgtcatttgcagttcccggtagcagccatggcgtcggtgcagctgtctgggccgcgggtggtggcggctgcgaaaccggctgcgttgggcgggctcctcctgacgccgtcccttgcggtgccaaaggggcggagggccaggggcctcgtggtgagggccgccacggtcgtgtcacctaagtatacgtccataaaaccattgggagacagagtacttgtgaagatcaaaacctctgaggctaaatctgatggaggtattttacttccagtatcagttcagacaagaccacaaggaggggagattgttgcggttggagaagggagaagttttggaagtaaccgcattgagatcagtgttccggttggtgcacaagttgtctactcgaaatatgcaggcacagaattgaaattcaatgacgccgaccatctcattttgaaagaagatgacataattggtattcttgacagtgatgatgtgaaggatatgaaaccactgaatgatcgcattctgattaaggttgctgaagctgaagaacgaactgctggtggtttgctattgacgcaggcaactaaggagaaaccttctgttggatcagtggtagccgttggcccagggccgttgggcgaggacggcagcaggaatcccctgtcgatcactcctggaagcaacgtgatgtattccaagtatgcggggagtgagttcaagggcgaggacggtgagtacatcgtgctcagggcgtctgacgtgatggctgttctttcctgatccccaaaccatacagcgccaggtgcgcgataggaagttttgatgttgaggccgaaccttatcttttatttgctcttgtttggaattggtggaggcttttgaactgtaatctggtgcgaattataaggaaaataagccgagttgtgtagacttgagacaggactgtgctgtgctgtttggctggtaggtgagctaaccagtgttcagctggtgggtgagctgaccagcacgtcgggttcggctgttcttcctgatgtcagcgttgtacgccaaggttggccaacggcatcaatattactaatagcatctaggctaccgtttgagtttttcatggattaatgacaacacaagatgtgactattatatacttcctctgtttttttatttgtcatgttttagttcaaaaataaacctgttttagttcaaaaatgaactagcggacgacaaatattcaagaatagaagatagtattttgcaaagataactaggcttatagttgggctttgatgttaaaaatttctgattaatt

SEQ ID NO: 26612 - DNA, 5168 bp, Zea Mays
ctttttcaaattgccttgaccaacaaaaaataaaaagttcactgcctcgcattttcccactcttccgcttccacgagcagatgccggcgaatggcaagctctcggcgaagccctccccctcgccgatggttgctcccgcctcgcgccccaaatttacagctgttacctttctcggtgactgcgacgacgacgatgacttccaacctcctcgcccccgccccttgaagccttgcattggcgccgccgcacttcggttccgtaagaagctcaaggctccatcctccgggaaggagaatagttccgccgccggtggtgccgttactgtggtgggggtcgcttcgacggccgtgaaggatgccgaaaccctagccgccggctctagggttagtggcgacgttcccaaaacgaagagacgaaagaccggtgaaagttgcggcctgtcgaggtacggatctgatagcactaaactaagctgtaaaccgaagatagaattggatagatacggatatggcaaagggtgctgcagtttcttgcccagtgcgatagactcgacggttttggcgctcggtgcggtatgtgattttggagttaggcgttgtgatgaggctcaaatagctgtctccaggcattgtacctcagttcttgaggcggggcacgccacagaagagctgacaccgacaggctctgggtgtgatccacccaaaacggagaagaagccgggcagttctgaagctgtggagggacatcacgactccaggttgattgaaccgaggcttgttgaatcagatgcaaacctcgagtttgtaactgggattcttggctcactgactgataaacaggacacgaagaaagcaaacggggtggtatttggatgtggtgttggatttcagaatgggaactatcacttggattctctacagccagagcttctaacgtcgaactcaaagtatgattctagagtttgtgttagcaatgaaatccaagagcctggtttgggagcctgtaacttgatttcacaggagaggaaagtagcagctggacattctgcatgtgcaacccctgaaaatgtgactgcagagaataaatcaagtgcacctgaggcttgtaaggggcaatgccactccgattcatctgcatcaaagcttccagaatcccatatgatccatgactttgaagttgatggttgcgataattttgagattgggacccagctcagtgagctcattaacttgtgtatgaaggattccatagagggacaatcaaactttggtgcagctcccatggaacagaacactttagactctaagagactcagttcagactatgaagcgaaatgccctctatgtggatcggatatttctgatttaagcgaggagctccggcagctgcatactaacaattgccttgacgaaccagctaaggaatctagtcccaaccataaaaaagagcccagtgttggacaaaatgttgaaactggacgtgttgtcgaatggttaagaaaccttgggttatccaagtatgaggaagtttttatcagagaagaagttgactgggaaaccttgcagtggctcactgaagaggacctgttgggtattgggatcagctctcttggaccaagaaagaaaattatccatgctctaggagagttactgaagaaacatgatgatcccagtgaaatggaagctgtgttaaattcaggaaatactaagaagactaaacttccgatgaatggtaataaattaattaccgaatactttcaatgttcctcatttgatcaaagacaaagaagggtatgcaaagcaaacaagccatctaatctgaacgagaagaaaatttctagtgctaaagtacccactagaagaactgctggtaaaggaaagattaaggatacgcctctttggtgttgcatcccagggaccccttttcgagtggatgcatttcgctacttgagaggtgattgttctcactggtttctcacacactttcatgtggatcattatcaaggcttgactagaagcttttgtcatgggaagatatactgttcgtcaattacagcgagtcttgtgcatcataagattggtatcccatgggatagattgcatgtattgaccctaaatgaaaagctcaatattgctggagttaatttgatatgttttgatgccaaccattgcccaggatcaatcattattctctttgagcctccaaatggtaaagctgttttgcacactggagatttccgtttttcttccaagatggccaacaatcctgttttgcagtcttcctgtgtccacactctaatacttgacacaacctattgcaatccacggtatgatttcccaagtcaagaaatcgtaatacagttcgtcattgaggccatccaagcagaagctttcaatccaaaaacattgtttttgattggaagctacacaattggaaaagaaagattgtttatggaggttgctcgtttgcttcagaagaaagtatatgttggagctgcaaagctgcaaatactgaaacatttagagcttcctcaggagattatgcactggtttacagccaatgaagcagaaagtcacatacatgttgtccccatgtggactctagcaagcttcaagcggatgaaatatctatcgaatcaatatgctggccggtatgaccttatagtggcgttttgtcctactggttgggcatttggcaaaggtaggaaaaagacaccaggcaaaaggtggcaacaaggatcaatcattagatatgaagtgccctacagtgaacacagcagtttcacggaactgcagcagtttgtcaagttcatatcaccagagcacataatccctagcgtaaacaacgacggccctgagagtgcaaacgctatgcttgcccagctgttaaacgagtagaggaattcgttcgtcgcttcaatatcttcggcttggctacagttttctcttcgaaaaccatttgatgaaagggatggacgctggacgagctaacttccaaggactaatacagtgatggcggaagcattcctgatggtgccacccagagttctgacgtggaaatccagagatacagggtgcatagatgcgcacgcagacacccgttggcgccgtggaggtgctggttgacaaatcgtcagccaagattctgtactggaatgggtaccggcgatagcgtgtattgccgaaaccatgtgaaccgtgatttgtgactgtcaagccaagcgagtgaacttgcatgtcattatgagcccatttgtacacgaacttgtccagggtttttctagtgatggtgaaaagtcctgccatgagtgtcacctttctttaaaaaaaaacgtcgatcaaactggcaaaatccgtaggagacccacttgtcagctaaccaccccttgcagtcatccgcaccagggcaccaccaccactccagatgttctagaactatcaggcggcttcctccccctaaccgcaacagttaaaacgccgtagcaactagcaacgctaccacagtgcgcgcttgaagatagtgtcatttgcagttcccggtagcagccatggcgtcggtgcagctgtctgggccgcgggtggtggcggctgcgaaaccggctgcgttgggcgggctcctcctgacgccgtcccttgcggtgccaaaggggcggagggccaggggcctcgtggtgagggccgccacggtcgtgtcacctaagtatacgtccataaaaccattgggagacagagtacttgtgaagatcaaaacctctgaggctaaatctgatggaggtattttacttccagtatcagttcagacaagaccacaaggaggggagattgttgcggttggagaagggagaagttttggaagtaaccgcattgagatcagtgttccggtatttacttttacacagctaactgagctaagtttattttgtataagcagacatgtctgtaattctatacttgtgtatttaaagttttaaacatttacgtcaacgaactaaaagtgctattgctgctgcactgccacccatgacaaaaaggtaagaaagtagctgtatgttttctatgctgagattttttctgtatccaaaatcttcttctaggtttgaacttctaattttggaagacaattttcctcatggccttgtcaccagacaccagtaacatgtttttttccgttgtaacacacttgtactgtcctaagccaattgagtaatttgacatcgaattataatcttgtacaggttggtgcacaagttgtctactcgaaatatgcaggcacagaattgaaattcaatgacgccgaccatctcattttgaaagaagatgacataattggtattcttgacagtgatgatgtgaaggatatgaaaccactgaatgatcgcattctgattaaggttgctgaagctgaagaacgaactgctggtggtttgctattgacgcaggcaactaaggagaaaccttctgttggatcagtggtagccgttggcccagggccgttgggcgaggacggcagcaggaatcccctgtcgatcactcctggaagcaacgtgatgtattccaagtatgcggggagtgagttcaagggcgaggacggtgagtacatcgtgctcagggcgtctgacgtgatggctgttctttcctgatccccaaaccatacagcgccaggtgcgcgataggaagttttgatgttgaggccgaaccttatcttttatttgctcttgtttggaattggtggaggcttttgaactgtaatctggtgcgaattataaggaaaataagccgagttgtgtagacttgagacaggactgtgctgtgctgtttggctggtaggtgagctaaccagtgttcagctggtgggtgagctgaccagcacgtcgggttcggctgttcttcctgatgtcagcgttgtacgccaaggttggccaacggcatcaatattactaatagcatctaggctaccgtttgagtttttcatggattaatgacaacacaagatgtgactattatatacttcctctgtttttttatttgtcatgttttagttcaaaaataaacctgttttagttcaaaaatgaactagcggacgacaaatattcaagaatagaagatagtattttgcaaagataactaggcttatagttgggctttgatgttaaaaatttctgattaatt

SEQ ID NO: 26613 - DNA, 4815 bp, Zea Mays
cctttttcaaattgccttgaccaacaaaaaataaaaagttcactgcctcgcattttcccactcttccgcttccacgagcagatgccggcgaatggcaagctctcggcgaagccctccccctcgccgatggttgctcccgcctcgcgccccaaatttacagctgttacctttctcggtgactgcgacgacgacgatgacttccaacctcctcgcccccgccccttgaagccttgcattggcgccgccgcacttcggttccgtaagaagctcaaggctccatcctccgggaaggagaatagttccgccgccggtggtgccgttactgtggtgggggtcgcttcgacggccgtgaaggatgccgaaaccctagccgccggctctagggttagtggcgacgttcccaaaacgaagagacgaaagaccggtgaaagttgcggcctgtcgaggtacggatctgatagcactaaactaagctgtaaaccgaagatagaattggatagatacggatatggcaaagggtgctgcagtttcttgcccagtgcgatagactcgacggttttggcgctcggtgcggtatgtgattttggagttaggcgttgtgatgaggctcaaatagctgtctccaggcattgtacctcagttcttgaggcggggcacgccacagaagagctgacaccgacaggctctgggtgtgatccacccaaaacggagaagaagccgggcagttctgaagctgtggagggacatcacgactccaggttgattgaaccgaggcttgttgaatcagatgcaaacctcgagtttgtaactgggattcttggctcactgactgataaacaggacacgaagaaagcaaacggggtggtatttggatgtggtgttggatttcagaatgggaactatcacttggattctctacagccagagcttctaacgtcgaactcaaagtatgattctagagtttgtgttagcaatgaaatccaagagcctggtttgggagcctgtaacttgatttcacaggagaggaaagtagcagctggacattctgcatgtgcaacccctgaaaatgtgactgcagagaataaatcaagtgcacctgaggcttgtaaggggcaatgccactccgattcatctgcatcaaagcttccagaatcccatatgatccatgactttgaagttgatggttgcgataattttgagattgggacccagctcagtgagctcattaacttgtgtatgaaggattccatagagggacaatcaaactttggtgcagctcccatggaacagaacactttagactctaagagactcagttcagactatgaagcgaaatgccctctatgtggatcggatatttctgatttaagcgaggagctccggcagctgcatactaacaattgccttgacgaaccagctaaggaatctagtcccaaccataaaaaagagcccagtgttggacaaaatgttgaaactggacgtgttgtcgaatggttaagaaaccttgggttatccaagtatgaggaagtttttatcagagaagaagttgactgggaaaccttgcagtggctcactgaagaggacctgttgggtattgggatcagctctcttggaccaagaaagaaaattatccatgctctaggagagttactgaagaaacatgatgatcccagtgaaatggaagctgtgttaaattcaggaaatactaagaagactaaacttccgatgaatggtaataaattaattaccgaatactttcaatgttcctcatttgatcaaagacaaagaagggtatgcaaagcaaacaagccatctaatctgaacgagaagaaaatttctagtgctaaagtacccactagaagaactgctggtaaaggaaagattaaggatacgcctctttggtgttgcatcccagggaccccttttcgagtggatgcatttcgctacttgagaggtgattgttctcactggtttctcacacactttcatgtggatcattatcaaggcttgactagaagcttttgtcatgggaagatatactgttcgtcaattacagcgagtcttgtgcatcataagattggtatcccatgggatagattgcatgtattgaccctaaatgaaaagctcaatattgctggagttaatttgatatgttttgatgccaaccattgcccaggatcaatcattattctctttgagcctccaaatggtaaagctgttttgcacactggagatttccgtttttcttccaagatggccaacaatcctgttttgcagtcttcctgtgtccacactctaatacttgacacaacctattgcaatccacggtatgatttcccaagtcaagaaatcgtaatacagttcgtcattgaggccatccaagcagaagctttcaatccaaaaacattgtttttgattggaagctacacaattggaaaagaaagattgtttatggaggttgctcgtttgcttcagaagaaagtatatgttggagctgcaaagctgcaaatactgaaacatttagagcttcctcaggagattatgcactggtttacagccaatgaagcagaaagtcacatacatgttgtccccatgtggactctagcaagcttcaagcggatgaaatatctatcgaatcaatatgctggccggtatgaccttatagtggcgttttgtcctactggttgggcatttggcaaaggtaggaaaaagacaccaggcaaaaggtggcaacaaggatcaatcattagatatgaagtgccctacagtgaacacagcagtttcacggaactgcagcagtttgtcaagttcatatcaccagagcacataatccctagcgtaaacaacgacggccctgagagtgcaaacgctatgcttgcccagctgttaaacgagtagaggaattcgttcgtcgcttcaatatcttcggcttggctacagttttctcttcgaaaaccatttgatgaaagggatggacgctggacgagctaacttccaaggactaatacagtgatggcggaagcattcctgatggtgccacccagagttctgacgtggaaatccagagatacagggtgcatagatgcgcacgcagacacccgttggcgccgtggaggtgctggttgacaaatcgtcagccaagattctgtactggaatgggtaccggcgatagcgtgtattgccgaaaccatgtgaaccgtgatttgtgactgtcaagccaagcgagtgaacttgcatgtcattatgagcccatttgtacacgaacttgtccagggtttttctagtgatggtgaaaagtcctgccatgagtgtcacctttctttaaaaaaaaacgtcgatcaaactggcaaaatccgtaggagacccacttgtcagctaaccaccccttgcagtcatccgcaccagggcaccaccaccactccagatgttctagaactatcaggcggcttcctccccctaaccgcaacagttaaaacgccgtagcaactagcaacgctaccacagtgcgcgcttgaagatagtgtcatttgcagttcccggtagcagccatggcgtcggtgcagctgtctgggccgcgggtggtggcggctgcgaaaccggctgcgttgggcgggctcctcctgacgccgtcccttgcggtgccaaaggggcggagggccaggggcctcgtggtgagggccgccacggtcgtgtcacctaagtatacgtccataaaaccattgggagacagagtacttgtgaagatcaaaacctctgaggctaaatctgatggaggtattttacttccagtatcagttcagacaagaccacaaggaggggagattgttgcggttggagaagggagaagttttggaagtaaccgcattgagatcagtgttccggttggtgcacaagttgtctactcgaaatatgcaggcacagaattgaaattcaatgacgccgaccatctcattttgaaagaagatgacataattggtattcttgacagtgatgatgtgaaggatatgaaaccactgaatgatcgcattctgattaaggttgctgaagctgaagaacgaactgctggtggtttgctattgacgcaggcaactaaggagaaaccttctgttggatcagtggtagccgttggcccagggccgttgggcgaggacggcagcaggaatcccctgtcgatcactcctggaagcaacgtgatgtattccaagtatgcggggagtgagttcaagggcgaggacggtgagtacatcgtgctcagggcgtctgacgtgatggctgttctttcctgatccccaaaccatacagcgccaggtgcgcgataggaagttttgatgttgaggccgaaccttatcttttatttgctcttgtttggaattggtggaggcttttgaactgtaatctggtgcgaattataaggaaaataagccgagttgtgtagacttgagacaggactgtgctgtgctgtttggctggtaggtgagctaaccagtgttcagctggtgggtgagctgaccagcacgtcgggttcggctgttcttcctgatgtcagcgttgtacgccaaggttggccaacggcatcaatattactaatagcatctaggctaccgtttgagtttttcatggattaatgacaacacaagatgtgactattatatacttcctctgtttttttatttgtcatgttttagttcaaaaataaacctgttttagttcaaaaatgaactagcggacgacaaatattcaagaatagaagatagtattttgcaaagataactaggcttatagttgggctttgatgttaaaaatttctgattaatt

SEQ ID NO: 26614 - DNA, 2254 bp, Zea Mays
aaacaccatagaagggaagttttgctgttttcttcatgcaaatatcaatttggaacccaggcttttgctgaccatttccaaaaatgctgcaagctatcaatttcttgaatttttacgtgcaagctcattactcttcagtttgacaagattacttttaggcgatcagaggatactaataattctgtaaaggagactagttcagctaaggttcaggtactcatttttgagatagaagatcgtgaaatgattggtggatcagcatatggaggtcagaaagctatttgttgtacttcagatcttgcgaagttaggagcttgcacagaaggttctgtcatctaccgcccatcccaggtaaatcctggttggccaaagttgtttgtagcatcttttgatggaagtgacctgatcgcgacactaccgtcaaggaccattccaattaccaaaactgggatatacaatatgtactttatacactgtgatccatcacttgctagtttggaaatcgaggggaaaaccatatggaaaaatcctactggataccttccgggtcggatggcacctcttaagaacttttttggactgatgtcttttgcatttgtcgtacttgggatctattggttttatcagtatatgaagtcctggagagaggttcttccacttcagaactgtattactcttgtgattacactgggcatgtttgagatggcattgtggtattttgagtatgctgaatttaatgagactggagtacggccaaaaggcatcacattttgggctgtcacgtttgggactgtcaagaggacggctgctgaagttattgttctcattgtctcaatgggatatggtgttgtcacgcctactttgggtggcttgacatcaaaagtggtcatgcttggaggaacattctttctagcaacagaaattcttgaattggtagaaaatcttggtgctgttaatgatctatctggaaaagctcgtctgttcttggtctatccagtggccattttagatgctgcatttgttatttggatatttatttctctagctaagaccattggtaaacttcaggtgggcaaaacgtcttctttgtatccttattagttcccttgcagtatcagtattactacactatatcctttgtgcttgcattaaactttttccccaggcactgatttatgtgatacaaacactatcatttcctaatctttggcatgaatggtaggcaagaaggttgatggccaaacttgacatttataggaaatttgcaactgcattgatcatatctgttctggtgtctgttgggtggattggctatgagtgtttgaagctggagaccaggagtgttactttaaactgcacctttctactttcaagaacctgtccattttgtattgtttggattcatttgtttgcaccttacttgtttatgcatatgtttcattatttcagaagtcattgatatccctgcaatttctttcttgcagatttactccaaatcaacagatgtatttaatgaacgatggcagcatgcctggattattcctgccttctggcatgtcttgtctttcttacttctttgtgtcatttgctacctgtgggcaccttcacaaaactcaatgagattttcttatgatgcaagtgaattctttgatcgaaaggataatatctcattaattaggccagcacccagtgcatccaagaatggatggaatttatcttctacaccagagcccaaagctacaaaggatgtgaataccgtagcagattttgaaggtgatgatgaggaaaacaaaagggagtagaatgtactgtcgatttgattacggagggtatatttgagatcctttgaagtgtgtgctagagcaattttggtatttaggagaggattggccatgctagttattattaatggagcactccgctcgatgttatttcttcgattcgttaccactacagtagttcttcacatggcgagttatgctgttatcttcatagtcttaatgatggtatatgatagaaacaattagtctggtgtataatatttataataatggcaccatattgcttctggttcctgtgaactcgacatatgttatgaatgtcagagaataaattacgatagaaacaattagtctgatgtataatatttgtattactggcaccatattgcttctggttcctgtgaactctacatatgctatgaatgtcagagaataaattgttttgctggatctttgttagaatttcacttgat

SEQ ID NO: 26615 - DNA, 1817 bp, Zea Mays
tcttgcattctcgcgtcaaggtttgacaagattacttttaggcgatcagaggatactaataattctgtaaaggagactagttcagctaaggttcaggtactcatttttgagatagaagatcgtgaaatgattggtggatcagcatatggaggtcagaaagctatttgttgtacttcagatcttgcgaagttaggagcttgcacagaaggttctgtcatctaccgcccatcccaggtaaatcctggttggccaaagttgtttgtagcatcttttgatggaagtgacctgatcgcgacactaccgtcaaggaccattccaattaccaaaactgggatatacaatatgtactttatacactgtgatccatcacttgctagtttggaaatcgaggggaaaaccatatggaaaaatcctactggataccttccgggtcggatggcacctcttaagaacttttttggactgatgtcttttgcatttgtcgtacttgggatctattggttttatcagtatatgaagtcctggagagaggttcttccacttcagaactgtattactcttgtgattacactgggcatgtttgagatggcattgtggtattttgagtatgctgaatttaatgagactggagtacggccaaaaggcatcacattttgggctgtcacgtttgggactgtcaagaggacggctgctgaagttattgttctcattgtctcaatgggatatggtgttgtcacgcctactttgggtggcttgacatcaaaagtggtcatgcttggaggaacattctttctagcaacagaaattcttgaattggtagaaaatcttggtgctgttaatgatctatctggaaaagctcgtctgttcttggtctatccagtggccattttagatgctgcatttgttatttggatatttatttctctagctaagaccattggtaaacttcaggcaagaaggttgatggccaaacttgacatttataggaaatttgcaactgcattgatcatatctgttctggtgtctgttgggtggattggctatgagatttactccaaatcaacagatgtatttaatgaacgatggcagcatgcctggattattcctgccttctggcatgtcttgtctttcttacttctttgtgtcatttgctacctgtgggcaccttcacaaaactcaatgagattttcttatgatgcaagtgaattctttgatcgaaaggataatatctcattaattaggccagcacccagtgcatccaagaatggatggaatttatcttctacaccagagcccaaagctacaaaggatgtgaataccgtagcagattttgaaggtgatgatgaggaaaacaaaagggagtagaatgtactgtcgatttgattacggagggtatatttgagatcctttgaagtgtgtgctagagcaattttggtatttaggagaggattggccatgctagttattattaatggagcactccgctcgatgttatttcttcgattcgttaccactacagtagttcttcacatggcgagttatgctgttatcttcatagtcttaatgatggtatatgatagaaacaattagtctggtgtataatatttataataatggcaccatattgcttctggttcctgtgaactcgacatatgttatgaatgtcagagaataaattacgatagaaacaattagtctgatgtataatatttgtattactggcaccatattgcttctggttcctgtgaactctacatatgctatgaatgtcagagaataaattgttttgctggatctttgttagaatttcacttgat

SEQ ID NO: 26616 - DNA, 1814 bp, Zea Mays
agccgttccggttcgctatcaggtttgacaagattacttttaggcgatcagaggatactaataattctgtaaaggagactagttcagctaaggttcaggtactcatttttgagatagaagatcgtgaaatgattggtggatcagcatatggaggtcagaaagctatttgttgtacttcagatcttgcgaagttaggagcttgcacagaaggttctgtcatctaccgcccatcccaggtaaatcctggttggccaaagttgtttgtagcatcttttgatggaagtgacctgatcgcgacactaccgtcaaggaccattccaattaccaaaactgggatatacaatatgtactttatacactgtgatccatcacttgctagtttggaaatcgaggggaaaaccatatggaaaaatcctactggataccttccgggtcggatggcacctcttaagaacttttttggactgatgtcttttgcatttgtcgtacttgggatctattggttttatcagtatatgaagtcctggagagaggttcttccacttcagaactgtattactcttgtgattacactgggcatgtttgagatggcattgtggtattttgagtatgctgaatttaatgagactggagtacggccaaaaggcatcacattttgggctgtcacgtttgggactgtcaagaggacggctgctgaagttattgttctcattgtctcaatgggatatggtgttgtcacgcctactttgggtggcttgacatcaaaagtggtcatgcttggaggaacattctttctagcaacagaaattcttgaattggtagaaaatcttggtgctgttaatgatctatctggaaaagctcgtctgttcttggtctatccagtggccattttagatgctgcatttgttatttggatatttatttctctagctaagaccattggtaaacttcagaaggttgatggccaaacttgacatttataggaaatttgcaactgcattgatcatatctgttctggtgtctgttgggtggattggctatgagatttactccaaatcaacagatgtatttaatgaacgatggcagcatgcctggattattcctgccttctggcatgtcttgtctttcttacttctttgtgtcatttgctacctgtgggcaccttcacaaaactcaatgagattttcttatgatgcaagtgaattctttgatcgaaaggataatatctcattaattaggccagcacccagtgcatccaagaatggatggaatttatcttctacaccagagcccaaagctacaaaggatgtgaataccgtagcagattttgaaggtgatgatgaggaaaacaaaagggagtagaatgtactgtcgatttgattacggagggtatatttgagatcctttgaagtgtgtgctagagcaattttggtatttaggagaggattggccatgctagttattattaatggagcactccgctcgatgttatttcttcgattcgttaccactacagtagttcttcacatggcgagttatgctgttatcttcatagtcttaatgatggtatatgatagaaacaattagtctggtgtataatatttataataatggcaccatattgcttctggttcctgtgaactcgacatatgttatgaatgtcagagaataaattacgatagaaacaattagtctgatgtataatatttgtattactggcaccatattgcttctggttcctgtgaactctacatatgctatgaatgtcagagaataaattgttttgctggatctttgttagaatttcacttgat

SEQ ID NO: 26617 - DNA, 2243 bp, Zea Mays
ctagccagtagccgttccggttcgctatcaggtttgacaagattacttttaggcgatcagaggatactaataattctgtaaaggagactagttcagctaaggttcaggtactcatttttgagatagaagatcgtgaaatgattggtggatcagcatatggaggtcagaaagctatttgttgtacttcagatcttgcgaagttaggagcttgcacagaaggttctgtcatctaccgcccatcccaggtaaatcctggttggccaaagttgtttgtagcatcttttgatggaagtgacctgatcgcgacactaccgtcaaggaccattccaattaccaaaactgggatatacaatatgtactttatacactgtgatccatcacttgctagtttggaaatcgaggggaaaaccatatggaaaaatcctactggataccttccgggtcggatggcacctcttaagaacttttttggactgatgtcttttgcatttgtcgtacttgggatctattggttttatcagtatatgaagtcctggagagaggttcttccacttcagaactgtattactcttgtgattacactgggcatgtttgagatggcattgtggtattttgagtatgctgaatttaatgagactggagtacggccaaaaggcatcacattttgggctgtcacgtttgggactgtcaagaggacggctgctgaagttattgttctcattgtctcaatgggatatggtgttgtcacgcctactttgggtggcttgacatcaaaagtggtcatgcttggaggaacattctttctagcaacagaaattcttgaattggtagaaaatcttggtgctgttaatgatctatctggaaaagctcgtctgttcttggtctatccagtggccattttagatgctgcatttgttatttggatatttatttctctagctaagaccattggtaaacttcaggtgggcaaaacgtcttctttgtatccttattagttcccttgcagtatcagtattactacactatatcctttgtgcttgcattaaactttttccccaggcactgatttatgtgatacaaacactatcatttcctaatctttggcatgaatggtaggcaagaaggttgatggccaaacttgacatttataggaaatttgcaactgcattgatcatatctgttctggtgtctgttgggtggattggctatgaggtatgcttatttatgtcaaagccgtattctaactccagaattatcaagggaatattgttgcattgcctcacaaaattagattggtttctcggcagtgtttgaagctggagaccaggagtgttactttaaactgcacctttctactttcaagaacctgtccattttgtattgtttggattcatttgtttgcaccttacttgtttatgcatatgtttcattatttcagaagtcattgatatccctgcaatttctttcttgcagatttactccaaatcaacagatgtatttaatgaacgatggcagcatgcctggattattcctgccttctggcatgtcttgtctttcttacttctttgtgtcatttgctacctgtgggcaccttcacaaaactcaatgagattttcttatgatgcaagtgaattctttgatcgaaaggataatatctcattaattaggccagcacccagtgcatccaagaatggatggaatttatcttctacaccagagcccaaagctacaaaggatgtgaataccgtagcagattttgaaggtgatgatgaggaaaacaaaagggagtagaatgtactgtcgatttgattacggagggtatatttgagatcctttgaagtgtgtgctagagcaattttggtatttaggagaggattggccatgctagttattattaatggagcactccgctcgatgttatttcttcgattcgttaccactacagtagttcttcacatggcgagttatgctgttatcttcatagtcttaatgatggtatatgatagaaacaattagtctggtgtataatatttataataatggcaccatattgcttctggttcctgtgaactcgacatatgttatgaatgtcagagaataaattacgatagaaacaattagtctgatgtataatatttgtattactggcaccatattgcttctggttcctgtgaactctacatatgctatgaatgtcagagaataaattgttttgctggatctttgttagaatttcacttgat

SEQ ID NO: 26618 - DNA, 2414 bp, Zea Mays
gtttttagtgctggtttgacaattgtcattgatcctcgaactttgaacaccaaagaagaattgctgccttgctggtctgggaagcactttctttcactccttccctccccatttcctactgacggccgagggggggcacattctttggcttttgtcccggttttgccctccggctcctgccgagctcagcagggggaggcgctgcgcttcgcttcacgccagatccaacctcaccggccaccagcttgcctccatggccggtcgcttcctcctcgtcgttgccgtcgccctcctcctccgccctggggatgcgtccgtgcacgagtaccgcgggctcagcttcgccaacaagggcaacgccttcatcctccacgccggcagcgagggcctctacgcggcctcccacgccaacaccaccgccgaggacgccgccgcagtggccgaagccttaatccggtttgacaagattacttttaggcgatcagaggatactaataattctgtaaaggagactagttcagctaaggttcaggtactcatttttgagatagaagatcgtgaaatgattggtggatcagcatatggaggtcagaaagctatttgttgtacttcagatcttgcgaagttaggagcttgcacagaaggttctgtcatctaccgcccatcccaggtaaatcctggttggccaaagttgtttgtagcatcttttgatggaagtgacctgatcgcgacactaccgtcaaggaccattccaattaccaaaactgggatatacaatatgtactttatacactgtgatccatcacttgctagtttggaaatcgaggggaaaaccatatggaaaaatcctactggataccttccgggtcggatggcacctcttaagaacttttttggactgatgtcttttgcatttgtcgtacttgggatctattggttttatcagtatatgaagtcctggagagaggttcttccacttcagaactgtattactcttgtgattacactgggcatgtttgagatggcattgtggtattttgagtatgctgaatttaatgagactggagtacggccaaaaggcatcacattttgggctgtcacgtttgggactgtcaagaggacggctgctgaagttattgttctcattgtctcaatgggatatggtgttgtcacgcctactttgggtggcttgacatcaaaagtggtcatgcttggaggaacattctttctagcaacagaaattcttgaattggtagaaaatcttggtgctgttaatgatctatctggaaaagctcgtctgttcttggtctatccagtggccattttagatgctgcatttgttatttggatatttatttctctagctaagaccattggtaaacttcagaaggttgatggccaaacttgacatttataggaaatttgcaactgcattgatcatatctgttctggtgtctgttgggtggattggctatgagtgtttgaagctggagaccaggagtgttactttaaactgcacctttctactttcaagaacctgtccattttgtattgtttggattcatttgtttgcaccttacttgtttatgcatatgtttcattatttcagaagtcattgatatccctgcaatttctttcttgcagatttactccaaatcaacagatgtatttaatgaacgatggcagcatgcctggattattcctgccttctggcatgtcttgtctttcttacttctttgtgtcatttgctacctgtgggcaccttcacaaaactcaatgagattttcttatgatgcaagtgaattctttgatcgaaaggataatatctcattaattaggccagcacccagtgcatccaagaatggatggaatttatcttctacaccagagcccaaagctacaaaggatgtgaataccgtagcagattttgaaggtgatgatgaggaaaacaaaagggagtagaatgtactgtcgatttgattacggagggtatatttgagatcctttgaagtgtgtgctagagcaattttggtatttaggagaggattggccatgctagttattattaatggagcactccgctcgatgttatttcttcgattcgttaccactacagtagttcttcacatggcgagttatgctgttatcttcatagtcttaatgatggtatatgatagaaacaattagtctggtgtataatatttataataatggcaccatattgcttctggttcctgtgaactcgacatatgttatgaatgtcagagaataaattacgatagaaacaattagtctgatgtataatatttgtattactggcaccatattgcttctggttcctgtgaactctacatatgctatgaatgtcagagaataaattgttttgctggatctttgttagaatttcacttgat

SEQ ID NO: 26619 - DNA, 2571 bp, Zea Mays
gtttttagtgctggtttgacaattgtcattgatcctcgaactttgaacaccaaagaagaattgctgccttgctggtctgggaagcactttctttcactccttccctccccatttcctactgacggccgagggggggcacattctttggcttttgtcccggttttgccctccggctcctgccgagctcagcagggggaggcgctgcgcttcgcttcacgccagatccaacctcaccggccaccagcttgcctccatggccggtcgcttcctcctcgtcgttgccgtcgccctcctcctccgccctggggatgcgtccgtgcacgagtaccgcgggctcagcttcgccaacaagggcaacgccttcatcctccacgccggcagcgagggcctctacgcggcctcccacgccaacaccaccgccgaggacgccgccgcagtggccgaagccttaatccggtttgacaagattacttttaggcgatcagaggatactaataattctgtaaaggagactagttcagctaaggttcaggtactcatttttgagatagaagatcgtgaaatgattggtggatcagcatatggaggtcagaaagctatttgttgtacttcagatcttgcgaagttaggagcttgcacagaaggttctgtcatctaccgcccatcccaggtaaatcctggttggccaaagttgtttgtagcatcttttgatggaagtgacctgatcgcgacactaccgtcaaggaccattccaattaccaaaactgggatatacaatatgtactttatacactgtgatccatcacttgctagtttggaaatcgaggggaaaaccatatggaaaaatcctactggataccttccgggtcggatggcacctcttaagaacttttttggactgatgtcttttgcatttgtcgtacttgggatctattggttttatcagtatatgaagtcctggagagaggttcttccacttcagaactgtattactcttgtgattacactgggcatgtttgagatggcattgtggtattttgagtatgctgaatttaatgagactggagtacggccaaaaggcatcacattttgggctgtcacgtttgggactgtcaagaggacggctgctgaagttattgttctcattgtctcaatgggatatggtgttgtcacgcctactttgggtggcttgacatcaaaagtggtcatgcttggaggaacattctttctagcaacagaaattcttgaattggtagaaaatcttggtgctgttaatgatctatctggaaaagctcgtctgttcttggtctatccagtggccattttagatgctgcatttgttatttggatatttatttctctagctaagaccattggtaaacttcaggcactgatttatgtgatacaaacactatcatttcctaatctttggcatgaatggtaggcaagaaggttgatggccaaacttgacatttataggaaatttgcaactgcattgatcatatctgttctggtgtctgttgggtggattggctatgaggtatgcttatttatgtcaaagccgtattctaactccagaattatcaagggaatattgttgcattgcctcacaaaattagattggtttctcggcagtgtttgaagctggagaccaggagtgttactttaaactgcacctttctactttcaagaacctgtccattttgtattgtttggattcatttgtttgcaccttacttgtttatgcatatgtttcattatttcagaagtcattgatatccctgcaatttctttcttgcagatttactccaaatcaacagatgtatttaatgaacgatggcagcatgcctggattattcctgccttctggcatgtcttgtctttcttacttctttgtgtcatttgctacctgtgggcaccttcacaaaactcaatgagattttcttatgatgcaagtgaattctttgatcgaaaggataatatctcattaattaggccagcacccagtgcatccaagaatggatggaatttatcttctacaccagagcccaaagctacaaaggatgtgaataccgtagcagattttgaaggtgatgatgaggaaaacaaaagggagtagaatgtactgtcgatttgattacggagggtatatttgagatcctttgaagtgtgtgctagagcaattttggtatttaggagaggattggccatgctagttattattaatggagcactccgctcgatgttatttcttcgattcgttaccactacagtagttcttcacatggcgagttatgctgttatcttcatagtcttaatgatggtatatgatagaaacaattagtctggtgtataatatttataataatggcaccatattgcttctggttcctgtgaactcgacatatgttatgaatgtcagagaataaattacgatagaaacaattagtctgatgtataatatttgtattactggcaccatattgcttctggttcctgtgaactctacatatgctatgaatgtcagagaataaattgttttgctggatctttgttagaatttcacttgat

SEQ ID NO: 26620 - DNA, 2396 bp, Zea Mays
gtttttagtgctggtttgacaattgtcattgatcctcgaactttgaacaccaaagaagaattgctgccttgctggtctgggaagcactttctttcactccttccctccccatttcctactgacggccgagggggggcacattctttggcttttgtcccggttttgccctccggctcctgccgagctcagcagggggaggcgctgcgcttcgcttcacgccagatccaacctcaccggccaccagcttgcctccatggccggtcgcttcctcctcgtcgttgccgtcgccctcctcctccgccctggggatgcgtccgtgcacgagtaccgcgggctcagcttcgccaacaagggcaacgccttcatcctccacgccggcagcgagggcctctacgcggcctcccacgccaacaccaccgccgaggacgccgccgcagtggccgaagccttaatccgatgcatctcataaacaccatagaagggaagttttgctgttttcttcatgcaaatatcaatttggaacccaggcttttgctgaccatttccaaaaatgctgcaagctatcaatttcttgaatttttacgtgcaagctcattactcttcagtttgacaagattacttttaggcgatcagaggatactaataattctgtaaaggagactagttcagctaaggttcaggtactcatttttgagatagaagatcgtgaaatgattggtggatcagcatatggaggtcagaaagctatttgttgtacttcagatcttgcgaagttaggagcttgcacagaaggttctgtcatctaccgcccatcccaggtaaatcctggttggccaaagttgtttgtagcatcttttgatggaagtgacctgatcgcgacactaccgtcaaggaccattccaattaccaaaactgggatatacaatatgtactttatacactgtgatccatcacttgctagtttggaaatcgaggggaaaaccatatggaaaaatcctactggataccttccgggtcggatggcacctcttaagaacttttttggactgatgtcttttgcatttgtcgtacttgggatctattggttttatcagtatatgaagtcctggagagaggttcttccacttcagaactgtattactcttgtgattacactgggcatgtttgagatggcattgtggtattttgagtatgctgaatttaatgagactggagtacggccaaaaggcatcacattttgggctgtcacgtttgggactgtcaagaggacggctgctgaagttattgttctcattgtctcaatgggatatggtgttgtcacgcctactttgggtggcttgacatcaaaagtggtcatgcttggaggaacattctttctagcaacagaaattcttgaattggtagaaaatcttggtgctgttaatgatctatctggaaaagctcgtctgttcttggtctatccagtggccattttagatgctgcatttgttatttggatatttatttctctagctaagaccattggtaaacttcagaaggttgatggccaaacttgacatttataggaaatttgcaactgcattgatcatatctgttctggtgtctgttgggtggattggctatgagatttactccaaatcaacagatgtatttaatgaacgatggcagcatgcctggattattcctgccttctggcatgtcttgtctttcttacttctttgtgtcatttgctacctgtgggcaccttcacaaaactcaatgagattttcttatgatgcaagtgaattctttgatcgaaaggataatatctcattaattaggccagcacccagtgcatccaagaatggatggaatttatcttctacaccagagcccaaagctacaaaggatgtgaataccgtagcagattttgaaggtgatgatgaggaaaacaaaagggagtagaatgtactgtcgatttgattacggagggtatatttgagatcctttgaagtgtgtgctagagcaattttggtatttaggagaggattggccatgctagttattattaatggagcactccgctcgatgttatttcttcgattcgttaccactacagtagttcttcacatggcgagttatgctgttatcttcatagtcttaatgatggtatatgatagaaacaattagtctggtgtataatatttataataatggcaccatattgcttctggttcctgtgaactcgacatatgttatgaatgtcagagaataaattacgatagaaacaattagtctgatgtataatatttgtattactggcaccatattgcttctggttcctgtgaactctacatatgctatgaatgtcagagaataaattgttttgctggatctttgttagaatttcacttgat

SEQ ID NO: 26621 - DNA, 2419 bp, Zea Mays
gtttttagtgctggtttgacaattgtcattgatcctcgaactttgaacaccaaagaagaattgctgccttgctggtctgggaagcactttctttcactccttccctccccatttcctactgacggccgagggggggcacattctttggcttttgtcccggttttgccctccggctcctgccgagctcagcagggggaggcgctgcgcttcgcttcacgccagatccaacctcaccggccaccagcttgcctccatggccggtcgcttcctcctcgtcgttgccgtcgccctcctcctccgccctggggatgcgtccgtgcacgagtaccgcgggctcagcttcgccaacaagggcaacgccttcatcctccacgccggcagcgagggcctctacgcggcctcccacgccaacaccaccgccgaggacgccgccgcagtggccgaagccttaatccggtttgacaagattacttttaggcgatcagaggatactaataattctgtaaaggagactagttcagctaaggttcaggtactcatttttgagatagaagatcgtgaaatgattggtggatcagcatatggaggtcagaaagctatttgttgtacttcagatcttgcgaagttaggagcttgcacagaaggttctgtcatctaccgcccatcccaggtaaatcctggttggccaaagttgtttgtagcatcttttgatggaagtgacctgatcgcgacactaccgtcaaggaccattccaattaccaaaactgggatatacaatatgtactttatacactgtgatccatcacttgctagtttggaaatcgaggggaaaaccatatggaaaaatcctactggataccttccgggtcggatggcacctcttaagaacttttttggactgatgtcttttgcatttgtcgtacttgggatctattggttttatcagtatatgaagtcctggagagaggttcttccacttcagaactgtattactcttgtgattacactgggcatgtttgagatggcattgtggtattttgagtatgctgaatttaatgagactggagtacggccaaaaggcatcacattttgggctgtcacgtttgggactgtcaagaggacggctgctgaagttattgttctcattgtctcaatgggatatggtgttgtcacgcctactttgggtggcttgacatcaaaagtggtcatgcttggaggaacattctttctagcaacagaaattcttgaattggtagaaaatcttggtgctgttaatgatctatctggaaaagctcgtctgttcttggtctatccagtggccattttagatgctgcatttgttatttggatatttatttctctagctaagaccattggtaaacttcaggcaagaaggttgatggccaaacttgacatttataggaaatttgcaactgcattgatcatatctgttctggtgtctgttgggtggattggctatgagtgtttgaagctggagaccaggagtgttactttaaactgcacctttctactttcaagaacctgtccattttgtattgtttggattcatttgtttgcaccttacttgtttatgcatatgtttcattatttcagaagtcattgatatccctgcaatttctttcttgcagatttactccaaatcaacagatgtatttaatgaacgatggcagcatgcctggattattcctgccttctggcatgtcttgtctttcttacttctttgtgtcatttgctacctgtgggcaccttcacaaaactcaatgagattttcttatgatgcaagtgaattctttgatcgaaaggataatatctcattaattaggccagcacccagtgcatccaagaatggatggaatttatcttctacaccagagcccaaagctacaaaggatgtgaataccgtagcagattttgaaggtgatgatgaggaaaacaaaagggagtagaatgtactgtcgatttgattacggagggtatatttgagatcctttgaagtgtgtgctagagcaattttggtatttaggagaggattggccatgctagttattattaatggagcactccgctcgatgttatttcttcgattcgttaccactacagtagttcttcacatggcgagttatgctgttatcttcatagtcttaatgatggtatatgatagaaacaattagtctggtgtataatatttataataatggcaccatattgcttctggttcctgtgaactcgacatatgttatgaatgtcagagaataaattacgatagaaacaattagtctgatgtataatatttgtattactggcaccatattgcttctggttcctgtgaactctacatatgctatgaatgtcagagaataaattgttttgctggatctttgttagaatttcacttgat

SEQ ID NO: 26622 - DNA, 2493 bp, Zea Mays
caaacagctccatgaccccacggtagatagccgtagcctaccctagtaccaggcatctgtttttagtgctggtttgacaattgtcattgatcctcgaactttgaacaccaaagaagaattgctgccttgctggtctgggaagcactttctttcactccttccctccccatttcctactgacggccgagggggggcacattctttggcttttgtcccggttttgccctccggctcctgccgagctcagcagggggaggcgctgcgcttcgcttcacgccagatccaacctcaccggccaccagcttgcctccatggccggtcgcttcctcctcgtcgttgccgtcgccctcctcctccgccctggggatgcgtccgtgcacgagtaccgcgggctcagcttcgccaacaagggcaacgccttcatcctccacgccggcagcgagggcctctacgcggcctcccacgccaacaccaccgccgaggacgccgccgcagtggccgaagccttaatccggtttgacaagattacttttaggcgatcagaggatactaataattctgtaaaggagactagttcagctaaggttcaggtactcatttttgagatagaagatcgtgaaatgattggtggatcagcatatggaggtcagaaagctatttgttgtacttcagatcttgcgaagttaggagcttgcacagaaggttctgtcatctaccgcccatcccaggtaaatcctggttggccaaagttgtttgtagcatcttttgatggaagtgacctgatcgcgacactaccgtcaaggaccattccaattaccaaaactgggatatacaatatgtactttatacactgtgatccatcacttgctagtttggaaatcgaggggaaaaccatatggaaaaatcctactggataccttccgggtcggatggcacctcttaagaacttttttggactgatgtcttttgcatttgtcgtacttgggatctattggttttatcagtatatgaagtcctggagagaggttcttccacttcagaactgtattactcttgtgattacactgggcatgtttgagatggcattgtggtattttgagtatgctgaatttaatgagactggagtacggccaaaaggcatcacattttgggctgtcacgtttgggactgtcaagaggacggctgctgaagttattgttctcattgtctcaatgggatatggtgttgtcacgcctactttgggtggcttgacatcaaaagtggtcatgcttggaggaacattctttctagcaacagaaattcttgaattggtagaaaatcttggtgctgttaatgatctatctggaaaagctcgtctgttcttggtctatccagtggccattttagatgctgcatttgttatttggatatttatttctctagctaagaccattggtaaacttcaggcaagaaggttgatggccaaacttgacatttataggaaatttgcaactgcattgatcatatctgttctggtgtctgttgggtggattggctatgagattggtttctcggcagtgtttgaagctggagaccaggagtgttactttaaactgcacctttctactttcaagaacctgtccattttgtattgtttggattcatttgtttgcaccttacttgtttatgcatatgtttcattatttcagaagtcattgatatccctgcaatttctttcttgcagatttactccaaatcaacagatgtatttaatgaacgatggcagcatgcctggattattcctgccttctggcatgtcttgtctttcttacttctttgtgtcatttgctacctgtgggcaccttcacaaaactcaatgagattttcttatgatgcaagtgaattctttgatcgaaaggataatatctcattaattaggccagcacccagtgcatccaagaatggatggaatttatcttctacaccagagcccaaagctacaaaggatgtgaataccgtagcagattttgaaggtgatgatgaggaaaacaaaagggagtagaatgtactgtcgatttgattacggagggtatatttgagatcctttgaagtgtgtgctagagcaattttggtatttaggagaggattggccatgctagttattattaatggagcactccgctcgatgttatttcttcgattcgttaccactacagtagttcttcacatggcgagttatgctgttatcttcatagtcttaatgatggtatatgatagaaacaattagtctggtgtataatatttataataatggcaccatattgcttctggttcctgtgaactcgacatatgttatgaatgtcagagaataaattacgatagaaacaattagtctgatgtataatatttgtattactggcaccatattgcttctggttcctgtgaactctacatatgctatgaatgtcagagaataaattgttttgctggatctttgttagaatttcacttgat

SEQ ID NO: 26623 - DNA, 745 bp, Zea Mays
tgaagggagggaaaatcctttttggaggatctgccattgaatcagaaggaaactttgtgcaaccaacaattgtggaaattacaccttctgcaccagttgtgaaagaagaactctttggtcctgtcctttatgttatgaaatttcagtccttgaaggaagcaattgaaatcaataactctgttcctcaaggattgagcagttctatatttacaaagaggccagatattatttttaagtggctcgggccccatggtagtgattgtggtatagtgaatgtgaacatacctactaatggtgctgaaattggtggagcatttggtggagaaaaagcaactggtggtggacgagaagcagggagtgattcctggaagcagtacatgaggagggcgacttgtacaatcaactatgggagcgagctacctctagcccagggaatcaattttggttaatcctgcagaaatgttgcgcgtggatctcagtgttttctgcagacgtggatgccgtatggaaagaactgatgcaaccgcatttgagatctcagcagacttgagcagcatttattggcgtcagttgtgaaacttaaactgcaggagcatcttgtacataaataaaataagatgtttgttgctcgtgggccgtggcacgttttggtaccggtgtccagtctactaataaaatctaatgcaaaacggtcataactacattctcatgcagtatgattttccggccttttgatctggaattg

SEQ ID NO: 26624 - DNA, 1869 bp, Zea Mays
acaaatacacctcagtctcagtcccccaccacatccgctccccgccttccgcttccctaccccccgcatcacctaccaacgccgacaccatgggggccttcgcgaaggaggagcaccagttcctagccgagctcggcctcgcgcagcgcaacccaggcgcgttcgcatgcggtgcgtggggcggctcaggtcccaccgtcacctccacgagcccgaccaacaatcaggtcatcgcagaggtcgtggaggcgtccgtgcacgactacgaggagggcatgcgcgcctgcttcgatgccgccaagacatggatggcgattcctgctccaaagcgaggagagatcgttaggcaaatcggtgatgcactgagagcaaagctccatcaccttggcaggcttgtgtcacttgagatggggaaaattcttcctgaagggatcggtgaggttcaggaaatcatcgacatgtgtgattatgctgtggggctaagtcgccaactaaatggatccattataccatctgaacgaccaaaccatatgatgatggaggtgtggaatccccttggagttgtgggtgttataacggcatttaatttcccttgtgctgtgcttggaaaggtgctccaacaactccactgatcactattgcaatgacaaaaatagtggctagtgtattggagaagaacaacttgccaggcgcaatttttacatctttttgtgggggcactgaaattggtcaagcaattgcccttgacattaggatacctttggtttcattcactggaagtacaagggctggtctaatggttcagcaacaagttagtgcaagatttggtaaatgccttcttgaacttagcggaaacaatgccatcattgttatggatgatgcagatatccagctagctgtgcgatctgtcttgttcgctgctgttggtacagcaggacaacgctgcactacatgtcgtaggctgattcttcatgagaacatatatcaaaccttccttgatcagcttgttgaggtatacaaacaagtccgaattggggatccgttggagaaaggcaccttactgggaccactgcacactcctgcttcaaaagagaactttttgaaaggcattcagactatcaaatctcagggagggaaaatcctttttggaggatctgccattgaatcagaaggaaactttgtgcaaccaacaattgtggaaattacaccttctgcaccagttgtgaaagaagaactctttggtcctgtcctttatgttatgaaatttcagtccttgaaggaagcaattgaaatcaataactctgttcctcaaggattgagcagttctatatttacaaagaggccagatattatttttaagtggctcgggccccatggtagtgattgtggtatagtgaatgtgaacatacctactaatggtgctgaaattggtggagcatttggtggagaaaaagcaactggtggtggacgagaagcagggagtgattcctggaagcagtacatgaggagggcgacttgtacaatcaactatgggagcgagctacctctagcccagggaatcaattttggttaatcctgcagaaatgttgcgcgtggatctcagtgttttctgcagacgtggatgccgtatggaaagaactgatgcaaccgcatttgagatctcagcagacttgagcagcatttattggcgtcagttgtgaaacttaaactgcaggagcatcttgtacataaataaaataagatgtttgttgctcgtgggccgtggcacgttttggtaccggtgtccagtctactaataaaatctaatgcaaaacggtcataactacattctcatgcagtatgattttccggccttttgatctggaattg

SEQ ID NO: 26625 - DNA, 1714 bp, Zea Mays
ctaaactcagctactcaggtcaggtctgagataaaccagtcactctactactcgatggaaccagcaacatgggctgtgttcctcggcattgccctctgcgcagcggcagcgctcttcctttcgcgcggccggcgcccggtctacaaccccccgccgggccccaagccatggccgatcatcggcaaccttaacctcatgggcgagctgccccaccgctccatgaacgagctgtccaagcggtacggtccgctcatgcagctccggttcgggtcgttgcctgttctcgtcggcgcgtcggttgagatggcaaagctcttcctcaagaccaacgacgcggcgttctccgaccggccgaggttcgcaatcggcaagtacaccgcgtacgacttctccgaccttctatgggctccttccgggccgtacctgcgccaggcacgcaggatctgcgccaccgagctcttcagcgccacgcggctcgagtccttcgagcacatccgcgacgaggaggtgcgcgtgatgctgcgacagctgcgccaagcggctgggcgcaccgtgcggctcagggactacctgcagatgttggcgctcggcgtgatctcgcgcatagttctgggcaataaattggctggacctgcagggctacgttgctaggatgaagagaatgaaggcgaggtttggtcgattcctggaacgagtcttggacgtgcacaacgagcggcgactacgcgagggagggaactttgtggcaaaggatatgttggacgtgctgctgcagctggccgatgacactagtcttgaagtccagctcagcagggacaatgttaaggctatcacacaggacctaatcatcgcaggcacggatagtaatgcaaacacgctggagtgggctgtctcggagctcctcaagaaccctaagatcttagccaaggccatggaggagctgaaccatgtcatagggccggaccgactggtgacggaaagcgacctccctcgcctcccctacatcgaggctgtgctcaaggagaccatgcgcgtgcaccctgccgcgccgatgctggcaccccacgtggcccgcgaggacacatccgtggacggatacgacgtgctcgctggcacggtcttgttcatcaacgtgtgggcaatcggccgcgaccctggactgtgggacgcgccggaggagttccggccggagcggttcgtcgagagcaagatcgacgtgaggggccatgacttccagctgctgccgttcggctctggccggcgaatgtgccccgggatcaacctcgcgctaaaggtgatggctttgagtcttgccaatctgctacacggcttcgagtggaggcttccggacggcgtgacggcagaggagctgagcatggatgaggccttcaagctcgcggtaccgcgtaaattcccgctcatggtcgtggccgagcccaggttgccagctcgcctgtatactggcgcttgatgcccgtacgtgtcttcggttgttggcatgcgtggagtatagcacatgattttcagctcttggaactttgttttaataaaacacaaatatatgtgttatgttggttagatgaatgtgaatataaagttgacaacctaggtaattcgaacccctattggtatataattttactttatttttgcataactgtgtaaactggtggtcatggacgttgaagttaatatttggactgtggattagatt

SEQ ID NO: 26626 - DNA, 1301 bp, Zea Mays
ccacagttttggggctttctatgttctggactagattttgtgttttttttaatcaagggaaacgagtgtccttttgacgccgtgctctgctttaaggagcagatttgcgacgctatccaggacgagctacaatcactcgaaggtgttccaccagtctctagaagttgtaaagaggtaaatgagtttgttggtacaaaacaagacccactaataccgataaagaagaagacgcacagatcatgccgtcttttttggtggatcagatcaaaattgtgcatatgcgtgtcatggttctgttgctcctgccattgcttgcccagctgcaaaaggccatgctgcctggattgctcctgctgctcatgcccagatctgtcatgctgcaagcccagctgcaaatcatgcaacaaaccctgctttgggcccaacagctgttcatgttgcgacatatcatgctgcaagccagattgcccatcctgtagttcaaactgcagctcgtgctgcaccggcagtccatcatgctgtaaaccaaactgcaacacctgctgcagaccaaactgtagctcgtgctgcgatccgtcatgctgcaaaccgaactgcagctgcttcaagaccctctcgtgctgcaaattccagtgcagcccaaactgctgcacctgcagcctcccgagttgctccggctgcaacccctgcggcagttgcaagaaatgctggtcatgccccagcgactgcaagccaagctgtggctgtttcagcgcgcaatgttgcagctgcgcgggatgctgctcgtgctcaagctgtttcagttgcttcggttgtttcaagtccttcaagtgctccaacctgtttgggtgctgctcctgcaagcagtgcttcaagtgccagtcctcgtgctgcaagggggcgtcgtcctgctgcaaatgccagtcgtcgtgctgtgagggtgaagacggcagcagctgctgccggaggccatgctgcacttttccgaagccagcttgctctgggtgttcgtgcgggtgcgcttggtcctgcagaaagtgtacagaatggtgtcgatgttccgggtgccgcaatccgtgctgtgccactggatgcttgtgttgactgttgaggttgaactagacgtttccttggttgttatttttttgcgtctgccgtttagatgaccgttagtttcgttcgtgctttgatatatggtgtggcgtccttgtctgtaaagaaatcccatatcactagaagaaattgaagcgtcaatagtcatcaactgctataaaattcagatgccttttaagaacgaggct

SEQ ID NO: 26627 - DNA, 2162 bp, Zea Mays
cttgaacttcagaagttcttcatttgccgtcctatgaaacatgaggacaggtttcacaacacattttgacattatatctttatcaagtcagttgtggtgaactgtgaacaaatgtgcttgttatgcatatcggcacctcttgtatttgcattcttcccctagcagtaagacctctatgctgggttgaacatatgtcgttggacaatgaaactggattagacaaacctggaataagggtcaggtcagtcacaggccttgttgcagcagactatttcgtccctggatattttgtttgggctgtcttaattgccaatttagctcgtattggatatgaagaaaagaccatgtacatggctgcatatgattggaggttatctttccagaacactgaggttcgtgatcaaactttgagcagaataaagagcaatattgaactcatggtagcaacaaatggtggaaatagggtggtggtgatcccacactccatgggggtcctctattttctgcattttatgaaatgggtcgaagcacctcctcccatggggggcggtggtggtccgaactggtgtgagaagcatattaaagctgtaatgaatattggaggacctttcttaggagttcccaaggctgttgctgggcttttctcatctgaagccaaagatgttgccgttgctagagctatcgctcctgatgtcctggactctgattttcttggacttcaaactttgcgccatttgatgcgtatgacccgaacatgggattcaacaatgtcaatgcttcctaaaggtggtgatacaatttggggaaatctggattggtctccagaagatggccttgaatgtaaagctaagaagcataaaaccaatgataccgaggtttctaaggatagcaatggggaaaatatcgaagttcaacctgaacctataaactacggaaggctggtatccttcggtaaagatgtagcagaggcaccttcttcagagattgaacagatagaatttcgtgatgctgttaaaggtaacgatatcgtccattcaaatgcatcatgccgggagatctggacagagtaccatgaattaggatggggtggaataaaggcagtcgcagactacaaagtttacactgccagttctgttatagaccttcttcactttgttgctccaaggatgatgcagcgtggaaatgtccacttttcatatggaattgctgataacttggatgatccgaaatatcaacattacaaatattggtcaaaccccttggaaacaaagctaccgaatgctcctgacatggaaataatttccatgtacggagtaggcattcctactgaaagggcatatgtctacaagttggctccacaggcagagtgctatataccattccggattgacgcctcggctgatggcggggaggaaaacaaatgcttgaaagggggtgtttacttagctgacggcgacgaaactgttccagttcttagcgcgggctacatgtgtgcaaaagggtggcgtggcaaaactcgtttcaaccctgccggcagcaagacttacgtgagagagtacagccattcaccaccctcaactctcctggaaggcaggggcactcagagcggtgcacatgttgatataatggggaacttcgctttgatcgaggacatcatcaggatagctgccggggcaaccggtgaggaaattggtggcgaccaggtttattcagatatattcaaatggtcagagaaaatcaaattgaaattgtaacccatgggaagttaaaagaagtgccccaacccgttcattgcgttcctaaatgcttgcctgagcgcaactctggattttgcttaaatatcgtatttttttcacgcctcattcgtccctctagtaaatttacattgacaggaccccggtgcgacgcggatgttgtaccgtatttttggcattgtatattaaaatgtacaggcgtaagttacatttgctagctgaaattattgcagtagcttgccttttcttttgagcacggaagtgtgctctccattacgtgataacctgtgccaaatctttgacaatcatatcctgaatataagatggaacattatttcgttgtgtgaccatattacaagagcggggaatgtaattgactatccttgacacaaaattacataacagcaa

SEQ ID NO: 26628 - DNA, 2030 bp, Zea Mays
caaaagttcattgtactttgatttggccttgtgcttgacctctatgctgggttgaacatatgtcgttggacaatgaaactggattagacaaacctggaataagggtcaggtcagtcacaggccttgttgcagcagactatttcgtccctggatattttgtttgggctgtcttaattgccaatttagctcgtattggatatgaagaaaagaccatgtacatggctgcatatgattggaggttatctttccagaacactgaggttcgtgatcaaactttgagcagaataaagagcaatattgaactcatggtagcaacaaatggtggaaatagggtggtggtgatcccacactccatgggggtcctctattttctgcattttatgaaatgggtcgaagcacctcctcccatggggggcggtggtggtccgaactggtgtgagaagcatattaaagctgtaatgaatattggaggacctttcttaggagttcccaaggctgttgctgggcttttctcatctgaagccaaagatgttgccgttgctagagctatcgctcctgatgtcctggactctgattttcttggacttcaaactttgcgccatttgatgcgtatgacccgaacatgggattcaacaatgtcaatgcttcctaaaggtggtgatacaatttggggaaatctggattggtctccagaagatggccttgaatgtaaagctaagaagcataaaaccaatgataccgaggtttctaaggatagcaatggggaaaatatcgaagttcaacctgaacctataaactacggaaggctggtatccttcggtaaagatgtagcagaggcaccttcttcagagattgaacagatagaatttcgtgatgctgttaaaggtaacgatatcgtccattcaaatgcatcatgccgggagatctggacagagtaccatgaattaggatggggtggaataaaggcagtcgcagactacaaagtttacactgccagttctgttatagaccttcttcactttgttgctccaaggatgatgcagcgtggaaatgtccacttttcatatggaattgctgataacttggatgatccgaaatatcaacattacaaatattggtcaaaccccttggaaacaaagctaccgaatgctcctgacatggaaataatttccatgtacggagtaggcattcctactgaaagggcatatgtctacaagttggctccacaggcagagtgctatataccattccggattgacgcctcggctgatggcggggaggaaaacaaatgcttgaaagggggtgtttacttagctgacggcgacgaaactgttccagttcttagcgcgggctacatgtgtgcaaaagggtggcgtggcaaaactcgtttcaaccctgccggcagcaagacttacgtgagagagtacagccattcaccaccctcaactctcctggaaggcaggggcactcagagcggtgcacatgttgatataatggggaacttcgctttgatcgaggacatcatcaggatagctgccggggcaaccggtgaggaaattggtggcgaccaggtttattcagatatattcaaatggtcagagaaaatcaaattgaaattgtaacccatgggaagttaaaagaagtgccccaacccgttcattgcgttcctaaatgcttgcctgagcgcaactctggattttgcttaaatatcgtatttttttcacgcctcattcgtccctctagtaaatttacattgacaggaccccggtgcgacgcggatgttgtaccgtatttttggcattgtatattaaaatgtacaggcgtaagttacatttgctagctgaaattattgcagtagcttgccttttcttttgagcacggaagtgtgctctccattacgtgataacctgtgccaaatctttgacaatcatatcctgaatataagatggaacattatttcgttgtgtgaccatattacaagagcggggaatgtaattgactatccttgacacaaaattacataacagcaa

SEQ ID NO: 26629 - DNA, 388 bp, Zea Mays
ctggcatgcatctcgctgaacttctcccggctgcaagcacaagggacattgtaaacaatcatgtatctgctgcaatcttgtataatcctattccagtgaaggcttaggtgccttctctgcttttaagttactcttgtaccttgcaagtttgtcctaagagcaagctagtgggaagagcgctggacacaaacctgaaccgaacgcggcgaagctctctgatcccaccaggtaaagcccggattgtgatatatacgcctggctcgtcttcttcgacccactccctctcctggtcgctcgcattgctgacggacaccgagagctcaccagacctgtcgatctcctcaggcccattgaatcacagcattggtgtccatggtggtggtggtgg

SEQ ID NO: 26630 - DNA, 3662 bp, Zea Mays
atgaaccacagtggtggccccgatgcacgagtggtgaaatcggattatgggagcttgccacatcggacgtcgttccacttccacacccttctcttctatcaatttcacggttccaccgctttgttcgtattttgcctttgcttcgcttggcttcctccctccgaggttccccagacccccaaccaaccaaaaccctatccgccgcccccgcccccgcccttggctgaggacatgtatccaccgctcggggacgcataggttgtgttacgagtgggagaaagcttcttcagtacgtgctgatctctccgccacacctgcacaggagtggccatagatcgccggaacgcgcctccgccgccggacgcggcggcggagaaggatgagagcacccagggtctacaactcccggaggacatccgctgggagcggctcgacaaggcgcgcttctttgtcgtgggcgccgggctcttctccgccgtctcggccgcgctctaccccgccgttgtcctcaagacgcgcctccaagtcgcccctgcggcggccgcggcggctgagtcagcagcgctcccgccctccgccgtcgcggcggcgactgccatcctgcgccaggaggggcccctcgccttctaccgcggcttcgccacctccctcgccggcaccatccctgcgcgcgcgctgtacatgggcgcgctcgaggccacgcgctccgccgtcggcccagccgcgctcagcttcggcgccgcggagcccgctgcgtcggcggcagcgggcgcagtggcgggcctcgccgccgccgtcgccgcgcaggtcgtgtggacgcccgtcgacgtcatcagccagcgcctcatggttcagggcaacccctgtcctgcctcccgctaccatggcggccttgacgccttccgcaagaccgtggcttctgacggactacgcggcctgtaccgtgggttcggcatgtccatcctaacctacgccccctccaatgctgtgtgccaggttgcaagactgtcatggtagttcagggagtgagtgccgcgatggccggtggtgcatctgcgtttgtgaccatgccactggacaccatcaaaaccaggatgcaagtcatggatggggacggtgagccgattacggtggggaggacagtgcgtaggctgatcaaggaaggtgggttggctgcttgttacaggggcctaggcccgaggtgggcgtccatgtcattgtctgccaccaccatgatcaccacctatgagttcctcaagcggctctcagacaagggccaggggagtgatcttgcatgatgtttgataaccagtatagacaacaagtgatcaggtgcatttgctttgtttctttatcgtttcatttccagcatgttatgtgttgaaaaaaaatggtgggctaatgtttgtagataatttttgtttgctcttataatcaagttttccgacgtggtgcaatttacgttggttatatattgtagttctcatatcatgttgttctagttgcatttattggcatcaaattggtggttatggcttggtatgattcagttttgcttactcaaacctttgtttgtgctgaagtattgatgtttgtaatacagttgttgttaagtgcctttggacttctgtgaacgctaacaatgttgtccatgccccatgttagtagaactagaacattgtcatgtttgcttaggatgtctgtaaatttactggcacctggttgtgagcaagaatatagatttatactcacgattgcaaatattgtactgctgattctagtataattggtatgtgttttttctgtttatactagcaccatgcttaacagcagacatgtcaaatagatccatttttttcctattcgatgacaccaagcatcagatgggctttgtgtcaattattccgtctctattctgtttctgtttcttaaccaggtttatgacagaatctgaatatgcttgatagacattaatactagtttacagtgtagcctgatacttctgcagcttgcaagcaagtgaaatcgatatgttatacatgaattcttagggggtgtttgaatgcactagagctaatagttagttggctaaaaaattgctagtgaaattagctaggtaagtatgagttaatttctaaactctcgatagccggttgtagtgtgttttttttttgttctttgtttcggttctctttttgtacctctgtgtactcattattattaataataaaatttgtactgtaggggttttccctacaaccttttcctttcaataaactatgagctaatttgctaaaagtttctaacagttaaactattagctagactgtttcgatgccttcaactaattttagtagctatctatcacctctagtgcattcaaacatggccttatacacaaggcaagggtgcagtttgagctgtcggaatggagttgtggaaacacgcacttgtgtcattttacccttatttatcattcttattccacctcattcagtttgttattggagaaggtggcaaatttaggtagctggtttaagagtttttttttgttcgatttttttttaaaaaaaccatagatgatgtttcaactaattgcactatgccaatgtctctacttcgattagaaaattcccaccaataattgtctgaaattatttctctgacatgataacgattcactttattatgctttgtttatgatattgttatcttcatgccggattggttgaagttccggtggtagcctttcccgttgttcttttgttagagcgccaaacattgtcttctacctaagttacaattaaaccaaacctttgtgcctcatcttccagacgtccgaagcattgccccatcatccaagcaagggcacttcagcacttgtgccccatcccatatactaacgtggctttcaggtgcaaagtgagaagaggtttaagtgctcgaatttagaattcaatgaaaatctctaaaccaggcctgagaacttgtggttcttggtagaagacagcgactgcagtggaaggaagcatgccagtgaggaatcgcagaggtaaactttacctgccgtggcacttggtggtgaggactagcctgccaaaagtcccaaagtgattcgcttagttaggacaggaaaaacgggtggttagtgtgtggatagctgacgtactatgttagcaacttggcttttgttggatggcgaaaggtcaccatcacaaatccgtaaggtagtggcgcacaggagaagcgaaaccgttcgtgtacaaagagcctgcaaaaggaggcgctcaattcatataattcatatcatatgtgttaggatgagatagtacgaaaaggtacacatttttttttccattccagttcatctgattgtggataaaagtgtagccagacaaggcccaggcttaaaattttgctcgttgatggatggtggccggggctaggcatctgccactcttttatcttcttctaggctgtgtttatagtcgaggaccattttgctcgtggtgggtttttgcttcaaggctgggttaggccgttgcctgtttttgtcctgcctgcttttttcaaaaaaaaaaatatcgttgtgcgttcactgtcgtcgcaatcaacccaccacaaagtggttttgagtttggggcactcagtgccaacttggg

SEQ ID NO: 26631 - DNA, 2141 bp, Zea Mays
gccaaatccgataatctaccagtgggccctggttgacagcccaacgcacggctctcctgtgcgcctccgatgccgtttccccgaagcaaagggagacgaaagctcaaaaggtccccccgcttcctgtggtccacgcacgcacgcaggcggcggtggtgcccatggcttcgtggctgttgctccccttctcctccttcccgtggcctcccccgcccccaccaggctcctcctccggccgcggcggcgatggcggcggagacggcggcgattggaggccgaccgtcgtcgcagccttcgcaggcgtgcaagtcggccgcgctctccgccgccgcttcgccggcctcctccgctcaccggaggtgcgacatcttgatgccttgccgaaaatgggtagcttttggtttgaaggatcagaatcgcttgcgacattccacattcttggcgcgatagggattgtgttctctgcaccttatgtttgcagctctgctctgttcagtgggaacgggtcagggggtagatacatcagcaacgggaagttgttgtccagacggcctcgtggaatcgattccaagaagaggctctggactaatgtccttcttgctcttaatgtcctgtaagtcggtggacaatttgagtttatgtgatagtagctccaatcctttggtacatttgttgtttaacacccttccttttgctctcaacgaagggcttatgtcgctcaggtagcatcacaaggaaagcttctcatgtggggagccaaggtttgtgtcttggttggaatttctgtttcagttatgcgctgttgattttgttaacctaatacagttatgaccatcatttgcaatgaaagatcaacagtctgattgatagagggcaattttggcgtttggcaacatcatctctacttcatgcaaatctcacccaccttgcagtatgtttttatgtttgaattgggttttatatttcatagaaaaaatatcagctaacttcctacctgttggatgttgtcataatgatgcagttcaattgtttctctttgaactctattgggcccatggttgaaatgttaagtggtcctagaagatatctagctgtttatttcagttcggcgctggcaggtgtttgttcttaaccttttggattggatgtgcgtcacctgctgttggtgcgtcaggtgccatttttggattggttggagcctatgcagtttatatgtggaggcatagaagattttttgggaattctagagagagtttagaacatattgggcgtgtggttgtcctgaatatggtactgctccacttttttctgcttattttattttgccttcgtttcaaaaactttctttgttccatgtgcaacattttcttttttcatagggtatgggcctcctttcaaggggaattgataactggggccatctgggaggcttgcttgggggagttgccatggcatggttcctaggtccggcatggcaatatcagtacgtggcaaaggatggtagagcggttttcaaagacagggctccagtcctccgactaataaaggggtagacctgtgggtattcgtggaaatagcgtggaagaggatgaaaaggggaaagggggtgaagattcagacatgcgccgagcaaagggagtggcgaaaaaacaattaggccctctttggaatgaaagaatttcagagaaatcatacatgaatcagttcatttttcatagaaaaaacacatgaaccttaacatgtaactagttttggtgtcgaaacatttcactgcagagctaattgctgaggaaacacacacgagaatcatattgctttgttcgaatcgtggcaattgttaaatcttcaaagctaagacgagttgtggactgtcagttgtatttccaggtatcaatagccctttttgtactaaccataggatctgctgtcaagttcctacgttggacattgttacgcaaccggatcctctacagtaacttgaagtagctgctgataggtcaggtcattgacgtgcggggttggccttgtctggcccatgcacttaagttgtcggatattactgcagatgaatggcttccgactgttactacgtttcttcttgtccagtactgcaagagatgataaaatatgtaataatgtcc

SEQ ID NO: 26632 - DNA, 2119 bp, Zea Mays
gccaaatccgataatctaccagtgggccctggttgacagcccaacgcacggctctcctgtgcgcctccgatgccgtttccccgaagcaaagggagacgaaagctcaaaaggtccccccgcttcctgtggtccacgcacgcacgcaggcggcggtggtgcccatggcttcgtggctgttgctccccttctcctccttcccgtggcctcccccgcccccaccaggctcctcctccggccgcggcggcgatggcggcggagacggcggcgattggaggccgaccgtcgtcgcagccttcgcaggcgtgcaagtcggccgcgctctccgccgccgcttcgccggcctcctccgctcaccggaggtgcgacatcttgatgccttgccgaaaatgggtagcttttggtttgaaggatcagaatcgcttgcgacattccacattcttggcgcgatagggattgtgttctctgcaccttatgtttgcagctctgctctgttcagtgggaacgggtcagggggtagatacatcagcaacgggaagttgttgtccagacggcctcgtggaatcgattccaagaagaggctctggactaatgtccttcttgctcttaatgtcctgtaagtcggtggacaatttgagtttatgtgatagtagctccaatcctttggtacatttgttgtttaacacccttccttttgctctcaacgaagggcttatgtcgctcaggtagcatcacaaggaaagcttctcatgtggggagccaaggtttgtgtcttggttggaatttctgtttcagttatgcgctgttgattttgttaacctaatacagttatgaccatcatttgcaatgaaagatcaacagtctgattgatagagggcaattttggcgtttggcaacatcatctctacttcatgcaaatctcacccaccttgcagtatgtttttatgtttgaattgggttttatatttcatagaaaaaatatcagctaacttcctacctgttggatgttgtcataatgatgcagttcaattgtttctctttgaactctattgggcccatggttgaaatgttaagtggtcctagaagatatctagctgtttatttcagttcggcgctggcaggttcactgatgagctaccgttttagtgcgtcacctgctgttggtgcgtcaggttggagcctatgcagtttatatgtggaggcatagaagattttttgggaattctagagagagtttagaacatattgggcgtgtggttgtcctgaatatggtactgctccacttttttctgcttattttattttgccttcgtttcaaaaactttctttgttccatgtgcaacattttcttttttcatagggtatgggcctcctttcaaggggaattgataactggggccatctgggaggcttgcttgggggagttgccatggcatggttcctaggtccggcatggcaatatcagtacgtggcaaaggatggtagagcggttttcaaagacagggctccagtcctccgactaataaaggggtagacctgtgggtattcgtggaaatagcgtggaagaggatgaaaaggggaaagggggtgaagattcagacatgcgccgagcaaagggagtggcgaaaaaacaattaggccctctttggaatgaaagaatttcagagaaatcatacatgaatcagttcatttttcatagaaaaaacacatgaaccttaacatgtaactagttttggtgtcgaaacatttcactgcagagctaattgctgaggaaacacacacgagaatcatattgctttgttcgaatcgtggcaattgttaaatcttcaaagctaagacgagttgtggactgtcagttgtatttccaggtatcaatagccctttttgtactaaccataggatctgctgtcaagttcctacgttggacattgttacgcaaccggatcctctacagtaacttgaagtagctgctgataggtcaggtcattgacgtgcggggttggccttgtctggcccatgcacttaagttgtcggatattactgcagatgaatggcttccgactgttactacgtttcttcttgtccagtactgcaagagatgataaaatatgtaataatgtcc

SEQ ID NO: 26633 - DNA, 1635 bp, Zea Mays
gccaaatccgataatctaccagtgggccctggttgacagcccaacgcacggctctcctgtgcgcctccgatgccgtttccccgaagcaaagggagacgaaagctcaaaaggtccccccgcttcctgtggtccacgcacgcacgcaggcggcggtggtgcccatggcttcgtggctgttgctccccttctcctccttcccgtggcctcccccgcccccaccaggctcctcctccggccgcggcggcgatggcggcggagacggcggcgattggaggccgaccgtcgtcgcagccttcgcaggcgtgcaagtcggccgcgctctccgccgccgcttcgccggcctcctccgctcaccgtgggaacgggtcagggggtagatacatcagcaacgggaagttgttgtccagacggcctcgtggaatcgattccaagaagaggctctggactaatgtccttcttgctcttaatgtcctggcttatgtcgctcaggtagcatcacaaggaaagcttctcatgtggggagccaagatcaacagtctgattgatagagggcaattttggcgtttggcaacatcatctctacttcatgcaaatctcacccaccttgcattcaattgtttctctttgaactctattgggcccatggttgaaatgttaagtggtcctagaagatatctagctgtttatttcagttcggcgctggcaggttcactgatgagctaccgttttagtgcgtcacctgctgttggtgcgtcaggtgccatttttggattggttggagcctatgcagtttatatgtggaggcatagaagattttttgggaattctagagagagtttagaacatattgggcgtgtggttgtcctgaatatgggtatgggcctcctttcaaggggaattgataactggggccatctgggaggcttgcttgggggagttgccatggcatggttcctaggtccggcatggcaatatcagtacgtggcaaaggatggtagagcggttttcaaagacagggctccagtcctccgactaataaaggggtagacctgtgggtattcgtggaaatagcgtggaagaggatgaaaaggggaaagggggtgaagattcagacatgcgccgagcaaagggagtggcgaaaaaacaattaggccctctttggaatgaaagaatttcagagaaatcatacatgaatcagttcatttttcatagaaaaaacacatgaaccttaacatgtaactagttttggtgtcgaaacatttcactgcagagctaattgctgaggaaacacacacgagaatcatattgctttgttcgaatcgtggcaattgttaaatcttcaaagctaagacgagttgtggactgtcagttgtatttccaggtatcaatagccctttttgtactaaccataggatctgctgtcaagttcctacgttggacattgttacgcaaccggatcctctacagtaacttgaagtagctgctgataggtcaggtcattgacgtgcggggttggccttgtctggcccatgcacttaagttgtcggatattactgcagatgaatggcttccgactgttactacgtttcttcttgtccagtactgcaagagatgataaaatatgtaataatgtcc

SEQ ID NO: 26634 - DNA, 2726 bp, Zea Mays
gccaaatccgataatctaccagtgggccctggttgacagcccaacgcacggctctcctgtgcgcctccgatgccgtttccccgaagcaaagggagacgaaagctcaaaaggtccccccgcttcctgtggtccacgcacgcacgcaggcggcggtggtgcccatggcttcgtggctgttgctccccttctcctccttcccgtggcctcccccgcccccaccaggctcctcctccggccgcggcggcgatggcggcggagacggcggcgattggaggccgaccgtcgtcgcagccttcgcaggcgtgcaagtcggccgcgctctccgccgccgcttcgccggcctcctccgctcaccggtaccgtgcctcgcctcgccttccatttcgttgtaacttgggatgcacaccatgatagcgtctacttagtctgttcccaaccaaacaggcctcagaccctcagtctgttgttgactgagctctcacgctctttgttcattggatggcgatttttgtgtgtgtgtgtgtgtgcgcgcgcgctcgatcaaatacttaatgtcaagtgaacctttctactctaggaggtgcgacatcttgatgccttgccgaaaatgggtagcttttggtttgaaggatcagaatcgcttgcgacattccacattcttggcgcgatagggattgtgttctctgcaccttatgtttgcagctctgctctgttcagtgggaacgggtcagggggtagatacatcagcaacgggaagttgttgtccagacggcctcgtggaatcgattccaagaagaggctctggactaatgtccttcttgctcttaatgtcctggcttatgtcgctcaggtagcatcacaaggaaagcttctcatgtggggagccaagatcaacagtctgattgatagagggcaattttggcgtttggcaacatcatctctacttcatgcaaatctcacccaccttgcattcaattgtttctctttgaactctattgggcccatggttgaaatgttaagtggtcctagaagatatctagctgtttatttcagttcggcgctggcaggttcactgatgagctaccgttttagtgcgtcacctgctgttggtgcgtcaggtgccatttttggattggtatgtctattttgccgctacatatgataggacttgtttgtcacacttgtggtcattacccagtgccagaatcatgttaaccctataatatggcataattcattagcaatgtgaaactacaaacttctccctttgttccaaattatagttcactttagatttgtcatgagtcaaacttctctaacttttaccagctttgtagaatatacacaaacatctataatataaaattagtttaattaaattctccataactcatgtattgatagcggacttatatgaacttatccatgtaaaaatatatcccccctaaaaacagtcaaagttaacaagtttgacatacgagttaggacaaagcttaagtgaactataacttggaaaccaagtttttaattcgtcacttctaaatggttggtataacattcctttgtactaactcctcaaaactgcacatctttactaaacaggccagaaacatgatttatttgtagtttgtatttctgtatttcagacttttgtttcttatgtacaccacatttatgttttgtcaaaaaatagtcctggtcttgtcctattgaaatataaatctctgatacaactggtcatgaaagtgtttatatcacctttatctgcactatcaggttggagcctatgcagtttatatgtggaggcatagaagattttttgggaattctagagagagtttagaacatattgggcgtgtggttgtcctgaatatggtactgctccacttttttctgcttattttattttgccttcgtttcaaaaactttctttgttccatgtgcaacattttcttttttcatagggtatgggcctcctttcaaggggaattgataactggggccatctgggaggcttgcttgggggagttgccatggcatggttcctaggtccggcatggcaatatcagtacgtggcaaaggatggtagagcggttttcaaagacagggctccagtcctccgactaataaaggggtagacctgtgggtattcgtggaaatagcgtggaagaggatgaaaaggggaaagggggtgaagattcagacatgcgccgagcaaagggagtggcgaaaaaacaattaggccctctttggaatgaaagaatttcagagaaatcatacatgaatcagttcatttttcatagaaaaaacacatgaaccttaacatgtaactagttttggtgtcgaaacatttcactgcagagctaattgctgaggaaacacacacgagaatcatattgctttgttcgaatcgtggcaattgttaaatcttcaaagctaagacgagttgtggactgtcagttgtatttccaggtatcaatagccctttttgtactaaccataggatctgctgtcaagttcctacgttggacattgttacgcaaccggatcctctacagtaacttgaagtagctgctgataggtcaggtcattgacgtgcggggttggccttgtctggcccatgcacttaagttgtcggatattactgcagatgaatggcttccgactgttactacgtttcttcttgtccagtactgcaagagatgataaaatatgtaataatgtcc

SEQ ID NO: 26635 - DNA, 2081 bp, Zea Mays
gccaaatccgataatctaccagtgggccctggttgacagcccaacgcacggctctcctgtgcgcctccgatgccgtttccccgaagcaaagggagacgaaagctcaaaaggtccccccgcttcctgtggtccacgcacgcacgcaggcggcggtggtgcccatggcttcgtggctgttgctccccttctcctccttcccgtggcctcccccgcccccaccaggctcctcctccggccgcggcggcgatggcggcggagacggcggcgattggaggccgaccgtcgtcgcagccttcgcaggcgtgcaagtcggccgcgctctccgccgccgcttcgccggcctcctccgctcaccggtaccgtgcctcgcctcgccttccatttcgttgtaacttgggatgcacaccatgatagcgtctacttagtctgttcccaaccaaacaggcctcagaccctcagtctgttgttgactgagctctcacgctctttgttcattggatggcgatttttgtgtgtgtgtgtgtgtgcgcgcgcgctcgatcaaatacttaatgtcaagtgaacctttctactctaggaggtgcgacatcttgatgccttgccgaaaatgggtagcttttggtttgaaggatcagaatcgcttgcgacattccacattcttggcgcgatagggattgtgttctctgcaccttatgtttgcagctctgctctgttcagtgggaacgggtcagggggtagatacatcagcaacgggaagttgttgtccagacggcctcgtggaatcgattccaagaagaggctctggactaatgtccttcttgctcttaatgtcctgtaagtcggtggacaatttgagtttatgtgatagtagctccaatcctttggtacatttgttgtttaacacccttccttttgctctcaacgaagggcttatgtcgctcaggtagcatcacaaggaaagcttctcatgtggggagccaagtctgattgatagagggcaattttggcgtttggcaacatcatctctacttcatgcaaatctcacccaccttgcattcaattgtttctctttgaactctattgggcccatggttgaaatgttaagtggtcctagaagatatctagctgtttatttcagttcggcgctggcaggttcactgatgagctaccgttttagtgcgtcacctgctgttggtgcgtcaggtgccatttttggattggttggagcctatgcagtttatatgtggaggcatagaagattttttgggaattctagagagagtttagaacatattgggcgtgtggttgtcctgaatatgggtatgggcctcctttcaaggggaattgataactggggccatctgggaggcttgcttgggggagttgccatggcatggttcctaggtccggcatggcaatatcagtacgtggcaaaggatggtagagcggttttcaaagacagggctccagtcctccgactaataaaggggtagacctgtgggtattcgtggaaatagcgtggaagaggatgaaaaggggaaagggggtgaagattcagacatgcgccgagcaaagggagtggcgaaaaaacaattaggccctctttggaatgaaagaatttcagagaaatcatacatgaatcagttcatttttcatagaaaaaacacatgaaccttaacatgtaactagttttggtgtcgaaacatttcactgcagagctaattgctgaggaaacacacacgagaatcatattgctttgttcgaatcgtggcaattgttaaatcttcaaagctaagacgagttgtggactgtcagttgtatttccaggtatcaatagccctttttgtactaaccataggatctgctgtcaagttcctacgttggacattgttacgcaaccggatcctctacagtaacttgaagtagctgctgataggtcaggtcattgacgtgcggggttggccttgtctggcccatgcacttaagttgtcggatattactgcagatgaatggcttccgactgttactacgtttcttcttgtccagtactgcaagagatgataaaatatgtaataatgtcc

SEQ ID NO: 26636 - DNA, 1767 bp, Zea Mays
gccaaatccgataatctaccagtgggccctggttgacagcccaacgcacggctctcctgtgcgcctccgatgccgtttccccgaagcaaagggagacgaaagctcaaaaggtccccccgcttcctgtggtccacgcacgcacgcaggcggcggtggtgcccatggcttcgtggctgttgctccccttctcctccttcccgtggcctcccccgcccccaccaggctcctcctccggccgcggcggcgatggcggcggagacggcggcgattggaggccgaccgtcgtcgcagccttcgcaggcgtgcaagtcggccgcgctctccgccgccgcttcgccggcctcctccgctcaccggaggtgcgacatcttgatgccttgccgaaaatgggtagcttttggtttgaaggatcagaatcgcttgcgacattccacattcttggcgcgatagggattgtgttctctgcaccttatgtttgcagctctgctctgttcagtgggaacgggtcagggggtagatacatcagcaacgggaagttgttgtccagacggcctcgtggaatcgattccaagaagaggctctggactaatgtccttcttgctcttaatgtcctggcttatgtcgctcaggtagcatcacaaggaaagcttctcatgtggggagccaagtctgattgatagagggcaattttggcgtttggcaacatcatctctacttcatgcaaatctcacccaccttgcattcaattgtttctctttgaactctattgggcccatggttgaaatgttaagtggtcctagaagatatctagctgtttatttcagttcggcgctggcaggttcactgatgagctaccgttttagtgcgtcacctgctgttggtgcgtcaggtgccatttttggattggttggagcctatgcagtttatatgtggaggcatagaagattttttgggaattctagagagagtttagaacatattgggcgtgtggttgtcctgaatatgggtatgggcctcctttcaaggggaattgataactggggccatctgggaggcttgcttgggggagttgccatggcatggttcctaggtccggcatggcaatatcagtacgtggcaaaggatggtagagcggttttcaaagacagggctccagtcctccgactaataaaggggtagacctgtgggtattcgtggaaatagcgtggaagaggatgaaaaggggaaagggggtgaagattcagacatgcgccgagcaaagggagtggcgaaaaaacaattaggccctctttggaatgaaagaatttcagagaaatcatacatgaatcagttcatttttcatagaaaaaacacatgaaccttaacatgtaactagttttggtgtcgaaacatttcactgcagagctaattgctgaggaaacacacacgagaatcatattgctttgttcgaatcgtggcaattgttaaatcttcaaagctaagacgagttgtggactgtcagttgtatttccaggtatcaatagccctttttgtactaaccataggatctgctgtcaagttcctacgttggacattgttacgcaaccggatcctctacagtaacttgaagtagctgctgataggtcaggtcattgacgtgcggggttggccttgtctggcccatgcacttaagttgtcggatattactgcagatgaatggcttccgactgttactacgtttcttcttgtccagtactgcaagagatgataaaatatgtaataatgtcc

SEQ ID NO: 26637 - DNA, 1642 bp, Zea Mays
gccaaatccgataatctaccagtgggccctggttgacagcccaacgcacggctctcctgtgcgcctccgatgccgtttccccgaagcaaagggagacgaaagctcaaaaggtccccccgcttcctgtggtccacgcacgcacgcaggcggcggtggtgcccatggcttcgtggctgttgctccccttctcctccttcccgtggcctcccccgcccccaccaggctcctcctccggccgcggcggcgatggcggcggagacggcggcgattggaggccgaccgtcgtcgcagccttcgcaggcgtgcaagtcggccgcgctctccgccgccgcttcgccggcctcctccgctcaccgctctgctctgttcagtgggaacgggtcagggggtagatacatcagcaacgggaagttgttgtccagacggcctcgtggaatcgattccaagaagaggctctggactaatgtccttcttgctcttaatgtcctggcttatgtcgctcaggtagcatcacaaggaaagcttctcatgtggggagccaagtctgattgatagagggcaattttggcgtttggcaacatcatctctacttcatgcaaatctcacccaccttgcattcaattgtttctctttgaactctattgggcccatggttgaaatgttaagtggtcctagaagatatctagctgtttatttcagttcggcgctggcaggttcactgatgagctaccgttttagtgcgtcacctgctgttggtgcgtcaggtgccatttttggattggttggagcctatgcagtttatatgtggaggcatagaagattttttgggaattctagagagagtttagaacatattgggcgtgtggttgtcctgaatatgggtatgggcctcctttcaaggggaattgataactggggccatctgggaggcttgcttgggggagttgccatggcatggttcctaggtccggcatggcaatatcagtacgtggcaaaggatggtagagcggttttcaaagacagggctccagtcctccgactaataaaggggtagacctgtgggtattcgtggaaatagcgtggaagaggatgaaaaggggaaagggggtgaagattcagacatgcgccgagcaaagggagtggcgaaaaaacaattaggccctctttggaatgaaagaatttcagagaaatcatacatgaatcagttcatttttcatagaaaaaacacatgaaccttaacatgtaactagttttggtgtcgaaacatttcactgcagagctaattgctgaggaaacacacacgagaatcatattgctttgttcgaatcgtggcaattgttaaatcttcaaagctaagacgagttgtggactgtcagttgtatttccaggtatcaatagccctttttgtactaaccataggatctgctgtcaagttcctacgttggacattgttacgcaaccggatcctctacagtaacttgaagtagctgctgataggtcaggtcattgacgtgcggggttggccttgtctggcccatgcacttaagttgtcggatattactgcagatgaatggcttccgactgttactacgtttcttcttgtccagtactgcaagagatgataaaatatgtaataatgtcc

SEQ ID NO: 26638 - DNA, 2074 bp, Zea Mays
gttattttcaatgaatgtagaggaaaatattatatatagaccgctggcaaacagacactaaactctatggaggtggaggccaaatccgataatctaccagtgggccctggttgacagcccaacgcacggctctcctgtgcgcctccgatgccgtttccccgaagcaaagggagacgaaagctcaaaaggtccccccgcttcctgtggtccacgcacgcacgcaggcggcggtggtgcccatggcttcgtggctgttgctccccttctcctccttcccgtggcctcccccgcccccaccaggctcctcctccggccgcggcggcgatggcggcggagacggcggcgattggaggccgaccgtcgtcgcagccttcgcaggcgtgcaagtcggccgcgctctccgccgccgcttcgccggcctcctccgctcaccggtaccgtgcctcgcctcgccttccatttcgttgtaacttgggatgcacaccatgatagcgtctacttagtctgttcccaaccaaacaggcctcagaccctcagtctgttgttgactgagctctcacgctctttgttcattggatggcgatttttgtgtgtgtgtgtgtgtgcgcgcgcgctcgatcaaatacttaatgtcaagtgaacctttctactctaggaggtgcgacatcttgatgccttgccgaaaatgggtagcttttggtttgaaggatcagaatcgcttgcgacattccacattcttggcgcgatagggattgtgttctctgcaccttatgtttgcagctctgctctgttcagtgggaacgggtcagggggtagatacatcagcaacgggaagttgttgtccagacggcctcgtggaatcgattccaagaagaggctctggactaatgtccttcttgctcttaatgtcctggcttatgtcgctcaggtagcatcacaaggaaagcttctcatgtggggagccaagatcaacagtctgattgatagagggcaattttggcgtttggcaacatcatctctacttcatgcaaatctcacccaccttgcattcaattgtttctctttgaactctattgggcccatggttgaaatgttaagtggtcctagaagatatctagctgtttatttcagttcggcgctggcaggttcactgatgagctaccgttttagtgcgtcacctgctgttggtgcgtcaggtgccatttttggattggttggagcctatgcagtttatatgtggaggcatagaagattttttgggaattctagagagagtttagaacatattgggcgtgtggttgtcctgaatatgggtatgggcctcctttcaaggggaattgataactggggccatctgggaggcttgcttgggggagttgccatggcatggttcctaggtccggcatggcaatatcagtacgtggcaaaggatggtagagcggttttcaaagacagggctccagtcctccgactaataaaggggtagacctgtgggtattcgtggaaatagcgtggaagaggatgaaaaggggaaagggggtgaagattcagacatgcgccgagcaaagggagtggcgaaaaaacaattaggccctctttggaatgaaagaatttcagagaaatcatacatgaatcagttcatttttcatagaaaaaacacatgaaccttaacatgtaactagttttggtgtcgaaacatttcactgcagagctaattgctgaggaaacacacacgagaatcatattgctttgttcgaatcgtggcaattgttaaatcttcaaagctaagacgagttgtggactgtcagttgtatttccaggtatcaatagccctttttgtactaaccataggatctgctgtcaagttcctacgttggacattgttacgcaaccggatcctctacagtaacttgaagtagctgctgataggtcaggtcattgacgtgcggggttggccttgtctggcccatgcacttaagttgtcggatattactgcagatgaatggcttccgactgttactacgtttcttcttgtccagtactgcaagagatgataaaatatgtaataatgtcc

SEQ ID NO: 26639 - DNA, 1831 bp, Zea Mays
tccacctccactgaccaccacactccatgtctccaaccccccactaagcaaagagccaaagaggcgacggccggcaggagatattctttttcgcgtcctcgcgcgggatcagcgatcagatagcctttctgccccccttcttcttcttctctgacagaccacgtactccttcctatagccacccacattaccgtgcccgtgcgtgcatctctctttctgaatggatgcagagcctgtgccatcgccatttgcggcatactactagtactaatcttcctaaactgatcggcatcgacactcagcaggcagtcagcagcacccttcctagatcgccgttaccggaggagaacggggagcgtgcaaaacaggtcgtgaggcacagaggcagtagcaaaccgacgaacagaagccacggtcttgtctcacgcaaaagcagtacgtagaggcacaagtataaagttgcggcagatttacccatactttttgttaatttgcaagaaagatctgagatgccaccctcaacaagatttgatttcaagcctagatattgtttaaatgcaatagagctaatagtcgactcagctaacactataaccattaacctcttttagctagacacatccaatcatccgtagcctcacccttaactacccattattaattcattagctagctcaatctagctaaaataaggtaatagttagctaaccatttgttagccaactaattacactagcaatttatcgaacaactattaactgtagtctatagtacattcaaacatggccttagaaagaccggaatgaatcacggtatgaaaacaacaatacaatacccccaaagtcattcctttgaaaggtcggaagaaatcacagcatcgatcctgatttcagcgagaaaacagatgcggctgcaaaaactgagcagcctttttcagtctggtcagagactgcgatgtagcctctttcccttcgtatggtatactaactacttttacattatttctctagtttttttccaggcacgttgatgcttgctgctgtctagttgaaaagaaagagaaatctggcgtccgacacggagtaatgcatgcagtagccgcatgctcagtttgcaccggccgggatcgcaccatcgacgtcactaaagctgctggcctgttgatgatctgctgccagtagccttcgtcctgaagctccttggcggttgtcattccaacaagaacgaaccaacagggaggtgcgggggatgcaagagaaacactatcgtctgcactgcacaggtcaggccgccgtaggctgtgggcgaaacgaaagctatccaatctggcagactgatgactcactggctgagtggcagtgatcgattccgggaatacccgatgaattattggtagtaggtggtgggggaaacgtctgccgccgcctcgttcctgggcagaatgatcgcaaattcgcaagtcttcccctccctcccaagcgcaggaggtattatagtacgccgagcgggcgaggagccgggaagccgccgggaaaaggcacgccgacgccggcagctgcacggcctttcagagagagcggaggcccgcctttactctccgttgcctttaccctccctccgctttagtgcgatgcgtcgtcggacgtaggcgctgatgcaacgcaactttcatggcgcgcgcgtgttagcagacggttttccatggagcgcgtgtttgattcgaattcgaatgaatgcaaatacctcagcagtcgcagtcgcagtcgcatgatcaactttcagcaaagtcgttaaactgtggctagctctctctctctctctatatatccgc

SEQ ID NO: 26640 - DNA, 1332 bp, Zea Mays
tccacctccactgaccaccacactccatgtctccaaccccccactaagcaaagagccaaagaggcgacggccggcaggagatattctttttcgcgtcctcgcgcgggatcagcgatcagatagcctttctgccccccttcttcttcttctctgacagaccacgtactccttcctatagccacccacattaccgtgcccgtgcgtgcatctctctttctgaatggatgcagagcctgtgccatcgccatttgcggcatactactagtactaatcttcctaaactgatcggcatcgacactcagcaggcagtcagcagcacccttcctagatcgccgttaccggaggagaacggggagcgtgcaaaacaggtcgtgaggcacagaggcagtagcaaaccgacgaacagaagccacggtcttgtctcacgcaaaagcatttttttccaggcacgttgatgcttgctgctgtctagttgaaaagaaagagaaatctggcgtccgacacggagtaatgcatgcagtagccgcatgctcagtttgcaccggccgggatcgcaccatcgacgtcactaaagctgctggcctgttgatgatctggaacgggagacagaggtagacgaatcgatcgagagtttggatggagcccatccatgttagaaaaatgtgacatcagctgccagtagccttcgtcctgaagctccttggcggttgtcattccaacaagaacgaaccaacagggaggtgcgggggatgcaagagaaacactatcgtctgcactgcacaggtcaggccgccgtaggctgtgggcgaaacgaaagctatccaatctggcagactgatgactcactggctgagtggcagtgatcgattccgggaatacccgatgaattattggtagtaggtggtgggggaaacgtctgccgccgcctcgttcctgggcagaatgatcgcaaattcgcaagtcttcccctccctcccaagcgcaggaggtattatagtacgccgagcgggcgaggagccgggaagccgccgggaaaaggcacgccgacgccggcagctgcacggcctttcagagagagcggaggcccgcctttactctccgttgcctttaccctccctccgctttagtgcgatgcgtcgtcggacgtaggcgctgatgcaacgcaactttcatggcgcgcgcgtgttagcagacggttttccatggagcgcgtgtttgattcgaattcgaatgaatgcaaatacctcagcagtcgcagtcgcagtcgcatgatcaactttcagcaaagtcgttaaactgtggctagctctctctctctctctatatatccgc

SEQ ID NO: 26641 - DNA, 1370 bp, Zea Mays
gtttttttaaggcctccagagtccagtgctccacctccactgaccaccacactccatgtctccaaccccccactaagcaaagagccaaagaggcgacggccggcaggagatattctttttcgcgtcctcgcgcgggatcagcgatcagatagcctttctgccccccttcttcttcttctctgacagaccacgtactccttcctatagccacccacattaccgtgcccgtgcgtgcatctctctttctgaatggatgcagagcctgtgccatcgccatttgcggcatactactagtactaatcttcctaaactgatcggcatcgacactcagcaggcagtcagcagcacccttcctagatcgccgttaccggaggagaacggggagcgtgcaaaacaggtcgtgaggcacagaggcagtagcaaaccgacgaacagaagccacggtcttgtctcacgcaaaagcatttttttccaggcacgttgatgcttgctgctgtctagttgaaaagaaagagaaatctggcgtccgacacggagtaatgcatgcagtagccgcatgctcagtttgcaccggccgggatcgcaccatcgacgtcactaaagctgctggcctgttgatgatctggaaaagtaggaacgggagacagaggtagacgaatcgatcgagagtttggatggagcccatccatgttagaaaaatgtgacatcagctgccagtagccttcgtcctgaagctccttggcggttgtcattccaacaagaacgaaccaacagggaggtgcgggggatgcaagagaaacactatcgtctgcactgcacaggtcaggccgccgtaggctgtgggcgaaacgaaagctatccaatctggcagactgatgactcactggctgagtggcagtgatcgattccgggaatacccgatgaattattggtagtaggtggtgggggaaacgtctgccgccgcctcgttcctgggcagaatgatcgcaaattcgcaagtcttcccctccctcccaagcgcaggaggtattatagtacgccgagcgggcgaggagccgggaagccgccgggaaaaggcacgccgacgccggcagctgcacggcctttcagagagagcggaggcccgcctttactctccgttgcctttaccctccctccgctttagtgcgatgcgtcgtcggacgtaggcgctgatgcaacgcaactttcatggcgcgcgcgtgttagcagacggttttccatggagcgcgtgtttgattcgaattcgaatgaatgcaaatacctcagcagtcgcagtcgcagtcgcatgatcaactttcagcaaagtcgttaaactgtggctagctctctctctctctctatatatccgc

SEQ ID NO: 26642 - DNA, 1375 bp, Zea Mays
gtttttttaaggcctccagagtccagtgctccacctccactgaccaccacactccatgtctccaaccccccactaagcaaagagccaaagaggcgacggccggcaggagatattctttttcgcgtcctcgcgcgggatcagcgatcagatagcctttctgccccccttcttcttcttctctgacagaccacgtactccttcctatagccacccacattaccgtgcccgtgcgtgcatctctctttctgaatggatgcagagcctgtgccatcgccatttgcggcatactactagtactaatcttcctaaactgatcggcatcgacactcagcaggcagtcagcagcacccttcctagatcgccgttaccggaggagaacggggagcgtgcaaaacaggtcgtgaggcacagaggcagtagcaaaccgacgaacagaagccacggtcttgtctcacgcaaaagcatttttttccaggcacgttgatgcttgctgctgtctagttgaaaagaaagagaaatctggcgtccgacacggagtaatgcatgcagtagccgcatgctcagtttgcaccggccgggatcgcaccatcgacgtcactaaagctgctggcctgttgatgatctgtacaggaaaagtaggaacgggagacagaggtagacgaatcgatcgagagtttggatggagcccatccatgttagaaaaatgtgacatcagctgccagtagccttcgtcctgaagctccttggcggttgtcattccaacaagaacgaaccaacagggaggtgcgggggatgcaagagaaacactatcgtctgcactgcacaggtcaggccgccgtaggctgtgggcgaaacgaaagctatccaatctggcagactgatgactcactggctgagtggcagtgatcgattccgggaatacccgatgaattattggtagtaggtggtgggggaaacgtctgccgccgcctcgttcctgggcagaatgatcgcaaattcgcaagtcttcccctccctcccaagcgcaggaggtattatagtacgccgagcgggcgaggagccgggaagccgccgggaaaaggcacgccgacgccggcagctgcacggcctttcagagagagcggaggcccgcctttactctccgttgcctttaccctccctccgctttagtgcgatgcgtcgtcggacgtaggcgctgatgcaacgcaactttcatggcgcgcgcgtgttagcagacggttttccatggagcgcgtgtttgattcgaattcgaatgaatgcaaatacctcagcagtcgcagtcgcagtcgcatgatcaactttcagcaaagtcgttaaactgtggctagctctctctctctctctatatatccgc

SEQ ID NO: 26643 - DNA, 1950 bp, Zea Mays
gtttttttaaggcctccagagtccagtgctccacctccactgaccaccacactccatgtctccaaccccccactaagcaaagagccaaagaggcgacggccggcaggagatattctttttcgcgtcctcgcgcgggatcagcgatcagatagcctttctgccccccttcttcttcttctctgacagaccacgtactccttcctatagccacccacattaccgtgcccgtgcgtgcatctctctttctgaatggatgcagagcctgtgccatcgccatttgcggcatactactagtactaatcttcctaaactgatcggcatcgacactcagcaggcagtcagcagcacccttcctagatcgccgttaccggaggagaacggggagcgtgcaaaacaggtcgtgaggcacagaggcagtagcaaaccgacgaacagaagccacggtcttgtctcacgcaaaagcagtacgtagaggcacaagtataaagttgcggcagatttacccatactttttgttaatttgcaagaaagatctgagatgccaccctcaacaagatttgatttcaagcctagatattgtttaaatgcaatagagctaatagtcgactcagctaacactataaccattaacctcttttagctagacacatccaatcatccgtagcctcacccttaactacccattattaattcattagctagctcaatctagctaaaataaggtaatagttagctaaccatttgttagccaactaattacactagcaatttatcgaacaactattaactgtagtctatagtacattcaaacatggccttagaaagaccggaatgaatcacggtatgaaaacaacaatacaatacccccaaagtcattcctttgaaaggtcggaagaaatcacagcatcgatcctgatttcagcgagaaaacagatgcggctgcaaaaactgagcagcctttttcagtctggtcagagactgcgatgtagcctctttcccttcgtatggtatactaactacttttacattatttctctagtttttttccaggcacgttgatgcttgctgctgtctagttgaaaagaaagagaaatctggcgtccgacacggagtaatgcatgcagtagccgcatgctcagtttgcaccggccgggatcgcaccatcgacgtcactaaagctgctggcctgttgatgatctgtacaggaaaagtaggaacgggagacagaggtagacgaatcgatcgagagtttggatggagcccatccatgttagaaaaatgtgacatcagctgccagtagccttcgtcctgaagctccttggcggttgtcattccaacaagaacgaaccaacagggaggtgcgggggatgcaagagaaacactatcgtctgcactgcacaggtcaggccgccgtaggctgtgggcgaaacgaaagctatccaatctggcagactgatgactcactggctgagtggcagtgatcgattccgggaatacccgatgaattattggtagtaggtggtgggggaaacgtctgccgccgcctcgttcctgggcagaatgatcgcaaattcgcaagtcttcccctccctcccaagcgcaggaggtattatagtacgccgagcgggcgaggagccgggaagccgccgggaaaaggcacgccgacgccggcagctgcacggcctttcagagagagcggaggcccgcctttactctccgttgcctttaccctccctccgctttagtgcgatgcgtcgtcggacgtaggcgctgatgcaacgcaactttcatggcgcgcgcgtgttagcagacggttttccatggagcgcgtgtttgattcgaattcgaatgaatgcaaatacctcagcagtcgcagtcgcagtcgcatgatcaactttcagcaaagtcgttaaactgtggctagctctctctctctctctatatatccgc

SEQ ID NO: 26644 - DNA, 1945 bp, Zea Mays
gtttttttaaggcctccagagtccagtgctccacctccactgaccaccacactccatgtctccaaccccccactaagcaaagagccaaagaggcgacggccggcaggagatattctttttcgcgtcctcgcgcgggatcagcgatcagatagcctttctgccccccttcttcttcttctctgacagaccacgtactccttcctatagccacccacattaccgtgcccgtgcgtgcatctctctttctgaatggatgcagagcctgtgccatcgccatttgcggcatactactagtactaatcttcctaaactgatcggcatcgacactcagcaggcagtcagcagcacccttcctagatcgccgttaccggaggagaacggggagcgtgcaaaacaggtcgtgaggcacagaggcagtagcaaaccgacgaacagaagccacggtcttgtctcacgcaaaagcagtacgtagaggcacaagtataaagttgcggcagatttacccatactttttgttaatttgcaagaaagatctgagatgccaccctcaacaagatttgatttcaagcctagatattgtttaaatgcaatagagctaatagtcgactcagctaacactataaccattaacctcttttagctagacacatccaatcatccgtagcctcacccttaactacccattattaattcattagctagctcaatctagctaaaataaggtaatagttagctaaccatttgttagccaactaattacactagcaatttatcgaacaactattaactgtagtctatagtacattcaaacatggccttagaaagaccggaatgaatcacggtatgaaaacaacaatacaatacccccaaagtcattcctttgaaaggtcggaagaaatcacagcatcgatcctgatttcagcgagaaaacagatgcggctgcaaaaactgagcagcctttttcagtctggtcagagactgcgatgtagcctctttcccttcgtatggtatactaactacttttacattatttctctagtttttttccaggcacgttgatgcttgctgctgtctagttgaaaagaaagagaaatctggcgtccgacacggagtaatgcatgcagtagccgcatgctcagtttgcaccggccgggatcgcaccatcgacgtcactaaagctgctggcctgttgatgatctggaaaagtaggaacgggagacagaggtagacgaatcgatcgagagtttggatggagcccatccatgttagaaaaatgtgacatcagctgccagtagccttcgtcctgaagctccttggcggttgtcattccaacaagaacgaaccaacagggaggtgcgggggatgcaagagaaacactatcgtctgcactgcacaggtcaggccgccgtaggctgtgggcgaaacgaaagctatccaatctggcagactgatgactcactggctgagtggcagtgatcgattccgggaatacccgatgaattattggtagtaggtggtgggggaaacgtctgccgccgcctcgttcctgggcagaatgatcgcaaattcgcaagtcttcccctccctcccaagcgcaggaggtattatagtacgccgagcgggcgaggagccgggaagccgccgggaaaaggcacgccgacgccggcagctgcacggcctttcagagagagcggaggcccgcctttactctccgttgcctttaccctccctccgctttagtgcgatgcgtcgtcggacgtaggcgctgatgcaacgcaactttcatggcgcgcgcgtgttagcagacggttttccatggagcgcgtgtttgattcgaattcgaatgaatgcaaatacctcagcagtcgcagtcgcagtcgcatgatcaactttcagcaaagtcgttaaactgtggctagctctctctctctctctatatatccgc

SEQ ID NO: 26645 - DNA, 1307 bp, Zea Mays
tttgttctttgagtttgactttctttgtccttgatgagcaagtacaaggtggaaggttttccaactattttggtatttggtgctgataaggagagcccgttcccctaccagggggctagagttgcatctgccattgaatcctttgcattggagcagttggaagccaactctggcccagttgaagtttctgagttgactggcccggatgtcatggaagagaagtgtgcttctgctgccatttgttttgtatcattccttccagacatcctcgattcaaaggcagagggaagaaacaagtaccttgagctcctgctctcggttgctgagaagtataaaaagagtccatacaggcaagtgtcagcttagctaattacagaccttacgaaaatgtgtctgcttcgtcactttcaaaagaaaggaaaaaggtcaagagtttaaccgatacagtagtttcctttagtgccatgaaaaaggaacagtaatattggcattcaacagtaacaggtgtgtattttaaatgctaacatatagaggtaaaacaagatgcagggtaaccttgcgtgaacaaaatatttaggttgatatttaaaaccataaactttacaagcatactgcaacgactagtgttctattctatgtcaacaaaagcatgccgtgcaatcgtttttcttgaaattccctcttctttggtagtactacacaccctgtgccggatgctttttgccatgcagttttgtctggacagctgctggcaagcaagctaatctcgagaaccaggttggagtgggcggctacggctatcccgccatggttgctctcaacgtgaagaaaggtgcatacgctccactccgtaatgccttccagcgcgacgaaatcatcgagtttgtgaaggaagcagggcgcggtggaaagggaaatcttcctctgaacgttgcgccgacagtagtcacttccgagccgtgggacggcaaagacggagaggtcatcgaagaggatgaattctcccttgacgagctcatgggcgacagctcctcagtaaacgatgagttgtagttctgacgattctgtaactgatctgcgtgccgattagcctgactgtaaatctgaggaactctgatgttttaaaaactcattaaattttcagattttggatgctagaattagaatggttaagattaaagagaactgatgtgataggcacatctttttttgtccctgaaataaagtcagttgtgggcgttgcttgccgcaacaaatggtgtcgctttagatggtctcaagcaacatcatctatatttatcttctat

SEQ ID NO: 26646 - DNA, 2181 bp, Zea Mays
ccgctccaaatggtccaacgaccacgtgagtcgcgctcgcgccaagaagagaagccactcctacgtggacgaacatcaaacgtggagatcattgataggtcttcacacgcgtccgtctcttcgcgaggacccagcccaggctttaaatctcagcaccacggcgaaacccgatggctagtcgccactcgccactgccgtttgatccctcccgctcccccgctccgccatgcgtcccgccgtcctcgctgccctccttctagtggcagcggccgcctccacggccgccgcactctactcatccggctcccccgtcctccagctcaactccaacaacttcaaatcgaaggtgctgaactcgaaccgcgtggtgctggttgagttcttcgcgccgtggtgcgggcactgcaagcagttggcccccacctgggagaaggctgccggtgtgctcaagggcgtcgccacggtcgcagcgctcgatgctgatgcgcagcaggcgctcgcgcaggaatacggaatcaagggatttcccactattaaggtgttttcccctggtaaatctccagtcgattatcaaggagcaagagatgtaaagccaatcgtagagtttgctctgtcacaggtcaaggcccttcttagagataggttgagtggtaaggcatcagcagggtcaaatggcaagacatctggaggttcaagtgagaaaaatgaaccaagtgcatcagtagaattaaattcgcgtaacttcgatgaactcgttgtcaaaagcaaggacatttggattgtggaattctttgcgccatggtgtgggcactgcaagaaattggcacctgaatggaaaaaggctgcgaagaacttgaagggccaagtgaagctaggccatgttgattgtgatgctgaaaagtccttgatgagcaagtacaaggtggaaggttttccaactattttggtatttggtgctgataaggagagcccgttcccctaccagggggctagagttgcatctgccattgaatcctttgcattggagcagttggaagccaactctggcccagttgaagtttctgagttgactggcccggatgtcatggaagagaagtgtgcttctgctgccatttgttttgtatcattccttccagacatcctcgattcaaaggcagagggaagaaacaagtaccttgagctcctgctctcggttgctgagaagtataaaaagagtccatacaggcaagtgtcagcttagctaattacagaccttacgaaaatgtgtctgcttcgtcactttcaaaagaaaggaaaaaggtcaagagtttaaccgatacagtagtttcctttagtgccatgaaaaaggaacagtaatattggcattcaacagtaacaggtgtgtattttaaatgctaacatatagaggtaaaacaagatgcagggtaaccttgcgtgaacaaaatatttaggttgatatttaaaaccataaactttacaagcatactgcaacgactagtgttctattctatgtcaacaaaagcatgccgtgcaatcgtttttcttgaaattccctcttctttggtagtactacacaccctgtgccggatgctttttgccatgcagttttgtctggacagctgctggcaagcaagctaatctcgagaaccaggttggagtgggcggctacggctatcccgccatggttgctctcaacgtgaagaaaggtgcatacgctccactccgtaatgccttccagcgcgacgaaatcatcgagtttgtgaaggaagcagggcgcggtggaaagggaaatcttcctctgaacgttgcgccgacagtagtcacttccgagccgtgggacggcaaagacggagaggtcatcgaagaggatgaattctcccttgacgagctcatgggcgacagctcctcagtaaacgatgagttgtagttctgacgattctgtaactgatctgcgtgccgattagcctgactgtaaatctgaggaactctgatgttttaaaaactcattaaattttcagattttggatgctagaattagaatggttaagattaaagagaactgatgtgataggcacatctttttttgtccctgaaataaagtcagttgtgggcgttgcttgccgcaacaaatggtgtcgctttagatggtctcaagcaacatcatctatatttatcttctat

SEQ ID NO: 26647 - DNA, 1985 bp, Zea Mays
tgtaattattggctatactagtactactgtactagtagtacttcatcagtattcacctctcgtcatctcgtttcttgtttgttcccccatctcgttgttgatcccctctgccgctcagcggctatatatacgtccaatctaatccccatcccattccgtctccgtcgcctgatcaaaccagaggtaggagaaataaaaggagcaagttttctggctcttcttcttgtcccgtagtccgtactattcttagcgctgttcttcaccaagatcgcctcgccggcacggcggcacccatgttgggcttctgcgccccctcggcctgttcacctcccgacgaggctacgccagagccgttccgttcgctgcagatcgccaccacggtcgccgccgccgccgccactacaaagaagaagcgccggcccgccggcacaccagacccagacgcggaggtggtgtcgctgtcgccgcggacgctgctggagtcggaccggtacgtgtgcgagatctgcgggcaggggttccagcgcgaccagaacctgcagatgcatcggcggcggcacaaggtgccgtggaagctgttgaagcgggaggccggggaggcggcgcggaagcgggtcttcgtgtgcccggagcccagctgcctgcaccaccacccctcccacgcgctgggcgacctcgtcggcatcaagaagcacttccgccgcaagcacagcggccagcgccagtgggcctgcgcccgctgctccaaggcctacgccgtccactccgactacaaggcccacctcaagacctgcggcacccgcggccactcctgcgactgcggccgcgtcttctcacgtgtggagagcttcatagagcaccaggatagctgcaacgccgggcaggcacgggcgggcgccggtgtggctgctgctagtgccgggtcgcagcagcaggcgccgccggccatgtcactgtcgaggaccgcgtcgagcaccagcccgtccagcgacattgccatcagcccggtggccgcctggcccgccggtccggcaccggcgattccaagccctgcatcgaccgccgcgttccactggttcgaacaagtcccgtcgccgcggacaccaccgccatcggtccaccaccgcggcgggcacaacctcgagctgcagctcatgccgccgtcctgcagcggcgcgggcggtgacgcgccaccacgtactccggcggctccgtcacagagccacgccgccgccatggccatgcagctgcagctgtccatcggcgtctgcggggacgcgggcgacgaggtgctggccgcagcgagggaggaggaggcgcgggagcagctgcggcaagctgtggcggagaaggcggcggcggacgaagcccgcgcgcaggcgaagcggcaagcggagctggccgagcgggagctggcgagcgccaagcggatgcggcggcaggcgcaggtggagctgagccgcgcccacgcggtccgggaccacgccttgcgccaggtgaacgcgacgcttctccagatcacctgcctcggctgccgccacaagttccacgcgcgcccgcagctggacgccgttccggcgaggtggcctgcagctgctgctacatgtcctccatcgtgagagaggacgtcctctagcttcttattcgctagctaaatcaatacttgctttttttgccaacgggacgccggccgcggggcttgcatgaattggcgcgtgcgttatgaggtgtgatagaatcagatgctgatgcctgatggtccagtgtgtggacagtggaagatcgctagctggatcgatccagtagtgctgcctagtgtttgagctagccctgtgactgtgaggaggagcaggataggagaggcagtagccgttaggcaaatcgaagacgacgggatagctgctagagctttacttactgtgacgtgcatggaatctttcggtgtttgcttcccattggatcttgttggaaaaacattgtgttgc

SEQ ID NO: 26648 - DNA, 1433 bp, Zea Mays
gcacccggcctctctctctgactctcacccagtccactctccacactctgtctgcctcacgattcacgtcctcagctcccccccctgctgccgctgcagcaaggccgacgagccatggagaaaggggtgcagctgatggaggggaggcaggcgtggccgctccacacgatggggatgcccgtcgccagtacgaccaccaccagcacctgcttcgacgactacagctgcagcagtagcgggtgggagcagtcggcaccgttcggctgcttcggcctcctcgccgccgacgtccatgacctcttcccgctcttcgcagccatggagccggccccgccgccgccgccgtcggcgcacggcgtggccgtcgcgatccccggggagctggacgaccttctcctgaacttctgggacgcgggctgccacgacggcgacgtgggcgagccgccgctcaaggcgcagcaggaggaggaggaggccgccttcaattccagctgcgcctgcgccagcgccacgcacgagcagggctaccgcacccccaccgactccttcacaattcactgtgatgatgatgaccaggccttgagctcgattttctcggcgggtcccgcgccggcagcggagagagcggcgttccagcagcaggcccccgccacagaggcggagcccctgcccagctcgtcctcctccagctgccgcggggacccgcgcgccgccggggccgggaccggcctgccgcttccggggcggggcgccgcgcgggggcctgcgcgggccccgccgcttccgaggacctgcggcccctctctgaaacgtgccgcgacacgcgaaggcgtcggccgagagcggcggcggcaagcggcggaagggcgcgggcgtggtggtggtgcgtccgttcgcgctgctgaagcccgacggcctggacggcggcgcgacgctggcggacatcaacgcgcgcgtcctgatgcggccggcgcggccggtgcggcaccccgtgggcgagttcgcgtgcgcgccgcgcgtgtccgcggaccagccgggcatctcgggcaaggccgtcgccggcttcacgcgcctgcacacccccgggcgcggctccataaccatcataaggacgcgaggctagtgagtcatggcgacgtaggaatgtagtaggattaggtgtagccgccgcgccggggccggcagtggtgactcgacctccgagtcgcgattccgtgtgtaataatgtaaattatgagcgcacaacctgtaaatcgtaccaataaaatctctgctatctaccagtccccccctgcactgcaccgacgaactgcaaccgaacttttgatcaggaactgaatctagctgccattgtttggcacggggccacggagcttgtaaataaacaggttgtggtacggctgctggaggcaactagctttccttttgtctgc

SEQ ID NO: 26649 - DNA, 1355 bp, Zea Mays
gcacccggcctctctctctgactctcacccagtccactctccacactctgtctgcctcacgattcacgtcctcagctcccccccctgctgccgctgcagcaaggccgacgagccatggagaaaggggtgcagctgatggaggggaggcaggcgtggccgctccacacgatggggatgcccgtcgccagtacgaccaccaccagcacctgcttcgacgactacagctgcagcagtagcgggtgggagcagtcggcaccgttcggctgcttcggcctcctcgccgccgacgtccatgacctcttcccgctctaacttctgggacgcgggctgccacgacggcgacgtgggcgagccgccgctcaaggcgcagcaggaggaggaggaggccgccttcaattccagctgcgcctgcgccagcgccacgcacgagcagggctaccgcacccccaccgactccttcacaattcactgtgatgatgatgaccaggccttgagctcgattttctcggcgggtcccgcgccggcagcggagagagcggcgttccagcagcaggcccccgccacagaggcggagcccctgcccagctcgtcctcctccagctgccgcggggacccgcgcgccgccggggccgggaccggcctgccgcttccggggcggggcgccgcgcgggggcctgcgcgggccccgccgcttccgaggacctgcggcccctctctgaaacgtgccgcgacacgcgaagagtcggagcaggcgtcggccgagagcggcggcggcaagcggcggaagggcgcgggcgtggtggtggtgcgtccgttcgcgctgctgaagcccgacggcctggacggcggcgcgacgctggcggacatcaacgcgcgcgtcctgatgcggccggcgcggccggtgcggcaccccgtgggcgagttcgcgtgcgcgccgcgcgtgtccgcggaccagccgggcatctcgggcaaggccgtcgccggcttcacgcgcctgcacacccccgggcgcggctccataaccatcataaggacgcgaggctagtgagtcatggcgacgtaggaatgtagtaggattaggtgtagccgccgcgccggggccggcagtggtgactcgacctccgagtcgcgattccgtgtgtaataatgtaaattatgagcgcacaacctgtaaatcgtaccaataaaatctctgctatctaccagtccccccctgcactgcaccgacgaactgcaaccgaacttttgatcaggaactgaatctagctgccattgtttggcacggggccacggagcttgtaaataaacaggttgtggtacggctgctggaggcaactagctttccttttgtctgc

SEQ ID NO: 26650 - DNA, 1017 bp, Zea Mays
cccatttgcataagtaacgacgtcgatcagtgaatgggcggcgatggcatcaagggattcaaaatctaaaaccgatggcatagagggaatgttaccatttccagtgtcacataaagaatcagtataatttctaatggcatagagggaattttctcttcattttaacgacttggtaacatccgatttcaaaggcctatattgacggttgacgccgcgatagcaaggaaatagcacatgatcgacgctactgatgaggttaatgaatgaactctattgcggcacctctgattctttctgcaccctggccgtcccagtccaatccgacacggccagacgacgcgctacaccctcggatccatcggcagtccaaaaaaacccaagaaccgcatgaagtgaaaaaaacaaggaagaagaaaaaaaaaagttgatcgtatttacagccatatcctccttcattcgcgccgccggaggtaaagcagagagggcctcacgccgcgaacgacgacgagggcctctgatccgggtccggggccgacgccgcaatgccagcaccagcagcaggtgagggcgacgctggcgccggcgcggcgggggccgcggagctggtggaggcgacgcgctcgcaggaggggcacatggagagggtggtggccgggaggtgcatgtgcaacaaggggcgcaccgccttgagcgcgcggagctcggctagctccttgtgcagccgccggttctcccccgtcagcgtctcgcagcagcgcttcaggtgctcgcagtccacctccgtctgcttcagcttcgtcctggccctgcggttctggaaccacacctccacctggcgcgcccgcaggttgagctgcctcgccagcgccagcttctgcttctgcatgcgcgccacggacggaacgcaccagcgtaaggactcaggagtcaggaccgagaccggtcgaggaacaaagtaggcttggtttttctgcgtcaccggcggcggatgctcttaccgggttcggcgtggcgcgc

SEQ ID NO: 26651 - DNA, 2228 bp, Zea Mays
aaagatttttcttctcggtccctctctctcgtccgtcctagccaccagcacataacaaagcaggcaggcaggctcatacagtacgctcaaagcggaaacagagcgaagaactcagcaggacagtcagctgcaaccgcaactggtctgcttgtcagcaggatcagttggatggccttgttcttcatccttgcttgcaccctcatttttgtagccatcgcctcctacgcccagtacgcgcgctggcagaaggggaaaggccgcctcggcggccatgagaaggcttcttcttcctcctcgaagctgcctcctggctccatgggctggccttacctcggtgacacccttcagctctactcccaggaccccaacgtcttcttcgcctccaaacagaagcggtatggcgagatcttcaagacgcaccttctggggtgcccgtgcgtgatgctggcgagcccggaggcggcgcggttcgtcctggtgacgcaggcgcacctgttcaagccgacttaccctcggagcaaggagcgcatgatcgggccgtcggctctcttcttccaccagggcgactaccacctccggctccgcaagctcgtccagggcgcgctcgggcccgacgcgctgcgcgcgctcgttcctgaggtcgagtccgccgtgcgctccaccctcgctgcctgggacggccaggtcaggagcacgttcgacgccatgaagacggtttcgaagcatgcgtgggcgtggccaatggtgtccgtaatgatgtcaacacaatatatatcggatgatgctgagaacattattgcctgccggctcgatctgttgctacgtttattccagctgtcgttcgatgtgggcatcctggcgatcttcggcggcggcgggctggacgagcggcgcaaggcggagctgaggaagaactactccatcgtggagaaggggtacaactccttccccaacagcatacccgggacgctctactacaaggcgatgcaggcgcggcggcgtctgcacggcgtgctgatcgacgtgatgcgcgagcggcgggagcgcggcgcgccgggcaccgacctgctgggctgcctgatgcggtcccagggtgacgacgacggcgcgcggcggccgctcctgacggacgaccaggtcgccgacaacatcatcggcgtgctgttcgcggcgcaggacacgacggccagcgcgctgacctgggccgtgaagtacctccacgaccacccgaagctgctggaggccgtccgggcggagcaggcggcggtacgcgaggccaccggcggcgggaggcggccgctgacgtgggcgcacacgaggagcatggcgctgacgcatagggtgattttggagagcttaaggatggcgagcatcatctcgttcacgttcagggaggccgtggccgacgtggagtacaaagggttccttatccccaaggggtggaaggtgatgccgctgttcaggaacatccatcacagcccggactacttccaggatccacacaagttcgacccttctagattccaggtggcgccgcggccgaacacgttcctgccatttgggagcggcgtgcacgcgtgccccgggaacgagctggccaagctcgagatgctggtcctcatccaccatctggtcaccgcctacaggtgcgttcgtctctcctcgcacacagattcgcttttgtccttgtggaccagaacgtacgacacattggctggtgccacgccgccatcggccaccactactcagctcccctagctagctctcacatcatacatgatcatccaaatctccggtgggagactgttggatccagcgacgaggtcgagtacaggccgttccccgtgcccaagcaaggcttgcctgtcagattatggagagaaagcagtgcggcggtggacagaaatggccgccatgagaccgatgacgatgtggaggacataatagtttgacccttaaactagctagctaggcattaatttaaccaagctagctagacaggtttttgtctttgctagctagctctcgccagctgccctcctcttctcctcgatcaaattattaccttgagggggagaagaaatggcggcttttctctttccgtttccttctcgcctttcttccctgataatgatgaaaaatgtaagatatgcagataccaatgatcattgtatcattgagatatatctatatatatagtcacccgaaacagggagctagcggtatta

SEQ ID NO: 26652 - DNA, 2566 bp, Zea Mays
ggaagatccatccatcaaagatttttcttctcggtccctctctctcgtccgtcctagccaccagcacataacaaagcaggcaggcaggctcatacagtacgctcaaagcggaaacagagcgaagaactcagcaggacagtcagctgcaaccgcaactggtctgcttgtcagcaggatcagttggatggccttgttcttcatccttgcttgcaccctcatttttgtagccatcgcctcctacgcccagtacgcgcgctggcagaaggggaaaggccgcctcggcggccatgagaaggcttcttcttcctcctcgaagctgcctcctggctccatgggctggccttacctcggtgacacccttcagctctactcccaggaccccaacgtcttcttcgcctccaaacagaagcggtatggcgagatcttcaagacgcaccttctggggtgcccgtgcgtgatgctggcgagcccggaggcggcgcggttcgtcctggtgacgcaggcgcacctgttcaagccgacttaccctcggagcaaggagcgcatgatcgggccgtcggctctcttcttccaccagggcgactaccacctccggctccgcaagctcgtccagggcgcgctcgggcccgacgcgctgcgcgcgctcgttcctgaggtcgagtccgccgtgcgctccaccctcgctgcctgggacggccaggtcaggagcacgttcgacgccatgaagacggtttcgaagcatgcgtgggcgtggccaatggtgtccgtaatgatgtcaacacaatatatatcggatgatgctgagaacattattgcctgccggctcgatctgttgctacgtttattccagctgtcgttcgatgtgggcatcctggcgatcttcggcggcggcgggctggacgagcggcgcaaggcggagctgaggaagaactactccatcgtggagaaggggtacaactccttccccaacagcatacccgggacgctctactacaaggcgatgcaggcgcggcggcgtctgcacggcgtgctgatcgacgtgatgcgcgagcggcgggagcgcggcgcgccgggcaccgacctgctgggctgcctgatgcggtcccagggtgacgacgacggcgcgcggcggccgctcctgacggacgaccaggtcgccgacaacatcatcggcgtgctgttcgcggcgcaggacacgacggccagcgcgctgacctgggccgtgaagtacctccacgaccacccgaagctgctggaggccgtccgggcggagcaggcggcggtacgcgaggccaccggcggcgggaggcggccgctgacgtgggcgcacacgaggagcatggcgctgacgcatagggtgattttggagagcttaaggatggcgagcatcatctcgttcacgttcagggaggccgtggccgacgtggagtacaaagggttccttatccccaaggggtggaaggtgatgccgctgttcaggaacatccatcacagcccggactacttccaggatccacacaagttcgacccttctagattccaggtggcgccgcggccgaacacgttcctgccatttgggagcggcgtgcacgcgtgccccgggaacgagctggccaagctcgagatgctggtcctcatccaccatctggtcaccgcctacaggtgcgttcgtctctcctcgcacacagattcgcttttgtccttgtggaccagaacgtacgacacattggctggtgccacgccgccatcggccaccactactcagctcccctagctagctctcacatcatacatgatcatccaaatctccggtatgtatgtatgtatgcgtgcatcgaatcgatcatatatgtgctcctataccatacactgtgggtccctcgaaatgtacgtcttcagtcttcactaggctcgatcgctgtcttcttgcacgacgactgctcgatctcctttgctatactacggacgggcatcatcagcatctcacctcagctatggcaatacttttgagttgtttactgatcttacactgagactacagcagtttcagcacgttgtttattcattacctaactagcttacactgagaatactaattaaagtggcgcgtgtgcatgcatgctttgtttgcaggtgggagactgttggatccagcgacgaggtcgagtacaggccgttccccgtgcccaagcaaggcttgcctgtcagattatggagagaaagcagtgcggcggtggacagaaatggccgccatgagaccgatgacgatgtggaggacataatagtttgacccttaaactagctagctaggcattaatttaaccaagctagctagacaggtttttgtctttgctagctagctctcgccagctgccctcctcttctcctcgatcaaattattaccttgagggggagaagaaatggcggcttttctctttccgtttccttctcgcctttcttccctgataatgatgaaaaatgtaagatatgcagataccaatgatcattgtatcattgagatatatctatatatatagtcacccgaaacagggagctagcggtatta

SEQ ID NO: 26653 - DNA, 1975 bp, Zea Mays
ggaagatccatccatcaaagatttttcttctcggtccctctctctcgtccgtcctagccaccagcacataacaaagcaggcaggcaggctcatacagtacgctcaaagcggaaacagagcgaagaactcagcaggacagtcagctgcaaccgcaactggtctgcttgtcagcaggatcagttggatggccttgttcttcatccttgcttgcaccctcatttttgtagccatcgcctcctacgcccagtacgcgcgctggcagaaggggaaaggccgcctcggcggccatgagaaggcttcttcttcctcctcgaagctgcctcctggctccatgggctggccttacctcggtgacacccttcagctctactcccaggaccccaacgtcttcttcgcctccaaacagaagcggtatggcgagatcttcaagacgcaccttctggggtgcccgtgcgtgatgctggcgagcccggaggcggcgcggttcgtcctggtgacgcaggcgcacctgttcaagccgacttaccctcggagcaaggagcgcatgatcgggccgtcggctctcttcttccaccagggcgactaccacctccggctccgcaagctcgtccagggcgcgctcgggcccgacgcgctgcgcgcgctcgttcctgaggtcgagtccgccgtgcgctccaccctcgctgcctgggacggccaggtcaggagcacgttcgacgccatgaagacgctgtcgttcgatgtgggcatcctggcgatcttcggcggcggcgggctggacgagcggcgcaaggcggagctgaggaagaactactccatcgtggagaaggggtacaactccttccccaacagcatacccgggacgctctactacaaggcgatgcaggcgcggcggcgtctgcacggcgtgctgatcgacgtgatgcgcgagcggcgggagcgcggcgcgccgggcaccgacctgctgggctgcctgatgcggtcccagggtgacgacgacggcgcgcggcggccgctcctgacggacgaccaggtcgccgacaacatcatcggcgtgctgttcgcggcgcaggacacgacggccagcgcgctgacctgggccgtgaagtacctccacgaccacccgaagctgctggaggccgtccgggcggagcaggcggcggtacgcgaggccaccggcggcgggaggcggccgctgacgtgggcgcacacgaggagcatggcgctgacgcatagggtgattttggagagcttaaggatggcgagcatcatctcgttcacgttcagggaggccgtggccgacgtggagtacaaagggttccttatccccaaggggtggaaggtgatgccgctgttcaggaacatccatcacagcccggactacttccaggatccacacaagttcgacccttctagattccaggtggcgccgcggccgaacacgttcctgccatttgggagcggcgtgcacgcgtgccccgggaacgagctggccaagctcgagatgctggtcctcatccaccatctggtcaccgcctacaggtgggagactgttggatccagcgacgaggtcgagtacaggccgttccccgtgcccaagcaaggcttgcctgtcagattatggagagaaagcagtgcggcggtggacagaaatggccgccatgagaccgatgacgatgtggaggacataatagtttgacccttaaactagctagctaggcattaatttaaccaagctagctagacaggtttttgtctttgctagctagctctcgccagctgccctcctcttctcctcgatcaaattattaccttgagggggagaagaaatggcggcttttctctttccgtttccttctcgcctttcttccctgataatgatgaaaaatgtaagatatgcagataccaatgatcattgtatcattgagatatatctatatatatagtcacccgaaacagggagctagcggtatta

SEQ ID NO: 26654 - DNA, 2446 bp, Zea Mays
ggaagatccatccatcaaagatttttcttctcggtccctctctctcgtccgtcctagccaccagcacataacaaagcaggcaggcaggctcatacagtacgctcaaagcggaaacagagcgaagaactcagcaggacagtcagctgcaaccgcaactggtctgcttgtcagcaggatcagttggatggccttgttcttcatccttgcttgcaccctcatttttgtagccatcgcctcctacgcccagtacgcgcgctggcagaaggggaaaggccgcctcggcggccatgagaaggcttcttcttcctcctcgaagctgcctcctggctccatgggctggccttacctcggtgacacccttcagctctactcccaggaccccaacgtcttcttcgcctccaaacagaagcggtatggcgagatcttcaagacgcaccttctggggtgcccgtgcgtgatgctggcgagcccggaggcggcgcggttcgtcctggtgacgcaggcgcacctgttcaagccgacttaccctcggagcaaggagcgcatgatcgggccgtcggctctcttcttccaccagggcgactaccacctccggctccgcaagctcgtccagggcgcgctcgggcccgacgcgctgcgcgcgctcgttcctgaggtcgagtccgccgtgcgctccaccctcgctgcctgggacggccaggtcaggagcacgttcgacgccatgaagacgctgtcgttcgatgtgggcatcctggcgatcttcggcggcggcgggctggacgagcggcgcaaggcggagctgaggaagaactactccatcgtggagaaggggtacaactccttccccaacagcatacccgggacgctctactacaaggcgatgcaggcgcggcggcgtctgcacggcgtgctgatcgacgtgatgcgcgagcggcgggagcgcggcgcgccgggcaccgacctgctgggctgcctgatgcggtcccagggtgacgacgacggcgcgcggcggccgctcctgacggacgaccaggtcgccgacaacatcatcggcgtgctgttcgcggcgcaggacacgacggccagcgcgctgacctgggccgtgaagtacctccacgaccacccgaagctgctggaggccgtccgggcggagcaggcggcggtacgcgaggccaccggcggcgggaggcggccgctgacgtgggcgcacacgaggagcatggcgctgacgcatagggtgattttggagagcttaaggatggcgagcatcatctcgttcacgttcagggaggccgtggccgacgtggagtacaaagggttccttatccccaaggggtggaaggtgatgccgctgttcaggaacatccatcacagcccggactacttccaggatccacacaagttcgacccttctagattccaggtggcgccgcggccgaacacgttcctgccatttgggagcggcgtgcacgcgtgccccgggaacgagctggccaagctcgagatgctggtcctcatccaccatctggtcaccgcctacaggtgcgttcgtctctcctcgcacacagattcgcttttgtccttgtggaccagaacgtacgacacattggctggtgccacgccgccatcggccaccactactcagctcccctagctagctctcacatcatacatgatcatccaaatctccggtatgtatgtatgtatgcgtgcatcgaatcgatcatatatgtgctcctataccatacactgtgggtccctcgaaatgtacgtcttcagtcttcactaggctcgatcgctgtcttcttgcacgacgactgctcgatctcctttgctatactacggacgggcatcatcagcatctcacctcagctatggcaatacttttgagttgtttactgatcttacactgagactacagcagtttcagcacgttgtttattcattacctaactagcttacactgagaatactaattaaagtggcgcgtgtgcatgcatgctttgtttgcaggtgggagactgttggatccagcgacgaggtcgagtacaggccgttccccgtgcccaagcaaggcttgcctgtcagattatggagagaaagcagtgcggcggtggacagaaatggccgccatgagaccgatgacgatgtggaggacataatagtttgacccttaaactagctagctaggcattaatttaaccaagctagctagacaggtttttgtctttgctagctagctctcgccagctgccctcctcttctcctcgatcaaattattaccttgagggggagaagaaatggcggcttttctctttccgtttccttctcgcctttcttccctgataatgatgaaaaatgtaagatatgcagataccaatgatcattgtatcattgagatatatctatatatatagtcacccgaaacagggagctagcggtatta

SEQ ID NO: 26655 - DNA, 2394 bp, Zea Mays
tcccccgccccgtaatcctgccttctagctcgaggacgagctgtttttggaggctaggagagatgttatgaccggcaacgcagcagccctaataaaatcagttagtttgtttagatggataagcatcagtttgttagtgtgatagagttaaatcagttagtttgtttagatggataagcatcggtttgttagtttggatagagtttagatgaataaacattggtttgttaagatcttagataaggtggttagttgaaggctgctatctcatctatatatatgtatcccttcaattaatgaaagatcaagcaggcaagtatcttgcccgtgcttcccccaactcagcgattgttcattcgtgctactgttcatcgggcgatattgttcatcaacgagcactgtttatcacatgaacagtaccacccttccccaaccaccatgttgatccaagacccaaaacctaccacttgtactacctttgtaaccctagttccaacatagtgccaccacctgacctcgatgccatgacgaaagccctctctgaggtcgcccaatagatggtcaacctccacgtgtagcaagtcgccatcctctcacggctaaccatcgtggagagccaagatgtcctcatcgacaagcaccatgccctagggctttctctacaggatgccgaggtacggcacaatggcgcctccaacttactccgacatcactgccataccacaaccaacaatggcatatcgtgccatccaccaccacgttgctcgccgccccaccctccattgcatcatctattcacatccacgtcatcaattccccattatcaccgtcattggtgcccaacttcttggcaccacctactctagtgttcccgcagttccctgctccagtgtcgcgaccgacagcaacccgtgacacggccaccgggttcaacaagctcaatttcacctcctatgttggcttggaggatcccctaaactggctcacccattctgagcaattttttcgagggcaacacacgctcgcatctgatcatgtttagctcgcatcgtaccatctctgcagcatggcgcaaagccgcagacacagttacacgtcctcaaacaggatgagggcatgccttcctgggagcgcttcaaggggatttgcaacctaagcttcgggccagccatctatactaaccacctctctaaattagcgtgattctcttccacctccatagtgtcagactactagaagcgtttcaacacctgctttatcacacacctcggtcggatgccgcttagaaggttgacttggtcatagggggctcctagaacacatccgtgtggacgtccaactacgcgcccccagaacctataaatggtcatgcacttggcccgggcatatgagcaccacacggaggcaacattgctagaccaggcccctgcaccaagcgccctccacatcaccagccagggatgttgtctgcaccgctagggccaccacgtgcctcacccgctagggccaccacgccaggagtggcagcacccacattccccagctcacaacaagccctcttaatcacattaagaaaattaggtttgagcaagagtaattaggtattgctgatggctgatgattggtgcagcaaaaacgcacaagccacaaggtatgcaaaactaatttaggttgtatacttctagagtgttggattattaaatgatttttttgtctaaaactgattactttatttcaattgtaggtttttttgtgcaattcataattcagattcttatgtatcaacatgtcacatttagctgtttaaaaattttgaacagtggaccaccctagctataaatcctggctacgcccctgaacagctctactgcatgacaaagtatattatctgtcgaagtccaactagtagttcatccagtggcggaggacaaaagaaaattaaggtatggctagctagtagggaaaaaaagaaaaaatgttgtgcacatggaaatcaaacaagcaaattgatgtctcatacgctaaggattaaccactgcaccacatgcatcctaatgtttataaaggaaggtatgaagattttaaaaatttaggcatggctgatgccataatcagccataaaggctactccgcagctgagttcatcacaatgacaccacatcttcacaaagctcaagtcttgattttagttccacctactgtgcgaaagcatgataaatttaccagtaagaagttctgggtacctttgtcctcgttctctctagatgttttactctttaaaacatcgatattgtagcatagcatgtaaggaaaacaagttggagaaatatcatcttaccaatcccggcgcatggcacacacttgcaaatggtctccttgcccttcttcctgaag

SEQ ID NO: 26656 - DNA, 285 bp, Zea Mays
gccggcgcccgcaatgtcgctctggagcctgctgcatcccagcaccgccgccgtcgctgtggcagcggccatacttttctgcttcgtcgcgcctgtgtgcggtgcgggcggtgagggactgtgggtgcgttgcgagttggaaggtgatgactggtaacgatgggattaggtgggaatcggcgcggaaagccgcggttacttatgcagcctctcggtcgggcctcctggctgctgtcctgtccttcctgggtctggattcccgtggagtaggaggcaatggagtcg

SEQ ID NO: 26657 - DNA, 353 bp, Zea Mays
gtttgttcggattcggcaaagggtgtggagagagtcagagccgaagtgaatttgtatcttttttttttaaaaaaatgaatatgaataaatggaaactaaagtaaaaaaaggggctagctattgcctattggcctgtggaaagctccacagcctgtgccagcgcgaaaaggcccagtgacgagttggagccgtcccaaaaggaggcctgggctcaattcagcaggaacagggagcggcaggcaggtggagctgacatactatactctactcacttgaccgcgaagcgccgcgccatgccgcgctccgctgcggcgaggaacgcctccacctcctccgccggcggcgacctcccc

SEQ ID NO: 26658 - DNA, 404 bp, Zea Mays
ttgaaagatgcctcttaggtaaatacaaatcaatatatcgtccttatgaaagaaaatgcaattcttcattctacagttcatttattatcataatttatcaagttgcaaaatttgattggctctaaaagaaacttatataatttaaaaccagctacaacgaatttgtaagacatacaaaacaaaaatattctcactctacagaatatatcattggtagtataaaattgctctatgcactgatctacggattcatatcctattggactgctagccgctggagatggtccatgaaaacctggaagctcacatcatctgtgaatatgacgtctccaccaggggagggattgtccgagttatatgtcactgatggatttaacttcgccagtaaaaatcgagcctgagat

SEQ ID NO: 26659 - DNA, 924 bp, Zea Mays
cttgggaaaagggaaaaaaaggaggagaggagaccacaatgtcggcgacgctttgagtcctcttgagcgcctcctcgttgtgcgccggccatcgtcttccaacgcgcttcctctacttgggtgtttttgttcgcacggctccagctcaccctcttctatcctctcccacatcgccgtcgaccaaagcggcagacatagcgtctcacctccggcgtcagagaacgcacgtccgttcgatggcggagatggcgctgcagcacctcgtcatgggcctgaacaactaagcctcagtcagggcctcgtggtgcaaccccctcaactccctcaccgacgctttcctcggccagtcctctaaggtgcagcctcagtacaccacaacactgtgttgcttactgggatgcatagaagacgaggttgaagaatttttttgtttagcttactgaacctgctcctgaagttgtttgtcagctgatgtctcaaattggtagcaagatcctggacaaatatattgtgaatttgatacaactatgccatgcttacattttatcttgaaatgttactgtttatggtttcttgtcagccgtgtgacaaacttaaatgaaatagcccatcacttcctgcactgcattcagatgcatatggagctgatcattcaagtgaactgcattcagatgaataaggaggcacttttacgtaccaatctcagataggaaggcacttcattgttcactcatcctagaggtcatttaccgaaagaaacaaatgtgtttgctgaatttgttcttatcttgtacacattatgtttttgacaaactgaatttggcatgtttcaaggaaactgtgttctcgtattcacatactactttttcgtgtgtggtgtattcgtatactccctttatcctaatgcatgaacgtaggtgtcct

SEQ ID NO: 26660 - DNA, 1855 bp, Zea Mays
cgcatctctcatgcatccgaccgccggctgcttcagctatcagacgcttgagctttcgagacttcacgtgaaggacccttgggaaaagggaaaaaaaggaggagaggagaccacaatgtcggcgacgctttgagtcctcttgagcgcctcctcgttgtgcgccggccatcgtcttccaacgcgcttcctctacttgggtgtttttgttcgcacggctccagctcaccctcttctatcctctcccacatcgccgtcgaccaaagcggcagacatagcgtctcacctccggcgtcagagaacgcacgtccgttcgatggcggagatggcgctgcagcacctcgtcatgggcctgaacaactaagcctcagtcagggcctcgtggtgcaaccccctcaactccctcaccgacgctttcctcggccagtcctctaaggtgcagcctcaggggattcctgaacttggtggaatagaagcaacatttacagattttgacaaaatttatggcaatagaaatgcaatcgttgttgacaagcagtggccacaataaaaaaggtatgtccctgttaaatgttgtctgcatgcagacataaaataaataatgttcattgtagtcgactgatgtctaaaaatgatattaaaaatgatgcaggtaaaaatgtgcatatggttgtcttaggactttgtcttaggactttgtcagatctataaacttgggagttagaatcacatctgttcctatccgtgttcacaatccaagtcctcaagttctaagattgttattttattttgtaaatcacaactcactataattgttcatgataattatttgtaaactagaaaacccaactatcttgctgtcaaacacttccaaaaaaataaattattctcgcgcgcagggcgcgcgttagctactagtatactacatttatgttatagcgaagcaagtagaagagtgtgatataagttgtacatcgaaaaatagcatgtaaatctatagaatcaatttccatctctcacctcattaatttaagataggtttatatgataactttagaaagtggtgaaatgttatattctaaaaaatagcatattttattagtaagattccaatttcttaaaataaaaagaaacaaacgaggcctaaggtaaaatcattcaaccattgcacacaacactgtgttggcacacaacactcgctctccaaaaacaatttttataacacaatatggaaatcattgacttggttaatataattactttttttgaaacattttctaagtcaaaattattcttttacagtacaccacaacactgtgttgcttactgggatgcatagaagacgaggttgaagaatttttttgtttagcttactgaacctgctcctgaagttgtttgtcagctgatgtctcaaattggtagcaagatcctggacaaatatattgtgaatttgatacaactatgccatgcttacattttatcttgaaatgttactgtttatggtttcttgtcagccgtgtgacaaacttaaatgaaatagcccatcacttcctgcactgcattcagatgcatatggagctgatcattcaagtgaactgcattcagatgaataaggaggcacttttacgtaccaatctcagataggaaggcacttcattgttcactcatcctagaggtcatttaccgaaagaaacaaatgtgtttgctgaatttgttcttatcttgtacacattatgtttttgacaaactgaatttggcatgtttcaaggaaactgtgttctcgtattcacatactactttttcgtgtgtggtgtattcgtatactccctttatcctaatgcatgaacgtaggtgtcct

SEQ ID NO: 26661 - DNA, 896 bp, Zea Mays
cgcatctctcatgcatccgaccgccggctgcttcagctatcagacgcttgagctttcgagacttcacgtgaaggacccttgggaaaagggaaaaaaaggaggagaggagaccacaatgtcggcgacgctttgagtcctcttgagcgcctcctcgttgtgcgccggccatcgtcttccaacgcgcttcctctacttgggtgtttttgttcgcacggctccagctcaccctcttctatcctctcccacatcgccgtcgaccaaagcggcagacatagcgtctcacctccggcgtcagagaacgcacgtccgttcgatggcggagatggcgctgcagcacctcgtcatgggcctgaacaactaagcctcagtcagggcctcgtggtgcaaccccctcaactccctcaccgacgctttcctcggccagtcctctaaggtgcagcctcaggggattcctgaacttggtggaatagaagcaacatttacagattttgacaaaatttatggcaatagaaatgcaatcgttgttgacaagcagtggccacaataaaaaagccgtgtgacaaacttaaatgaaatagcccatcacttcctgcactgcattcagatgcatatggagctgatcattcaagtgaactgcattcagatgaataaggaggcacttttacgtaccaatctcagataggaaggcacttcattgttcactcatcctagaggtcatttaccgaaagaaacaaatgtgtttgctgaatttgttcttatcttgtacacattatgtttttgacaaactgaatttggcatgtttcaaggaaactgtgttctcgtattcacatactactttttcgtgtgtggtgtattcgtatactccctttatcctaatgcatgaacgtaggtgtcct

SEQ ID NO: 26662 - DNA, 1052 bp, Zea Mays
agaaaaaactgcaccgtccgatcgctgctcagcagccacgcgcatctctcatgcatccgaccgccggctgcttcagctatcagacgcttgagctttcgagacttcacgtgaaggacccttgggaaaagggaaaaaaaggaggagaggagaccacaatgtcggcgacgctttgagtcctcttgagcgcctcctcgttgtgcgccggccatcgtcttccaacgcgcttcctctacttgggtgtttttgttcgcacggctccagctcaccctcttctatcctctcccacatcgccgtcgaccaaagcggcagacatagcgtctcacctccggcgtcagagaacgcacgtccgttcgatggcggagatggcgctgcagcacctcgtcatgggcctgaacaactaagcctcagtcagggcctcgtggtgcaaccccctcaactccctcaccgacgctttcctcggccagtcctctaaggtgcagcctcaggggattcctgaacttggtggaatagaagcaacatttacagattttgacaaaatttatggcaatagaaatgcaatcgttgttgacaagcagtggccacaataaaaaagtacaccacaacactgtgttgcttactgggatgcatagaagacgaggttgaagaatttttttgtttagcttactgaacctgctcctgaagttgtttgtcagctgatgtctcaaattgccgtgtgacaaacttaaatgaaatagcccatcacttcctgcactgcattcagatgcatatggagctgatcattcaagtgaactgcattcagatgaataaggaggcacttttacgtaccaatctcagataggaaggcacttcattgttcactcatcctagaggtcatttaccgaaagaaacaaatgtgtttgctgaatttgttcttatcttgtacacattatgtttttgacaaactgaatttggcatgtttcaaggaaactgtgttctcgtattcacatactactttttcgtgtgtggtgtattcgtatactccctttatcctaatgcatgaacgtaggtgtcct

SEQ ID NO: 26663 - DNA, 381 bp, Zea Mays
aggaggtctggattctgatggtggaggagccttcgagccgtgtgacaaacttaaatgaaatagcccatcacttcctgcactgcattcagatgcatatggagctgatcattcaagtgaactgcattcagatgaataaggaggcacttttacgtaccaatctcagataggaaggcacttcattgttcactcatcctagaggtcatttaccgaaagaaacaaatgtgtttgctgaatttgttcttatcttgtacacattatgtttttgacaaactgaatttggcatgtttcaaggaaactgtgttctcgtattcacatactactttttcgtgtgtggtgtattcgtatactccctttatcctaatgcatgaacgtaggtgtcct

SEQ ID NO: 26664 - DNA, 796 bp, Zea Mays
atgctcgatggacatggcgctgtgcgtgcgcccaccaacgctcacggtggccttgggcatcatcgccacgagcatttgcggggtggtaggtatcccatgctccaggaacgcctgcagtagtacggtattaagatctgagtttggccaaaaaccatgcacagtagcggcagcatgaagagttgattaggcgcgcgcctgctaatcatgatcagggaagggggacatggagcatttctttatgcaaaggtttattaatggcgaaccaggcagcttcccacggccaggccactgtacagacatgcatgccgccagacaccaggcttaaagaacacgcatcccggaagctagtacccacatgtccaggctgttagtagttgctttaatagcaaaccgaattgcgaattttgctgtcttcttcttttaaaaaaaaacacacaagaagaggaaacacccaactctgaaatgtgactgcccgatggcttacgttcatcatgcaggaattgtagacgttgatccagaaggccagcttctgctgatgggagagccccgccaggtcaaccgacgacagcctccgcagcaaggccttgagtctccgacgaacgagaggcgtgtcgccgttgccgtcgaaggacgcggcgtcgaccacgtggaaccgcttgtaggcgccgatgtccctggcgcccagctccaggatgccgtaggggtcctgcgggtacgcgtccgcctccgacgacgccgagctctcgctggagccggagaccgacggggacagcgcctgctggtcctcgtctcctag

SEQ ID NO: 26665 - DNA, 3173 bp, Zea Mays
ggttgggagaggagcacgtggccgtccagaatccagtgatccaccacaaccgcccgtccattctccaggccatgccgcgcacggcactgctccgcctcgccgctgcttcgacgacgcgcgcgtcctcggcttccgcggcggcgcggcgactgtgcccgtcctcagagtcagacgacggcggcgagcggcacgcggccgcccggaaggatgagctcctcccgccgccccgcacgccgcgccccgacgagcggcggctgtctcggcgtggagagcatcggtgagcatggagccatggatagatatagtagtaaaagcgtgcattcgagcacttctctgctcgcgcgaatacctcgtgtgtgtgtgtttcttgtttttcctgtccccgctgcggtcatcttcgtttccgtcgatcacgctcattattcaatggcgggtctgcattctttttctatttttttcctcaaaaactaccagcaggacgtctggagtattcttcttctaatcatgatacgtcgtcgtgcgtcgtaaaacgacacatgcgtatggattggacacaggcaactccaatcactctaccgtatccgtatggacgtttgtagaccattcattgatcattgcgggcctaataaatacggtcctgcctgccaggtgtcccacccactgcaaccgctccaacaagtagggaattgaacggtgagggtcgctccaccgcacatccaatccgacggcacgactctcgcgcgggtcggtcgccccggcccacacccacactggagcgtcaatgaaatttcagccccaaacagtccaatcacggtaactaatcactttgcacgaaaacagattaaaacaataaaaccaccgccaccgccacctcgacctcgactcctccgccccatcgccgtcgtccccgtctcctccgccttgctgtctgtccgctgctcacctcccctaaaaggaggcacccccggccattgccgcaccaagctccccttcctcgaatgccccaggcccggacaccacgacgccctgccccgtgctcacatggctagcggcgtcctccaccgctccgcctcccgatgtctccgccctgccgccgcgccaacccccgactccggcaggggccacggcgcggttatgatcggtgattcggggacgcgcggtgttgctctgcggctgggaggatctagccggagagagttattatctgtcacaatggcctccagagaccacactggcttgacccgacaacttttggattttcaacatgatacaatagatgaggtaggtgcagaacacggtccattcatggatttgaaagcgagattcatggacttcaaacagagaaactatgtggagaatttttcaaattaccaaaatcttgctgaacagcaaacaccaaagttcatggtgattgcttgtgctgactccagagtctgccctaccgctgttttggggtttcagcctggcgaagcatttacggttcgtaatgtggcgaatttggtaccaccatatgagcatgagggatcagagactagtgcagcactagagtttgctatcaatacactcgaggtagagaatgtactggtggtaggccacagtaggtgtgggggcatccaggcactaatgagcatgaaagatgattcaacgtccggaagcttcattaaaaactgggtttcaattgggaagagcgcaaggttaagcacaagagctgcagctggaaatttgagttttgacatgcagtgcaaacattgtgaaaaggaatcaataaatagctctctgttgaacttgttaacatacccatggatagagaagagggtgaatgaagggttggaaggtggaagcaagtacgctataaagaataggtccacctggtcttgaccaatgaaggcctcatttacttgggtaaatttcactctgcgccctgcagttaagcatggttttgctttgccactacgctgtgcatttccgtcgcacctttgctccattgtggtattgatgtcctgcagaagcgagtccctgtatcaaataactgtgtccattgcgatgcatggcactatggcactagcatgtcagcttgctgtagtattgcatactcacgggcaggtgcatcggcattgtagttgtagcagctattgtttgatacgtacaggaactctccactgtggaagcacaaagccacaatggagtgaggtgcgacgcaatgaacaatatggtggcaaagtgaaagtctgtggaactaccggggggcaaagtggattttgtgcaactatttgtgtgtcgttttccggttgataccattgagaaaatacgaataagttacaggatcagtcatagtgcatgtaattgtcgccacatttggcgttaccttgttattgtaattgtaacatttgtaccatttgttgtatcattataactgtgagatacaatacaaatattatacggtctcggcaaatttgcttgatgacagtgttgttcgttcggaagagtcggcaatgcaaattctgtgatattccacatgttccaactaaaaaagtacgagtagcaccatgggagacatgtcacacagtaccccttcccttccgtctcccatcactccatcagtcagtcacttctacggcgccactgtcgtaaaccctagcgaggtgcgccgagaagcgctgcctcttgtagcactcggcgccgagcatctcctcccggctgagcagcacggcccggagcgccgcctgcagcgctggccgtgacgacgtcgacgttccctcgccatcgtggtgccgcccgccgacgtccagctccaggacgctccgcgtcctcccgccgacggtggctatctccgcgcgcacggccctcgcgctgacggaccgcacggcgcggcccagctcggacatgagccccgggcggtcggcgcagcacacccacgccctgacgcgcctggcggccctctccccgccgtggcagaagcggtgctggtggccctcctcgacgccgacctcgtcgccttcccccgggacggccactgccgcgcccgccgccgcggcgtccgcctcgccccgcagctcccgcacgtgccgcaccacctcccctagcagcgccgccttgtccatctgcatgattaattcgtacacgcacacgtacgtaaccgtgttcgctatcgagttcgatgatgaactgccacg

SEQ ID NO: 26666 - DNA, 2313 bp, Zea Mays
cttctctctctctcttctatagagccaatcgcaaagcgcggtgctgtcatggaggttgggagaggagcacgtggccgtccagaatccagtgatccaccacaaccgcccgtccattctccaggccatgccgcgcacggcactgctccgcctcgccgctgcttcgacgacgcgcgcgtcctcggcttccgcggcggcgcggcgactgtgcccgtcctcagagtcagacgacggcggcgagcggcacgcggccgcccggaaggatgagctcctcccgccgccccgcacgccgcgccccgacgagcggcggctgtctcggcgtggagagcatcggagagagttattatctgtcacaatggcctccagagaccacactggcttgacccgacaacttttggattttcaacatgatacaatagatgaggtaggtgcagaacacggtccattcatggatttgaaagcgagattcatggacttcaaacagagaaactatgtggagaatttttcaaattaccaaaatcttgctgaacagcaaacaccaaagttcatggtgattgcttgtgctgactccagagtctgccctaccgctgttttggggtttcagcctggcgaagcatttacggttcgtaatgtggcgaatttggtaccaccatatgagcatgagggatcagagactagtgcagcactagagtttgctatcaatacactcgaggtagagaatgtactggtggtaggccacagtaggtgtgggggcatccaggcactaatgagcatgaaagatgattcaacgtccggaagcttcattaaaaactgggtttcaattgggaagagcgcaaggttaagcacaagagctgcagctggaaatttgagttttgacatgcagtgcaaacattgtgaaaaggaatcaataaatagctctctgttgaacttgttaacatacccatggatagagaagagggtgaatgaagggttggaaggtggaagcaagtacgctataaagaataggtccacctggtcttgaccaatgaaggcctcatttacttgggtaaatttcactctgcgccctgcagttaagcatggttttgctttgccactacgctgtgcatttccgtcgcacctttgctccattgtggtattgatgtcctgcagaagcgagtccctgtatcaaataactgtgtccattgcgatgcatggcactatggcactagcatgtcagcttgctgtagtattgcatactcacgggcaggtgcatcggcattgtagttgtagcagctattgtttgatacgtacaggaactctccactgtggaagcacaaagccacaatggagtgaggtgcgacgcaatgaacaatatggtggcaaagtgaaagtctgtggaactaccggggggcaaagtggattttgtgcaactatttgtgtgtcgttttccggttgataccattgagaaaatacgaataagttacaggatcagtcatagtgcatgtaattgtcgccacatttggcgttaccttgttattgtaattgtaacatttgtaccatttgttgtatcattataactgtgagatacaatacaaatattatacggtctcggcaaatttgcttgatgacagtgttgttcgttcggaagagtcggcaatgcaaattctgtgatattccacatgttccaactaaaaaagtacgagtagcaccatgggagacatgtcacacagtaccccttcccttccgtctcccatcactccatcagtcagtcacttctacggcgccactgtcgtaaaccctagcgaggtgcgccgagaagcgctgcctcttgtagcactcggcgccgagcatctcctcccggctgagcagcacggcccggagcgccgcctgcagcgctggccgtgacgacgtcgacgttccctcgccatcgtggtgccgcccgccgacgtccagctccaggacgctccgcgtcctcccgccgacggtggctatctccgcgcgcacggccctcgcgctgacggaccgcacggcgcggcccagctcggacatgagccccgggcggtcggcgcagcacacccacgccctgacgcgcctggcggccctctccccgccgtggcagaagcggtgctggtggccctcctcgacgccgacctcgtcgccttcccccgggacggccactgccgcgcccgccgccgcggcgtccgcctcgccccgcagctcccgcacgtgccgcaccacctcccctagcagcgccgccttgtccatctgcatgattaattcgtacacgcacacgtacgtaaccgtgttcgctatcgagttcgatgatgaactgccacg

SEQ ID NO: 26667 - DNA, 2495 bp, Zea Mays
gtcatttggactccattattccaaatgacggctgtgtgtgtataagctagactatatatggctggacgggccaaatatacacgattaggcgacagcgttgttttgcaggtcaaatttgtacttgatcaagacacaccgtatggatttgggcctcaagtgtctttgttaagacagagaagttgccacacatagattcgaccataaaggcgagagaaaacaaagaccgggccggtgtcgcgatcgcatattctaaaccgcaattttaaaggcggtggaggccttggagtggagccagacgaccacttggaaaacagcagccgggagggagagagacaagcatgcaccaaaggcacgagcgcgaccggcggcgtcggctcggccctgagctgccgctgggtgaccatggtgaattcgatgagggaagcggtgagaaagcgagcgcagatactgttgttagctactagtagagtgaaaccagggttagtaagcaaggccaacgccaaggcagctacggccaacggcagcggcttgcatccagccttcattcctgcagcaaagcggcgcgtcaaaactggcaggcagcccagacgctcgagaacacatcaacacaccacacacaggtcaggcacgcacaagaaacacctgccaccgccggcggccgcccggtcgctcgctgccgatcgacggccatggacttcgacgaccacgacgacagtgacgaggagatggcgccgatgccgatgccgatgccgatgccggtgagctccagctacgacgccccgcctctggcagctgggttcggtggcggcggcgtggagccgctcagcgttcgcgccaaggccccggcgggcggcctcggcggcggcggcggcggcggcgggaggagggcacgctcggcgcgctccgctgcgccgcgtgcggctgccaccgcaacttccaccgcaaggagcccgccgcgggctcgctcgtctcccccgccgcgctggccgcctacggcagcgccgcgccgcaccaccaccacttctccccgtactgccgcaccccggccgggtacttccaccagcagccgctgcagatggccccgcccgtgcccgtggggcacacgccgcggccgctggcgctgccgtccacgtcccacggctggcgcgacgacggcgacggcgacgacgacttttccgggatggccgggccgctgtcgtcggcggtggggccgctgggcggcatgtccctcggcggcaccaccgggccttccggctcgggcgggtccggcaagaagcggttccgcaccaagttcagccaggagcagaaggacaggatgctggcgttcgcggagcgcgtggggtggcgcgtccagaagcacgacgaggccgccgtgcagcagttctgcgacgaggtctgcgtcaagcgccacgtgctcaaggtgtggatgcacaacaacaagcacaccctcggcaagaagccgtagcgcgctagcaccatcacctgacctgacctgacccccggacgcgtgtgtactcccatcccatccgtacacggaagagccacgtacacgcttgcattttgttgatcgcagatcgatcgggggtggccggggccagcccctccggccggtaggtacacatgtgcatcttctttgtcagcattcttgtttcggctccggcgccttcgtggcggcgtaggttagttgcagtaactcgtagcgagctgcatatgctccatcgatcttcttgccggcggttctttcagttctcatttacccgtacttgttggtgttgtttattaattaattaattcggcatggccatttgccggtttgcttggtttcttactactattcttcaacgggaaatgtacgtggccttgcgacgatgggatgcgctgccggcgaacagagtgtgtatctggggattgcggccgcatggattctgtcattctgtgtgtttatatgtctcgtgctcgtgccctgccttcttatattttttgtggttggacctgcgcgccgggatcagctccgatgatgatctttttttttcctctcttgctcatgttttgcttcctagttagatgctgcatgctgcgcctaaagaagataggagtatataggtcacactgttcgtccattatctatactcctctttgcattgtacagtatattctctacaaagtcgttgccacgcacgagtcctccagtgcttcttcttgctcaagccatggaggggtgtgtgcgtgcgtgatcttctcgcgacttgatttacatttcctgatcacactatggaggtgggtgtaagttatttttaccatgctggattgctggtctgtagtggagagtaaactatactgccccttggtaaattctcccctcaattttttttacttgatccatgcatgcatgcatcatgtatgtacagacgactacagatgcaatgtgtactgtacacgcttgtaattttggcctcttcagcttgggtcatcaatgcccttgaaacgcgtttaat

SEQ ID NO: 26668 - DNA, 1776 bp, Zea Mays
cgcgactgctcgtgatcttctgacatcgtcgacccagctgatcctggcgcgcgccaacaatcagtaagtctaatcagtacgcatcatctgatttgacttttatttcagttcttctgatttggtcatgatttacattcggaatttaatttggaatttgtctacttattcaacagaaacaccggcgcaggcgcaggcgcagggcaccactcatgtcgccggcactacgactacgaggacactccgcaacccgctcctcgtcgtcaacttcgtcctcatggtcgtgggctcagcgggcggcccgctgttcctccgcgcctacttcctccacggcggcgcccgcaagtggctctcggccttgctccagaccgccggcttcccgctcctgctcgtgccgctctgcgtctccttctcccggcgccgccgccggcgcgacgacggcgcgccggcgaaggcgccgttcttcctcatgacgccccgcctcctggcggcgtccgcggccatcggcctcatgaccggcctcgacgacctcctctacgcctacggcctggcctacctgccggtgtccacgtcctccatcctcatctccacgcagctggccttcacggccgccttcgcgctgctgctcgtgcggcagcggttcacggccttctcggtgaacgccgtggcgctgctcagcgccggcgccgccatgctcgggatgaacgccggcggggaccgccccgcgggcgtgtcgccggcgcagtacggcgccggcttcgccatgacgctcggcgccgccgcgctctacggcctcctgctccccgccatggagctcagccaggcccaggcgcgcgccggtactgccgcggctgtcacctacacgctcgtcatcgagatgcagctcgtcatcggcctcaccgccaccgtcttcagcgccgtcggcatgctcgccaaccatgatttgcacaagcccgggccgcctgtgttcccggccaggagagaggacgcccgcccgttcgacttcaagggcgtgtggcaggcgatggaggagtgccagcggctagggctcgctagggccatcggcgtcagcaacttcaggaccaagcacctcgacaagatgatgccttttgccaccatcacccctgcggtgaaccaggtggaggtgaacccggtttgccagcagctgaagctgagggggtactgcgccgagaagggcatccacgtccaggcgttctcgccgttgggaggccagagctgggcggcggaaagaaacgccgtgctcgagtccgaggtcctcgcggagatagccaaggcgagagggaagaccgtggcgcaggtgtcgttgagatgggtatttgagcaaggggtgagttttgtcgttaagacctacaaaaaggagaggcttaaggaaaacctcgagatcttcgactgggagttgactgacgaggacagggtcaagatcagccggatcccgcagaagaagctttctggcttctcattcatgttcaagccggaaggtgagttcacatcggttgatgtctcggagatcaatcctatagaggagtaggcgctaaagaaatgccttgattctcaataagccaatttcgcttgatgtagtacctgtatatatttgaataaggcagcattgactgtccgttgttgaactcaatcgtttttttacatccgaaatcctgtcatgtaaatcagtataaaaggacgaattttttgggaactccctctgtctctggttcataacttcatatacatattcagaaacatgcatagtggaattttggg

SEQ ID NO: 26669 - DNA, 1740 bp, Zea Mays
gcggtaaccgctgcgaacagccttaggagggagtgtagagctgaaaaggcaatccccggagaggcgcgggagttcgatctcggccggtcaggctactacctactgctggccgggtcagccgccacgtaccagtgcttcttcctcggcaccatcggcgccgtcttctttggctcggcgctgctcgccggagtggtcatgaccgtgcttatcccggtcactgaggtgctcgccgtcgtgttcttccacgagccgttcaacggcaccaagggcgtcgccctcgcgctctcgctctggggcttcgtctcctacttctacggggaggttcaaacatccaaggcgcaccaccacctgcctgacaagccaacaaatgtcgagcgtttggacccatagatgatggtgatatggcgttcccgggagtaagttttcaccccgtatttgaggaataagcaagccatatcaaatcatattatacaacaatctatataggggagtatgaattttcttgtacagtctaatgtctcccatgcatggacctatagagcatactatgtatatatgttggtgtatatgtacttaaacaaacttgaccatgcaaaggtaagattaatcctagccattgcatcaaaaggatgactttgaaggaccggatcaagcaaccggaaaggggtgaatggaagtcaataaaaatatttacactcggtgtaactttggctcgtttcccaatattataccctaacctttaaaaattcaaatgacacacaagtgatgtggaaaattttctaggacatacacgactccaacgaaacaaatggatcgcaggacaaacattgaaaaatccgaaacgacctaaaaatatgtcactaactcagattgttttcaacatctcgaattttagttttagaataaaaaatcataaaattttacatacaccttcagaagggagtttctaaggtgtacacaaaattttgaactcaaacgggtttaaacttcaaagtaagaccagaaaactcaaacttgccttggagttttgtcaaaataacatctattagaaaaaatatccatgaattggatcgactcataccaaaaggttgcaacgaatccaggacgatttctaaaccataaattaaccccaacacacttcccaaacaagtgaagacaaggatcaactcaaaactcaaagtagaggggttgggagtagaagaaaacaaatcaaaagcaaataccatcagatgtgatacgaaatgaaaaaccaagatggcaacatgtggttatggccacacttcctcagaactctataaacttagatgacgaggttcaaaacatctaaagatctcttagctaaaatgagaaagactaagtgatggaaatgaaaatggtaaaagagatagctaaatgatccggccctcccctccttttatagagggttgttcattattcctaaactattcctagatatagagttgtgatgccagattccatgagtcgtggcgtaatgccccaacacaatgcaatctctctaactctccctcagcccaacaatagtaccatgtctagtcctcattctatttcggtcgatctctcatagtcgcacaaatgggcaatgggacagacggtgagtcaatgttaaggatcgcaaaatttcctacaggaacgaggcctatggggaacctctccgttcgagacggggacatgactagtttctcatttgtgaggctagtcgagcggggcccgtaaataaac

SEQ ID NO: 26670 - DNA, 1261 bp, Zea Mays
ggcaaataagctcacccgttgaatccctccacctttgatgatcatgccatgccatagtgtcctgtcctgatcacactgcctttttcatcatatagagtagaaacttagataagcttttgccctttgattctgaactgagagagtgtgcactgtgttgtgcctgtgcaaggcgtgtacttgtactgtaccaggggggagacggtagtgtagtactgtagtgggtgacgactgacgaccatgggtttcccaatgactaccgccattgttcctcccccgagatggctttatccccgattatctgaggtgtacgtcgagcatttaaaagggcattttccgcggtttgagaaacgaggagatctatctccttctcgcttcttattttttatttggtttgtgaaatagaatgatgtgtctatcaccaacacattcctcataatataataattagtatatacatgagaaataagttaattccaccaaaatttatagaacaaacttataatgcatcaatttataaagtataaggtgactcaataaaccaaacacatcgtaaagaggacggcgagtgctatcagtcatcagaaattcagaacctttgttctccctgcctcctcaaagcaagacatcggttcactgacagccaagacgcgcgagatatgacactaagaggcgatcccgagggaggcgaggcagtacgagctgggggaggcccggtactacatggtgctggcgtgggcggcggtgctgtggcagtgcttcttcctgggcgcggtgggcgtcatcttctgcgtgcacacgctgctggcgggcatcctcatcgccgtgttcatcccggtgacggaggtggcggccgtcatcttcctgcacgagaagttcagcagcgagaagggcgtggcgctggcgctctcgctctggggcctcgcgtcctactcctacggcgagtggagccaggccaaggccaagaaggagaagaagagcgaggaggacgacggcgaagtggcccaggcagtcccatgatccgtgccccacacacacaaacacaatggtctgccccgttgtactctctgtctgtgtgtatgtaaatgttgtgttgattgcggccgtgttggtcctgtgaatggcgtcctgagtcgtcggttgtcagtgatgtttgatttccagggattaatcttttgtctctttatttttattttatttaataatttacatattaaaataaaatagaatatatgaactaaatattagtctttagaaatcaaat

SEQ ID NO: 26671 - DNA, 895 bp, Zea Mays
ggcaaataagctcacccgttgaatccctccacctttgatgatcatgccatgccatagtgtcctgtcctgatcacactgcctttttcatcatatagagtagaaacttagataagcttttgccctttgattctgaactgagagagtgtgcactgtgttgtgcctgtgcaaggcgtgtacttgtactgtaccaggggggagacggtagtgtagtactgtagtgggtgacgactgacgaccatgggtttcccaatgactaccgccattgttcctcccccgagatggctttatccccgattatctgaggcgatcccgagggaggcgaggcagtacgagctgggggaggcccggtactacatggtgctggcgtgggcggcggtgctgtggcagtgcttcttcctgggcgcggtgggcgtcatcttctgcgtgcacacgctgctggcgggcatcctcatcgccgtgttcatcccggtgacggaggtggcggccgtcatcttcctgcacgagaagttcagcagcgagaagggcgtggcgctggcgctctcgctctggggcctcgcgtcctactcctacggcgagtggagccaggccaaggccaagaaggagaagaagagcgaggaggacgacggcgaagtggcccaggcagtcccatgatccgtgccccacacacacaaacacaatggtctgccccgttgtactctctgtctgtgtgtatgtaaatgttgtgttgattgcggccgtgttggtcctgtgaatggcgtcctgagtcgtcggttgtcagtgatgtttgatttccagggattaatcttttgtctctttatttttattttatttaataatttacatattaaaataaaatagaatatatgaactaaatattagtctttagaaatcaaat

SEQ ID NO: 26672 - DNA, 229 bp, Zea Mays
acctcgtgagccggttttccatgacatgatggtggcgcctaattttgctggtcgtgtgtgccggatatcgcgatgtcagcagatcggcatgaaatgctgtcgagaagggagaaggccacaaacttcaaaccagactatgatattgatatccatatgaagtaccatagctcataacctgcttgcctctaggaatgttgcgaacaacgatttcactggttagattcccaat

SEQ ID NO: 26673 - DNA, 212 bp, Zea Mays
catccggccgtccacctcgtgagccggttttccatgacatgatggtggcgcctaattttgctggtcgtgtgtgccggatatcgcgatgtcagcagatcggcatgaaatgctgtcgagaagggagaaggccacaaacttcaaaccagactatgatattgatatccatatgaaggaatgttgcgaacaacgatttcactggttagattcccaat

SEQ ID NO: 26674 - DNA, 375 bp, Zea Mays
cattgatcatccggccgtccacctcgtgagccgagagcaggttttccatgacatgatggtggcgcctaattttgctggtcgtgtgtgccggatatcgcgatgtcagcagatcggcatgaaatgctgtcgagaagggagaaggccacaaacttcaaaccagactatgatattgatatccatatgaaggtcttagctatgagtgggcaagaatccagtattcttacaggctacaaactgaagtgctgatacggtggtaggaaatgagatgatgatgggtatttttggtgcttcatttgcatgtccagtaccatagctcataacctgcttgcctctaggaatgttgcgaacaacgatttcactggttagattcccaat

SEQ ID NO: 26675 - DNA, 226 bp, Zea Mays
cattgatcatccggccgtccacctcgtgagccgagagcaggttttccatgacatgatggtggcgcctaattttgctggtcgtgtgtgccggatatcgcgatgtcagcagatcggcatgaaatgctgtcgagaagggagaaggccacaaacttcaaaccagactatgatattgatatccatatgaaggaatgttgcgaacaacgatttcactggttagattcccaat

SEQ ID NO: 26676 - DNA, 280 bp, Zea Mays
cattgatcatccggccgtccacctcgtgagccgagagcaggttttccatgacatgatggtggcgcctaattttgctggtcgtgtgtgccggatatcgcgatgtcagcagatcggcatgaaatgctgtcgagaagggagaaggccacaaacttcaaaccagactatgatattgatatccatatgaaggtcttagctatgagtgggcaagaatccagtattcttacaggctacaaactgaaggaatgttgcgaacaacgatttcactggttagattcccaat

SEQ ID NO: 26677 - DNA, 197 bp, Zea Mays
cattgatcatccggccgtccacctcgtgagccgagagcaggttttccatgacatgatggtggcgcctaattttgctggtcgtgtgtgccggatatcgcgatgtcagcagatcggcatgaaatgctgtcgagaagggagaaggccacaaacttcaaaccagactatgatattgatatccatatgaagctatgagtggg

SEQ ID NO: 26678 - DNA, 893 bp, Zea Mays
gtaccacgacgaaagttcagagcgggaaggcggggagaagtgtgataaaggaaatggggcacacctcatctggcaatgaagtgcccttgaaatattcttcaggcaaagctttccccctaggagtgtcacaagttgacgatgggctaaattttgcaatattctcacagcatgcttcttctgtcaccctttgcttgaaacttcctgagagaggcacccaagatgatgcggacattatagagtttgctttagaccgccagaagaacaaaactggagatatatggcatgtgtcagtggagggtttgcctgcttcttgtgttctctatgggtatcgtgttagcggtcctcaagggtggcaacaagttgaaaaagagaagccaagccagcttttcggaacatatgattttgatagctccccttttgactggggtgacaattataagcttcctaatttgcctgagacagatcttgttatatatgaaatgaatgtccgtgccttcactgcggatgagtcaagcaagcttggtccagccattcgtggaagttaccttggtgtcattgacaaaattcctcatttgctggaacttggcgttaatgcagtggagctacttcctgtttttgagtttgatgagctggagtttaagagattccctaacccaagggatcacatggtaaatacatggggatattctacaatcaacttttttgcacccatgagtcgttatgctagtgcgggtggtggacctgtggctgcttccaaagagttcaaacagatggtgaaggcatttcataatgctggaattgaggtctattacatattagatctcaacaacagtgcacagctgctgaacttctcgggttgcggtaaaaccatggtcctaagcttctctttctaa

SEQ ID NO: 26679 - DNA, 1591 bp, Zea Mays
gggatttgatgccttgcggtcttgcggagtaccacgacgaaagttcagagcgggaaggcggggagaagtgtgataaaggaaatggggcacacctcatctggcaatgaagtgcccttgaaatattcttcaggcaaagctttccccctaggagtgtcacaagttgacgatgggctaaattttgcaatattctcacagcatgcttcttctgtcaccctttgcttgaaacttcctgagagaggcacccaagatgatgcggacattatagagtttgctttagaccgccagaagaacaaaactggagatatatggcatgtgtcagtggagggtttgcctgcttcttgtgttctctatgggtatcgtgttagcggtcctcaagggtggcaacaaggtcatagatttgatgacagcgcttttgactccgtgtcatggccgtttctcattggggttttgaggaaaatggggtttgggcagatttggtgtgatgttgtttgtgggctgttggctacttcctccacaagaattttgctaaatggcgttcatggggagatcatttcgcaccagaggggtctaaggcaaggagacccactatcccctatgttgttcattttggttatggatgttctgaacttgctcattcaaaaggcttccgatgaagggttacttcagcagctatcagctgggactttgcatcacaagctttctctttacgcggatgacgcggtggtttttcttaggccggtggcttcagacatcaatttggtcctggagatccttcggctttttggggaagcctcggggctcaagaccaatgtcctgaaaagtagtgtgttccccattcgttgtaccgaagatgatttgatgcgggtccaagcttctctcccctgccccatttcagatttcccgtgtcaatatcttggactgcccctgtccttgggaaagctttcaaaggcccaactacaggcattggtggacaaagcagctagtgtactcccgggttggaaggccgacctgatgacaaaagcgggtcgagctgtttatgttcagtttgttctcacagcaaaaatgatttatgctgcgatggctttggacctccctaattggaccaccaaagctattgacaagataagaagaggtttcctttggaaaggaagaaaacaagccaatggtggtcactgtttagtggtgtggggtaaggttactaggcctaaagttctgggcgggcttgggatcactgatctttggcttttgagcgtggcgcttcgagctaggtggccttggctccagagaaccgatcactctaagccttggtcggtcctccctgttcaggcctgtggtgcgatggaagccttgatcaatgttgcagttgtgtctcaattgggtgatggacatgatatcctcttttggaaggatcggtggctgaatggtagatgcatcggtgaggtggcacctgaggttcttgagcatgtacctacgtgtgtcgcttccaaaaggctggtaaaagatgctctaacaaatctgaattgggtggctgatataaggggtgcgctttcagtcagggcgcttgcacaggttttggatctctgtgacttgt

SEQ ID NO: 26680 - DNA, 921 bp, Zea Mays
gtgtggcggaggtccgaacctctggaggcccagctgggcgagcccgagtgctagcccaattcacccccaggtcacaccaaattgccaaccgccctcattccaaaccctagccgtcgccagccttggagctctcggacacggcggctcctcctccactccccctcgactcctcctccatccccgacgcgacggctccatccccgacgctgagctccatatctgcttgtccgccggcggcggctaccactcgccagcaagccatctcctggagctggaggggtctgcttcctccttgactgcccatcgacatcttcgccctcgtggccttcgcgtcggtgcccctcgcctgtgatgcaggggtctcatccatgtggtgccacactactggttgccaacgaccgggaaggaaggtggtgtggatgccgtgctcgtgtcttcctctacagggatgctcagattccccttcctcactgggctccttagattcgccaacacgaaggagtaataggagctaataatatccaaccatcaatccagcagaatttaataggatatgagttgatatcaaatgcagagtttacattttcaccgtggacaccttttcctaccaagaggttcaaattttactgcaaaatcaacgagttcttggtggtgttggtatggcatccgatccaatggtggcacgtagaagtaaaatctgaaacatttgttttgatggttagcttgcattttatgctataattacctcaaatcacgtgttgcctttttcaccaatttatgacatctattgacatgttttactttaatttacgacatttattgatgtgttttgcgacaacctcatgtggggccacatttgccattatgaaatagatcgatgatttatgctaaaattcatacccatttacactgtgttgtttt

SEQ ID NO: 26681 - DNA, 1093 bp, Zea Mays
ctcacctgtgtgtggcggaggtccgaacctctggaggcccagctgggcgagcccgagtgctagcccaattcacccccaggtcacaccaaattgccaaccgccctcattccaaaccctagccgtcgccagccttggagctctcggacacggcggctcctcctccactccccctcgactcctcctccatccccgacgcgacggctccatccccgacgctgagctccatgtcttccctcacctcggtcctagactcccaggtgaaaacttcagactctgaccctgtccccataacgtgtgcctcctgccctcctcgcagatctgcttgtccgccggcggcggctaccactcgccagcaagccatctcctggagctggaggggtctgcttcctccttgactgcccatcgacatcttcgccctcgtggccttcgcgtcggtgcccctcgcctgtgatgcaggggtctcatccatgtggtgccacactactggttgccaacgaccgggaaggaaggtggtgtggatgccgtgctcgtgtcttcctctacagggatgctcagattccccttcctcactgggctccttagattcgccaacacgaaggtatatgtgacagaggtagcagcaaggatgggagctaataatatgatttgacttctctggtgtctctatatatgagtaataggagctaataatatccaaccatcaatccagcagaatttaataggatatgagttgatatcaaatgcagagtttacattttcaccgtggacaccttttcctaccaagaggttcaaattttactgcaaaatcaacgagttcttggtggtgttggtatggcatccgatccaatggtggcacgtagaagtaaaatctgaaacatttgttttgatggttagcttgcattttatgctataattacctcaaatcacgtgttgcctttttcaccaatttatgacatctattgacatgttttactttaatttacgacatttattgatgtgttttgcgacaacctcatgtggggccacatttgccattatgaaatagatcgatgatttatgctaaaattcatacccatttacactgtgttgtttt

SEQ ID NO: 26682 - DNA, 872 bp, Zea Mays
ctggctcacctgtgtgtggcggaggtccgaacctctggaggcccagctgggcgagcccgagtgctagcccaattcacccccaggtcacaccaaattgccaaccgccctcattccaaaccctagccgtcgccagccttggagctctcggacacggcggctcctcctccactccccctcgactcctcctccatccccgacgcgacggctccatccccgacgctgagctccatatctgcttgtccgccggcggcggctaccactcgccagcaagccatctcctggagctggaggggtctgcttcctccttgactgcccatcgacatcttcgccctcgtggccttcgcgtcggtgcccctcgcctgtgatgcaggggtctcatccatgtggtgccacactactggttgccaacgaccgggaaggaaggtggtgtggatgccgtgctcgtgtcttcctctacagggatgctcagattccccttcctcactgggctccttagattcgccaacacgaagatatcaaatgcagagtttacattttcaccgtggacaccttttcctaccaagaggttcaaattttactgcaaaatcaacgagttcttggtggtgttggtatggcatccgatccaatggtggcacgtagaagtaaaatctgaaacatttgttttgatggttagcttgcattttatgctataattacctcaaatcacgtgttgcctttttcaccaatttatgacatctattgacatgttttactttaatttacgacatttattgatgtgttttgcgacaacctcatgtggggccacatttgccattatgaaatagatcgatgatttatgctaaaattcatacccatttacactgtgttgtttt

SEQ ID NO: 26683 - DNA, 4243 bp, Zea Mays
gcccgccgcgccactcgacatctcaacccacactggcccactcctgtcttgaacatctcccgtccccatcgtcctcgtcgcatccagcactctgcactcatgcgtttcctcccctcctaagccaaaccccgaatcctccgtcgcccagcagccgccggtgacggcgacgctgggcaatggggactgaggtagcagccgtagtggatctccgggcgctgacacagtcggatctcgtggccctagctgccgcatcgccctacgccgtcgactcccgccggggccggcgccggcgccgcgatagcgagttcctctctcccccgaagatcgaccgcgccgttttcaacgagagcgcaggttcccgcaaacaaaccttctcccgtcgccgcgtcgccaccaacatatcccacaaactaacgcccaccaccaccggggcctcctccttatctacgccagctgcccccaccgaggaggaccccgacaaccgcctcattgtgttctacctccaacgcctcttcgcgcgtgacgacccctcgtaccctgctccgcctacgattccaccccgaccgcaaaccctagccgcgcccgcgataacagcacctgcaccgcccgcgccgtctctgccgccgccgtctgctgcggcggcagaccccgatagggtagtgctgaatccaaagggtttggtggttgacctggtgagactcgccgatcttgtggatccgtatggggaagagctacgtcagcgtacggcaggattggggtcagagtccgagctgctgggattcatgaacgcgctggaagggcaatggggaagccggaggcgtcggaggaagtttgtgaatgctggcatgttcggtgaccacctgccctgtgggtggaaactgctgcttgggctcaagcgaaaggagcgtgtcgcatggattaattgccgccgttatgtgagccccaaaggacatcagtttgctacttgcaaagaagtatcttcctacctcttgtcccttcttggatatcaggaggcaaagccaactgcctctcagattaacaatgcaggagtgcatgacctacatgttaattctgtaggtcttcaccagcaaaccatctcaattgaggaaaagcaaattgcagtgccagttaattcagttgcattgtttaattcctctggtgattctcatcaacaaaaacttcagaaggatgaagctccaatagaagtgaatgcaaaggagtgccggaaatgcaatttgacgtttcatgaccagagcgcctatatgcaacatcagttgtcctttcaccaaaggaaagctaaaaggcgcagggttagtaaatctggagaattgggtaccaacatagatggaaactacgagaagactcagcagaagacctctggagaggtatctggcaattttggccacagcgctgcaaatgtaaggtatgaaggtctgagtccagcagaactgttagatggtcgaccatccttgatggcagtgccatgtggatctcaggagatcactatcttgcctcaacagggaaaagaaccttgtgtgttgcctcaacagggaaaagaaccgtctgtgttgcctcaaccgggaaaagaaccgtctgtgttgcctcaacagggaaaagaaccttctatgttgcctcaacaggggaaagaaccttctgtgttgcctcaacagggaaaagaaccttctgtgttgcctcaacagggaaaagaaccttctgagttgcctcagcagggaaaagaatcttcaggagatatctctgtgaatcagaaggaccctcttaaggagatgaatggctttcctgaacaggaaaaaggacttgttgctggagaacttgtctctgcacatcataaggaccctctaatggatattacagatgcatttgaaatgataaaaaaacatcctgccagagagccttcctctgggcatcatctggatactgtcgacaattctgatgatcataaaacccacgatgaagcatgtgacaatgttgtaacttctctttctattgatgctgaaaggaaattgggtgtttgcaactccatgaatgttcatgagaatatcagcttaaaagatccagaactttccaatgcagattattcccaaaagttcaataggtctgatgaaacttgtgatgtacataaagaggtttcttcaactgtgaatgatcctgatgaaagaaaatgcacagatgattcaacgaggtgtactaatatgtcctgtgatctactgcatggcaaaattgtcagttctcctgaagaacatgattttagtaaccagctagaaagtaacccactttcagtatctaggaatgagcctgatcttaattcaattggtacggaagtggatggtggcaatataacttgcaatgcggaaaaccccagaagcttcaaaagtgagaaatctgctgagctcaagattatggattgcgaaatgacttcttttaaagacagtgaaataaaaaatgatgtcagagtaagggatgtaaatctcaattcatgtttggattcaatatcttctcctatttctggtggaaacaatgaaacatctgatactcctgatgatgctattcgatcatccattatcgcccaatgcttcggtactacctctaatgatgacacggcttgtaaggatggaaactttgccaaccagaacgacacctgtaagggtgaaaattttgtcaaccagaaaaatgtcacaatgtaccaatctaatttgaccatggaacctatacctcgagctcaaataaatgtggattgtttcacttcttcctgttcaatgactcctgaaatcaaggactatggcaacagaggtgaagatcgtgcgaaagaagcactagtgaactcacaaaacatgacaagtaatgaaactggttttgatgctgaagcttataacagtgatatcttcaatggtactatcacagaaagtagtcttgcccagttgagtaatgtcattagtatgaaaaatgcttttgcaaactgttactcattatctgacctaaacacacttactggtggtactgcaactgatgatattgatatgcacaatattaggagttcttttgtcagctctaccagtcgcactgaaccaaatgagcactgcacgttggattttgatatcaagggttccatgcttgaggcattggaaaaatctgacagtgacttagataatcaatacaatgatgcaggcccttcttgtgactcactacctgctactgggacaagtgggactattgatgattttatgtccatgcaaaccaattttggtagctttacttctttggttcgtgctgttgaagatgttccactgagcaggattattcaagatcagatgtatccaagctttgagcaacagctaaggatggcctcggctggagctccgccttatgggaccatcggcaggcatgaccctatacctgtaccagagccaacattgatgctaggttatgcaccgcagctaggtaactgcccccctccgttccagttgggctggggtccgtcttattcgaagatggttggcatgctccaatctgtgtgcgtgtggtgcaatagcccattccagcatttcggcaccgtcgctgagcagcaggcagattcacttggttacatttgcccgtcgtgcaagggaaagttttctggtcatcttggcatcaacggtccatctatttgaaatcagtttcttgtaacctgaactggtgctgctgccccaccatcaatttatagtctagttgatatgaatcgttttgtacttgtagtatgtatcctttaactcgtggctagtggtggaaacaggtttattcgaatcttacatttttggttattaaaactcaaccatcaagcagttgttgcgaacaaggaagctaagttgttggatacatacaagactgtgctctcaagagatactggtgggtactctgctgaagaaaagaccaattggcctgaagactaaattgtccatcttcaattgcaccaagagaaaggatctccattgcactggtggctggtgcatgtttgaggcttggatgatggcagaagtgtcatgtttttttatgttgaaccttgtttctaaatagtaagtctagacaattgttctgtttgaaatctgaatgaattgtggctggttgttggtggactggattacaggcaaaagtgtcatgttttttctatctttaaccttgtgtataatatagtaaaggacggatgattgctctatttgaaatatggagtaatggttgctagttgcctgac

SEQ ID NO: 26684 - DNA, 4089 bp, Zea Mays
gcccgccgcgccactcgacatctcaacccacactggcccactcctgtcttgaacatctcccgtccccatcgtcctcgtcgcatccagcactctgcactcatgcgtttcctcccctcctaagccaaaccccgaatcctccgtcgcccagcagccgccggtgacggcgacgctgggcaatggggactgaggtagcagccgtagtggatctccgggcgctgacacagtcggatctcgtggccctagctgccgcatcgccctacgccgtcgactcccgccggggccggcgccggcgccgcgatagcgagttcctctctcccccgaagatcgaccgcgccgttttcaacgagagcgcagctgcccccaccgaggaggaccccgacaaccgcctcattgtgttctacctccaacgcctcttcgcgcgtgacgacccctcgtaccctgctccgcctacgattccaccccgaccgcaaaccctagccgcgcccgcgataacagcacctgcaccgcccgcgccgtctctgccgccgccgtctgctgcggcggcagaccccgatagggtagtgctgaatccaaagggtttggtggttgacctggtgagactcgccgatcttgtggatccgtatggggaagagctacgtcagcgtacggcaggattggggtcagagtccgagctgctgggattcatgaacgcgctggaagggcaatggggaagccggaggcgtcggaggaagtttgtgaatgctggcatgttcggtgaccacctgccctgtgggtggaaactgctgcttgggctcaagcgaaaggagcgtgtcgcatggattaattgccgccgttatgtgagccccaaaggacatcagtttgctacttgcaaagaagtatcttcctacctcttgtcccttcttggatatcaggaggcaaagccaactgcctctcagattaacaatgcaggagtgcatgacctacatgttaattctgtaggtcttcaccagcaaaccatctcaattgaggaaaagcaaattgcagtgccagttaattcagttgcattgtttaattcctctggtgattctcatcaacaaaaacttcagaaggatgaagctccaatagaagtgaatgcaaaggagtgccggaaatgcaatttgacgtttcatgaccagagcgcctatatgcaacatcagttgtcctttcaccaaaggaaagctaaaaggcgcagggttagtaaatctggagaattgggtaccaacatagatggaaactacgagaagactcagcagaagacctctggagaggtatctggcaattttggccacagcgctgcaaatgtaaggtatgaaggtctgagtccagcagaactgttagatggtcgaccatccttgatggcagtgccatgtggatctcaggagatcactatcttgcctcaacagggaaaagaaccttgtgtgttgcctcaacagggaaaagaaccgtctgtgttgcctcaaccgggaaaagaaccgtctgtgttgcctcaacagggaaaagaaccttctatgttgcctcaacaggggaaagaaccttctgtgttgcctcaacagggaaaagaaccttctgtgttgcctcaacagggaaaagaaccttctgagttgcctcagcagggaaaagaatcttcaggagatatctctgtgaatcagaaggaccctcttaaggagatgaatggctttcctgaacaggaaaaaggacttgttgctggagaacttgtctctgcacatcataaggaccctctaatggatattacagatgcatttgaaatgataaaaaaacatcctgccagagagccttcctctgggcatcatctggatactgtcgacaattctgatgatcataaaacccacgatgaagcatgtgacaatgttgtaacttctctttctattgatgctgaaaggaaattgggtgtttgcaactccatgaatgttcatgagaatatcagcttaaaagatccagaactttccaatgcagattattcccaaaagttcaataggtctgatgaaacttgtgatgtacataaagaggtttcttcaactgtgaatgatcctgatgaaagaaaatgcacagatgattcaacgaggtgtactaatatgtcctgtgatctactgcatggcaaaattgtcagttctcctgaagaacatgattttagtaaccagctagaaagtaacccactttcagtatctaggaatgagcctgatcttaattcaattggtacggaagtggatggtggcaatataacttgcaatgcggaaaaccccagaagcttcaaaagtgagaaatctgctgagctcaagattatggattgcgaaatgacttcttttaaagacagtgaaataaaaaatgatgtcagagtaagggatgtaaatctcaattcatgtttggattcaatatcttctcctatttctggtggaaacaatgaaacatctgatactcctgatgatgctattcgatcatccattatcgcccaatgcttcggtactacctctaatgatgacacggcttgtaaggatggaaactttgccaaccagaacgacacctgtaagggtgaaaattttgtcaaccagaaaaatgtcacaatgtaccaatctaatttgaccatggaacctatacctcgagctcaaataaatgtggattgtttcacttcttcctgttcaatgactcctgaaatcaaggactatggcaacagaggtgaagatcgtgcgaaagaagcactagtgaactcacaaaacatgacaagtaatgaaactggttttgatgctgaagcttataacagtgatatcttcaatggtactatcacagaaagtagtcttgcccagttgagtaatgtcattagtatgaaaaatgcttttgcaaactgttactcattatctgacctaaacacacttactggtggtactgcaactgatgatattgatatgcacaatattaggagttcttttgtcagctctaccagtcgcactgaaccaaatgagcactgcacgttggattttgatatcaagggttccatgcttgaggcattggaaaaatctgacagtgacttagataatcaatacaatgatgcaggcccttcttgtgactcactacctgctactgggacaagtgggactattgatgattttatgtccatgcaaaccaattttggtagctttacttctttggttcgtgctgttgaagatgttccactgagcaggattattcaagatcagcggtgtgatttgcaacttggatttggtggccccaagcagcagatgtatccaagctttgagcaacagctaaggatggcctcggctggagctccgccttatgggaccatcggcaggcatgaccctatacctgtaccagagccaacattgatgctaggttatgcaccgcagctaggtaactgcccccctccgttccagttgggctggggtccgtcttattcgaagatggttggcatgctccaatctgtgtgcgtgtggtgcaatagcccattccagcatttcggcaccgtcgctgagcagcaggcagattcacttggttacatttgcccgtcgtgcaagggaaagttttctggtcatcttggcatcaacggtccatctatttgaaatcagtttcttgtaacctgaactggtttattcgaatcttacatttttggttattaaaactcaaccatcaagcagttgttgcgaacaaggaagctaagttgttggatacatacaagactgtgctctcaagagatactggtgggtactctgctgaagaaaagaccaattggcctgaagactaaattgtccatcttcaattgcaccaagagaaaggatctccattgcactggtggctggtgcatgtttgaggcttggatgatggcagaagtgtcatgtttttttatgttgaaccttgtttctaaatagtaagtctagacaattgttctgtttgaaatctgaatgaattgtggctggttgttggtggactggattacaggcaaaagtgtcatgttttttctatctttaaccttgtgtataatatagtaaaggacggatgattgctctatttgaaatatggagtaatggttgctagttgcctgac

SEQ ID NO: 26685 - DNA, 2791 bp, Zea Mays
atttcgtgttgcttccttctcctatcgattcaggccgtaattccagaccaccggccggcgtggtctcgaaaatttcgtcggtaaatggatatatatatcaatcaatgcccctgtgatatcgagcttcagttgatgcagtggtgaaaacatcttctcgaaaaactgctggctgcaagttgcaaaagtttgtctttcccttgttgtgttgttgcttccttctctggtggagtacacgggagaagtttgcagatacaggcagctcctttcaaatctcctatgtccagggatttggactgtcctgttcagacacagatggctgtggcagtcctggaccggagctttagcagcgaatatcctggaggtagcagaattgaggggaggcaactgagctggaagagagtatttgtccaaactgacaatggttctgtccttggcatcgagctggagagaggagaaaacgtacaaactgtgaaaaagaagctccagatagccctcaatgtgcccactgatgagagctcattgacctttggtgacctagttctgaataatgatcttagcagcattcgcaatgactcacccttgtttctcaaaaggaatcagattcaccggagcaattccacaccttgcctctcacctacaggtaagaatgttttgcaaagagaccggagtggacccattgaaatccttggctgttcaagtccttcatctcggatgaagcagcttgctaaggatgtcattaaagccataatgaatgatgttgacccagtcgctgttaacagtgggatgggtggtgcctactacttcaagaacatttggggagagcgtgtggcaattgtcaagccaactgatgaggaaccatttgctccaaataatccaaaaggttttgtggggaaagctctgggacagccgggcctgaaaaggtctgtacgggttggggagacaggcttcagagaggttgctgcttacctcctcgactatggtcactttgcaaatgttcctcccaccatgctggtcaagataacacacacaatcttcaatgtgaacgactgtgttggctgcaaaagtaaagtgttctgcaacaaatcagaggctgtgagcaagattgcatcgctgcaggagttcattcctcatgatttcgatgccagtgaccatgggacctcaagcttccctgtatctgcagtgcataggattggcatccttgacattagaatcttcaacactgacaggcatgctggaaatcttctggtcaagaagcttggtcctggcgccgacaattttggagagcagacagaactcattcctattgaccatggtctctgtcttccagaatgcctagaagacccatacttcgagtggatccactggccgcaggcatctgttcctttctccgaggaggagcttgagtacattgcaagacttgatcctgtaaaagatgcagaaatgctacgcatggagctacccatgatacgagacgcatgtctcagggtgctggtgctatcaacagtatttctcaaggaagctgcagcgtctggcctctgcctctcggagattggagacatgatgagcaggcagttcactgcgaaggaggaggaaccgagtcagcttgagctgctctgcatggaggcaaggaagtgggttgaggaaagagagtcctttcttcccaacgaagccggagttgaagatgacgatgatgacttcacccagttccttatcgacggcgaggatgattatccggatgccttggaaccatcagctttctgcaagtttggtagcatgaaggcaagttctaggaatccactgtccaagctagatgagcgtgacgaggaagacggagacgggaccgaggaggacgacgacgacgacatcttgaccggtgcattgcctcagaggatctcgtctatctccaagctgtcgtcatccatgaaggggcttggcttcattgggaaacccaagccctaccgcacgtgccttcggaagggtaaagcgacaggcagaactaagtacaccggcaaagccagcgagcatcagtccggcagcaggagcgccaacgagctgctcccgcccagcgccagtttcgtgaagctgtcggacatgagccctaaacagtggagcgcattcctcgacaagttccaggagctgctcccaggtgccctgagcgcccggaagcacgctgccggtgtcgtcggccagcgctcgatgccgaggctgggcacgtcttgccagttttgagagtagcagaagagaagccaccgaacccaaggtatgacgaacgcgcttctgttcgagctctggtgtgcagcagccaagcaggtacggagtattatatatgcttgtagtaggtgtctggagccggtggtggtagagagggtccgagaataagatcatccatggcatgtgagatgaggttgcgggagaaggaagggggttgtgtgtgtttgtgcatagtgtttcgcataagaggtccgttgttcttttttcttcttctctgtatatagttaagtactcctactgctactgcatcgcagcaccgggcacgggctgggatctcggccgttgttatctgaacgatggtggtgagtgtgctggcgtcgcctgctctctgctctgtctttgccgctgtaccattttggaggcgcttaccatattatgaactttgaactatgatatgatgttcgctacagattatattgcataaatatcacatgttctctgtataccagtaatatgtgtactgtacctttccattcagtggagcctgcgtgccacaaaaaaaaaaggtagctagagctgg

SEQ ID NO: 26686 - DNA, 2956 bp, Zea Mays
gaggggtgtcgctaaccgtggttatgacattaacccgtctttggtcccggagggaaaaggacaaatcactcacacagagggaacaaaagggcacaggaatcgcgacagcgtgggaggcgtacggcgcaccgcccggccgccggatctgcgccggcgacgcgcccggacgtcggatctacgccgccgcaggaggagggaggcggcgctctggccgttccttgcccgcgagcgcccagatccgtcccgccgccggatatatatatcaatcaatgcccctgtgatatcgagcttcagttgatgcagtggtgaaaacatcttctcgaaaaactgctggctgcaagttgcaaaagtttgtctttcccttgttgtgttgttgcttccttctctggtggagtacacgggagaagtttgcagatacaggcagctcctttcaaatctcctatgtccagggatttggactgtcctgttcagacacagatggctgtggcagtcctggaccggagctttagcagcgaatatcctggaggtagcagaattgaggggaggcaactgagctggaagagagtatttgtccaaactgacaatggttctgtccttggcatcgagctggagagaggagaaaacgtacaaactgtgaaaaagaagctccagatagccctcaatgtgcccactgatgagagctcattgacctttggtgacctagttctgaataatgatcttagcagcattcgcaatgactcacccttgtttctcaaaaggaatcagattcaccggagcaattccacaccttgcctctcacctacaggtaagaatgttttgcaaagagaccggagtggacccattgaaatccttggctgttcaagtccttcatctcggatgaagcagcttgctaaggatgtcattaaagccataatgaatgatgttgacccagtcgctgttaacagtgggatgggtggtgcctactacttcaagaacatttggggagagcgtgtggcaattgtcaagccaactgatgaggaaccatttgctccaaataatccaaaaggttttgtggggaaagctctgggacagccgggcctgaaaaggtctgtacgggttggggagacaggcttcagagaggttgctgcttacctcctcgactatggtcactttgcaaatgttcctcccaccatgctggtcaagataacacacacaatcttcaatgtgaacgactgtgttggctgcaaaagtaaagtgttctgcaacaaatcagaggctgtgagcaagattgcatcgctgcaggagttcattcctcatgatttcgatgccagtgaccatgggacctcaagcttccctgtatctgcagtgcataggattggcatccttgacattagaatcttcaacactgacaggcatgctggaaatcttctggtcaagaagcttggtcctggcgccgacaattttggagagcagacagaactcattcctattgaccatggtctctgtcttccagaatgcctagaagacccatacttcgagtggatccactggccgcaggcatctgttcctttctccgaggaggagcttgagtacattgcaagacttgatcctgtaaaagatgcagaaatgctacgcatggagctacccatgatacgagacgcatgtctcagggtgctggtgctatcaacagtatttctcaaggaagctgcagcgtctggcctctgcctctcggagattggagacatgatgagcaggcagttcactgcgaaggaggaggaaccgagtcagcttgagctgctctgcatggaggcaaggaagtgggttgaggaaagagagtcctttcttcccaacgaagccggagttgaagatgacgatgatgacttcacccagttccttatcgacggcgaggatgattatccggatgccttggaaccatcagctttctgcaagtttggtagcatgaaggcaagttctaggaatccactgtccaagctagatgagcgtgacgaggaagacggagacgggaccgaggaggacgacgacgacgacatcttgaccggtgcattgcctcagaggatctcgtctatctccaagctgtcgtcatccatgaaggggcttggcttcattgggaaacccaagccctaccgcacgtgccttcggaagggtaaagcgacaggcagaactaagtacaccggcaaagccagcgagcatcagtccggcagcaggagcgccaacgagctgctcccgcccagcgccagtttcgtgaagctgtcggacatgagccctaaacagtggagcgcattcctcgacaagttccaggagctgctcccaggtgccctgagcgcccggaagcacgctgccggtgtcgtcggccagcgctcgatgccgaggctgggcacgtcttgccagttttgagagtagcagaagagaagccaccgaacccaaggtatgacgaacgcgcttctgttcgagctctggtgtgcagcagccaagcaggtacggagtattatatatgcttgtagtaggtgtctggagccggtggtggtagagagggtccgagaataagatcatccatggcatgtgagatgaggttgcgggagaaggaagggggttgtgtgtgtttgtgcatagtgtttcgcataagaggtccgttgttcttttttcttcttctctgtatatagttaagtactcctactgctactgcatcgcagcaccgggcacgggctgggatctcggccgttgttatctgaacgatggtggtgagtgtgctggcgtcgcctgctctctgctctgtctttgccgctgtaccattttggaggcgcttaccatattatgaactttgaactatgatatgatgttcgctacagattatattgcataaatatcacatgttctctgtataccagtaatatgtgtactgtacctttccattcagtggagcctgcgtgccacaaaaaaaaaaggtagctagagctgg

SEQ ID NO: 26687 - DNA, 2221 bp, Zea Mays
atagctggtaagcgtagtggaggaagagagggaagaaaacgaagcgaagccaaagcaaggtctgagccgccggagagggaggtggccgggtgggaaacctctctcgcgcgtcaggcgtcacgtgagaactcccgatccaccgggacgacggattcccgccgctcccccgcgcgcggcttcttccggtgcggtcggcggccgacggcggaagctactggcccaagcaaagtgagtgaattgcgagtccaggcggcgatggcggggcgctgcgattgacgtgcgacgactatgggcatccaagggaacaaggcggcgacgcacgagcacgacttcctctcgttgtacgccgccgccgccgcggccgccgccgccaaggacgctcctctcctgctccacgactccaagacgccgcctccttctcaaggtaattttctcttgaagacgcacgacttcctgcagccgttcgatcagaagccaggagcgccgccggagccgtcgccgctgcccgctccagccgcggagatcaggcaccggcagcaggtggcggtcgccaagcagcgcgcgctgccccttcccctgcccggcggcgtcggcaccttcagcatcagccccgcgcccgtgtcggtcgcgctgccgtcggccgtcgtcaagtcggagccgccgccgttcgtgctctggggccaacctgcagcgacgctgcagccgggcgcgcgagggcaccagcagcagtgggcgctccccttcgccggctccttgcaggtcagtccgccgccgcagcaggcgcaaccggataggaagggccgcggcggaggcggggtcatggattcaggctccagatccagcggcggagccgggttcgacgacgaagacggcctcaccacgcgccgcgaggtctcctcctcgctccaagatttggcagtaagggtggattggaagggtgggagctgcagcgatggcggtacaaatcaggggccaaacacaccacggtcaaaacactcggccacagagcagcgcagacgcagcaagatcaatgataggtttcagatacttagggagctgttgccacacaatgatcaaaagagagacaaagcaacatttctcttggaggttattgaatatatacgttttttgcaagagaaagcgcaaaaatacgaggcaacattcccagaatggaaccaagaaaatccaacgatgcttccagtaaaggccaaatcccaggagattccccgcctgacccttcacatttcgtgagaaatggatcctcccctggatctaatttcactgggaaactcgatgataatcacacatctgcagctgcatcaggggcactggaccaggcagaaactaatcacgtggctagcggctgctacagatcatcagaaactccggcgaatattacaaataatgctatatctcagtcccaacctcaatggacaggtccgtcccctgtggatgactctgcagtgaaaagtgaaatgcttaacagccaggagttggcaatagatgaaggaatgatcagtgtgtccagtacctattcccaagagttacttatctcgttgtctcacgcccttcagagctcaggtgtggatctgtcccaaaccagcatctctgtgcagatcaacctgggaaagcgtgctggcaagagatctgcatctgctggtggtgtatcctccaactccaaggaaccaccagccgatccagcatctagtaacgaactaggcggccatcacgtgacaacgttgggagctagcgctgacggtctcctcccccacgcgacgaaacggcataaacgggacaacagctgatgatgggcctctctcactccgcctcgttcccagacgacagacggattgatcattcttttttttttctcccagcccgacgggaggctctctcttggattggttgcacatcgcgtgctcggtgatgggctgagaccccggctgtattctttttgatttgatcgctcccgccgccatcccctgtctagcccattgtttttacgtagaggaacgaaccgtggagcttcccattgcggattgtgaagccgctcttcttgtacacaggcttccattcatctgagaagcttcttcccctccttgaacaggtctctccgcgttttagacctgtatactagcaacctgtaagatatgattatgatgtccagcagctctcccaggcacggcaccggccagtcaagttgttccgttatttctatgta

SEQ ID NO: 26688 - DNA, 2227 bp, Zea Mays
atagctggtaagcgtagtggaggaagagagggaagaaaacgaagcgaagccaaagcaaggtctgagccgccggagagggaggtggccgggtgggaaacctctctcgcgcgtcaggcgtcacgtgagaactcccgatccaccgggacgacggattcccgccgctcccccgcgcgcggcttcttccggtgcggtcggcggccgacggcggaagctactggcccaagcaaagtgagtgaattgcgagtccaggcggcgatggcggggcgctgcgattgacgtgcgacgactatgggcatccaagggaacaaggcggcgacgcacgagcacgacttcctctcgttgtacgccgccgccgccgcggccgccgccgccaaggacgctcctctcctgctccacgactccaagacgccgcctccttctcaaggtaattttctcttgaagacgcacgacttcctgcagccgttcgatcagaagccaggagcgccgccggagccgtcgccgctgcccgctccagccgcggagatcaggcaccggcagcaggtggcggtcgccaagcagcgcgcgctgccccttcccctgcccggcggcgtcggcaccttcagcatcagccccgcgcccgtgtcggtcgcgctgccgtcggccgtcgtcaagtcggagccgccgccgttcgtgctctggggccaacctgcagcgacgctgcagccgggcgcgcgagggcaccagcagcagtgggcgctccccttcgccggctccttgcaggtcagtccgccgccgcagcaggcgcaaccggataggaagggccgcggcggaggcggggtcatggattcaggctccagatccagcggcggagccgggttcgacgacgaagacggcctcaccacgcgccgcgaggtctcctcctcgctccaagcagatttggcagtaagggtggattggaagggtgggagctgcagcgatggcggtacaaatcaggggccaaacacaccacggtcaaaacactcggccacagagcagcgcagacgcagcaagatcaatgataggtttcagatacttagggagctgttgccacacaatgatcaaaagagagacaaagcaacatttctcttggaggttattgaatatatacgttttttgcaagagaaagcgcaaaaatacgaggcaacattcccagaatggaaccaagaaaatccaacgatgcttcctcaaatatgtattttcgatcattctggaaaaatgcacagagtaaaggccaaatcccaggagattccccgcctgacccttcacatttcgtgagaaatggatcctcccctggatctaatttcactgggaaactcgatgataatcacacatctgcagctgcatcaggggcactggaccaggcagaaactaatcacgtggctagcggctgctacagatcatcagaaactccggcgaatattacaagtccgtcccctgtggatgactctgcagtgaaaagtgaaatgcttaacagccaggagttggcaatagatgaaggaatgatcagtgtgtccagtacctattcccaagagttacttatctcgttgtctcacgcccttcagagctcaggtgtggatctgtcccaaaccagcatctctgtgcagatcaacctgggaaagcgtgctggcaagagatctgcatctgctggtggtgtatcctccaactccaaggaaccaccagccgatccagcatctagtaacgaactaggcggccatcacgtgacaacgttgggagctagcgctgacggtctcctcccccacgcgacgaaacggcataaacgggacaacagctgatgatgggcctctctcactccgcctcgttcccagacgacagacggattgatcattcttttttttttctcccagcccgacgggaggctctctcttggattggttgcacatcgcgtgctcggtgatgggctgagaccccggctgtattctttttgatttgatcgctcccgccgccatcccctgtctagcccattgtttttacgtagaggaacgaaccgtggagcttcccattgcggattgtgaagccgctcttcttgtacacaggcttccattcatctgagaagcttcttcccctccttgaacaggtctctccgcgttttagacctgtatactagcaacctgtaagatatgattatgatgtccagcagctctcccaggcacggcaccggccagtcaagttgttccgttatttctatgta

SEQ ID NO: 26689 - DNA, 1103 bp, Zea Mays
aagggccaacatcttagcccatttgattgactccaaaagtaaaaaaaaaacaattcacacagttttgtatccattttctatttttctcctctcgagtagcgtggcgggcgtggacgcggcggcgatgctgcggtcggcgctgcggcggggaggggcgtccgcgaggcaggtcgcgttggcgggagaagcctcgccgagagacctcctccggatgcgcgtggcggagcgggagcgcgcgaggcggcggcgtcgcgacccgggccgcgacgagttcttcgtgcccacgccagagtcgctggcgtggctcgactcggtctccctccccatggtgctcaccgccgccgccgtggccctcttcaccaagctcctcatgatggaacatgaagctacagatcaagaaaggagagagcgcaagataaagaatagccaccctgatcaaggaacagtaaggatgctatctcgtgaagaatgggaggaggtccaagaagtcaggccaaggaccccttttgaatcaaagttagctcgtccacatgcccggataagaacgggggagccagtgcgactggttagtagatgtttcttgtggaggatgtcaaggattgggctactgatgtaatcgcagattcttttaccagagcagaagaagctaccaagaaaaaatgatttagaagaatctaaaacacccggtgtatctgctttatcgtttctctgaatctaaaacacccagttgtaaccgagttcttttacagatccatgaccatatgggtattacggccactatggtattctgagagtgaagccctgagtcccttggtctatgtttcggtgcaccatggtaaacaactgcttcacccgggcctcttggagaaagagcgatataataaagaatactaggtgaattgacacggtgaaatttctcttaaaatttgcgccatgtattggtataaggttaatcgtaccactattttgttcttgtttatatacgtgatacttgtatacaacgactgtacttacatggttaggatcttctcaaaactaaaatttattttccataaaaaattaagtgcagctgtgaggctagaatcaaagaactcatacatctt

SEQ ID NO: 26690 - DNA, 648 bp, Zea Mays
tggaaccaatcaagatggcgtctggtttaagagcactagagcactgctgcctacccttgcgtattgtgtttacacttcacaatatggcaagagctcttgcctacggtggagcagctgccgcagctgggttcgtctcgccgtggcttgccgtgctcggtgtggccatgctctccgtctggaccatcacgctcgccatcctcctctgtggcgacagctcagacaacccgagaccaccaagatacaatcctgccgttagtgcggctatagcagctggtggcggagggggctgtggtggcgggggcggtggtggtggagggggctgtggtggcggaggcggtggtggagggggctgtggaggaggcggcggcggcggatgctagagttcatcgcatccgttgcaccagcggcatcagttgtgctggtctgcagaagctaaggtgccagaagatgtatcaatggatatttttttacttgtcaattgtcatgcatggcatatatggtaaggaaggactgtccgtattatggatatccttattagtttttgtttgttgtcatgtctctgctgctattagcatggtgtatataataataaattatgtcgtctttgaattcgtactcttatctgtacacaagcttttcaattgatgg

SEQ ID NO: 26691 - DNA, 2597 bp, Zea Mays
ctcaggtccccggatcccatctgtccccgttgctgcgccctatgctatcctgacgccgttctaggctttcacagttttgtgtttgttgaatgtgtttgcaatggagattgaagaacacacagattcactttcaatagaggaacccatcacaaggctcccaccagatattattgaggggatacttctcaggcttccggtaaactctctaatgaggctgcgtcaagtctgcaagcaatggtggaacatggtcagcgtgccccgctttatcaaagaacatgcctatcatgcacccaagcacctcctcctttacttgcctaagttgaatatatctgcatcgctccatccaaagactgccaaaccatgtcttgcaacaatcattaatgaaaagtggtctccattgacatgggcctcatcgcatatggaccctgatgatcacctctttgcatcatgcaacggtttgctttgcttctacaagacatacacactaaagatatctaaccctgcaacaggtcaatgcctgcatctcttgaaacctgacggcatattgttgtacgacttccactatctatacagctttggatttcacccgattactggagaatacaagctcgtgcactttctccgtgagcctcagcgctacaaatcaggacagcctttccatttcgacaccattcaagtgtacacccttggtgaagacaaatggagagctatcagagctcctataccatgctgcatggtgcatcttggagtagtaaatgtggatggagtgatgtattggctaacagaagataaaggaacaagctgtggcatggcagttgtatcgtttgatctcagggaagaaatgtttgccttgattcatcttccagcattggaggtgaaagagacagcctcttgtgccaccatcaaagttgcttactatatgactgagatagatgacaaagtgtgcgtagtgactatgccataccaaagccatgcaccaaggtggcgccgaaacaacgcagagctttcaggcaggactgacatttgggctcttgaaagtgacaagtggttcctgaaatatagcatccagtcaccatctctatctcggtatgttcctcagccatgcttcatccacagggagaagatcatactgcaggacagtgaaagtaatgtgtggtaccatgatttgcgaggcaagaacgtgcagattgagcatgcagatggggcgaagcttttgcaccttggtgacaacagattctatgagacacagtcctatttctacaaggagacacttgctcccttgagcatttatgccagagcagccattgttcgtgcaccgcctgagcctcttgctcgttcagttgctttacattagtttctgagaggctcttgcactctgaaggtttggcagcaagtactgacgaatattttaatatggagagtgggtaatggggacggcacacgtatggaatgatccctggttttggagagagtggactagccatccatgccaaggggtgtaaatcctatgaaccaagtgaatcattgagatgattgacacatgcataggcaattggaacgaggcactaaagatgtgaatgaatcttagtaagcccagttcatatggagatggatgatgtctcagtcttgcactatggagtcttttcatgatcaaatcagcctatatttagtccgggaggagttggccactatggaaagcataggaatagatgtgtattcgacagtgagcaactagaggtccatgaagttccccaggaggttgtagacaagggtagtgtttgggtgagggctgatactgtagctttggggcagctaacacatcagtagacagtagtctcaggactcaggaggttaggctgctcaatcttcacaatgggtgcgaatgtaacaaaaaaactaatctgagccatgtatctggatcgttctatcttttaatatagtgtttttaaatatagtgatgtgcagctctcttgcatattcgagaaaaaaatcaagaggagtttgaaaagaaaaacaagtatggagctgtttcatcttcacgggggctttgatcgataaggattcaggagtgctggaagaagatttggagcaagagctgtcgctgtccggcgtctggcggtctgggggagaccagtgattttcctacgcacgcctgccaaaagtgggatggagttgaacgcaaaatgtgttgtttgtcattgggtagatggaggaggacacctcgtttatacgcgcggaggaggtgtagtgcgactgtgcgagttgaatttgtaagaaactcagccgcatgcttgcttggagatacttgagatggaacggaaaactcaggtctcaacagctgtagagaaggtgaggggagggaagcaaacaacctagcttacattgtgatgaaacaaggcagatgagttctggacctctctctctctctctctctctctctcaaaaatggtttgccagtatagtctgtgacttaggaagattgtcatgcctgaatcccgatatagaatttctggtgtaattttcacagtaatattgttcacacatgtcgatggttcagctgttttcggtgctactgcattttttttctatttctgaac

SEQ ID NO: 26692 - DNA, 2843 bp, Zea Mays
gtaccaaccctaatcctagggttcctcacacttgcgggccgagtaatttctcgtcttgtttcggctagggagcggggtggcttctccggccaaggcatatagttgcagtcactgcaattgatacttccatttttgaaacttcgatggaaattttggagatgtttatattcacacaaagttatgttatatttaccatcaatgctaagtggttacaaattttactgtcagctagtaccgactgaaaaagtaacaggcagaggttcatgtaatcatgttggggactgttgatgcccaaaatgacacgcgaaaggctttcacagttttgtgtttgttgaatgtgtttgcaatggagattgaagaacacacagattcactttcaatagaggaacccatcacaaggctcccaccagatattattgaggggatacttctcaggcttccggtaaactctctaatgaggctgcgtcaagtctgcaagcaatggtggaacatggtcagcgtgccccgctttatcaaagaacatgcctatcatgcacccaagcacctcctcctttacttgcctaagttgaatatatctgcatcgctccatccaaagactgccaaaccatgtcttgcaacaatcattaatgaaaagtggtctccattgacatgggcctcatcgcatatggaccctgatgatcacctctttgcatcatgcaacggtttgctttgcttctacaagacatacacactaaagatatctaaccctgcaacaggtcaatgcctgcatctcttgaaacctgacggcatattgttgtacgacttccactatctatacagctttggatttcacccgattactggagaatacaagctcgtgcactttctccgtgagcctcagcgctacaaatcaggacagcctttccatttcgacaccattcaagtgtacacccttggtgaagacaaatggagagctatcagagctcctataccatgctgcatggtgcatcttggagtagtaaatgtggatggagtgatgtattggctaacagaagataaaggaacaagctgtggcatggcagttgtatcgtttgatctcagggaagaaatgtttgccttgattcatcttccagcattggaggtgaaagagacagcctcttgtgccaccatcaaagttgcttactatatgactgagatagatgacaaagtgtgcgtagtgactatgccataccaaagccatgcaccaaggtggcgccgaaacaacgcagagctttcaggcaggactgacatttgggctcttgaaagtgacaagtggttcctgaaatatagcatccagtcaccatctctatctcggtatgttcctcagccatgcttcatccacagggagaagatcatactgcaggacagtgaaagtaatgtgtggtaccatgatttgcgaggcaagaacgtgcagattgagcatgcagatggggcgaagcttttgcaccttggtgacaacagattctatgagacacagtcctatttctacaaggagacacttgctcccttgagcatttatgccagagcagccattgttcgtgcaccgcctgagcctcttgctcgttcagttgctttacattagtttctgagaggctcttgcactctgaaggtttggcagcaagtactgacgaatattttaatatggagagtgggtaatggggacggcacacgtatggaatgatccctggttttggagagagtggactagccatccatgccaaggggtgtaaatcctatgaaccaagtgaatcattgagatgattgacacatgcataggcaattggaacgaggcactaaagatgtgaatgaatcttagtaagcccagttcatatggagatggatgatgtctcagtcttgcactatggagtcttttcatgatcaaatcagcctatatttagtccgggaggagttggccactatggaaagcataggaatagatgtgtattcgacagtgagcaactagaggtccatgaagttccccaggaggttgtagacaagggtagtgtttgggtgagggctgatactgtagctttggggcagctaacacatcagtagacagtagtctcaggactcaggaggttaggctgctcaatcttcacaatgggtgcgaatgtaacaaaaaaactaatctgagccatgtatctggatcgttctatcttttaatatagtgtttttaaatatagtgatgtgcagctctcttgcatattcgagaaaaaaatcaagaggagtttgaaaagaaaaacaagtatggagctgtttcatcttcacgggggctttgatcgataaggattcaggagtgctggaagaagatttggagcaagagctgtcgctgtccggcgtctggcggtctgggggagaccagtgattttcctacgcacgcctgccaaaagtgggatggagttgaacgcaaaatgtgttgtttgtcattgggtagatggaggaggacacctcgtttatacgcgcggaggaggtgtagtgcgactgtgcgagttgaatttgtaagaaactcagccgcatgcttgcttggagatacttgagatggaacggaaaactcaggtctcaacagctgtagagaaggtgaggggagggaagcaaacaacctagcttacattgtgatgaaacaaggcagatgagttctggacctctctctctctctctctctctctctcaaaaatggtttgccagtatagtctgtgacttaggaagattgtcatgcctgaatcccgatatagaatttctggtgtaattttcacagtaatattgttcacacatgtcgatggttcagctgttttcggtgctactgcattttttttctatttctgaac

SEQ ID NO: 26693 - DNA, 2639 bp, Zea Mays
gaacatacttggagtcaaactctaaacctagaggtcccacaacatgtacctggcgcagatctagccgaaccctagcgcagggagcagatctgtaccaaccctaatcctagggttcctcacacttgcgggccgagtaatttctcgtcttgtttcggctagggagcggggtggcttctccggccaaggctttcacagttttgtgtttgttgaatgtgtttgcaatggagattgaagaacacacagattcactttcaatagaggaacccatcacaaggctcccaccagatattattgaggggatacttctcaggcttccggtaaactctctaatgaggctgcgtcaagtctgcaagcaatggtggaacatggtcagcgtgccccgctttatcaaagaacatgcctatcatgcacccaagcacctcctcctttacttgcctaagttgaatatatctgcatcgctccatccaaagactgccaaaccatgtcttgcaacaatcattaatgaaaagtggtctccattgacatgggcctcatcgcatatggaccctgatgatcacctctttgcatcatgcaacggtttgctttgcttctacaagacatacacactaaagatatctaaccctgcaacaggtcaatgcctgcatctcttgaaacctgacggcatattgttgtacgacttccactatctatacagctttggatttcacccgattactggagaatacaagctcgtgcactttctccgtgagcctcagcgctacaaatcaggacagcctttccatttcgacaccattcaagtgtacacccttggtgaagacaaatggagagctatcagagctcctataccatgctgcatggtgcatcttggagtagtaaatgtggatggagtgatgtattggctaacagaagataaaggaacaagctgtggcatggcagttgtatcgtttgatctcagggaagaaatgtttgccttgattcatcttccagcattggaggtgaaagagacagcctcttgtgccaccatcaaagttgcttactatatgactgagatagatgacaaagtgtgcgtagtgactatgccataccaaagccatgcaccaaggtggcgccgaaacaacgcagagctttcaggcaggactgacatttgggctcttgaaagtgacaagtggttcctgaaatatagcatccagtcaccatctctatctcggtatgttcctcagccatgcttcatccacagggagaagatcatactgcaggacagtgaaagtaatgtgtggtaccatgatttgcgaggcaagaacgtgcagattgagcatgcagatggggcgaagcttttgcaccttggtgacaacagattctatgagacacagtcctatttctacaaggagacacttgctcccttgagcatttatgccagagcagccattgttcgtgcaccgcctgagcctcttgctcgttcagttgctttacattagtttctgagaggctcttgcactctgaaggtttggcagcaagtactgacgaatattttaatatggagagtgggtaatggggacggcacacgtatggaatgatccctggttttggagagagtggactagccatccatgccaaggggtgtaaatcctatgaaccaagtgaatcattgagatgattgacacatgcataggcaattggaacgaggcactaaagatgtgaatgaatcttagtaagcccagttcatatggagatggatgatgtctcagtcttgcactatggagtcttttcatgatcaaatcagcctatatttagtccgggaggagttggccactatggaaagcataggaatagatgtgtattcgacagtgagcaactagaggtccatgaagttccccaggaggttgtagacaagggtagtgtttgggtgagggctgatactgtagctttggggcagctaacacatcagtagacagtagtctcaggactcaggaggttaggctgctcaatcttcacaatggtgatgtgcagctctcttgcatattcgagaaaaaaatcaagaggagtttgaaaagaaaaacaagtatggagctgtttcatcttcacgggggctttgatcgataaggattcaggagtgctggaagaagatttggagcaagagctgtcgctgtccggcgtctggcggtctgggggagaccagtgattttcctacgcacgcctgccaaaagtgggatggagttgaacgcaaaatgtgttgtttgtcattgggtagatggaggaggacacctcgtttatacgcgcggaggaggtgtagtgcgactgtgcgagttgaatttgtaagaaactcagccgcatgcttgcttggagatacttgagatggaacggaaaactcaggtctcaacagctgtagagaaggtgaggggagggaagcaaacaacctagcttacattgtgatgaaacaaggcagatgagttctggacctctctctctctctctctctctctctcaaaaatggtttgccagtatagtctgtgacttaggaagattgtcatgcctgaatcccgatatagaatttctggtgtaattttcacagtaatattgttcacacatgtcgatggttcagctgttttcggtgctactgcattttttttctatttctgaac

SEQ ID NO: 26694 - DNA, 2774 bp, Zea Mays
atccggtcaaggggaagtgtcctcacgtcggtagaactctagtgaaagtgaaagaacatacttggagtcaaactctaaacctagaggtcccacaacatgtacctggcgcagatctagccgaaccctagcgcagggagcagatctgtaccaaccctaatcctagggttcctcacacttgcgggccgagtaatttctcgtcttgtttcggctagggagcggggtggcttctccggccaagctagtaccgactgaaaaagtaacaggcagaggttcatgtaatcatgttggggactgttgatgcccaaaatgacacgcgaaaggctttcacagttttgtgtttgttgaatgtgtttgcaatggagattgaagaacacacagattcactttcaatagaggaacccatcacaaggctcccaccagatattattgaggggatacttctcaggcttccggtaaactctctaatgaggctgcgtcaagtctgcaagcaatggtggaacatggtcagcgtgccccgctttatcaaagaacatgcctatcatgcacccaagcacctcctcctttacttgcctaagttgaatatatctgcatcgctccatccaaagactgccaaaccatgtcttgcaacaatcattaatgaaaagtggtctccattgacatgggcctcatcgcatatggaccctgatgatcacctctttgcatcatgcaacggtttgctttgcttctacaagacatacacactaaagatatctaaccctgcaacaggtcaatgcctgcatctcttgaaacctgacggcatattgttgtacgacttccactatctatacagctttggatttcacccgattactggagaatacaagctcgtgcactttctccgtgagcctcagcgctacaaatcaggacagcctttccatttcgacaccattcaagtgtacacccttggtgaagacaaatggagagctatcagagctcctataccatgctgcatggtgcatcttggagtagtaaatgtggatggagtgatgtattggctaacagaagataaaggaacaagctgtggcatggcagttgtatcgtttgatctcagggaagaaatgtttgccttgattcatcttccagcattggaggtgaaagagacagcctcttgtgccaccatcaaagttgcttactatatgactgagatagatgacaaagtgtgcgtagtgactatgccataccaaagccatgcaccaaggtggcgccgaaacaacgcagagctttcaggcaggactgacatttgggctcttgaaagtgacaagtggttcctgaaatatagcatccagtcaccatctctatctcggtatgttcctcagccatgcttcatccacagggagaagatcatactgcaggacagtgaaagtaatgtgtggtaccatgatttgcgaggcaagaacgtgcagattgagcatgcagatggggcgaagcttttgcaccttggtgacaacagattctatgagacacagtcctatttctacaaggagacacttgctcccttgagcatttatgccagagcagccattgttcgtgcaccgcctgagcctcttgctcgttcagttgctttacattagtttctgagaggctcttgcactctgaaggtttggcagcaagtactgacgaatattttaatatggagagtgggtaatggggacggcacacgtatggaatgatccctggttttggagagagtggactagccatccatgccaaggggtgtaaatcctatgaaccaagtgaatcattgagatgattgacacatgcataggcaattggaacgaggcactaaagatgtgaatgaatcttagtaagcccagttcatatggagatggatgatgtctcagtcttgcactatggagtcttttcatgatcaaatcagcctatatttagtccgggaggagttggccactatggaaagcataggaatagatgtgtattcgacagtgagcaactagaggtccatgaagttccccaggaggttgtagacaagggtagtgtttgggtgagggctgatactgtagctttggggcagctaacacatcagtagacagtagtctcaggactcaggaggttaggctgctcaatcttcacaatggtgatgtgcagctctcttgcatattcgagaaaaaaatcaagaggagtttgaaaagaaaaacaagtatggagctgtttcatcttcacgggggctttgatcgataaggattcaggagtgctggaagaagatttggagcaagagctgtcgctgtccggcgtctggcggtctgggggagaccagtgattttcctacgcacgcctgccaaaagtgggatggagttgaacgcaaaatgtgttgtttgtcattgggtagatggaggaggacacctcgtttatacgcgcggaggaggtgtagtgcgactgtgcgagttgaatttgtaagaaactcagccgcatgcttgcttggagatacttgagatggaacggaaaactcaggtctcaacagctgtagagaaggtgaggggagggaagcaaacaacctagcttacattgtgatgaaacaaggcagatgagttctggacctctctctctctctctctctctctctcaaaaatggtttgccagtatagtctgtgacttaggaagattgtcatgcctgaatcccgatatagaatttctggtgtaattttcacagtaatattgttcacacatgtcgatggttcagctgttttcggtgctactgcattttttttctatttctgaac

SEQ ID NO: 26695 - DNA, 3008 bp, Zea Mays
atccggtcaaggggaagtgtcctcacgtcggtagaactctagtgaaagtgaaagaacatacttggagtcaaactctaaacctagaggtcccacaacatgtacctggcgcagatctagccgaaccctagcgcagggagcagatctgtaccaaccctaatcctagggttcctcacacttgcgggccgagtaatttctcgtcttgtttcggctagggagcggggtggcttctccggccaagggctactttatgtgtaaacaggcatatagttgcagtcactgcaattgatacttccatttttgaaacttcgatggaaattttggagatgtttatattcacacaaagttatgttatatttaccatcaatgctaagtggttacaaattttactgtcagctagtaccgactgaaaaagtaacaggcagaggttcatgtaatcatgttggggactgttgatgcccaaaatgacacgcgaaaggctttcacagttttgtgtttgttgaatgtgtttgcaatggagattgaagaacacacagattcactttcaatagaggaacccatcacaaggctcccaccagatattattgaggggatacttctcaggcttccggtaaactctctaatgaggctgcgtcaagtctgcaagcaatggtggaacatggtcagcgtgccccgctttatcaaagaacatgcctatcatgcacccaagcacctcctcctttacttgcctaagttgaatatatctgcatcgctccatccaaagactgccaaaccatgtcttgcaacaatcattaatgaaaagtggtctccattgacatgggcctcatcgcatatggaccctgatgatcacctctttgcatcatgcaacggtttgctttgcttctacaagacatacacactaaagatatctaaccctgcaacaggtcaatgcctgcatctcttgaaacctgacggcatattgttgtacgacttccactatctatacagctttggatttcacccgattactggagaatacaagctcgtgcactttctccgtgagcctcagcgctacaaatcaggacagcctttccatttcgacaccattcaagtgtacacccttggtgaagacaaatggagagctatcagagctcctataccatgctgcatggtgcatcttggagtagtaaatgtggatggagtgatgtattggctaacagaagataaaggaacaagctgtggcatggcagttgtatcgtttgatctcagggaagaaatgtttgccttgattcatcttccagcattggaggtgaaagagacagcctcttgtgccaccatcaaagttgcttactatatgactgagatagatgacaaagtgtgcgtagtgactatgccataccaaagccatgcaccaaggtggcgccgaaacaacgcagagctttcaggcaggactgacatttgggctcttgaaagtgacaagtggttcctgaaatatagcatccagtcaccatctctatctcggtatgttcctcagccatgcttcatccacagggagaagatcatactgcaggacagtgaaagtaatgtgtggtaccatgatttgcgaggcaagaacgtgcagattgagcatgcagatggggcgaagcttttgcaccttggtgacaacagattctatgagacacagtcctatttctacaaggagacacttgctcccttgagcatttatgccagagcagccattgttcgtgcaccgcctgagcctcttgctcgttcagttgctttacattagtttctgagaggctcttgcactctgaaggtttggcagcaagtactgacgaatattttaatatggagagtgggtaatggggacggcacacgtatggaatgatccctggttttggagagagtggactagccatccatgccaaggggtgtaaatcctatgaaccaagtgaatcattgagatgattgacacatgcataggcaattggaacgaggcactaaagatgtgaatgaatcttagtaagcccagttcatatggagatggatgatgtctcagtcttgcactatggagtcttttcatgatcaaatcagcctatatttagtccgggaggagttggccactatggaaagcataggaatagatgtgtattcgacagtgagcaactagaggtccatgaagttccccaggaggttgtagacaagggtagtgtttgggtgagggctgatactgtagctttggggcagctaacacatcagtagacagtagtctcaggactcaggaggttaggctgctcaatcttcacaatgggtgcgaatgtaacaaaaaaactaatctgagccatgtatctggatcgttctatcttttaatatagtgtttttaaatatagtgatgtgcagctctcttgcatattcgagaaaaaaatcaagaggagtttgaaaagaaaaacaagtatggagctgtttcatcttcacgggggctttgatcgataaggattcaggagtgctggaagaagatttggagcaagagctgtcgctgtccggcgtctggcggtctgggggagaccagtgattttcctacgcacgcctgccaaaagtgggatggagttgaacgcaaaatgtgttgtttgtcattgggtagatggaggaggacacctcgtttatacgcgcggaggaggtgtagtgcgactgtgcgagttgaatttgtaagaaactcagccgcatgcttgcttggagatacttgagatggaacggaaaactcaggtctcaacagctgtagagaaggtgaggggagggaagcaaacaacctagcttacattgtgatgaaacaaggcagatgagttctggacctctctctctctctctctctctctctcaaaaatggtttgccagtatagtctgtgacttaggaagattgtcatgcctgaatcccgatatagaatttctggtgtaattttcacagtaatattgttcacacatgtcgatggttcagctgttttcggtgctactgcattttttttctatttctgaac

SEQ ID NO: 26696 - DNA, 1574 bp, Zea Mays
ttctttcctgctttacagttgagagcccaatcccatatggtagaggcccgcacgtttccccttgcgacgtcaacctcgttctacccaccagccaccagccggcacaaattctcccttcccacaagaacatcacacggcgatagcaaaaccttccgtcggaggatggcttccgccggcgctggagaagggaaggagacggctgccgggagcagcctccacagcaagactctcctcaagagccaaccactgtaccagtacatactggaatccaccgtcttcccacgcgagccggactgcctgcgggagctccgcgtcgccaccgccacccaccccatggcgggcatggctgcgtcgccggacgaggtgcagctgctgcagctcctgatcgagattcttggcgccaagaacgccatcgaggttggcgtcttcaccgggtactcgctgctcgccaccgccctcgccctccccgacgacggcaagattgtggccatcgacgttacccgcgagagctacgaccagatagggtcgccggtgatcgagaaggccggcgtggcgcacaagatcgacttccgcgtcgggctcgcgctgcccgtgctggaccagatggtggccgaggaggggaacaagggcaagttcgacttcgcgttcgtggacgcggacaagagatccaaaagtttgtggaaatcaggaaagaaactgacgaagattccacagctcaccaaagtgaaatcgaatggagcagctcacctgtagaagaactaaatgagaagataaagatgctcgaattgaaactggaagaggccaccatgctcatcaatgagcgggattcagaaatacttgaactagatgcactcagccatgtacaaccacagaatacagtagcatgtaacaactatccgctgtccctacagtctgatgtagaccggctgttcctggagaagatggaagcagagattcagtgctttatccttacaagagcttctcaggactggaaactcctgacaatggatcaatttgctcttaacgaggcacagaaatcccttctgtcggatcacaaatccctagaaactaaactgaggcacgccgagaacagggcgatgatgctggaggagatggtggataaactagagtcgcaatgcaaggcgctgtctgagacttcagaagttctgaagctgcaggccggagctagcagggcctctttgttctgctcgatccagtttgtgctgctgtgcatagccattgggaccctcctcgttcgcttcctgtcctcttctccggagattgtacctacttgaggttagagaattatgccagtcagcctttatgtaggcgttgttgaacggttgtttactgtaacttattagggcatcaatcgccttacagattttcgttttttgtaccatcaactcgattttgctagtaatttctttatgaatacgagtttactccacttctgggttctctggattctggaaatgccacatgtgtagttttttttctatggtcggtataatgttcgaaagggaatctcgtcaccttggtggtttatgctgagagatctgtcatgatgcttt

SEQ ID NO: 26697 - DNA, 2108 bp, Zea Mays
ttctttcctgctttacagttgagagcccaatcccatatggtagaggcccgcacgtttccccttgcgacgtcaacctcgttctacccaccagccaccagccggcacaaattctcccttcccacaagaacatcacacggcgatagcaaaaccttccgtcggaggatggcttccgccggcgctggagaagggaaggagacggctgccgggagcagcctccacagcaagactctcctcaagagccaaccactgtaccagtacatactggaatccaccgtcttcccacgcgagccggactgcctgcgggagctccgcgtcgccaccgccacccaccccatggcgggcatggctgcgtcgccggacgaggtgcagctgctgcagctcctgatcgagattcttggcgccaagaacgccatcgaggttggcgtcttcaccgggtactcgctgctcgccaccgccctcgccctccccgacgacggcaagattgtggccatcgacgttacccgcgagagctacgaccagatagggtcgccggtgatcgagaaggccggcgtggcgcacaagatcgacttccgcgtcgggctcgcgctgcccgtgctggaccagatggtggccgaggaggggaacaagggcaagttcgacttcgcgttcgtggacgcggacaaggtgaacttcctcaactaccacgagcggctgctgcagctgctcagggtcgggggcctcatcgcctacgacaacacgctgtggggcggctccgtggccgcgtcccccgacgagccgctctccgagcgggaccgcgcgctcgctgcggccaccagggagttcaacgcggccgtggccgccgatccccgcgttcacgtctgccaggtcgccatcgccgacgggctcacgctgtgccgccgcgtcgcctgatccgtatccggttatccgcctcgaaatacagcagagctgtgggctgtcgctgacactgctgtgagctctgtgcttgaaatggccatggtctgtaataacgaactgggcttgagcgaaaataaatccaccagcgcgctagcgtgtgtcagcgatcatcatgctcaatctattggccggttggctggggtaacggcagtccagctacgccagtgacgagccggcaccttcttcccggcggtgagggcctttggcggcttggcgcatggcggcatgggcgatgtgtatgcaagatccaaaagtttgtggaaatcaggaaagaaactgacgaagattccacagctcaccaaagtgaaatcgaatggagcagctcacctgtagaagaactaaatgagaagataaagatgctcgaattgaaactggaagaggccaccatgctcatcaatgagcgggattcagaaatacttgaactagatgcactcagccatgtacaaccacagaatacagtagcatgtaacaactatccgctgtccctacagtctgatgtagaccggctgttcctggagaagatggaagcagagattcagtgctttatccttacaagagcttctcaggactggaaactcctgacaatggatcaatttgctcttaacgaggcacagaaatcccttctgtcggatcacaaatccctagaaactaaactgaggcacgccgagaacagggcgatgatgctggaggagatggtggataaactagagtcgcaatgcaaggcgctgtctgagacttcagaagttctgaagctgcaggccggagctagcagggcctctttgttctgctcgatccagtttgtgctgctgtgcatagccattgggaccctcctcgttcgcttcctgtcctcttctccggagattgtacctacttgaggttagagaattatgccagtcagcctttatgtaggcgttgttgaacggttgtttactgtaacttattagggcatcaatcgccttacagattttcgttttttgtaccatcaactcgattttgctagtaatttctttatgaatacgagtttactccacttctgggttctctggattctggaaatgccacatgtgtagttttttttctatggtcggtataatgttcgaaagggaatctcgtcaccttggtggtttatgctgagagatctgtcatgatgcttt

SEQ ID NO: 26698 - DNA, 2306 bp, Zea Mays
cttctttcctgctttacagttgagagcccaatcccatatggtagaggcccgcacgtttccccttgcgacgtcaacctcgttctacccaccagccaccagccggcacaaattctcccttcccacaagaacatcacacggcgatagcaaaaccttccgtcggaggatggcttccgccggcgctggagaagggaaggagacggctgccgggagcagcctccacagcaagactctcctcaagagccaaccactgtaccagctccaggcaaggcccgaactggggatttccgatcccaagagcccccaccaagcgctcccgccgatcccaaggactcctgcctccgatgcggcaactcatcccatccggcttctaaagccgcggcccctgtggtcaattccggtggccggcggcatggattccggcgccaacagcatcggcgagtcggtgggcgagtcgccgtcgctggcgctggcgccggagccgcagacacggccggccgagccggtcaccaagggtcgcgggctccgccggtggcgccgtatcccgcgcgagcagcaccaggaggggtctccgggtagccccggggccgataccggcgttggagctagcgcgggtgaggacttggcggcgcagctccacaagcgtcgttacggtcctgccgccgacgagcccaagggaaagcaggacccggctgcagcagaggaggtcgagagctcggtcgcgtccgtggagtccagcttcgtgccgctggaggcgtccccaccgccggcgccgactaggttggacccgaatctaggccacctgattgccaccgctggtttctcggtgggcgccggcggcgccgattcggacaacagcgacgaccgcaccagcaagttgtccacggccgccagcgcgccgcgccacgacttctcgtccgtcggcttcggccgggagcgcgacagggcgcggtcccgcgcccccggcgctgctcacggcaagggcatccgtgctgcacgtgtgcgcggcgccactatgcgtgttgcctcttcccctgctgaagcggggaattctcgctccagcgtcgagtccaacctccggagctctaacgctgctcatgcgcggcgatctagtgctggcgtcacaagcaacggtgttcacaagattctgttccctgatggtcatcaaagtgacgatgaacctccaagtggggacatgcggtatggtacaggacgtttctacaaggagaatgggagtatagaagggagattggggaactgtgactccgactccaaccatcatacctttgatgaagcgagcgtgggcaagttgagaatggagggactcattcaggtttggatctgtatggtgagtcgatgggcgttacttcagtcggcacaagaaagcgcttgagaatgagatccaaaagtttgtggaaatcaggaaagaaactgacgaagattccacagctcaccaaagtgaaatcgaatggagcagctcacctgtagaagaactaaatgagaagataaagatgctcgaattgaaactggaagaggccaccatgctcatcaatgagcgggattcagaaatacttgaactagatgcactcagccatgtacaaccacagaatacagtagcatgtaacaactatccgctgtccctacagtctgatgtagaccggctgttcctggagaagatggaagcagagattcagtgctttatccttacaagagcttctcaggactggaaactcctgacaatggatcaatttgctcttaacgaggcacagaaatcccttctgtcggatcacaaatccctagaaactaaactgaggcacgccgagaacagggcgatgatgctggaggagatggtggataaactagagtcgcaatgcaaggcgctgtctgagacttcagaagttctgaagctgcaggccggagctagcagggcctctttgttctgctcgatccagtttgtgctgctgtgcatagccattgggaccctcctcgttcgcttcctgtcctcttctccggagattgtacctacttgaggttagagaattatgccagtcagcctttatgtaggcgttgttgaacggttgtttactgtaacttattagggcatcaatcgccttacagattttcgttttttgtaccatcaactcgattttgctagtaatttctttatgaatacgagtttactccacttctgggttctctggattctggaaatgccacatgtgtagttttttttctatggtcggtataatgttcgaaagggaatctcgtcaccttggtggtttatgctgagagatctgtcatgatgcttt

SEQ ID NO: 26699 - DNA, 1175 bp, Zea Mays
ccaaatgacttctttcctgctttacagttgagagcccaatcccatatggtagaggcccgcacgtttccccttgcgacgtcaacctcgttctacccaccagccaccagccggcacaaattctcccttcccacaagaacatcacacggcgatagcaaaaccttccgtcggaggatggcttccgccggcgctggagaagggaaggagacggctgccgggagcagcctccacagcaagactctcctcaagagccaaccactgtaccagagatccaaaagtttgtggaaatcaggaaagaaactgacgaagattccacagctcaccaaagtgaaatcgaatggagcagctcacctgtagaagaactaaatgagaagataaagatgctcgaattgaaactggaagaggccaccatgctcatcaatgagcgggattcagaaatacttgaactagatgcactcagccatgtacaaccacagaatacagtagcatgtaacaactatccgctgtccctacagtctgatgtagaccggctgttcctggagaagatggaagcagagattcagtgctttatccttacaagagcttctcaggactggaaactcctgacaatggatcaatttgctcttaacgaggcacagaaatcccttctgtcggatcacaaatccctagaaactaaactgaggcacgccgagaacagggcgatgatgctggaggagatggtggataaactagagtcgcaatgcaaggcgctgtctgagacttcagaagttctgaagctgcaggccggagctagcagggcctctttgttctgctcgatccagtttgtgctgctgtgcatagccattgggaccctcctcgttcgcttcctgtcctcttctccggagattgtacctacttgaggttagagaattatgccagtcagcctttatgtaggcgttgttgaacggttgtttactgtaacttattagggcatcaatcgccttacagattttcgttttttgtaccatcaactcgattttgctagtaatttctttatgaatacgagtttactccacttctgggttctctggattctggaaatgccacatgtgtagttttttttctatggtcggtataatgttcgaaagggaatctcgtcaccttggtggtttatgctgagagatctgtcatgatgcttt

SEQ ID NO: 26700 - DNA, 3764 bp, Zea Mays
ccgatttccaaagctggatccgatattccgatgaaagaggtaaatcgagcagcgggcatagttggaggtggcccaaatgacttctttcctgctttacagttgagagcccaatcccatatggtagaggcccgcacgtttccccttgcgacgtcaacctcgttctacccaccagccaccagccggcacaaattctcccttcccacaagaacatcacacggcgatagcaaaaccttccgtcggaggatggcttccgccggcgctggagaagggaaggagacggctgccgggagcagcctccacagcaagactctcctcaagagccaaccactgtaccagtacatactggaatccaccgtcttcccacgcgagccggactgcctgcgggagctccgcgtcgccaccgccacccaccccatggcgggcatggctgcgtcgccggacgaggtgcagctgctgcagctcctgatcgagattcttggcgccaagaacgccatcgaggttggcgtcttcaccgggtactcgctgctcgccaccgccctcgccctccccgacgacggcaagattgtggccatcgacgttacccgcgagagctacgaccagatagggtcgccggtgatcgagaaggccggcgtggcgcacaagatcgacttccgcgtcgggctcgcgctgcccgtgctggaccagatggtggccgaggaggggaacaagggcaagttcgacttcgcgttcgtggacgcggacaaggtgaacttcctcaactaccacgagcggctgctgcagctgctcagggtcgggggcctcatcgcctacgacaacacgctgtggggcggctccgtggccgcgtcccccgacgagccgctctccgagcgggaccgcgcgctcgctgcggccaccagggagttcaacgcggccgtggccgccgatccccgcgttcacgtctgccaggtcgccatcgccgacgggctcacgctgtgccgccgcgtcgcctgatccgtatccggttatccgcctcgaaatacagcagagctgtgggctgtcgctgacactgctgtgagctctgtgcttgaaatggccatggtctgtaataacgaactgggcttgagcgaaaataaatccaccagcgcgctagcgtgtgtcagcgatcatcatgctcaatctattggccggttggctggggtaacggcagtccagctacgccagtgacgagccggcaccttcttcccggcggtgagggcctttggcggcttggcgcatggcggcatgggcgatgtgtatgcagtatgtgccgttccgtaccacaattaccgttgttcctgggccgtgaatgtacttgggcttcagaccgttccgtaccacaattaccgttgttcctgggccgtgaatgtacttgggcttcagagtgagcggagcgacggcgagcccaaccacttcttcgtgcggcctgatcgcggtaacagccgtcagcccgccgccggtgaggcggtgaccggtgaccggtgagcggtgaggtgatggcccgcattctgcatgacgccggctagtgtgtactttgtagcgcccgccagctaggacaagggtcccacacagaactggccacgtacagcgaacaccagtacaccacgagcacagataagagtaggcaaaaaaaaaaaaaacccagcattgtttactgacaccttctgtttcctctcaccttccactcctggatctccagctccaggcaaggcccgaactggggatttccgatcccaagagcccccaccaagcgctcccgccgatcccaaggactcctgcctccgatgcggcaactcatcccatccggcttctaaagccgcggcccctgtggtcaattccggtggccggcggcatggattccggcgccaacagcatcggcgagtcggtgggcgagtcgccgtcgctggcgctggcgccggagccgcagacacggccggccgagccggtcaccaagggtcgcgggctccgccggtggcgccgtatcccgcgcgagcagcaccaggaggggtctccgggtagccccggggccgataccggcgttggagctagcgcgggtgaggacttggcggcgcagctccacaagcgtcgttacggtcctgccgccgacgagcccaagggaaagcaggacccggctgcagcagaggaggtcgagagctcggtcgcgtccgtggagtccagcttcgtgccgctggaggcgtccccaccgccggcgccgactaggttggacccgaatctaggccacctgattgccaccgctggtttctcggtgggcgccggcggcgccgattcggacaacagcgacgaccgcaccagcaagttgtccacggccgccagcgcgccgcgccacgacttctcgtccgtcggcttcggccgggagcgcgacagggcgcggtcccgcgcccccggcgctgctcacggcaagggcatccgtgctgcacgtgtgcgcggcgccactatgcgtgttgcctcttcccctgctgaagcggggaattctcgctccagcgtcgagtccaacctccggagctctaacgctgctcatgcgcggcgatctagtgctggcgtcacaagcaacggtgttcacaagattctgttccctgatggtcatcaaagtgacgatgaacctccaagtggggacatgcggtatggtacaggacgtttctacaaggagaatgggagtatagaagggagattggggaactgtgactccgactccaaccatcatacctttgatgaagcgagcgtgggcaagttgagaatggagggactcattcaggtttggatctgtatggtgagtcgatgggcgttacttcagtcggcacaagaaagcgcttgagaatgagatccaaaagtttgtggaaatcaggaaagaaactgacgaagattccacagctcaccaaagtgaaatcgaatggagcagctcacctgtagaagaactaaatgagaagataaagatgctcgaattgaaactggaagaggccaccatgctcatcaatgagcgggattcagaaatacttgaactagatgcactcagccatgtacaaccacagaatacagtagcatgtaacaactatccgctgtccctacagtctgatgtagaccggctgttcctggagaagatggaagcagagattcagtgctttatccttacaagagcttctcaggactggaaactcctgacaatggatcaatttgctcttaacgaggcacagaaatcccttctgtcggatcacaaatccctagaaactaaactgaggcacgccgagaacagggcgatgatgctggaggagatggtggataaactagagtcgcaatgcaaggcgctgtctgagacttcagaagttctgaagctgcaggccggagctagcagggcctctttgttctgctcgatccagtttgtgctgctgtgcatagccattgggaccctcctcgttcgcttcctgtcctcttctccggagattgtacctacttgaggttagagaattatgccagtcagcctttatgtaggcgttgttgaacggttgtttactgtaacttattagggcatcaatcgccttacagattttcgttttttgtaccatcaactcgattttgctagtaatttctttatgaatacgagtttactccacttctgggttctctggattctggaaatgccacatgtgtagttttttttctatggtcggtataatgttcgaaagggaatctcgtcaccttggtggtttatgctgagagatctgtcatgatgcttt

SEQ ID NO: 26701 - DNA, 2512 bp, Zea Mays
cccatcccttcctctcctcggtcaaaccgcctttctctcccctactcttctccctccctccccgtctctctctctctctaaaaaaagtggcgcccggagaaccgagaggccggagaaagaaaggcggaaagagggagcaaaatctcactttgctgggagttctttcctctgtttccgactcctttgttctcttagtgttcttggttggtggaatggaagctcagcagctccatttgtgttccagagatcttcgtcgttctcgttcccctcgtgtgtagcctttggaggaattcccgttcacatgatccgtgcctggacgtgacggttttgccacgctctgctgcttccctttcggggagaagaggactcgactcaaatcatttggtatcgcagacgtcgcccttcccagttcaggtgccagttgcagttgagagagatttctggcatgtccggcgcaagtaactatggatccctcatcgatgaatggttgctgccccctacaccaagcccaagaactctcatgtctagcttcctgaatgaagaattcagctctgcgccattctctggtccccatgatcaatctgaaaagagcagagaagttttgaattcgagcgatgaggttccttcacatgctgtcaaaggcccatttcaaaatggtttcccaaatttgttcagtgctaaatcaaactccaatggtggtttggcggagcgcagggctgcgagagcaggtttcagtgtcccgaaaattgatacttctcgagttggttcatccacagttattcgatctcctgtgtcaattccacctggtctaagtccaactacacttcttgagtctcctgtttttctttacaataaaatggcacaaccgtctccaaccactggcacattgccatttttgatggctacgaatgataagtcaacaatatcaccagctgccaagataactgaagattctacatttgataatgatgtgttttctttccaaccccacttaggttctgaacaaacagggttctctactgcagaaaaggactatggtgcctatgagagaaagcagtccttgtcgaatattcatcagcaggaatccagtctccagtcaagctttaccgcagtcaaggataacactagtgcaacaattgttaaagcgaagccatcttctagttccatgttcagtgatagtcactattcagctgatcaacagcaagctgacgagacaaacataaaggtgcaaggcaaaggtgtggaggctagatcagctgcttttgctcctgtatcagcgcacagtgatgcatctctcctggagtctcaagaagcacttgatgtctcctcaacactgtctaatgaagaggacgagagggcaacgcatggcactgtttctatagagtgtgatggtgatgaagctgatgctgtatctaaaagaaggaagctggaactagatgctttagaagctactgctactgctactacctccaccaccaataccatcgacatggggcctgcagcctcaagagctgtccgggagcctagggttgttgttcagaccacaagtgaggttgacattcttgacgacggttatcggtggcgcaagtatgggcagaaggttgttaagggcaatccaaatccaaggtctcactttcactaacatttcttacactactaaactgtactccatcccctgaaattagcaggcattgattcacttgtctgcaggagctactacaaatgtacaaacccgggctgttcagtgcgcaagcatgtggaaagagcatcacacgatctgaaatcagtcatcacaacgtatgagggaaagcacaaccatgaagttccagcagccagaaatagtgggcaaggcagttccagcgctccatctgcatcacaagctgttggttctcatcgtaggcaagaacctgcacaggccagctttgctcactttggtacggcctctttcagctcgttcggtctcccaccgagtggtcagttgggaccaacaactggcaatttcggcttcgggatggttccgccaggcatgacgatcccagtgccctctctaggatcacttgcccctgtaaagatggttggaaattcatcaactatgcagggctacccagggcttatggtgccgggagaaccaaaggcagagcctgtctcgcaaccacttatccaaatggcaaatgcatctccaccagcttaccaacagatattgagcaggcctcctttcggtcatcagatgtaaataataggaaagagaaaggggataatagatttgcttcagcttgtatacatgatagctacgctgcaacatggctttagtgttcatggatcgtccaattttttatttctattttatttttctgcccacgcatgtctttgaagcaaagaatgctgaggatgataccctgtcgtgcctgttgtaatcacgtaaaggatacctttcgtctttttgagactcgaaattggaaaacgaccaatcaaaatttctggttgcgaatgcaaatctgatgaattgtgctgc

SEQ ID NO: 26702 - DNA, 2368 bp, Zea Mays
cccatcccttcctctcctcggtcaaaccgcctttctctcccctactcttctccctccctccccgtctctctctctctctaaaaaaagtggcgcccggagaaccgagaggccggagaaagaaaggcggaaagagggagcaaaatctcactttgctgggagttctttcctctgtttccgactcctttgttctcttagtgttcttggttggtggaatggaagctcagcagctccatttgtgttccagagatcttcgtcgttctcgttcccctcgtgtgtagcctttggaggaattcccgttcacatgatccgtgcctggacgtgacggttttgccacgctctgctgcttccctttcggggagaagaggactcgactcaaatcatttggtatcgcagacgtcgcccttcccagttcagttgagagagatttctggcatgtccggcgcaagtaactatggatccctcatcgatgaatggttgctgccccctacaccaagcccaagaactctcatgtctagcttcctgaatgaagaattcagctctgcgccattctctggtccccatgatcaatctgaaaagagcagagaagttttgaattcgagcgatgaggttccttcacatgctgtcaaaggcccatttcaaaatggtttcccaaatttgttcagtgctaaatcaaactccaatggtggtttggcggagcgcagggctgcgagagcaggcacaaccgtctccaaccactggcacattgccatttttgatggctacgaatgataagtcaacaatatcaccagctgccaagataactgaagattctacatttgataatgatgtgttttctttccaaccccacttaggttctgaacaaacagggttctctactgcagaaaaggactatggtgcctatgagagaaagcagtccttgtcgaatattcatcagcaggaatccagtctccagtcaagctttaccgcagtcaaggataacactagtgcaacaattgttaaagcgaagccatcttctagttccatgttcagtgatagtcactattcagctgatcaacagcaagctgacgagacaaacataaaggtgcaaggcaaaggtgtggaggctagatcagctgcttttgctcctgtatcagcgcacagtgatgcatctctcctggagtctcaagaagcacttgatgtctcctcaacactgtctaatgaagaggacgagagggcaacgcatggcactgtttctatagagtgtgatggtgatgaagctgatgctgtatctaaaagaaggaagctggaactagatgctttagaagctactgctactgctactacctccaccaccaataccatcgacatggggcctgcagcctcaagagctgtccgggagcctagggttgttgttcagaccacaagtgaggttgacattcttgacgacggttatcggtggcgcaagtatgggcagaaggttgttaagggcaatccaaatccaaggtctcactttcactaacatttcttacactactaaactgtactccatcccctgaaattagcaggcattgattcacttgtctgcaggagctactacaaatgtacaaacccgggctgttcagtgcgcaagcatgtggaaagagcatcacacgatctgaaatcagtcatcacaacgtatgagggaaagcacaaccatgaagttccagcagccagaaatagtgggcaaggcagttccagcgctccatctgcatcacaagctgttggttctcatcgtaggcaagaacctgcacaggccagctttgctcactttggtacggcctctttcagctcgttcggtctcccaccgagtggtcagttgggaccaacaactggcaatttcggcttcgggatggttccgccaggcatgacgatcccagtgccctctctaggatcacttgcccctgtaaagatggttggaaattcatcaactatgcagggctacccagggcttatggtgccgggagaaccaaaggcagagcctgtctcgcaaccacttatccaaatggcaaatgcatctccaccagcttaccaacagatattgagcaggcctcctttcggtcatcagatgtaaataataggaaagagaaaggggataatagatttgcttcagcttgtatacatgatagctacgctgcaacatggctttagtgttcatggatcgtccaattttttatttctattttatttttctgcccacgcatgtctttgaagcaaagaatgctgaggatgataccctgtcgtgcctgttgtaatcacgtaaaggatacctttcgtctttttgagactcgaaattggaaaacgaccaatcaaaatttctggttgcgaatgcaaatctgatgaattgtgctgc

SEQ ID NO: 26703 - DNA, 2333 bp, Zea Mays
ttaaagagccatcgtctgcacaaacgatcctccatccaagtctttcttcccatcccttcctctcctcggtcaaaccgcctttctctcccctactcttctccctccctccccgtctctctctctctctaaaaaaagtggcgcccggagaaccgagaggccggagaaagaaaggcggaaagagggagcaaaatctcactttgctgggagttctttcctctgtttccgactcctttgttctcttagtgttcttggttggtggaatggaagctcagcagctccatttgtgttccagagatcttcgtcgttctcgttcccctcgtgtgtagcctttggaggaattcccgttcacatgatccgtgcctggacgtgacggttttgccacgctctgctgcttccctttcggggagaagaggactcgactcaaatcatttggtatcgcagacgtcgcccttcccagttcagttgagagagatttctggcatgtccggcgcaagtaactatggatccctcatcgatgaatggttgctgccccctacaccaagcccaagaactctcatgtctagcttcctgaatgaagaattcagctctgcgccattctctggtccccatgatcaatctgaaaagagcagagaagttttgaattcgagcgatgagggctgcgagagcaggtttcagtgtcccgaaaattgatacttctcgagttggttcatccacagttattcgatctcctgtgtcaattccacctggtctaagtccaactacacttcttgagtctcctgtttttctttacaataaaatggcacaaccgtctccaaccactggcacattgccatttttgatggctacgaatgataagtcaacaatatcaccagctgccaagataactgaagattctacatttgataatgatgtgttttctttccaaccccacttaggttctgaacaaacagggttctctactgcagaaaaggactatggtgcctatgagagaaagcagtccttgtcgaatattcatcagcaggaatccagtctccagtcaagctttaccgcagtcaaggataacactagtgcaacaattgttaaagcgaagccatcttctagttccatgttcagtgatagtcactattcagctgatcaacagcaagctgacgagacaaacataaaggtgcaaggcaaaggtgtggaggctagatcagctgcttttgctcctgtatcagcgcacagtgatgcatctctcctggagtctcaagaagcacttgatgtctcctcaacactgtctaatgaagaggacgagagggcaacgcatggcactgtttctatagagtgtgatggtgatgaagctgatgctgtatctaaaagaaggaagctggaactagatgctttagaagctactgctactgctactacctccaccaccaataccatcgacatggggcctgcagcctcaagagctgtccgggagcctagggttgttgttcagaccacaagtgaggttgacattcttgacgacggttatcggtggcgcaagtatgggcagaaggttgttaagggcaatccaaatccaagtgcgcaagcatgtggaaagagcatcacacgatctgaaatcagtcatcacaacgtatgagggaaagcacaaccatgaagttccagcagccagaaatagtgggcaaggcagttccagcgctccatctgcatcacaagctgttggttctcatcgtaggcaagaacctgcacaggccagctttgctcactttggtacggcctctttcagctcgttcggtctcccaccgagtggtcagttgggaccaacaactggcaatttcggcttcgggatggttccgccaggcatgacgatcccagtgccctctctaggatcacttgcccctgtaaagatggttggaaattcatcaactatgcagggctacccagggcttatggtgccgggagaaccaaaggcagagcctgtctcgcaaccacttatccaaatggcaaatgcatctccaccagcttaccaacagatattgagcaggcctcctttcggtcatcagatgtaaataataggaaagagaaaggggataatagatttgcttcagcttgtatacatgatagctacgctgcaacatggctttagtgttcatggatcgtccaattttttatttctattttatttttctgcccacgcatgtctttgaagcaaagaatgctgaggatgataccctgtcgtgcctgttgtaatcacgtaaaggatacctttcgtctttttgagactcgaaattggaaaacgaccaatcaaaatttctggttgcgaatgcaaatctgatgaattgtgctgc

SEQ ID NO: 26704 - DNA, 2013 bp, Zea Mays
acataccccaagctaggcacccactctggacccttcaggcgaacattctcagttcgagcccttttactgcgccttggcccatctgttgtctcatgtcttggcccatcttccaccatctctttacttacattctggtctgcggggcagccgacctcaccgacggcggaatgacaaaaaggacaatatcaacgacgccgcgcgcttcaacgccacagcccatcctctgagacaaaataggataaggagacccacccggcacgactgctctccgcacccgcaacgcccatggcgttcgccgccgtcctccgcgcccgcctcctcccggtgcccactccgctatccagctcctcgccgccgccattcttcgccccttcggcctacgtccgcgtaccgcgcctcacagcagcagcagcgcgcaccgtacggtaccgacgacggggcgggcggcctcaccgcgcggccgcggcgattacagcgtcactcgacctgaccgaggacaacgtccgggtggccctagacgaagccaaatccgagctagggcagctgttcgacacgtcggtgggcatcacagggcaagttgacctcgcggagttggacgggccgttcgtgaagctccggctcaagggcaagttctggcacacccgcgccaccgtggtcgcgcggatcggaaactacctcaagaaccgcattccggaaattttggaggtggagatcgaggacgagaaacagctggatgatagtcccgctgctttctgaggggtaccgcacgatcaccaatttagttcaatgctgtgtgtgattcatcagtatgtgccaattgtgaggttcaggagaagggacacgttttcagttttcagaattagtactggttcagggagaattcttatcggaggctacctttcgtacacagttaagtatggtactccttactctgctaatgtcaaaactacagacttatgaacacatgaattccaatcaacattttctggctgacatgacaagagcattcatcatcctcgatgtgtaaagctgaatctatggatctgagtctgaaggagcgaatatacagacctgaattttctgtatttcccataatcacagctccagcttcggggaatttgcagttgcctttgtggtttgcattatagcatatgcacattgattgcagatatccaatatttggaggtgcttgttctattattacgaagaagctgcatggtattacaaagaaacaaaatgacaagactatggctgacactagtcatactcaattcttgcatttgagcgccatccatgatttgtgaagacttccatcgctaccacttccaaagcttgacaaacatcgttgttgtgattcctccttttgtagaaatctctaaaatctgaaccagtgagtacatctaaaaataacctgcacaactgatggggaagctgccctaagtgtccgtttggttggatttttggggctgttttcgcttctcaaaacccaaaagttgaaccaaataccaaaggagcgagctgtttttggcttcctgcttttttgaaataggcggagtgaagaactttttcacggttgtttcaagagagacatagatagaaggtacttgttataactaaacggctaaacccgagaggctccatgccgttatagacactcgctctatagcggtagtattgacttaccagccaactaccgtttgcgaggctcacaaattagcgaggaaaaatcatcacttgcttggtgaagtttcttgagtcgacgtgcggctgtggtgtcgctgatcgtctcacgtgtgcttggccggatcgaagactgggagatagccctctctgtgctctgtaattgcatcatagaatctgaagtgtgaggagttagccttccttgaccggatcgatactcgtgcacaatcctaaagacacttcctcgccgaaatgcgctcttgctaaaagcttccagtctaggaggcacattgttgtatcactcacatgtacttgatatcgacagattgtccg

SEQ ID NO: 26705 - DNA, 600 bp, Zea Mays
tctgcggggcagccgacctcaccgacggcggaatgacaaaaaggacaatatcaacgacgccgcgcgcttcaacgccacagcccatcctctgagacaaaataggataaggagacccacccggcacgactgctctccgcacccgcaacgcccatggcgttcgccgccgtcctccgcgcccgcctcctcccggtgcccactccgctatccagctcctcgccgccgccattcttcgccccttcggcctacgtccgcgtaccgcgcctcacagcagcagcagcgcgcaccgtacggtaccgacgacggggcgggcggcctcaccgcgcggccgcggcgattacagcgtcactcgacctgaccgaggacaacgtccgggtggccctagacgaagccaaatccgagctagggcagctgttcgacacgtcggtgggcatcacagggcaagttgacctcgcggagttggacgggccgttcgtgaagctccggctcaagggcaagttctggcacacccgcgccaccgtggtcgcgcggatcggaaactacctcaagaaccgcattccggaaatggggagagtgttgtttaatcaaggtgtaacatggggc

SEQ ID NO: 26706 - DNA, 3139 bp, Zea Mays
gagcttcctcccccaaattccggtcctcctaaaccctcgctcgctacctcctcatcggcgcgaccccaattccgccctccccgacctcgatgaacccgatctaagcatgtccgctgcgctcgcctgtctccgccgcacctccaagcgccgccgagacgcgcccgatcatgccctccccccatcatcgaagcagccgctgatggcccacgccggcgccggcgctggcgccgccgagtcgtcctcgtcggcctcggcctccgcttcggggggcgatggagcttccgcagcggcggcggcggcctccgcctcgtctccccctgcgtcgccgcgggaggtgcacttcttcgtgcgcgccaccgattctaggaccatcgcgatgcacgcggggtgtgacgatactgtcggcgccgtgcttgatcatctcggcgcctgcgggtatggccgcgatttgcggctgctctacgcggggcggcagctcgcgccggaggccaccctcgccgagctccatctcccgccggattccacacttcaccttttggcgcgcctcaggtccacccagcatcctcacgcgtggcaactcgcgtcgcacatcgccggcaccgccgccgccgccgccgccgccgcggagtccgagccgtccaggatccccgccgccgcgttctccctcgacgaactcgtcagggagttcatcctccgcgcccaccgcgccaacctggggcttcgccccgatcgcgcctctactgacgaagatcggtttgcggccgaccacgccgctgagtacgtggacatcttcctccaggcgggcgccgccttagcgctggttcgcctctacctctcaaattcccccttccgctctcacgccgagagtgccatcaaatgttttgtcgccacggacccttattccttgccgatggacttgctagtcgtgacggcaccagtgctgcttgaattctgccgcttgctctccttggctgcaggcaagaaggaattactatatagatcatgccgtcgtacacttgcctcagttttatcaactcgtcccaggctgcccccttctatgaactcaccaaccagattgatcgagcaagtcctgccattcgcccgtgaaacagtggatgtggtccttgatggacttgcatcaatgccaatgattatatcgcctagtgatcttgatgagttctcaaatttcctcaaagtgatgtgccagcaagcacgccattggatttccggtgaggggccgatgcccagtaatctgtacagcagggagtctgagcatggcgacacatggatatggaggtttcacaacatgtcgatggacatgctgaaaaggttggatgagtgcttgaagacattggagatggacctgtcattatcatcagagagtgtcggggtcatggaaagtcaaaccacatgggctgctcgatcacacatcctggtcatgttgactgaactcgatttcatctcagcgatttatgaggatgtggggcacaacctacagcttgtgttgctggcacacagggcgccactcaatgctcttgtccgttgttccaagagaaatgagcgtctacattggctcgtgaagcataagaatctcctttgctttgaagcaagaaggaatttagtcttcatgatgctccctgaagggaaggatgactttggggagctgcatgagatgttaattgatcgatcacatttacttgatgaatcctttaattacatcgcacaggcgaaacaaactgaacttcgtggtgggctgtttatggagtttaagaatgaggaagctacaggtcctggcgttctaagggaatggttttgtttagtgtgccaagctcttttcagttcgaagcaagttctcttctcaccctgtccggaggataaacgaaggttctacttgaacgaaacatctgctgtggatccactgcacctgaagtacttcacttttgcggggcggataattggattagccttgatgcataaagtacaagttggagttgtgatagaccgtactctgttcttgcatcttgctgggagaagtattacgttagaagatatttctgttgcagatcctgtcaaatatgcaagctgtaaaaaaattctagagatggatgctgctgaaattgataatctatacctaacattttcccgaggagctcatgaattagctaacccatttcacggatggatttgctgatatactagttaatcccaagcgccgggaagagtttttcgagtgtttagatctagaagactttgatcgactgttaggggggagcagcaatgcaataaatctgcaagattggaaatcacatactcaatataatggctacaaagaaaaggatcgccagattaccctgttctggaaggctgtggagcgcatgtcaatcgagagacagaggcagctcctcttcttctggacttcggtgaagtatttaccatcagacgggttttgtggactgagctccaaactttttatttacaagacatcagattcgcccgaccggctcccatcatcgcagacctgcttctaccggctctgcctccctccttacacatccttgaaaatgatggaaaaccagctgcagaagatcacagaagagcatgtgagctgcagcttcggtacatggtagttgctgctgtcatggattctgaaccggtatattctgtacatacggtaggctagcgacaccctgctgcctcattgaatctgttcctagggcttgaggtaataggctttctttcttcttttgtatgtatcctgggtttagtgttccgagacttctatttaacctaatgcagaaggaattgatagaaagcaggttccttttgttttctaaagaggtgtgagtgtgacgctgtgtagtccagccggtggcagtaatgtaataacatgtgcatgtagctgcattgtgctgagtgctgacactccgattaccggtgaacgggatggtgggctattctagttgatccgttaccaaaccaaagcatggcattgtttgttcttccttctctagttttgattttgtggatctgacatactttggtcagctctcttgtagcagtagtctgccaattttcagctaactgtcaggcgtgtttcgctcgggacggtgaagcttatgcgaaccatggcagatgtttt

SEQ ID NO: 26707 - DNA, 3328 bp, Zea Mays
agaaaggccacgcccaaataaacatctcacactccccaccccacttcatcgagcttcctcccccaaattccggtcctcctaaaccctcgctcgctacctcctcatcggcgcgaccccaattccgccctccccgacctcgatgaacccgatctaagcatgtccgctgcgctcgcctgtctccgccgcacctccaagcgccgccgagacgcgcccgatcatgccctccccccatcatcgaagcagccgctgatggcccacgccggcgccggcgctggcgccgccgagtcgtcctcgtcggcctcggcctccgcttcggggggcgatggagcttccgcagcggcggcggcggcctccgcctcgtctccccctgcgtcgccgcgggaggtgcacttcttcgtgcgcgccaccgattctaggaccatcgcgatgcacgcggggtgtgacgatactgtcggcgccgtgcttgatcatctcggcgcctgcgggtatggccgcgatttgcggctgctctacgcggggcggcagctcgcgccggaggccaccctcgccgagctccatctcccgccggattccacacttcaccttttggcgcgcctcaggtccacccagcatcctcacgcgtggcaactcgcgtcgcacatcgccggcaccgccgccgccgccgccgccgccgcggagtccgagccgtccaggatccccgccgccgcgttctccctcgacgaactcgtcagggagttcatcctccgcgcccaccgcgccaacctggggcttcgccccgatcgcgcctctactgacgaagatcggtttgcggccgaccacgccgctgagtacgtggacatcttcctccaggcgggcgccgccttagcgctggttcgcctctacctctcaaattcccccttccgctctcacgccgagagtgccatcaaatgttttgtcgccacggacccttattccttgccgatggacttgctagtcgtgacggcaccagtgctgcttgaattctgccgcttgctctccttggctgcaggcaagaaggaattactatatagatcatgccgtcgtacacttgcctcagttttatcaactcgtcccaggctgcccccttctatgaactcaccaaccagattgatcgagcaagtcctgccattcgcccgtgaaacagtggatgtggtccttgatggacttgcatcaatgccaatgattatatcgcctagtgatcttgatgagttctcaaatttcctcaaagtgatgtgccagcaagcacgccattggatttccggtgaggggccgatgcccagtaatctgtacagcagggagtctgagcatggcgacacatggatatggaggtttcacaacatgtcgatggacatgctgaaaaggttggatgagtgcttgaagacattggagatggacctgtcattatcatcagagagtgtcggggtcatggaaagtcaaaccacatgggctgctcgatcacacatcctggtcatgttgactgaactcgatttcatctcagcgatttatgaggatgtggggcacaacctacagcttgtgttgctggcacacagggcgccactcaatgctcttgtccgttgttccaagagaaatgagcgtctacattggctcgtgaagcataagaatctcctttgctttgaagcaagaaggaatttagtcttcatgatgctccctgaagggaaggatgactttggggagctgcatgagatgttaattgatcgatcacatttacttgatgaatcctttaattacatcgcacaggcgaaacaaactgaacttcgtggtgggctgtttatggagtttaagaatgaggaagctacaggtcctggcgttctaagggaatggttttgtttagtgtgccaagctcttttcagttcgaagcaagttctcttctcaccctgtccggaggataaacgaaggttctacttgaacgaaactatctgcatattgcagcatctgctgtggatccactgcacctgaagtacttcacttttgcggggcggataattggattagccttgatgcataaagtacaagttggagttgtgatagaccgtactctgttcttgcatcttgctgggagaagtattacgttagaagatatttctgttgcagatcctgtcaaatatgcaagctgtaaaaaaattctagagatggatgctgctgaaattgataatctatacctaacattttcccgaggagctcatgaattaggtactgaaaagattattgatctttgtccaggaggacaggatatcagtgtgaatattgggaacagagagcattacattgatcttcttattaagaatatctttgtggactctatttcatctcagctaacccatttcacggatggatttgctgatatactagttaatcccaagcgccgggaagagtttttcgagtgtttagatctagaagactttgatcgactgttaggggggagcagcaatgcaataaatctgcaagattggaaatcacatactcaatataatggctacaaagaaaaggatcgccagattaccctgttctggaaggctgtggagcgcatgtcaatcgagagacagaggcagctcctcttcttctggacttcggtgaagtatttaccatcagacgggttttgtggactgagctccaaactttttatttacaagacatcagattcgcccgaccggctcccatcatcgcagacctgcttctaccggctctgcctccctccttacacatccttgaaaatgatggaaaaccagctgcagaagatcacagaagagcatgtgagctgcagcttcggtacatggtagttgctgctgtcatggattctgaaccggtatattctgtacatacggtaggctagcgacaccctgctgcctcattgaatctgttcctagggcttgaggtaataggctttctttcttcttttgtatgtatcctgggtttagtgttccgagacttctatttaacctaatgcagaaggaattgatagaaagcaggttccttttgttttctaaagaggtgtgagtgtgacgctgtgtagtccagccggtggcagtaatgtaataacatgtgcatgtagctgcattgtgctgagtgctgacactccgattaccggtgaacgggatggtgggctattctagttgatccgttaccaaaccaaagcatggcattgtttgttcttccttctctagttttgattttgtggatctgacatactttggtcagctctcttgtagcagtagtctgccaattttcagctaactgtcaggcgtgtttcgctcgggacggtgaagcttatgcgaaccatggcagatgtttt

SEQ ID NO: 26708 - DNA, 2745 bp, Zea Mays
gtcaaagctcaaaccggaagaaaggccacgcccaaataaacatctcacactccccaccccacttcatcgagcttcctcccccaaattccggtcctcctaaaccctcgctcgctacctcctcatcggcgcgaccccaattccgccctccccgacctcgatgaacccgatctaagcatgtccgctgcgctcgcctgtctccgccgcacctccaagcgccgccgagacgcgcccgatcatgccctccccccatcatcgaagcagccgctgatggcccacgccggcgccggcgctggcgccgccgagtcgtcctcgtcggcctcggcctccgcttcggggggcgatggagcttccgcagcggcggcggcggcctccgcctcgtctccccctgcgtcgccgcgggaggtgcacttcttcgtgcgcgccaccgattctaggaccatcgcgatgcacgcggggtgtgacgatactgtcggcgccgtgcttgatcatctcggcgcctgcgggtatggccgcgatttgcggctgctctacgcggggcggcagctcgcgccggaggccaccctcgccgagctccatctcccgccggattccacacttcaccttttggcgcgcctcaggtccacccagcatcctcacgcgtggcaactcgcgtcgcacatcgccggcaccgccgccgccgccgccgccgccgcggagtccgagccgtccaggatccccgccgccgcgttctccctcgacgaactcgtcagggagttcatcctccgcgcccaccgcgccaacctggggcttcgccccgatcgcgcctctactgacgaagatcggtttgcggccgaccacgccgctgagtacgtggacatcttcctccaggcgggcgccgccttagcgctggttcgcctctacctctcaaattcccccttccgctctcacgccgagagtgccatcaaatgttttgtcgccacggacccttattccttgccgatggacttgctagtcgtgacggcaccagtgctgcttgaattctgccgcttgctctccttggctgcaggcaagaaggaattactatatagatcatgccgtcgtacacttgcctcagttttatcaactcgtcccaggctgcccccttctatgaactcaccaaccagattgatcgagcaagtcctgccattcgcccgtgaaacagtggatgtggtccttgatggacttgcatcaatgccaatgattatatcgcctagtgatcttgatgagttctcaaatttcctcaaagtgatgtgccagcaagcacgccattggatttccggtgaggggccgatgcccagtaatctgtacagcagggagtctgagcatggcgacacatggatatggaggtttcacaacatgtcgatggacatgctgaaaaggttggatgagtgcttgaagacattggagatggacctgtcattatcatcagagagtgtcggggtcatggaaagtcaaaccacatgggctgctcgatcacacatcctggtcatgttgactgaactcgatttcatctcagcgatttatgaggatgtggggcacaacctacagcttgtgttgctggcacacagggcgccactcaatgctcttgtccgttgttccaagagaaatgagcgtctacattggctcgtgaagcataagaatctcctttgctttgaagcaagaaggaatttagtcttcatgatgctccctgaagggaaggatgactttggggagctgcatgagatgttaattgatcgatcacatttacttgatgaatcctttaattacatcgcacaggcgaaacaaactgaacttcgtggtgggctgtttatggagtttaagaatgaggaagctacaggtcctggcgttctaagggaatggttttgtttagtgtgccaagctcttttcagttcgaagcaagttctcttctcaccctgtccggaggataaacgaaggttctacttgaacgaaagctgtggagcgcatgtcaatcgagagacagaggcagctcctcttcttctggacttcggtgaagtatttaccatcagacgggttttgtggactgagctccaaactttttatttacaagacatcagattcgcccgaccggctcccatcatcgcagacctgcttctaccggctctgcctccctccttacacatccttgaaaatgatggaaaaccagctgcagaagatcacagaagagcatgtgagctgcagcttcggtacatggtagttgctgctgtcatggattctgaaccggtatattctgtacatacggtaggctagcgacaccctgctgcctcattgaatctgttcctagggcttgaggtaataggctttctttcttcttttgtatgtatcctgggtttagtgttccgagacttctatttaacctaatgcagaaggaattgatagaaagcaggttccttttgttttctaaagaggtgtgagtgtgacgctgtgtagtccagccggtggcagtaatgtaataacatgtgcatgtagctgcattgtgctgagtgctgacactccgattaccggtgaacgggatggtgggctattctagttgatccgttaccaaaccaaagcatggcattgtttgttcttccttctctagttttgattttgtggatctgacatactttggtcagctctcttgtagcagtagtctgccaattttcagctaactgtcaggcgtgtttcgctcgggacggtgaagcttatgcgaaccatggcagatgtttt

SEQ ID NO: 26709 - DNA, 3041 bp, Zea Mays
cttgtcaaagctcaaaccggaagaaaggccacgcccaaataaacatctcacactccccaccccacttcatcgagcttcctcccccaaattccggtcctcctaaaccctcgctcgctacctcctcatcggcgcgaccccaattccgccctccccgacctcgatgaacccgatctaagcatgtccgctgcgctcgcctgtctccgccgcacctccaagcgccgccgagacgcgcccgatcatgccctccccccatcatcgaagcagccgctgatggcccacgccggcgccggcgctggcgccgccgagtcgtcctcgtcggcctcggcctccgcttcggggggcgatggagcttccgcagcggcggcggcggcctccgcctcgtctccccctgcgtcgccgcgggaggtgcacttcttcgtgcgcgccaccgattctaggaccatcgcgatgcacgcggggtgtgacgatactgtcggcgccgtgcttgatcatctcggcgcctgcgggtatggccgcgatttgcggctgctctacgcggggcggcagctcgcgccggaggccaccctcgccgagctccatctcccgccggattccacacttcaccttttggcgcgcctcaggtccacccagcatcctcacgcgtggcaactcgcgtcgcacatcgccggcaccgccgccgccgccgccgccgccgcggagtccgagccgtccaggatccccgccgccgcgttctccctcgacgaactcgtcagggagttcatcctccgcgcccaccgcgccaacctggggcttcgccccgatcgcgcctctactgacgaagatcggtttgcggccgaccacgccgctgagtacgtggacatcttcctccaggcgggcgccgccttagcgctggttcgcctctacctctcaaattcccccttccgctctcacgccgagagtgccatcaaatgttttgtcgccacggacccttattccttgccgatggacttgctagtcgtgacggcaccagtgctgcttgaattctgccgcttgctctccttggctgcaggcaagaaggaattactatatagatcatgccgtcgtacacttgcctcagttttatcaactcgtcccaggctgcccccttctatgaactcaccaaccagattgatcgagcaagtcctgccattcgcccgtgaaacagtggatgtggtccttgatggacttgcatcaatgccaatgattatatcgcctagtgatcttgatgagttctcaaatttcctcaaagtgatgtgccagcaagcacgccattggatttccggtgaggggccgatgcccagtaatctgtacagcagggagtctgagcatggcgacacatggatatggaggtttcacaacatgtcgatggacatgctgaaaaggttggatgagtgcttgaagacattggagatggacctgtcattatcatcagagagtgtcggggtcatggaaagtcaaaccacatgggctgctcgatcacacatcctggtcatgttgactgaactcgatttcatctcagcgatttatgaggatgtggggcacaacctacagcttgtgttgctggcacacagggcgccactcaatgctcttgtccgttgttccaagagaaatgagcgtctacattggctcgtgaagcataagaatctcctttgctttgaagcaagaaggaatttagtcttcatgatgctccctgaagggaaggatgactttggggagctgcatgagatgttaattgatcgatcacatttacttgatgaatcctttaattacatcgcacaggcgaaacaaactgaacttcgtggtgggctgtttatggagtttaagaatgaggaagctacaggtcctggcgttctaagggaatggttttgtttagtgtgccaagctcttttcagttcgaagcaagttctcttctcaccctgtccggaggataaacgaaggttctacttgaacgaaagaggacaggatatcagtgtgaatattgggaacagagagcattacattgatcttcttattaagaatatctttgtggactctatttcatctcagctaacccatttcacggatggatttgctgatatactagttaatcccaagcgccgggaagagtttttcgagtgtttagatctagaagactttgatcgactgttaggggggagcagcaatgcaataaatctgcaagattggaaatcacatactcaatataatggctacaaagaaaaggatcgccagattaccctgttctggaaggctgtggagcgcatgtcaatcgagagacagaggcagctcctcttcttctggacttcggtgaagtatttaccatcagacgggttttgtggactgagctccaaactttttatttacaagacatcagattcgcccgaccggctcccatcatcgcagacctgcttctaccggctctgcctccctccttacacatccttgaaaatgatggaaaaccagctgcagaagatcacagaagagcatgtgagctgcagcttcggtacatggtagttgctgctgtcatggattctgaaccggtatattctgtacatacggtaggctagcgacaccctgctgcctcattgaatctgttcctagggcttgaggtaataggctttctttcttcttttgtatgtatcctgggtttagtgttccgagacttctatttaacctaatgcagaaggaattgatagaaagcaggttccttttgttttctaaagaggtgtgagtgtgacgctgtgtagtccagccggtggcagtaatgtaataacatgtgcatgtagctgcattgtgctgagtgctgacactccgattaccggtgaacgggatggtgggctattctagttgatccgttaccaaaccaaagcatggcattgtttgttcttccttctctagttttgattttgtggatctgacatactttggtcagctctcttgtagcagtagtctgccaattttcagctaactgtcaggcgtgtttcgctcgggacggtgaagcttatgcgaaccatggcagatgtttt

SEQ ID NO: 26710 - DNA, 3175 bp, Zea Mays
ctcttgtcaaagctcaaaccggaagaaaggccacgcccaaataaacatctcacactccccaccccacttcatcgagcttcctcccccaaattccggtcctcctaaaccctcgctcgctacctcctcatcggcgcgaccccaattccgccctccccgacctcgatgaacccgatctaagcatgtccgctgcgctcgcctgtctccgccgcacctccaagcgccgccgagacgcgcccgatcatgccctccccccatcatcgaagcagccgctgatggcccacgccggcgccggcgctggcgccgccgagtcgtcctcgtcggcctcggcctccgcttcggggggcgatggagcttccgcagcggcggcggcggcctccgcctcgtctccccctgcgtcgccgcgggaggtgcacttcttcgtgcgcgccaccgattctaggaccatcgcgatgcacgcggggtgtgacgatactgtcggcgccgtgcttgatcatctcggcgcctgcgggtatggccgcgatttgcggctgctctacgcggggcggcagctcgcgccggaggccaccctcgccgagctccatctcccgccggattccacacttcaccttttggcgcgcctcaggtccacccagcatcctcacgcgtggcaactcgcgtcgcacatcgccggcaccgccgccgccgccgccgccgccgcggagtccgagccgtccaggatccccgccgccgcgttctccctcgacgaactcgtcagggagttcatcctccgcgcccaccgcgccaacctggggcttcgccccgatcgcgcctctactgacgaagatcggtttgcggccgaccacgccgctgagtacgtggacatcttcctccaggcgggcgccgccttagcgctggttcgcctctacctctcaaattcccccttccgctctcacgccgagagtgccatcaaatgttttgtcgccacggacccttattccttgccgatggacttgctagtcgtgacggcaccagtgctgcttgaattctgccgcttgctctccttggctgcaggcaagaaggaattactatatagatcatgccgtcgtacacttgcctcagttttatcaactcgtcccaggctgcccccttctatgaactcaccaaccagattgatcgagcaagtcctgccattcgcccgtgaaacagtggatgtggtccttgatggacttgcatcaatgccaatgattatatcgcctagtgatcttgatgagttctcaaatttcctcaaagtgatgtgccagcaagcacgccattggatttccggtgaggggccgatgcccagtaatctgtacagcagggagtctgagcatggcgacacatggatatggaggtttcacaacatgtcgatggacatgctgaaaaggttggatgagtgcttgaagacattggagatggacctgtcattatcatcagagagtgtcggggtcatggaaagtcaaaccacatgggctgctcgatcacacatcctggtcatgttgactgaactcgatttcatctcagcgatttatgaggatgtggggcacaacctacagcttgtgttgctggcacacagggcgccactcaatgctcttgtccgttgttccaagagaaatgagcgtctacattggctcgtgaagcataagaatctcctttgctttgaagcaagaaggaatttagtcttcatgatgctccctgaagggaaggatgactttggggagctgcatgagatgttaattgatcgatcacatttacttgatgaatcctttaattacatcgcacaggcgaaacaaactgaacttcgtggtgggctgtttatggagtttaagaatgaggaagctacaggtcctggcgttctaagggaatggttttgtttagtgtgccaagctcttttcagttcgaagcaagttctcttctcaccctgtccggaggataaacgaaggttctacttgaacgaaacatctgctgtggatccactgcacctgaagtacttcacttttgcggggcggataattggattagccttgatgcataaagtacaagttggagttgtgatagaccgtactctgttcttgcatcttgctgggagaagtattacgttagaagatatttctgttgcagatcctgtcaaatatgcaagctgtaaaaaaattctagagatggatgctgctgaaattgataatctatacctaacattttcccgaggagctcatgaattagttaatcccaagcgccgggaagagtttttcgagtgtttagatctagaagactttgatcgactgttaggggggagcagcaatgcaataaatctgcaagattggaaatcacatactcaatataatggctacaaagaaaaggatcgccagattaccctgttctggaaggctgtggagcgcatgtcaatcgagagacagaggcagctcctcttcttctggacttcggtgaagtatttaccatcagacgggttttgtggactgagctccaaactttttatttacaagacatcagattcgcccgaccggctcccatcatcgcagacctgcttctaccggctctgcctccctccttacacatccttgaaaatgatggaaaaccagctgcagaagatcacagaagagcatgtgagctgcagcttcggtacatggtagttgctgctgtcatggattctgaaccggtatattctgtacatacggtaggctagcgacaccctgctgcctcattgaatctgttcctagggcttgaggtaataggctttctttcttcttttgtatgtatcctgggtttagtgttccgagacttctatttaacctaatgcagaaggaattgatagaaagcaggttccttttgttttctaaagaggtgtgagtgtgacgctgtgtagtccagccggtggcagtaatgtaataacatgtgcatgtagctgcattgtgctgagtgctgacactccgattaccggtgaacgggatggtgggctattctagttgatccgttaccaaaccaaagcatggcattgtttgttcttccttctctagttttgattttgtggatctgacatactttggtcagctctcttgtagcagtagtctgccaattttcagctaactgtcaggcgtgtttcgctcgggacggtgaagcttatgcgaaccatggcagatgtttt

SEQ ID NO: 26711 - DNA, 2920 bp, Zea Mays
gtgattctcttgtcaaagctcaaaccggaagaaaggccacgcccaaataaacatctcacactccccaccccacttcatcgagcttcctcccccaaattccggtcctcctaaaccctcgctcgctacctcctcatcggcgcgaccccaattccgccctccccgacctcgatgaacccgatctaagcatgtccgctgcgctcgcctgtctccgccgcacctccaagcgccgccgagacgcgcccgatcatgccctccccccatcatcgaagcagccgctgatggcccacgccggcgccggcgctggcgccgccgagtcgtcctcgtcggcctcggcctccgcttcggggggcgatggagcttccgcagcggcggcggcggcctccgcctcgtctccccctgcgtcgccgcgggaggtgcacttcttcgtgcgcgccaccgattctaggaccatcgcgatgcacgcggggtgtgacgatactgtcggcgccgtgcttgatcatctcggcgcctgcgggtatggccgcgatttgcggctgctctacgcggggcggcagctcgcgccggaggccaccctcgccgagctccatctcccgccggattccacacttcaccttttggcgcgcctcaggtccacccagcatcctcacgcgtggcaactcgcgtcgcacatcgccggcaccgccgccgccgccgccgccgccgcggagtccgagccgtccaggatccccgccgccgcgttctccctcgacgaactcgtcagggagttcatcctccgcgcccaccgcgccaacctggggcttcgccccgatcgcgcctctactgacgaagatcggtttgcggccgaccacgccgctgagtacgtggacatcttcctccaggcgggcgccgccttagcgctggttcgcctctacctctcaaattcccccttccgctctcacgccgagagtgccatcaaatgttttgtcgccacggacccttattccttgccgatggacttgctagtcgtgacggcaccagtgctgcttgaattctgccgcttgctctccttggctgcaggcaagaaggaattactatatagatcatgccgtcgtacacttgcctcagttttatcaactcgtcccaggctgcccccttctatgaactcaccaaccagattgatcgagcaagtcctgccattcgcccgtgaaacagtggatgtggtccttgatggacttgcatcaatgccaatgattatatcgcctagtgatcttgatgagttctcaaatttcctcaaagtgatgtgccagcaagcacgccattggatttccggtgaggggccgatgcccagtaatctgtacagcagggagtctgagcatggcgacacatggatatggaggtttcacaacatgtcgatggacatgctgaaaaggttggatgagtgcttgaagacattggagatggacctgtcattatcatcagagagtgtcggggtcatggaaagtcaaaccacatgggctgctcgatcacacatcctggtcatgttgactgaactcgatttcatctcagcgatttatgaggatgtggggcacaacctacagcttgtgttgctggcacacagggcgccactcaatgctcttgtccgttgttccaagagaaatgagcgtctacattggctcgtgaagcataagaatctcctttgctttgaagcaagaaggaatttagtcttcatgatgctccctgaagggaaggatgactttggggagctgcatgagatgttaattgatcgatcacatttacttgatgaatcctttaattacatcgcacaggcgaaacaaactgaacttcgtggtgggctgtttatggagtttaagaatgaggaagctacaggtcctggcgttctaagggaatggttttgtttagtgtgccaagctcttttcagttcgaagcaagttctcttctcaccctgtccggaggataaacgaaggttctacttgaacgaaattaatcccaagcgccgggaagagtttttcgagtgtttagatctagaagactttgatcgactgttaggggggagcagcaatgcaataaatctgcaagattggaaatcacatactcaatataatggctacaaagaaaaggatcgccagattaccctgttctggaaggctgtggagcgcatgtcaatcgagagacagaggcagctcctcttcttctggacttcggtgaagtatttaccatcagacgggttttgtggactgagctccaaactttttatttacaagacatcagattcgcccgaccggctcccatcatcgcagacctgcttctaccggctctgcctccctccttacacatccttgaaaatgatggaaaaccagctgcagaagatcacagaagagcatgtgagctgcagcttcggtacatggtagttgctgctgtcatggattctgaaccggtatattctgtacatacggtaggctagcgacaccctgctgcctcattgaatctgttcctagggcttgaggtaataggctttctttcttcttttgtatgtatcctgggtttagtgttccgagacttctatttaacctaatgcagaaggaattgatagaaagcaggttccttttgttttctaaagaggtgtgagtgtgacgctgtgtagtccagccggtggcagtaatgtaataacatgtgcatgtagctgcattgtgctgagtgctgacactccgattaccggtgaacgggatggtgggctattctagttgatccgttaccaaaccaaagcatggcattgtttgttcttccttctctagttttgattttgtggatctgacatactttggtcagctctcttgtagcagtagtctgccaattttcagctaactgtcaggcgtgtttcgctcgggacggtgaagcttatgcgaaccatggcagatgtttt

SEQ ID NO: 26712 - DNA, 2258 bp, Zea Mays
cgcctgcgtgtatgctgtgtcggcgtgcgcctgcggccgcagctagcagcctgtgcttaattggatgcagttgcagcgatccgtcgaccggccggtccatccgtccatggtgagtggcggcagcatcaaggagcagcagcacgagatgaacatctccttcgcgatggtgaaccaccaccaccaccatcagcagcctccatcctcgtcctcttcctcctccatgcacgcggccgctgcgagcttcatgagcggcaaggaggcgtcgtcaggagcgtatgcgtatgaccatctgggcgagctggaccaggcgttgttcatgtacctggatcacggcagaagccatggcggcacgccgcagcaagagcaaaggcagacactcaacatcttccccatgcatgtggagccgtcgccgaagtttagttctgcccccggcgccggtgggatacaagcagcctaggtcaccggaccatcaccatcaccagcatgcggccatggaggagttgttggcggagagcaggaggcagcaggagcaccaaccctttgctgccgctgctgagccggcagcagcacccgggatgatcaaaggtgtcaagccactggccaagaaggatcataggagaggcacatcgaccactgaacgcgacccaaaaacgctgagaaggctggcccagaatagggaggctgcaaggaaaagcaggctaagaaagaaggcttacatccagcaactcgagtccagcaggatcaggctagctcagctcgaacaagaacttcacactacaagagctcatcagggagttttcttccccaacggcggcatcctcgctggccaaagtgtcgtcggcaaaggcgtccccatcggcggcatcgacagcctcagctcagaggcggcgatgttcgatgtggagtacgggcggtggcaggaggagcactaccggctgatgtacgagcttcgggcggcgctgcagcagcacctgccggagggggagctgcagatgtacgtggagagctgcctggcgcaccacgacgagatgttgggcatcaaggagggcgccatcaaaggcgacgtcttccacctcatctccggcgtctggaggagccccgccgagcgctgcttcctctggctcggcggctttcgcccctccgaggtcatcaagatgctgctgagccacgtggatcccctgacggagcagcagatcgtggccgtgtacgggctacagcagtcggcgctagagacggaggagacgctgagccagggcatggaggcgctataccagtcgttgtccgacaccatcctgtccgacgcgctcagctgtccctccaacgtcgccatctacatgggccagatggccgccgccatgaacaagctctccacgctcaagggcttcgttagacaagctgagaaccttcggcagcagacgctccaccggctgcaccagatcctgacggcgcggcagatggcgcgctcgctgctggccatgtcggactacttccaccgtctccggacgctcagctcgctctgggtcacacgccccagggcgccgcaggagcagcagggccacagctagcggcggcgacggccagtggtgacgaccgccggccgcacgcaacgctagctggcgcacgcatgtgtccattcattgcatatatgagtcatgcatggtgcgtgtgtgtgtgtccgtcgcgcgtcgttcgtcatcggttcaaggaacagaccggacaagaattgggctttgcaggtaatagctactaagccagttagggccgggctggggaagagagagctagcgaggccgagggatcaacaaaaggataatgttaagcttagcgacgattgtcgtcttcgttggttgcttgtagctatagctagccatctaggtgtacttgatcgttcgatcgcggtctatcggtacggtcggctcctgcacacagtagtcaatgtgcggctgattgatgatgttctaagttaggtatctcacgatcaccggtcgccggatgcgtatgcctcgtcgccgtcttagtttggagtgttgaagatgtggggtcttaggcaaccgtggtaccgcgggtcgatgtttggcaacgcgaggaactagctagacaccgtgcaaatccgcaacgtacgggccaaaatagagtatatatatatgagtggtaatggagggagaggaggtttatatggtaaatgtagacgtatatacaaactacattttatttatatgtaagttaatgaatatatatttaatctaaaacgttttggc

SEQ ID NO: 26713 - DNA, 2031 bp, Zea Mays
ttggccgctagccctcccccggtctctagagtcaaaccgtatattataggtctctgcagccggcctgggacgatatactcatatacatgtacaccgcctgcgtgtatgctgtgtcggcgtgcgcctgcggccgcagctagcagcctgtgcttaattggatgcagttgcagcgatccgtcgaccggccggtccatccgtccatggtgagtggcggcagcatcaaggagcagcagcacgagatgaacatctccttcgcgatggtgaaccaccaccaccaccatcagcagcctccatcctcgtcctcttcctcctccatgcacgcggccgctgcgagcttcatgagcggcaaggaggcgtcgtcaggagcgtatgcgtatgaccatctgggcgagctggaccaggcgttgttcatgtacctggatcacggcagaagccatggcggcacgccgcagcaagagcaaaggcagacactcaacatcttccccatgcatgtggagccgtcgccgaagggggagattagtttagttctgcccccggcgccggtgggatacaagcagcctaggtcaccggaccatcaccatcaccagcatgcggccatggaggagttgttggcggagagcaggaggcagcaggagcaccaaccctttgctgccgctgctgagccggcagcagcacccgggatgatcaaaggtgtcaagccactggccaagaaggatcataggagaggcacatcgaccactgaacgcgacccaaaagcttacatccagcaactcgagtccagcaggatcaggctagctcagctcgaacaagaacttcacactacaagagctcatcagggagttttcttccccaacggcggcatcctcgctggccaaagtgtcgtcggcaaaggcgtccccatcggcggcatcgacagcctcagctcagatgctgctgagccacgtggatcccctgacggagcagcagatcgtggccgtgtacgggctacagcagtcggcgctagagacggaggagacgctgagccagggcatggaggcgctataccagtcgttgtccgacaccatcctgtccgacgcgctcagctgtccctccaacgtcgccatctacatgggccagatggccgccgccatgaacaagctctccacgctcaagggcttcgttagacaagctgagaaccttcggcagcagacgctccaccggctgcaccagatcctgacggcgcggcagatggcgcgctcgctgctggccatgtcggactacttccaccgtctccggacgctcagctcgctctgggtcacacgccccagggcgccgcaggagcagcagggccacagctagcggcggcgacggccagtggtgacgaccgccggccgcacgcaacgctagctggcgcacgcatgtgtccattcattgcatatatgagtcatgcatggtgcgtgtgtgtgtgtccgtcgcgcgtcgttcgtcatcggttcaaggaacagaccggacaagaattgggctttgcaggtaatagctactaagccagttagggccgggctggggaagagagagctagcgaggccgagggatcaacaaaaggataatgttaagcttagcgacgattgtcgtcttcgttggttgcttgtagctatagctagccatctaggtgtacttgatcgttcgatcgcggtctatcggtacggtcggctcctgcacacagtagtcaatgtgcggctgattgatgatgttctaagttaggtatctcacgatcaccggtcgccggatgcgtatgcctcgtcgccgtcttagtttggagtgttgaagatgtggggtcttaggcaaccgtggtaccgcgggtcgatgtttggcaacgcgaggaactagctagacaccgtgcaaatccgcaacgtacgggccaaaatagagtatatatatatgagtggtaatggagggagaggaggtttatatggtaaatgtagacgtatatacaaactacattttatttatatgtaagttaatgaatatatatttaatctaaaacgttttggc

SEQ ID NO: 26714 - DNA, 1529 bp, Zea Mays
ttggccgctagccctcccccggtctctagagtcaaaccgtatattataggtctctgcagccggcctgggacgatatactcatatacatgtacaccgcctgcgtgtatgctgtgtcggcgtgcgcctgcggccgcagctagcagcctgtgcttaattggatgcagttgcagcgatccgtcgaccggccggtccatccgtccatggtgagtggcggcagcatcaaggagcagcagcacgagatgaacatctccttcgcgatggtgaaccaccaccaccaccatcagcagcctccatcctcgtcctcttcctcctccatgcacgcggccgctgcgagcttcatgagcggcaaggaggcgtcgtcaggagcgtatgcgtatgaccatctgggcgagctggaccaggcgttgttcatgtacctggatcacggcagaagccatggcggcacgccgcagcaagagcaaaggcagacactcaacatcttccccatgcatgtggagccgtcgccgaagggggagattagtttagttctgcccccggcgccggtgggatacaagcagcctaggtcaccggaccatcaccatcaccagcatgcggccatggaggagttgttggcggagagcaggaggcagcaggagcaccaaccctttgctgccgctgctgagccggcagcagcacccgggatgatcaaaggtgtcaagccactggccaagaaggatcataggagaggcacatcgaccactgaacgcgacccaaaaacgctgagaaggctggcccagaatagggaggctgcaaggaaaagcaggctaagaaagaaggcttacatccagcaactcgagtccagcaggatcaggctagctcagctcgaacaagaacttcacactacaagagctcatcagggagttttcttccccaacggcggcatcctcgctggccaaagtgtcgtcggcaaaggcgtccccatcggcggcatcgacagcctcagctcagaggcggcgatgttcgatgtggagtacgggcggtggcaggaggagcactaccggctgatgtacgagcttcgggcggcgctgcagcagcacctgccggagggggagctgcagatgtacgtggagagctgcctggcgcaccacgacgagatgttgggcatcaaggagggcgccatcaaaggcgacgtcttccacctcatctccggcgtctggaggagccccgccgagcgctgcttcctctggctcggcggctttcgcccctccgaggtcatcaagatgctgctgagccacgtggatcccctgacggagcagcagatcgtggccgtgtacgggctacagcagtcggcgctagagacggaggagacgctgagccagggcatggaggcgctataccagtcgttgtccgacaccatcctgtccgacgcgctcagctgtccctccaacgtcgccatctacatgggccagatggccgccgccatgaacaagctctccacgctcaagggcttcgttagacaagggcggacccagagcaaaatgagagtgggg

SEQ ID NO: 26715 - DNA, 4646 bp, Zea Mays
acccaatgcaatcccgcttccacctcctccgtcctcttcactctcccccatcccagtcagtcctctccatgacctccgccgcggccgcctccccggaccccatggtggcgtaatttctgccgccaattcccttgcctccagacttcaaatccccaccaccatcgaacctccccaacccggcaaatcctaaatccaatataggctaaccctagccgcccatccgcccgccatgaaggcgtcgatcaagttccgcgacgacgaccgaccgctgctgcgcgccaaggtgccgattggcgtgctggggctgcccttcctctcgggcctcgcggcggggggagacgccaaggacctccgcttcgacctctccaccgccttctcctctggcccggcgctccgcctctcataccgccccaacgaacccctccagcctttcgccctctccgtccgcacggggctggggccgctggggtcccctgcccgcgccccattcgccctcgccgccgaattcaacctcacctcctccaacccgcccgccttctcgctcctcttcaagccccggatcggggacttcgccgtcgccagctccgtccgctccccgccgacaccgccgcccacatccactccgcccccgctagcgatcaagatggtcgacctcaccaccaacggcgacgaccacgactgcgaagcacacggtaacggcttctcctttaacgggaatgtattgggggcgaacgtggcggccgtcaccgggacggacggcggcggcggcggcgtaggcgcgctgctgtccgggatgcggctcacgaccaggagcatgctgccactgtggagtaaagcgagcctgcggttccagtgggggctgcgtgtgccgccggagatcaaggccacgcttgcagacaacgggtacgggcgcaaggctgggagcctcgccatcagcaagctgccgctgctggtgatgaacaagatcaccatcgagcacacgcccaaggtgccttcacagtctgaaacggacaagaagaggaagaaagatacaccaccggcagccaaggatgaagagttgtcattcatgaagaggcaactggataagctgaatgtggagaacacaatgctgcgtcgtgcagttgaggacttgcgtgcagagattggagccggcaaaggcgatgatcgtaagctgccaacagcagtgccacctcaacaacattctttagtgtcgaaaccagatcgccatttccacatcaatgcgaaggaattggtagacagtgggacgaaaccggcctcaaatgaagcaagtgaggagttgaagaaggtgcttgagggccggcggaagtaagaagcacctagctagggcttgctgttattgcaagccctacattatgacatagctgctgactgctgtgtcaggttttgtggttaataataatacttcctcgctggagaagattgctaaggtcagtttagcccctcgctggagaagattgcaagtgaggttgccattcgccatagcccccttcgaaggatgtggtattaatctcagtgaaattttggtatgtgcaattattcctttgaatcaagtgttgagcattggtgacgctcccaagttgcctatatcttaacaagcggcttggctgattattaagatatagacaactgaagtgtgaactgggaaagtaggtctggaataaccccaataactctgaattgtttgagtatccttttgtaattcctatgttaatttagggctcagagcgacgatcgatgttggattcggcacaaacatgtacaagctgaaacggttcctccaccagatcaataaaccccaaaagataggccgcgaactagggcttcttttgcaagaaacttgtttctcacacactcacacaagctcgcggtctgtctccaacaacaccctgtaaaagggtcttgttcgctaaatttagcggatgatgtcatcctgtacgcctccagcaatgcacgccaaaaggagccctaaattttgccatatgtgaaagagacgctaaatgtggtggatctcgggcgtccgctacacgctggctgcttctctctcccacggcagcgcggaaccttccctctcgttctcccttcttgtcacaattgtctccctacgctgcctgtttgttcccagtgtgctttgttggacttggacgcgaagctgggctctatacggccaaagtcgggcggttccggcggcggaccgctcatctcaggtggaatccttgcaaaacccaagccagtggcggaggtcctcgcgagcgcaagccagcagcaacgaccaactccatcgaccatttgtcctccaaactcggtgtcgagaaaaggaatcaaagcccggcgctgctgtcgtctagggctggaaaaaaagctcgagctcgacgaactggctcgggctcgcagcagctcggctcggaccagctcgacgctcagaacgagcccgagccaagcctgtttttgtggctcgtgaaaagagcgagtcaactcggctcaactcgctgtagctcgttagctggctcgtggcttgacccaacaacaatttgttacataaaattctaattagcatataatattactaccgagtagacaattaatttatgttatttgagattgctacacaaaattaatctattttctatattatattagcgatatctattttactaatataaaatttgttatttaaagtattttaaagattttgtattataatttagagagcagatctacgtttatggctaggattgttggctcggcgagccggctcgcgagccagaagcaagccgagccgctttttcaagctcgccagatgggcgagccgagctcggctcgtctcgtttccacccctactgttgtcttcgtcctcgattcggtcgacggtcccgaatccaagccgacgatggtgaatgaagcatcctccttaacctgttccgtttgatttctctgttttccccagatttgttcatagaataacccttggttcaggggatcttagtctatcgttcctttcttgcttgcaatgggttaggagtgttttaatgattaatttgtcatttactaaacaaacttcagatacgtatttctctgttttccccagatttgttcatagaataacccttggttcaggggatcttagtctatcgttcctttcttgcttgcaatgggttaggagtgttttaatgattaatttgtcatttactaaacaaacttcagatacgtagcttttggtcccatgccgggcaccgtgaaggaattccctttttgtgctaatataaaactagggtatgtcctctcatttctgcgtcaatttgaggagtacgtacatattattatcattgattctttcattgacatagaataagccacattatgtccctttttctacattgaatgttcatctgtgcgcaaggcctttatgtcttccatctgcatgagtacaatgaagaaattttggccaaaaatgtgcttgcatgcatatgctctaggaggtttataatcaagaataattttctggaaccgtgaaaaggagctcactccattgattaaggtttcaagcagatttaaggaattttcctgtaacataagttatctttgttaggcatcttgataattttgtcagatggcaagaggacctttagaatacaagatggtccgtattttcatgtataaggaatgatgaaaatatcatctgtttgaaatgtacagttgttacaccaacccttaggccctgttcgtttctatcaaatccatggggattgagagggattgaatcccctacaagtcaaaatccccttcaatccactccaatccccctcaatccctatggattagggatgaaacgaacaaagccttatgtggtatcatggccactaaacatcatgaagcaagccactacgggtacacacgagctgaactgaactgagcaacaacttcagcatcttccctcctagccattgcatatcacactcacacactgtcagcatgcatcatgatttatgagattcagtggtcctttattccaacagttttcccccttgtcttctatatttatttgataccaactaagttggtttaggtgtcacaatatttgtttatttccatttttgtttcatgcagcaagggacactcaaattctgatgttgaagcagttcttagatgagaaggcgaagaacaagtagagaaaatgaatcattagcagaattatgatggtctaacttgttcaaaactgccaaagtttagctcctatgtacaccaaaccagaaatccatatagttctcacatgtgttacttttaccaagttagtataaaaaacaccaatatttatggtagttcatgcctgtgtttgtggtagtttttgccgtatgtgttctttatgttatcagagaactctgtcgctctacaatgtggtgggggtgctctgttggtggcactgcatttaactgatttgtcatcagttcttcatcatttttaatatttaaatactgtggtggacgataaagtaacatgtattctttttcttgttcttttcttttgttgggttcatttgtttaatggatgatgagccaatggcttcatggagcagcagggacagtgaaacaccaacttcagtatatgctcaaattatgtcactgtctatc

SEQ ID NO: 26716 - DNA, 1682 bp, Zea Mays
ccaaattggaccattccagttcctataattttgtaatattattatctatcaaatagtaccactgtttttacatgaagtgcacattaaaatttatttctcacttaaccctatattaaatgcataaaacctccagaaattcataacttaaaacctataattccaaatttaatggttccagttcctatgatcttattttaatgactaatttattactgtgtattttatttatatgtttggtgtaatgttaatttatgctatgctatgtatgtattgtgttgatgcgagtagacgagcaagccactgtggaacctgaggttcaacaagttgaagtagctgagcaggagctcgtgccaggcaagttatgcccttgatcacttcttttacctattcatgttcttattaatcataatgatctgcataggttaattttgatgggacccaataggataccctagattttgactatctttataccttgtttcacccctggttttactactaaagttttgggtagttcttgccattgctttatgtggatttgggtatagagatattcatcactcattgttatacttgttattatctgttcattattctatgttcatgataagatcattatgttaatgggaacatggagaaccacccgggaaaacagtgctaccacaagggtttaatgggacgcccttggctaattaactaggaaagctagtggagggctaccttacccgaaaggggcaagggcagtaggggagtggtcagtgtagggaggtccttgggttgattttgctgcgatggcggtcagacaagaaccctgcactggagcttcctatagactgtagcgggtagtctgaagctagtggaactttgtaaaggcctcgtagtggtaccctgcctcgcttccttggtagaggtgtatggagtctgatcaactccgtggcaaatgggtaacacgacttgtgggtaaagatgcgtaacctctgcagagtgtaaaactggtatactagccgtgctcacggtcatgagcggctcggacactcacatgattaatttatggaacttaaacttaatttgtcatatcattgcatttgggattattttattattacttttattaattattactatggtttgatatttacttacacttagtaattgctaataaaattttgaccaacttataaaagcaatgctcagcttcaacctttatttcattgatcagccttacacttcatgaactcccacatttggtgagttcatgccacattattccccacgacttgttgagctatgaacgtatgtgagctcacccttgctgtctcacacccccccataggagaagagcaggtggtcgaagaggagccgcctaacactgaggagttcgatctgatctaggtggcgtttctcagtcgacattggcgtcgacgatccttagttcattttatatttatctttattttgtaataagtcttccactatgtaataaatactctgatgttttgtgacatttatctctatacactctgttattatatatgttgtattctttggcgcatgtatgagatgcacctggctttgttccttaaagccgggtgttacagcacggtattcagcctcagcactggagcatgacacggtatgctgacgcttgctggaccaagagacaagactggtgccgagaaagg

SEQ ID NO: 26717 - DNA, 1191 bp, Zea Mays
atgcagtcatatgcccggcttccatacttgcagaacttgaatgctaagtctctcacccgttcttttgtagccagattgcgggtagacgacgtatcggcaaagatcatgtcgttctcgcagcacgggacacgcgcggtctgcatcctttcagcaaacggcgccatatcaaatgtgacgcttcggcaatctgccacttcgggtggaacggtgacatacgaggtacactggtacagcgattcagaagagtgaccttactgatgtctattgtctataccgcgagtcatcactgtcgctgggtcgtttcgagatactgtctctgtccgggtcgtttcttctgtcagagaacggtggccagcgcagtcgaactggtgggctcagcgtttcgctagcaggccccgacggccgtgtcctgggtggctgtgttgccggactcctgacggctgcttcaccggtacagatcgtagtggggagcttcgacgccggtggaaagaagcagccgaagcagcagcagcagcagcagcttgctccgtcaccggcgccactaaatctcgcgccgacgggcgtggcggcagggccgagcagcccgccgtccagaggcacattgagcctaagcgagtcgtccagtggcgccccgccgagcccgccgcacgcaggggccagcggtggccatgggcagcagcagcagcagccacagccaggtggcttctccggtctgttctggaaatgacgagacccccggacaccgtctgaccgtggtagaactggcagaaaggactaaaggcgcgtgaggcactcgtcgaggccgaagctcactcggtgagaagcagcggtagcttgtaggtggtgtcaagactgtgtagctcttgctgttgctgtaggtgtaaatcgtgcgttgtgattgtgaggtggttgcttattgtctgtcgtctggaatggatgccgtgtactgaacctgtgcccccaatgcagcatgtcggaagttcttggtttcttctgcttgggtgcatcggcttgccgcacgatatgcatccatgcccataataatacgtgtatagatccaccttgttgtgaaggtcacacacaactcacaatgcaaacttgtctgaaaagattgatacaaaatggcaaattttcgcgctgctgctggagctgcgcggcggcagccgcacgcctcgtggcgcggaactctgg

SEQ ID NO: 26718 - DNA, 1189 bp, Zea Mays
attttaaggcttaccttgagcactttactaaagcaggacatatgatattctggtccattgaatatgtgagaaaaatgcagtcatatgcccggcttccatacttgcagaacttgaatgctaagtctctcacccgttcttttgtagccagattgcgggtagacgacgtatcggcaaagatcatgtcgttctcgcagcacgggacacgcgcggtctgcatcctttcagcaaacggcgccatatcaaatgtgacgcttcggcaatctgccacttcgggtggaacggtgacatacgagggtcgtttcgagatactgtctctgtccgggtcgtttcttctgtcagagaacggtggccagcgcagtcgaactggtgggctcagcgtttcgctagcaggccccgacggccgtgtcctgggtggctgtgttgccggactcctgacggctgcttcaccggtacagatcgtagtggggagcttcgacgccggtggaaagaagcagccgaagcagcagcagcagcagcagcttgctccgtcaccggcgccactaaatctcgcgccgacgggcgtggcggcagggccgagcagcccgccgtccagaggcacattgagcctaagcgagtcgtccagtggcgccccgccgagcccgccgcacgcaggggccagcggtggccatgggcagcagcagcagcagccacagccaggtggcttctccggtctgttctggaaatgacgagacccccggacaccgtctgaccgtggtagaactggcagaaaggactaaaggcgcgtgaggcactcgtcgaggccgaagctcactcggtgagaagcagcggtagcttgtaggtggtgtcaagactgtgtagctcttgctgttgctgtaggtgtaaatcgtgcgttgtgattgtgaggtggttgcttattgtctgtcgtctggaatggatgccgtgtactgaacctgtgcccccaatgcagcatgtcggaagttcttggtttcttctgcttgggtgcatcggcttgccgcacgatatgcatccatgcccataataatacgtgtatagatccaccttgttgtgaaggtcacacacaactcacaatgcaaacttgtctgaaaagattgatacaaaatggcaaattttcgcgctgctgctggagctgcgcggcggcagccgcacgcctcgtggcgcggaactctgg

SEQ ID NO: 26719 - DNA, 2371 bp, Zea Mays
ctgacgtgcttcacttacccgcctaattttctttttattcccggctaaaaccattttcttttcacaaaagattacgtgccaacttccaagaggagagctcggaaaaggaaaagaaacgaaagaaaggaaaatcgaggtagaagaaggctatgtgatgtgaggggaaattacgtgagatataagccaaatccattgaattctatcgttagctggctgcttgagctgagttctttgattggcctccggtgagtggtgactcttgagctccgccgcttaacctgccagtgtgcgagctctgcgtcttgctatccctgactattttcctgccttctgtctccattttcctagtgctatactaatttctgaagacctcctggaggaattctctgcttcatttctcgagcgggtaatctctaatttatctgctttatttgccaaatccttaccttcttcattcttttctctctctctctgtctttttttactgtgatttacggcttatattccttccatctctcctcgtttcttccccgccgttacacaggttgccgccaccctacgctgtaaaacttgatctgttcatgtcaatttttccagctttgatcagcgggggtttatggtttttgcagctcttacccgcttcgccggttgtccgatttgctgtgaagcaggagagcggccgccttcagtcaaggaaaatcgctgaagacagccgcagattgccagattcgtagttccgcttctgcttcggcgcacctgttcggtgtggaatgatggaggtgagcccgtctccggagcaaggagtgatggcgggaagggagccgttcgggctgccgaagaccccggcaacgccgccgtcctccgggggcacgcagggcctgcgcatggcgtacacgacggacggcaccgccatcttcaccccggtgagctccgtgccgcccgcgacggcgacataccagcccgtgggcggcagcgccgcgtctgcttcaagcttggctggcgtaggaggcaatggtggcgcgcccgtgcactcgggtggcgcgggtgagccggggaccaagaaaaagcgtggccggccaagaaagtacggccccgacggctccatgtcgctggcattggtgcccgcatccatggctggggagccggcgccggcggctcttggagcttccggtcctttctcgcctaacggcccgaaggcgccgaacactgcgccgtcagcgtcgccggacggcgcgaagaagcggggccggccgaagggctccaccaacaagaagcacgtggctgcgctcgggccagcgggggcaggttttacgcctcatcttatttttgtaaaagccggagaggacgtatcggcaaagatcatgtcgttctcgcagcacgggacacgcgcggtctgcatcctttcagcaaacggcgccatatcaaatgtgacgcttcggcaatctgccacttcgggtggaacggtgacatacgagggtcgtttcgagatactgtctctgtccgggtcgtttcttctgtcagagaacggtggccagcgcagtcgaactggtgggctcagcgtttcgctagcaggccccgacggccgtgtcctgggtggctgtgttgccggactcctgacggctgcttcaccggtacagatcgtagtggggagcttcgacgccggtggaaagaagcagccgaagcagcagcagcagcagcagcttgctccgtcaccggcgccactaaatctcgcgccgacgggcgtggcggcagggccgagcagcccgccgtccagaggcacattgagcctaagcgagtcgtccagtggcgccccgccgagcccgccgcacgcaggggccagcggtggccatgggcagcagcagcagcagccacagccaggtggcttctccggtctgttctggaaatgacgagacccccggacaccgtctgaccgtggtagaactggcagaaaggactaaaggcgcgtgaggcactcgtcgaggccgaagctcactcggtgagaagcagcggtagcttgtaggtggtgtcaagactgtgtagctcttgctgttgctgtaggtgtaaatcgtgcgttgtgattgtgaggtggttgcttattgtctgtcgtctggaatggatgccgtgtactgaacctgtgcccccaatgcagcatgtcggaagttcttggtttcttctgcttgggtgcatcggcttgccgcacgatatgcatccatgcccataataatacgtgtatagatccaccttgttgtgaaggtcacacacaactcacaatgcaaacttgtctgaaaagattgatacaaaatggcaaattttcgcgctgctgctggagctgcgcggcggcagccgcacgcctcgtggcgcggaactctgg

SEQ ID NO: 26720 - DNA, 2201 bp, Zea Mays
ctgacgtgcttcacttacccgcctaattttctttttattcccggctaaaaccattttcttttcacaaaagattacgtgccaacttccaagaggagagctcggaaaaggaaaagaaacgaaagaaaggaaaatcgaggtagaagaaggctatgtgatgtgaggggaaattacgtgagatataagccaaatccattgaattctatcgttagctggctgcttgagctgagttctttgattggcctccgtgctatactaatttctgaagacctcctggaggaattctctgcttcatttctcgagcggctcttacccgcttcgccggttgtccgatttgctgtgaagcaggagagcggccgccttcagtcaaggaaaatcgctgaagacagccgcagattgccagattcgtagttccgcttctgcttcggcgcacctgttcggtgtggaatgatggaggtgagcccgtctccggagcaaggagtgatggcgggaagggagccgttcgggctgccgaagaccccggcaacgccgccgtcctccgggggcacgcagggcctgcgcatggcgtacacgacggacggcaccgccatcttcaccccggtgagctccgtgccgcccgcgacggcgacataccagcccgtgggcggcagcgccgcgtctgcttcaagcttggctggcgtaggaggcaatggtggcgcgcccgtgcactcgggtggcgcgggtgagccggggaccaagaaaaagcgtggccggccaagaaagtacggccccgacggctccatgtcgctggcattggtgcccgcatccatggctggggagccggcgccggcggctcttggagcttccggtcctttctcgcctaacggcccgaaggcgccgaacactgcgccgtcagcgtcgccggacggcgcgaagaagcggggccggccgaagggctccaccaacaagaagcacgtggctgcgctcgggccagcgggggcaggttttacgcctcatcttatttttgtaaaagccggagaggacgtatcggcaaagatcatgtcgttctcgcagcacgggacacgcgcggtctgcatcctttcagcaaacggcgccatatcaaatgtgacgcttcggcaatctgccacttcgggtggaacggtgacatacgaggttcgtattttgaatgccacaagttatgagtatcgagtacactttgatacagatagtcagctcgagtactttactgccaggtacactggtacagcgattcagaagagtgaccttactgatgtctattgtctataccgcgagtcatcactgtcgctgggtcgtttcgagatactgtctctgtccgggtcgtttcttctgtcagagaacggtggccagcgcagtcgaactggtgggctcagcgtttcgctagcaggccccgacggccgtgtcctgggtggctgtgttgccggactcctgacggctgcttcaccggtacagatcgtagtggggagcttcgacgccggtggaaagaagcagccgaagcagcagcagcagcagcagcttgctccgtcaccggcgccactaaatctcgcgccgacgggcgtggcggcagggccgagcagcccgccgtccagaggcacattgagcctaagcgagtcgtccagtggcgccccgccgagcccgccgcacgcaggggccagcggtggccatgggcagcagcagcagcagccacagccaggtggcttctccggtctgttctggaaatgacgagacccccggacaccgtctgaccgtggtagaactggcagaaaggactaaaggcgcgtgaggcactcgtcgaggccgaagctcactcggtgagaagcagcggtagcttgtaggtggtgtcaagactgtgtagctcttgctgttgctgtaggtgtaaatcgtgcgttgtgattgtgaggtggttgcttattgtctgtcgtctggaatggatgccgtgtactgaacctgtgcccccaatgcagcatgtcggaagttcttggtttcttctgcttgggtgcatcggcttgccgcacgatatgcatccatgcccataataatacgtgtatagatccaccttgttgtgaaggtcacacacaactcacaatgcaaacttgtctgaaaagattgatacaaaatggcaaattttcgcgctgctgctggagctgcgcggcggcagccgcacgcctcgtggcgcggaactctgg

SEQ ID NO: 26721 - DNA, 2121 bp, Zea Mays
caaaagcataggaggccgcaaactaaataaaataagcatagggggtcaaataaggtagacccttaccaatgcaatcctgacgtgcttcacttacccgcctaattttctttttattcccggctaaaaccattttcttttcacaaaagattacgtgccaacttccaagaggagagctcggaaaaggaaaagaaacgaaagaaaggaaaatcgaggtagaagaaggctatgtgatgtgaggggaaattacgtgagatataagccaaatccattgaattctatcgttagctggctgcttgagctgagttctttgattggcctccgtgctatactaatttctgaagacctcctggaggaattctctgcttcatttctcgagcggctcttacccgcttcgccggttgtccgatttgctgtgaagcaggagagcggccgccttcagtcaaggaaaatcgctgaagacagccgcagattgccagattcgtagttccgcttctgcttcggcgcacctgttcggtgtggaatgatggaggtgagcccgtctccggagcaaggagtgatggcgggaagggagccgttcgggctgccgaagaccccggcaacgccgccgtcctccgggggcacgcagggcctgcgcatggcgtacacgacggacggcaccgccatcttcaccccggtgagctccgtgccgcccgcgacggcgacataccagcccgtgggcggcagcgccgcgtctgcttcaagcttggctggcgtaggaggcaatggtggcgcgcccgtgcactcgggtggcgcgggtgagccggggaccaagaaaaagcgtggccggccaagaaagtacggccccgacggctccatgtcgctggcattggtgcccgcatccatggctggggagccggcgccggcggctcttggagcttccggtcctttctcgcctaacggcccgaaggcgccgaacactgcgccgtcagcgtcgccggacggcgcgaagaagcggggccggccgaagggctccaccaacaagaagcacgtggctgcgctcgggccagcgggggcaggttttacgcctcatcttatttttgtaaaagccggagaggacgtatcggcaaagatcatgtcgttctcgcagcacgggacacgcgcggtctgcatcctttcagcaaacggcgccatatcaaatgtgacgcttcggcaatctgccacttcgggtggaacggtgacatacgagggtcgtttcgagatactgtctctgtccgggtcgtttcttctgtcagagaacggtggccagcgcagtcgaactggtgggctcagcgtttcgctagcaggccccgacggccgtgtcctgggtggctgtgttgccggactcctgacggctgcttcaccggtacagatcgtagtggggagcttcgacgccggtggaaagaagcagccgaagcagcagcagcagcagcagcttgctccgtcaccggcgccactaaatctcgcgccgacgggcgtggcggcagggccgagcagcccgccgtccagaggcacattgagcctaagcgagtcgtccagtggcgccccgccgagcccgccgcacgcaggggccagcggtggccatgggcagcagcagcagcagccacagccaggtggcttctccggtctgttctggaaatgacgagacccccggacaccgtctgaccgtggtagaactggcagaaaggactaaaggcgcgtgaggcactcgtcgaggccgaagctcactcggtgagaagcagcggtagcttgtaggtggtgtcaagactgtgtagctcttgctgttgctgtaggtgtaaatcgtgcgttgtgattgtgaggtggttgcttattgtctgtcgtctggaatggatgccgtgtactgaacctgtgcccccaatgcagcatgtcggaagttcttggtttcttctgcttgggtgcatcggcttgccgcacgatatgcatccatgcccataataatacgtgtatagatccaccttgttgtgaaggtcacacacaactcacaatgcaaacttgtctgaaaagattgatacaaaatggcaaattttcgcgctgctgctggagctgcgcggcggcagccgcacgcctcgtggcgcggaactctgg

SEQ ID NO: 26722 - DNA, 2079 bp, Zea Mays
caaaagcataggaggccgcaaactaaataaaataagcatagggggtcaaataaggtagacccttaccaatgcaatcctgacgtgcttcacttacccgcctaattttctttttattcccggctaaaaccattttcttttcacaaaagattacgtgccaacttccaagaggagagctcggaaaaggaaaagaaacgaaagaaaggaaaatcgaggtagaagaaggctatgtgatgtgaggggaaattacgtgagatataagccaaatccattgaattctatcgttagctggctgcttgagctgagttctttgattggcctccgtgctatactaatttctgaagacctcctggaggaattctctgcttcatttctcgagcgggagagcggccgccttcagtcaaggaaaatcgctgaagacagccgcagattgccagattcgtagttccgcttctgcttcggcgcacctgttcggtgtggaatgatggaggtgagcccgtctccggagcaaggagtgatggcgggaagggagccgttcgggctgccgaagaccccggcaacgccgccgtcctccgggggcacgcagggcctgcgcatggcgtacacgacggacggcaccgccatcttcaccccggtgagctccgtgccgcccgcgacggcgacataccagcccgtgggcggcagcgccgcgtctgcttcaagcttggctggcgtaggaggcaatggtggcgcgcccgtgcactcgggtggcgcgggtgagccggggaccaagaaaaagcgtggccggccaagaaagtacggccccgacggctccatgtcgctggcattggtgcccgcatccatggctggggagccggcgccggcggctcttggagcttccggtcctttctcgcctaacggcccgaaggcgccgaacactgcgccgtcagcgtcgccggacggcgcgaagaagcggggccggccgaagggctccaccaacaagaagcacgtggctgcgctcgggccagcgggggcaggttttacgcctcatcttatttttgtaaaagccggagaggacgtatcggcaaagatcatgtcgttctcgcagcacgggacacgcgcggtctgcatcctttcagcaaacggcgccatatcaaatgtgacgcttcggcaatctgccacttcgggtggaacggtgacatacgagggtcgtttcgagatactgtctctgtccgggtcgtttcttctgtcagagaacggtggccagcgcagtcgaactggtgggctcagcgtttcgctagcaggccccgacggccgtgtcctgggtggctgtgttgccggactcctgacggctgcttcaccggtacagatcgtagtggggagcttcgacgccggtggaaagaagcagccgaagcagcagcagcagcagcagcttgctccgtcaccggcgccactaaatctcgcgccgacgggcgtggcggcagggccgagcagcccgccgtccagaggcacattgagcctaagcgagtcgtccagtggcgccccgccgagcccgccgcacgcaggggccagcggtggccatgggcagcagcagcagcagccacagccaggtggcttctccggtctgttctggaaatgacgagacccccggacaccgtctgaccgtggtagaactggcagaaaggactaaaggcgcgtgaggcactcgtcgaggccgaagctcactcggtgagaagcagcggtagcttgtaggtggtgtcaagactgtgtagctcttgctgttgctgtaggtgtaaatcgtgcgttgtgattgtgaggtggttgcttattgtctgtcgtctggaatggatgccgtgtactgaacctgtgcccccaatgcagcatgtcggaagttcttggtttcttctgcttgggtgcatcggcttgccgcacgatatgcatccatgcccataataatacgtgtatagatccaccttgttgtgaaggtcacacacaactcacaatgcaaacttgtctgaaaagattgatacaaaatggcaaattttcgcgctgctgctggagctgcgcggcggcagccgcacgcctcgtggcgcggaactctgg

SEQ ID NO: 26723 - DNA, 1558 bp, Zea Mays
ctggccaccatttctttcccctctcccaagccagtgccgcggaccgcgagggttttaagagaaggcggcggcgccgttcactagggtttttcctgatctcgcctcctcctacttcccgagccacacacgctgccgccgtgagccgccgcccacaaggcttagcaccaaccatggccttcggagctctcgtcacgtcgaggctggtcaggtccggccacacccttgcatctgccgttgcccagggtcccgttgcccagcggatagcacctcctctgctctccaggcttggagcagtagctcgtcctactggttggtggtatgactagagtaccaaaggtccaggaggttgtttctcagatattcaataagccaccaagcaagggtgtcaatcctgatgaggctgttgccatgggagctgcaatccagggtggcattttgaggggtgatgtgaaggagctccttttgctggatgtcacacctctctcccttggtattgagacccttggtggcatcttcacaaggctaattaacaggaacaccacaattccaaccaagaagagccaggtcttctctaccgctgcagataaccagacacaggttggagttaaggtgcttcagggtgagagggagatggctacagataataagctccttggtgagttccagcttgaaggcattccaccagccccaagaggcatgccccagatcgaggttacctttgacattgatgccaatggcattgtaaaggtgtcagctagggacaaagccacaggcaaagaacaagaaatcaccatcaagtcttctggtggtttgtcagaggtcgaaattgagaagatggtgaaggaggccgagctacattctcagaaggaccaggaaaggaagtctcttattgatctcaagaactctgcagataccacgatctacagcattgagaagagtgtcagcgagtacaaggacaaggtccctgctgaagtcaccaaggagatcgagtctgctgtctctgatctgagggcagctatggctgaggacgatctggacaagatcaagcagaagctggaagcagcaaacaaggctgtttcaaagattggagagcacatgcaacaaggtggcggcagcggcagcgctggcggcagcggcagcagcagtggaggagaccagactccagaagctgagtaccaggacgcaaaggaagccaagatgtaggtcgaacctccatcaagtctctagtttttgcatgtgcccatttaggaagtaaacttacctacctccgatttcttagttttctgtgagggttaagaggactgtaatttttgttgccaaattttgggtcacggataagataaattgaggggaacggacccatacgttaattgaaccatttatatactcccgacggcctctcaactattgtttgttgatcttggttgtgtcgataataggaattatttatatggttaacatactttgctagttcagtgttctacctgcacattgcagcaatgcatatgcactggacactgcagttatccgttgcttcatttgagcaacgaagtccagg

SEQ ID NO: 26724 - DNA, 1252 bp, Zea Mays
gcaagcggaagccgtggcggagatattatataaggacgaagaggaggaggaccgaccggaggaggacgtagtgaggccctgtagtggagcgggatggcgtcgccgcgcgtgtgcgtgaccgggggcggcgggtgatcccaagaacgcccacctccggcggatggaaggggcatcggagagcttgctcctgttcaaggccgacatgctcgatcgcgacgccctggccgcggcggtctctgggtgcgagggggtcttccacgtcgcctcccctgtgcccgcagataaggtcctcgatcctgaggcagaggtactgtctcctgctgtcaaaggcactctgaacgttcttcaggcttgctcggcaaataatgttcggaaagttatcgtggtttcatccacagctgctgtccattttaatccgagttggccccaaggtataatccaagacgagagttgctggtcagataaatttttttgcactaagagtgaggaatggtacattgctgccaagacaattgctgaagagacagcactggagtatggagagaagaatgggctactcgttgttacagtttgcccttgtgtcgttttaggtccactcctgcagcctctaatcaacaccacgagtgaagtattcgtctacattataaaaggaggtcctagagcgatgaaaaacatcacctggaacatcgttgatgtccgtgatgtagccgatgctttgcttttggtatatgagaaagtggaatcatctgggagatacatttgtgcaccaaatcggatcagcacttacgacatagcgaacttgtttagaaagttctaccccaactacaattatgtgaagtgcagcgacgaggatcatgaatctgaaatgccgccggttacatcagagaaacttaagagcctaggttggaaaccaagaaaattggaggaaactctgctggacagcattgagcactacgagaaggcagggtttctgcaggatgtagagggctgcccttgtcgtcttccttatcttttccattttgcttctaactaataaagtaaactatgtattacagttacagttactacttaaactgcctttggacaaactatttctctgctctgtcgtgtttgtttttggatgcactacagtgcactctcttttagcaattgaattggttaagagcaaacctttgttacaacaaaagtggtagccctaaaaccgcatcctcatggatgaggtgttatgatgtatgtttaatcagatacaatt

SEQ ID NO: 26725 - DNA, 955 bp, Zea Mays
gatggaagaggtactgtctcctgctgtcaaaggcactctgaacgttcttcaggcttgctcggcaaataatgttcggaaagttatcgtggtttcatccacagctgctgtccattttaatccgagttggccccaaggtataatccaagacgagagttgctggtcagataaatttttttgcactaagagtgaggaatggtacattgctgccaagacaattgctgaagagacagcactggagtatggagagaagaatgggctactcgttgttacagtttgcccttgtgtcgttttaggtccactcctgcagcctctaatcaacaccacgagtgaagtattcgtctacattataaaaggaggtcctagagcgatgaaaaacatcacctggaacatcgttgatgtccgtgatgtagccgatgctttgcttttggtatatgagaaagtggaatcatctgggagatacatttgtgcaccaaatcggatcagcacttacgacatagcgaacttgtttagaaagttctaccccaactacaattatgtgaagtgcagcgacgaggatcatgaatctgaaatgccgccggttacatcagagaaacttaagagcctaggttggaaaccaagaaaattggaggaaactctgctggacagcattgagcactacgagaaggcagggtttctgcaggatgtagagggctgcccttgtcgtcttccttatcttttccattttgcttctaactaataaagtaaactatgtattacagttacagttactacttaaactgcctttggacaaactatttctctgctctgtcgtgtttgtttttggatgcactacagtgcactctcttttagcaattgaattggttaagagcaaacctttgttacaacaaaagtggtagccctaaaaccgcatcctcatggatgaggtgttatgatgtatgtttaatcagatacaatt

SEQ ID NO: 26726 - DNA, 869 bp, Zea Mays
ggcctagtttagcgaaagttttagaagtcctaattcacccccctcttaggcgtcacccgtttcctacactggcctcagggtacaccgtaccgaaagacgagagttgctggtcagacaaggagttctgcaagcaaaacggggttagtataatgctacttagtacttagcagcacagcaagctgtgtgatagctatacacatacaggtttacttcatttgttgcttcatcccagtcttatctctcttgaaaggcctattgtgattttcctaaatataagctaagtcttgcctgcctttgattacggctgaacagacagctttggagtacgcagttaaaaacggcctgaacgttgttacgctttgcccgcctttggtttttggcccactgtgttgcagcctacggtgaataccagcagcaaattccctcatctatgttataaaagctgtttaatcaagatcttcatccacaagcagattcttcacaatctattgcatgcgattccccgtttaggtggtgtttgggaacaaagtttttctgcagtattgaagcaatactgtagtattaagcaatactgtggtattatatactttgaggtgtttgacaactcatctgaaatctctgtatactaaactgtagtattgtaaatactgcacttgttttgaagttttggaaactttggtctcagccaaagtttttctctgtaaagagagcgccaactgggtcccgctctggctgattggtctcaaccaaagtttttcccaaacaccttaatgtattggatactgttgtattcgaaaactgaagcattgtaaactgtagtaatgtcatgactaaagtatactatttgaaaaactgcagtttgaaaaaac

SEQ ID NO: 26727 - DNA, 779 bp, Zea Mays
ggcctagtttagcgaaagttttagaagtcctaattcacccccctcttaggcgtcacccgtttcctacactggcctcagggtacaccgtaccgaaagacgagagttgctggtcagacaaggagttctgcaagcaaaacggggttagtataatgctacttagtacttagcagcacagcaagctgtgtgatagctatacacatacaggtttacttcatttgttgcttcatcccagtcttatctctcttgaaaggcctattgtgattttcctaaatataagctaagtcttgcctgcctttgattacggctgaacagacagctttggagtacgcagttaaaaacggcctgaacgttgttacgctttgcccgcctttggtttttggcccactgtgttgcagcctacggtgaataccagcagcaaattccctcatctatgttataaaaggttcgctaatgttcttacacgttcctcctcatatcttgctactaggattaccgtttcgttgatgaattttctcttctgactcattatgatgatgtgctcctgtcctaaccaccagtcaagttatggtttaatttgatgaattgtaactatccgtccattctttctggactgcatttatgaggtccaatctaaggccttgagattagatcgcatcgatagttactgttgctggacgttttttttttaaaaaaaacaaattttgaaatggggaatgttcaaatatcgatcatcatctcgaacctgttgatcaccggttgtctttcctgtcccatgtttg

SEQ ID NO: 26728 - DNA, 769 bp, Zea Mays
catccgacgctgatcccctcgattcgcggcgccctcgcctccaccactctccaaccacccgacgccgaccgccatcaattcacgcccccaccagctgcatcggttccctccagcgccccgcctcctggcgcagatccgtgcaccccttgccctctccggactcgatgattcacagatccgcccagctgcccaggcactgactaccggcatccggatctcctgctccactgctcgccgcctcggggctctccggcgttggctcagcgcgacgggccccccaatagcctagttccggatcccccaaccgcccaagccccacaggtcaagcaccggccaccgatgtctgacgaacgagcgaactccccgcggatgcaggaggaggaggtgcaggagcgaccgccgaccgtccgtgtttcaccatccccttcttcgatcacaaggaatcataaaagcatatggaggaactatgtataggctacaaagaagcataagaagcatttttatagcagaagccaagtgttctgatgattttgttttttcaattgtgttttatgttattagttcagcatgtacatatattgacatgatttatggcatggcatctgtcatctttgttatatttatgacatcgttcttgattgatgtgtgcgacatgaatgatggtttttttaacatcctgaccatcattgtgtcgctcattatcgtattttgtatatcgtttatgggttcacggatatgaaatgacaagtttcttatttttgagttctga

SEQ ID NO: 26729 - DNA, 1574 bp, Zea Mays
gtctgtgatcgtctgtggagggagccgtgcaccaggcaggcaggcaccgcacgaggcctccatttggaccaccgggaccagaacccgatcgggcacggcggagaacgcgacgaagcataaaataagccatcacaactgcatttaaagcaaggcttcccactgagccgaaggtcctgagttcgacacagtctctcttcaaaaaatacagggaagctgcatcaaatcaaatggtcgttttcaactctgaagcaggagataaagagcaagatgaactgggggaaaaccgtttgcagaagtcaatcataacaaggggaatatcgccatctattggagcattcactgtccaatgtgctaaatgttttaaatggaggcttattccaacgaaagagaagtatgaagaaattcgtgaacgtattatagaggaaccttttgtatgcaaaagagctcgtgaatggagacctgatgtaacatgcaatgacccagaagatatatctcaggatggtagcaggctttgggctattgacaaacccaatattgcacaaccccctcgcggatgggaaaggcagattaggataagaggtgaagggggtaccaaatttgctgatgtatactatacctctcctactggaaggaaacttaggtctctggttgaagtcgataggttcctccaagagaatccggagtatggtgctcagggtgtaactttagctcagttttcgttccagatacctagacctctacggcaggactatgtgaaaaagaaaccgaagttgataaatccaagtgatgaagcaatgaaacccatagcctgggcagttgctacaaaacacgagggcgatgccagtgaagaagcttctctcaccgatgaggcacctacatcagaagtcatgctagcccggaagagaaaagcaggaagctctttgtcgatagagccaaaccatctctctgatgaacttgaaccaaagctggaggatgcttagaacggggagacgtctacctgataagtaaaagttagcagcatcgtgatgccaactgccccctatcatggttttattggccctctgcttgtttctcatttccctttggagccagtttctctgttttgcgaggtcacacaagccttatttgtagtattacaacacagaagctggctgacccaaaatccgacactctgggggcagcaacttaacaaaatgtttgtacgagggtttagagccccacggtgcttctttggataagtatgtttattaccttgtacttagctaggaacctgcttatatgtaagatctttgtgtacgacggagaattgtcacagcggcataattctggtgcatcttggatttaatctcctgttctttgttagaccggccagtaggcagtagcaaaggttttgaaatgtctcaagttatataactactgtggtattgctagtgtaattctctgagcatgttttttatttgatattgtgatccttgtatcttttaaagagctgttttgtagaactcaaggtgcaaagtctggttggtttagctatgagctttagaagagtagagttcctgtgagctgtgaaaaag

SEQ ID NO: 26730 - DNA, 1894 bp, Zea Mays
gtctgtgatcgtctgtggagggagccgtgcaccaggcaggcaggcaccgcacgaggcctccatttggaccaccgggaccagaacccgatcgggcacggcggagaacgcgacgaagcataaaataagccatcacaactgcatttaaagcaaggcttcccactgagccgaaggtcctgagttcgacacagtctctcttcaaaaaatacaggggtcggtactcaggttatcattcatcacactattatatatcatgcaatatttgaaccttcatgagtattggatgtgatacataatgtacacatattccacatggaactattcttctgtttgcagcaggaaattctaacatttaccaactgcaggtacccaggctctaataatttgtacaaaaccgatggaaacttctaaatctcctcaatcgtcaaagaacagtcatattgtggtgccttctgatagtaatggcccccgatttgacaatgatggtttttcttcagaagctgcatcaaatcaaatggtcgttttcaactctgaagcaggagataaagagcaagatgaactgggggaaaaccgtttgcagaagtcaatcataacaaggggaatatcgccatctattggagcattcactgtccaatgtgctaaatgttttaaatggaggcttattccaacgaaagagaagtatgaagaaattcgtgaacgtattatagaggaaccttttgtatgcaaaagagctcgtgaatggagacctgatgtaacatgcaatgacccagaagatatatctcaggatggtagcaggctttgggctattgacaaacccaatattgcacaaccccctcgcggatgggaaaggcagattaggataagaggtgaagggggtaccaaatttgctgatgtatactatacctctcctactggaaggaaacttaggtctctggttgaagtcgataggttcctccaagagaatccggagtatggtgctcagggtgtaactttagctcagttttcgttccagatacctagacctctacggcaggactatgtgaaaaagaaaccgaagttgataaatccaagtgatgaagcaagtatgattgcctctaagtcttttcaaccagaagaagtgaaacccatagcctgggcagttgctacaaaacacgagggcgatgccagtgaagaagcttctctcaccgatgaggcacctacatcagaagtcatgctagcccggaagagaaaagcaggaagctctttgtcgatagagccaaaccatctctctgatgaacttgaaccaaagctggaggatgcttagaacggggagacgtctacctgataagtaaaagttagcagcatcgtgatgccaactgccccctatcatggttttattggccctctgcttgtttctcatttccctttggagccagtttctctgttttgcgaggtcacacaagccttatttgtagtattacaacacagaagctggctgacccaaaatccgacactctgggggcagcaacttaacaaaatgtttgtacgagggtttagagccccacggtgcttctttggataagtatgtttattaccttgtacttagctaggaacctgcttatatgtaagatctttgtgtacgacggagaattgtcacagcggcataattctggtgcatcttggatttaatctcctgttctttgttagaccggccagtaggcagtagcaaaggttttgaaatgtctcaagttatataactactgtggtattgctagtgtaattctctgagcatgttttttatttgatattgtgatccttgtatcttttaaagagctgttttgtagaactcaaggtgcaaagtctggttggtttagctatgagctttagaagagtagagttcctgtgagctgtgaaaaag

SEQ ID NO: 26731 - DNA, 1510 bp, Zea Mays
gtctgtgatcgtctgtggagggagccgtgcaccaggcaggcaggcaccgcacgaggcctccatttggaccaccgggaccagaacccgatcgggcacggcggagaacgcgaaagctgcatcaaatcaaatggtcgttttcaactctgaagcaggagataaagagcaagatgaactgggggaaaaccgtttgcagaagtcaatcataacaaggggaatatcgccatctattggagcattcactgtccaatgtgctaaatgttttaaatggaggcttattccaacgaaagagaagtatgaagaaattcgtgaacgtattatagaggaaccttttgtatgcaaaagagctcgtgaatggagacctgatgtaacatgcaatgacccagaagatatatctcaggatggtagcaggctttgggctattgacaaacccaatattgcacaaccccctcgcggatgggaaaggcagattaggataagaggtgaagggggtaccaaatttgctgatgtatactatacctctcctactggaaggaaacttaggtctctggttgaagtcgataggttcctccaagagaatccggagtatggtgctcagggtgtaactttagctcagttttcgttccagatacctagacctctacggcaggactatgtgaaaaagaaaccgaagttgataaatccaagtgatgaagcaagtatgattgcctctaagtcttttcaaccagaagaagtgaaacccatagcctgggcagttgctacaaaacacgagggcgatgccagtgaagaagcttctctcaccgatgaggcacctacatcagaagtcatgctagcccggaagagaaaagcaggaagctctttgtcgatagagccaaaccatctctctgatgaacttgaaccaaagctggaggatgcttagaacggggagacgtctacctgataagtaaaagttagcagcatcgtgatgccaactgccccctatcatggttttattggccctctgcttgtttctcatttccctttggagccagtttctctgttttgcgaggtcacacaagccttatttgtagtattacaacacagaagctggctgacccaaaatccgacactctgggggcagcaacttaacaaaatgtttgtacgagggtttagagccccacggtgcttctttggataagtatgtttattaccttgtacttagctaggaacctgcttatatgtaagatctttgtgtacgacggagaattgtcacagcggcataattctggtgcatcttggatttaatctcctgttctttgttagaccggccagtaggcagtagcaaaggttttgaaatgtctcaagttatataactactgtggtattgctagtgtaattctctgagcatgttttttatttgatattgtgatccttgtatcttttaaagagctgttttgtagaactcaaggtgcaaagtctggttggtttagctatgagctttagaagagtagagttcctgtgagctgtgaaaaag

SEQ ID NO: 26732 - DNA, 1701 bp, Zea Mays
gtctgtgatcgtctgtggagggagccgtgcaccaggcaggcaggcaccgcacgaggcctccatttggaccaccgggaccagaacccgatcgggcacggcggagaacgcgagcttcccactgagccgaaggtcctgagttcgacacagtctctcttcaaaaaatacaggggtacccaggctctaataatttgtacaaaaccgatggaaacttctaaatctcctcaatcgtcaaagaacagtcatattgtggtgccttctgatagtaatggcccccgatttgacaatgatggtttttcttcagaagctgcatcaaatcaaatggtcgttttcaactctgaagcaggagataaagagcaagatgaactgggggaaaaccgtttgcagaagtcaatcataacaaggggaatatcgccatctattggagcattcactgtccaatgtgctaaatgttttaaatggaggcttattccaacgaaagagaagtatgaagaaattcgtgaacgtattatagaggaaccttttgtatgcaaaagagctcgtgaatggagacctgatgtaacatgcaatgacccagaagatatatctcaggatggtagcaggctttgggctattgacaaacccaatattgcacaaccccctcgcggatgggaaaggcagattaggataagaggtgaagggggtaccaaatttgctgatgtatactatacctctcctactggaaggaaacttaggtctctggttgaagtcgataggttcctccaagagaatccggagtatggtgctcagggtgtaactttagctcagttttcgttccagatacctagacctctacggcaggactatgtgaaaaagaaaccgaagttgataaatccaagtgatgaagcaagtatgattgcctctaagtcttttcaaccagaagaagtgaaacccatagcctgggcagttgctacaaaacacgagggcgatgccagtgaagaagcttctctcaccgatgaggcacctacatcagaagtcatgctagcccggaagagaaaagcaggaagctctttgtcgatagagccaaaccatctctctgatgaacttgaaccaaagctggaggatgcttagaacggggagacgtctacctgataagtaaaagttagcagcatcgtgatgccaactgccccctatcatggttttattggccctctgcttgtttctcatttccctttggagccagtttctctgttttgcgaggtcacacaagccttatttgtagtattacaacacagaagctggctgacccaaaatccgacactctgggggcagcaacttaacaaaatgtttgtacgagggtttagagccccacggtgcttctttggataagtatgtttattaccttgtacttagctaggaacctgcttatatgtaagatctttgtgtacgacggagaattgtcacagcggcataattctggtgcatcttggatttaatctcctgttctttgttagaccggccagtaggcagtagcaaaggttttgaaatgtctcaagttatataactactgtggtattgctagtgtaattctctgagcatgttttttatttgatattgtgatccttgtatcttttaaagagctgttttgtagaactcaaggtgcaaagtctggttggtttagctatgagctttagaagagtagagttcctgtgagctgtgaaaaag

SEQ ID NO: 26733 - DNA, 1898 bp, Zea Mays
gtctgtgatcgtctgtggagggagccgtgcaccaggcaggcaggcaccgcacgaggcctccatttggaccaccgggaccagaacccgatcgggcacggcggagaacgcgaaaatcgaggtaggatcaagccattgagctacatttctggtgctgagatctgtttgtgtgtcacatcgacaattgagatgcgctagtgcagttgattaatggggaatatgcagcttgtcttgtgtgcattatgctatgtaatcaatctcttgttcagcgaagcataaaataagccatcacaactgcatttaaagcaaggcttcccactgagccgaaggtcctgagttcgacacagtctctcttcaaaaaatacaggggtacccaggctctaataatttgtacaaaaccgatggaaacttctaaatctcctcaatcgtcaaagaacagtcatattgtggtgccttctgatagtaatggcccccgatttgacaatgatggtttttcttcagaagctgcatcaaatcaaatggtcgttttcaactctgaagcaggagataaagagcaagatgaactgggggaaaaccgtttgcagaagtcaatcataacaaggggaatatcgccatctattggagcattcactgtccaatgtgctaaatgttttaaatggaggcttattccaacgaaagagaagtatgaagaaattcgtgaacgtattatagaggaaccttttgtatgcaaaagagctcgtgaatggagacctgatgtaacatgcaatgacccagaagatatatctcaggatggtagcaggctttgggctattgacaaacccaatattgcacaaccccctcgcggatgggaaaggcagattaggataagaggtgaagggggtaccaaatttgctgatgtatactatacctctcctactggaaggaaacttaggtctctggttgaagtcgataggttcctccaagagaatccggagtatggtgctcagggtgtaactttagctcagttttcgttccagatacctagacctctacggcaggactatgtgaaaaagaaaccgaagttgataaatccaagtgatgaagcaagtatgattgcctctaagtcttttcaaccagaagaagtgaaacccatagcctgggcagttgctacaaaacacgagggcgatgccagtgaagaagcttctctcaccgatgaggcacctacatcagaagtcatgctagcccggaagagaaaagcaggaagctctttgtcgatagagccaaaccatctctctgatgaacttgaaccaaagctggaggatgcttagaacggggagacgtctacctgataagtaaaagttagcagcatcgtgatgccaactgccccctatcatggttttattggccctctgcttgtttctcatttccctttggagccagtttctctgttttgcgaggtcacacaagccttatttgtagtattacaacacagaagctggctgacccaaaatccgacactctgggggcagcaacttaacaaaatgtttgtacgagggtttagagccccacggtgcttctttggataagtatgtttattaccttgtacttagctaggaacctgcttatatgtaagatctttgtgtacgacggagaattgtcacagcggcataattctggtgcatcttggatttaatctcctgttctttgttagaccggccagtaggcagtagcaaaggttttgaaatgtctcaagttatataactactgtggtattgctagtgtaattctctgagcatgttttttatttgatattgtgatccttgtatcttttaaagagctgttttgtagaactcaaggtgcaaagtctggttggtttagctatgagctttagaagagtagagttcctgtgagctgtgaaaaag

SEQ ID NO: 26734 - DNA, 2061 bp, Zea Mays
gtctgtgatcgtctgtggagggagccgtgcaccaggcaggcaggcaccgcacgaggcctccatttggaccaccgggaccagaacccgatcgggcacggcggagaacgcgacataaaataagccatcacaactgcatttaaagcaaggcttcccactgagccgaaggtcctgagttcgacacagtctctcttcaaaaaatacaggggtaaggcttgcctcggttatttcttcctctgaccactcatgtgggagccgccagcactgggtgtccttttacaactacacttaggtttgaatcatgggtgcttcttgtcatacaacagcttctaactttgtacaaaagattgttaactaagtaggttggtttgcttatgcaggtcggtactcaggttatcattcatcacactattatatatcatgcaatatttgaaccttcatgagtattggatgtgatacataatgtacacatattccacatggaactattcttctgtttgcagcaggaaattctaacatttaccaactgcaggtacccaggctctaataatttgtacaaaaccgatggaaacttctaaatctcctcaatcgtcaaagaacagtcatattgtggtgccttctgatagtaatggcccccgatttgacaatgatggtttttcttcagaagctgcatcaaatcaaatggtcgttttcaactctgaagcaggagataaagagcaagatgaactgggggaaaaccgtttgcagaagtcaatcataacaaggggaatatcgccatctattggagcattcactgtccaatgtgctaaatgttttaaatggaggcttattccaacgaaagagaagtatgaagaaattcgtgaacgtattatagaggaaccttttgtatgcaaaagagctcgtgaatggagacctgatgtaacatgcaatgacccagaagatatatctcaggatggtagcaggctttgggctattgacaaacccaatattgcacaaccccctcgcggatgggaaaggcagattaggataagaggtgaagggggtaccaaatttgctgatgtatactatacctctcctactggaaggaaacttaggtctctggttgaagtcgataggttcctccaagagaatccggagtatggtgctcagggtgtaactttagctcagttttcgttccagatacctagacctctacggcaggactatgtgaaaaagaaaccgaagttgataaatccaagtgatgaagcaagtatgattgcctctaagtcttttcaaccagaagaagtgaaacccatagcctgggcagttgctacaaaacacgagggcgatgccagtgaagaagcttctctcaccgatgaggcacctacatcagaagtcatgctagcccggaagagaaaagcaggaagctctttgtcgatagagccaaaccatctctctgatgaacttgaaccaaagctggaggatgcttagaacggggagacgtctacctgataagtaaaagttagcagcatcgtgatgccaactgccccctatcatggttttattggccctctgcttgtttctcatttccctttggagccagtttctctgttttgcgaggtcacacaagccttatttgtagtattacaacacagaagctggctgacccaaaatccgacactctgggggcagcaacttaacaaaatgtttgtacgagggtttagagccccacggtgcttctttggataagtatgtttattaccttgtacttagctaggaacctgcttatatgtaagatctttgtgtacgacggagaattgtcacagcggcataattctggtgcatcttggatttaatctcctgttctttgttagaccggccagtaggcagtagcaaaggttttgaaatgtctcaagttatataactactgtggtattgctagtgtaattctctgagcatgttttttatttgatattgtgatccttgtatcttttaaagagctgttttgtagaactcaaggtgcaaagtctggttggtttagctatgagctttagaagagtagagttcctgtgagctgtgaaaaag

SEQ ID NO: 26735 - DNA, 1796 bp, Zea Mays
gtctgtgatcgtctgtggagggagccgtgcaccaggcaggcaggcaccgcacgaggcctccatttggaccaccgggaccagaacccgatcgggcacggcggagaacgcgagtaagcactcccatcctcaatccctcccctccgcggctccgccgtaaaccccgctgttcttcgccggagcactccctccccgttcccccgccgcccccggccccccgacctcgatatcttcggagcccgccgttgggggcctactgcatgctcaaatcgtagacactgggtcggggcgtggtagagatccgtccgggctcggatcgatttcttcgttcgctgcgaagcataaaataagccatcacaactgcatttaaagcaaggcttcccactgagccgaaggtcctgagttcgacacagtctctcttcaaaaaatacagggaagctgcatcaaatcaaatggtcgttttcaactctgaagcaggagataaagagcaagatgaactgggggaaaaccgtttgcagaagtcaatcataacaaggggaatatcgccatctattggagcattcactgtccaatgtgctaaatgttttaaatggaggcttattccaacgaaagagaagtatgaagaaattcgtgaacgtattatagaggaaccttttgtatgcaaaagagctcgtgaatggagacctgatgtaacatgcaatgacccagaagatatatctcaggatggtagcaggctttgggctattgacaaacccaatattgcacaaccccctcgcggatgggaaaggcagattaggataagaggtgaagggggtaccaaatttgctgatgtatactatacctctcctactggaaggaaacttaggtctctggttgaagtcgataggttcctccaagagaatccggagtatggtgctcagggtgtaactttagctcagttttcgttccagatacctagacctctacggcaggactatgtgaaaaagaaaccgaagttgataaatccaagtgatgaagcaatgaaacccatagcctgggcagttgctacaaaacacgagggcgatgccagtgaagaagcttctctcaccgatgaggcacctacatcagaagtcatgctagcccggaagagaaaagcaggaagctctttgtcgatagagccaaaccatctctctgatgaacttgaaccaaagctggaggatgcttagaacggggagacgtctacctgataagtaaaagttagcagcatcgtgatgccaactgccccctatcatggttttattggccctctgcttgtttctcatttccctttggagccagtttctctgttttgcgaggtcacacaagccttatttgtagtattacaacacagaagctggctgacccaaaatccgacactctgggggcagcaacttaacaaaatgtttgtacgagggtttagagccccacggtgcttctttggataagtatgtttattaccttgtacttagctaggaacctgcttatatgtaagatctttgtgtacgacggagaattgtcacagcggcataattctggtgcatcttggatttaatctcctgttctttgttagaccggccagtaggcagtagcaaaggttttgaaatgtctcaagttatataactactgtggtattgctagtgtaattctctgagcatgttttttatttgatattgtgatccttgtatcttttaaagagctgttttgtagaactcaaggtgcaaagtctggttggtttagctatgagctttagaagagtagagttcctgtgagctgtgaaaaag

SEQ ID NO: 26736 - DNA, 2030 bp, Zea Mays
gtctgtgatcgtctgtggagggagccgtgcaccaggcaggcaggcaccgcacgaggcctccatttggaccaccgggaccagaacccgatcgggcacggcggagaacgcgacgaagcataaaataagccatcacaactgcatttaaagcaaggcttcccactgagccgaaggtcctgagttcgacacagtctctcttcaaaaaatacaggggtaaggcttgcctcggttatttcttcctctgaccactcatgtgggagccgccagcactgggtgtccttttacaactacacttaggtttgaatcatgggtgcttcttgtcatacaacagcttctaactttgtacaaaagattgttaactaagtaggttggtttgcttatgcaggtcggtactcaggttatcattcatcacactattatatatcatgcaatatttgaaccttcatgagtattggatgtgatacataatgtacacatattccacatggaactattcttctgtttgcagcaggaaattctaacatttaccaactgcaggtacccaggctctaataatttgtacaaaaccgatggaaacttctaaatctcctcaatcgtcaaagaacagtcatattgtggtgccttctgatagtaatggcccccgatttgacaatgatggtttttcttcagaagctgcatcaaatcaaatggtcgttttcaactctgaagcaggagataaagagcaagatgaactgggggaaaaccgtttgcagaagtcaatcataacaaggggaatatcgccatctattggagcattcactgtccaatgtgctaaatgttttaaatggaggcttattccaacgaaagagaagtatgaagaaattcgtgaacgtattatagaggaaccttttgtatgcaaaagagctcgtgaatggagacctgatgtaacatgcaatgacccagaagatatatctcaggatggtagcaggctttgggctattgacaaacccaatattgcacaaccccctcgcggatgggaaaggcagattaggataagaggtgaagggggtaccaaatttgctgatgtatactatacctctcctactggaaggaaacttaggtctctggttgaagtcgataggttcctccaagagaatccggagtatggtgctcagggtgtaactttagctcagttttcgttccagatacctagacctctacggcaggactatgtgaaaaagaaaccgaagttgataaatccaagtgatgaagcaatgaaacccatagcctgggcagttgctacaaaacacgagggcgatgccagtgaagaagcttctctcaccgatgaggcacctacatcagaagtcatgctagcccggaagagaaaagcaggaagctctttgtcgatagagccaaaccatctctctgatgaacttgaaccaaagctggaggatgcttagaacggggagacgtctacctgataagtaaaagttagcagcatcgtgatgccaactgccccctatcatggttttattggccctctgcttgtttctcatttccctttggagccagtttctctgttttgcgaggtcacacaagccttatttgtagtattacaacacagaagctggctgacccaaaatccgacactctgggggcagcaacttaacaaaatgtttgtacgagggtttagagccccacggtgcttctttggataagtatgtttattaccttgtacttagctaggaacctgcttatatgtaagatctttgtgtacgacggagaattgtcacagcggcataattctggtgcatcttggatttaatctcctgttctttgttagaccggccagtaggcagtagcaaaggttttgaaatgtctcaagttatataactactgtggtattgctagtgtaattctctgagcatgttttttatttgatattgtgatccttgtatcttttaaagagctgttttgtagaactcaaggtgcaaagtctggttggtttagctatgagctttagaagagtagagttcctgtgagctgtgaaaaag

SEQ ID NO: 26737 - DNA, 1745 bp, Zea Mays
gtttctttgtctgtgatcgtctgtggagggagccgtgcaccaggcaggcaggcaccgcacgaggcctccatttggaccaccgggaccagaacccgatcgggcacggcggagaacgcgacataaaataagccatcacaactgcatttaaagcaaggcttcccactgagccgaaggtcctgagttcgacacagtctctcttcaaaaaatacaggggtacccaggctctaataatttgtacaaaaccgatggaaacttctaaatctcctcaatcgtcaaagaacagtcatattgtggtgccttctgatagtaatggcccccgatttgacaatgatggtttttcttcagaagctgcatcaaatcaaatggtcgttttcaactctgaagcaggagataaagagcaagatgaactgggggaaaaccgtttgcagaagtcaatcataacaaggggaatatcgccatctattggagcattcactgtccaatgtgctaaatgttttaaatggaggcttattccaacgaaagagaagtatgaagaaattcgtgaacgtattatagaggaaccttttgtatgcaaaagagctcgtgaatggagacctgatgtaacatgcaatgacccagaagatatatctcaggatggtagcaggctttgggctattgacaaacccaatattgcacaaccccctcgcggatgggaaaggcagattaggataagaggtgaagggggtaccaaatttgctgatgtatactatacctctcctactggaaggaaacttaggtctctggttgaagtcgataggttcctccaagagaatccggagtatggtgctcagggtgtaactttagctcagttttcgttccagatacctagacctctacggcaggactatgtgaaaaagaaaccgaagttgataaatccaagtgatgaagcaagtatgattgcctctaagtcttttcaaccagaagaagtgaaacccatagcctgggcagttgctacaaaacacgagggcgatgccagtgaagaagcttctctcaccgatgaggcacctacatcagaagtcatgctagcccggaagagaaaagcaggaagctctttgtcgatagagccaaaccatctctctgatgaacttgaaccaaagctggaggatgcttagaacggggagacgtctacctgataagtaaaagttagcagcatcgtgatgccaactgccccctatcatggttttattggccctctgcttgtttctcatttccctttggagccagtttctctgttttgcgaggtcacacaagccttatttgtagtattacaacacagaagctggctgacccaaaatccgacactctgggggcagcaacttaacaaaatgtttgtacgagggtttagagccccacggtgcttctttggataagtatgtttattaccttgtacttagctaggaacctgcttatatgtaagatctttgtgtacgacggagaattgtcacagcggcataattctggtgcatcttggatttaatctcctgttctttgttagaccggccagtaggcagtagcaaaggttttgaaatgtctcaagttatataactactgtggtattgctagtgtaattctctgagcatgttttttatttgatattgtgatccttgtatcttttaaagagctgttttgtagaactcaaggtgcaaagtctggttggtttagctatgagctttagaagagtagagttcctgtgagctgtgaaaaag

SEQ ID NO: 26738 - DNA, 652 bp, Zea Mays
ctttgtctgtgatcgtctgtggagggagccgtgcaccaggcaggcaggcaccgcacgaggcctccatttggaccaccgggaccagaacccgatcgggcacggcggagaacgcgagtacccaggctctaataatttgtacaaaaccgatggaaacttctaaatctcctcaatcgtcaaagaacagtcatattgtggtgccttctgatagtaatggcccccgatttgacaatgatggtttttcttcagaagctgcatcaaatcaaatggtcgttttcaactctgaagcaggagataaagagcaagatgaactgggggaaaaccgtttgcagaagtcaatcataacaaggggaatatcgccatctattggagcattcactgtccaatgtgctaaatgttttaaatggaggcttattccaacgaaagagaagtatgaagaaattcgtgaacgtattatagaggaaccttttgtatgcaaaagagctcgtgaatggagacctgatgtaacatgcaatgacccagaagatatatctcaggatggtagcaggctttgggctattgacaaacccaatattgcacaaccccctcgcggatgggaaaggcagattaggataagaggtgaagggggtaccaaatttgctgatgtggaaagttc

SEQ ID NO: 26739 - DNA, 1081 bp, Zea Mays
atggcagaggagaagacgacaccggaaagcggagccacgaatccgttcctgtctgcacctcctcattttcacctccacccacccgactcggcggcctgcgctcgtccgcccgttcctcgccggcgccgtctcttccgcagaccggtccgtgggtcgagggagccgcttcttcctccagcttatggcagacagaagtgatggaccgattgggaggctcccagaacatcttattatagaaatactcattcgtttaccggtctatgagtgggtgcaattagcatgtgtcaacaagcattgggcaagcatatttcaaggagaatgcgtgtggcaaactgctattgcaaggaactggccatctgctggtctccggaaacgctggcctgggccaattcctagaggttctgctaggaggagatttcaagcactgtatgtcagtgagaacttagtaccatctggtggggagattgatgagcttgttggtcacacttatctctacttaaaagaacagcttgagcgtcctgtcatgcctccttccagcatacttcatggcaccatcattgaccaattcattgcttgcggcaatacaggagaaaaggcccatgatcttgcttcaaaaatatggcttgcagtcattgacagcttggaagaaaaccagcaaactttcttactgttaaaacgtgtggcacaagaaggagaaatcatatagggtactatggagggtgtttgacaagctgttcaccgacttccgcgactgtttcagcggggctgagtaccatgatgttctatcgactgctaagtctaggtttcagccggtgccttccacatggcttggccattagcgcactgcagttgctcttgttgtgcgcactctacagtgtcgtagataaagcagtgatacttacagcagtcatttcgagtacatgtagcatcttgacagcttcaagagcattaaaatgttgtttgagatggaatactcagtgttcttgcaagtccttgaaagtaattcgatacactctgtcatttgcacagttacttcagtgtatatatactgcagtttcagcactgccccgtttctgttttt

SEQ ID NO: 26740 - DNA, 324 bp, Zea Mays
gagagggcaaccgatcgagggagcgcgtgtgtgcagcgtcgtgttcttgcttcttcctcctcctgtcgtcgtcgcctgactagctgctttttttgtcaaatcatttcgttcttgaatccgttacagttgcctgctgcgccgtcttcattcttcaagcagtagcgtagcgcgcagcaagaaaccaccagggctacctagggtggtttagggttctccgccgctttccgatcttgtacagctagcatcatcggtacgctgtcgattgatctgagcagtatggaagcatcagcagcagcaggaggtgggagagagtcgaacaagaag

SEQ ID NO: 26741 - DNA, 1486 bp, Zea Mays
caaacagtcactatcatcaagtacgtcttaaaatttgcggtagcttcctcggtctctccatcagaagaacaaactagtatcatgaactaaccggctgcatcctgagctgggcttcgaggcaacaggtgtggtgtcgaacacaaggaagcttgacaacgatgctgaaatgagcagcgtcgatacggctggagtggaggacctgatggacgctgtcgaggaagttaaaccttgctggaccaaaccaagtccaaaaaatcagccgtctaatggttttgttacattctccttgactatgggccctgagtatcacatctctcagatcacagatgctgtggttattgcaaggtatctaggtgcaacacttgtactcccagacatcagaggaaatgaattaggaaataagcgaaaattccaagacatttacaatgtggataagttcgtgaggagcctggatggtgttgtcgaagtaatagaggatatacctgatgaagtgagtgctaagaagccagcagtcatcagagtaccgaaccgtgtgactgaaagcttcatcacaggcaccatccagcccatcttccaaaaaaacaagtacttaagactagcggtcattttctcttccgtaagtttaaggccaaaggagacgaacaacaaggacatggacgcaactgcttgccttgcgatgttcggtggcctcgagctgaagcacgaatattctgaggtggccagaaaaatgctggataggcttcaagaattaagcaagaagtcagatgggaaggtcttggcgatcgatttgcggaccgacttgctggaaaagaagagttgcaagacaacccgcggcgctcgaagaaaaggctgttatagccctgatgaggtcctggctttcctgaggagtgttggcttctctgctaacacaaccatctacttgacagagacgtcgtggtacaaaggcctggatgttctgaaggaagaattcccaaacacttggtataagggtgacattatgccagccgagaacaaagctgaattcctgaaatccagcaatgcagacctagcaagggctctggaccttgagatctgttcgcagagcgacgtgttcgtccctgccgtcgctggcctgttctacgggcatgtcacgggtaagaggatcgcgtccggacgcacccagatcgttgtgccttcccagtccagcacctcgacacatgcgtcagacttcatctccacctacatctccaacaagaaccaccttgcctacgcgtgctactgctaagcatccttttgtacggccgttaataagatcagctgaagggaaagtgctctgggtgcatatacaagtacctctcgtggacatgaatgatgttgtacactagctaatgttttgttatgaggaatattagcatacgactgtgtgttggttacttgtttggatattaaactctggaacagcagcaaggagcatatactgcacaataaaatgaaactaattaataaa

SEQ ID NO: 26742 - DNA, 998 bp, Zea Mays
ccagcgggcggccgcggccagcagtcatcagagtaccgaaccgtgtgactgaaagcttcatcacaggcaccatccagcccatcttccaaaaaaacaagtacttaagactagcggtcattttctcttccgtaagtttaaggccaaaggagacgaacaacaaggacatggacgcaactgcttgccttgcgatgttcggtggcctcgagctgaagcacgaatattctgaggtggccagaaaaatgctggataggcttcaagaattaagcaagaagtcagatgggaaggtcttggcgatcgatttgcggaccgacttgctggaaaagaagagttgcaagacaacccgcggcgctcgaagaaaaggctgttatagccctgatgaggtcctggctttcctgaggagtgttggcttctctgctaacacaaccatctacttgacagagacgtcgtggtacaaaggcctggatgttctgaaggaagaattcccaaacacttggtataagggtgacattatgccagccgagaacaaagctgaattcctgaaatccagcaatgcagacctagcaagggctctggaccttgagatctgttcgcagagcgacgtgttcgtccctgccgtcgctggcctgttctacgggcatgtcacgggtaagaggatcgcgtccggacgcacccagatcgttgtgccttcccagtccagcacctcgacacatgcgtcagacttcatctccacctacatctccaacaagaaccaccttgcctacgcgtgctactgctaagcatccttttgtacggccgttaataagatcagctgaagggaaagtgctctgggtgcatatacaagtacctctcgtggacatgaatgatgttgtacactagctaatgttttgttatgaggaatattagcatacgactgtgtgttggttacttgtttggatattaaactctggaacagcagcaaggagcatatactgcacaataaaatgaaactaattaataaa

SEQ ID NO: 26743 - DNA, 895 bp, Zea Mays
tagcagttccgtgtgtgcgctgcactggttcagtatcagtatccactcaactatgatcttacaattaatggctgaatttcccagacaattttacagattcggcagcaagcaaaactcagattatgatagatagttctggcaggagcagtaaaccagaggagagaaaagaaaagatcgagggggaagaccggaagaagaagaagccaagaactcggaagaactctccaagaaatcgaccgagcctggaggaaagccggtggcaaaggcaaatcacggccggatcgatcgcggcatcacgatacccggatccgcttcttgggggacagcgaccggaagacggtggagaggtcgcgcgggacggcgacgaacacccgcacgggcgcgggcggcggcttccgcttggcgggcagccgcggggccggcggcttgcgcggcgccggcgggcacacggcgggcgaccgcagcctgctcccctccgacgtcggcgtcgacggctcgcgatcctcttcctccgcggccttcgcgctgtccaccgccgacgacgccggcgacggagaggacgaggccgaggccgaggccgaggacgtggccgtggcggacgacggcaccgggggcggcagaggtgtagtcttgatgggcggcaacccggggagatcctcgtcgacgggtgacgccattatctctccccgctcgaattaccgacggacttattcaacggcgctgtaaattgggatcgagttctcctcgttggtggagggggtgcaattgcacgaggtgggtagagagagagagagggagagagagtaaggttggggcggtagcgcgaaggctgttaaatagcggcgctcttctaccttcttcgatggagaagggagacagagagagagaggaggag

SEQ ID NO: 26744 - DNA, 776 bp, Zea Mays
gtaactgctacggcaccgtgtttgcagtcgagtggatttgctggctgaatggccaaaggaagaaagctccaacaccagaggaattggctgagctggaggcaagacgtgaacgtgtcaagcaaaacattcagcttctcaaaaagaaagaagaagaggaaagaaaaactggtatccaaccagtcaagaaaattgggaaagctgaatctccaaatctccaaagtttcgtgaagcagcagttctcgggtactcctccagatcagcagaaagttaacactctaggacctgaggataggcctaaggacacaactcatacagaagatgctacgacagacaatgagaggtatactgaaccaacgggaactggtgccactttcaagccagggacttggcagccaccaacatgaatgccaacatgaactttagaagatgaaggacggtgtaccggagcattttcctttcacctatctgtgtaacattttaacatttgctctgaaagaatcactagcctatgttccttctttcagatggttacccatctgatggagttatagccttaagttccttcttttagatgcttacccatctgatggagttataggtgatcgggggctcccacggtatgctgttttttttgtggctaaattgtcctctgtaatctttactgtgatagcaactgtaataaactggaccagtgttttgcatcagggctctcttagagacactgttcaacatattctagtatgtctgatgctgcgaaatattgttttgtacggtag

SEQ ID NO: 26745 - DNA, 2621 bp, Zea Mays
agacacccatactgattcgctggcggcaggccgacggctacggagacggaagtggcgaccggttccggcgaggcgcaggcgacagataggggacagggcgaccatttctagcgaggcaggagcggggaagatccggaagctgcgatgtcgaagcggctgctgtcgcggctgctcggcatgttccaatcgcggacgcaggtgggcgtcgacaaggccggcaaccgctacttcacccgcgttgaggaggtcgacggcacaatgaaggagaggcgctgggtggagttcaagggcgcagaccaggactcgaccaccgttccaggttaccttcctcccttcctgctcattttcccgatgaggatgttgtgatgtgactgaagaagtgaagaatcctaatgtaactgctacggcaccgtgtttgcagtcgagtggatttgctggctgaatggccaaaggaagaaagctccaacaccagaggaattggctgagctggaggcaagacgtgaacgtgtcaagcaaaacattcagcgtatgtatgcggtgtttcctacttgtgtactcatgtatgattttattaataagcctcactgtgtgcagtgagcaagagcccaaacatgttttcttaggcatttgcagttgagtaacccatgttaattgcctcaactactttatagtagcccatatgtatcataatatgcactgtatgctactttccataccgttcactggacaaggctaagagaaatgaaataaaatgctggttagatatgtgtgtttcttgtatttgatgctaaattcttattttgtaaatagaaactgtattgtattttgtgctaggatcgtcaacaaggttgtatgagacatgatcacttgaaaactttgatctctattactccatccatccacaaaagggtgcaattttcacttttcgaggagccaaacagtttgaagttggaccataattataccaagaagtattaacctttatggtaagataagtagaatggcagacccagtgccggaggctcccacatgagtggtgtgtgggaaagggataaaccgaggcaagtctttccctacaaatacgaagagctttgagcccgtgacctgatgactctagtgagacaactctcaccgctgcaccaagcctgtccataaaattaattatgagatatattttcgtagtaaatctagttagggacataaatgttaatattattcactataaacttggtcaaactagtttgacttgcacaaatcccacagttgcatccttttgtcccattagctgcatccttttgtggatagagggagtacaactttgcaagcattccatctacgaattagaataacgttaacagtcagttgttttggtgtgtgattggtgattataaaagtaacaggacatgctgtcgtgcactcaaaatttggtttgttaacctcgtgattagggatgtaagctctgacaccatatagttgtgggccagttagctacttagctagctaacttctatcccgcatcccttcctttgatatttggatttgttcaatcgagtattgggttgatccaatgtcctaggaatgcaaaactcccatccctactcacgatctgaattttgatgatgtctgctatatatctatttaaatttattcacgaaaaatatgttgaaagtgctggcgtattgtttatggcctgaattttgtagagaatagttgttacaatgtaatatactggatacgtttgcagctatgaagctttcattctagttgaagacttgcatcgcggtaaaagatctgattcacaccagcatatgtttgtcacagcttcttttaagttttgtttcttcaaggatcaagattctcatgcatgtaattttgcattaaccttggttattcataaagctgtcatctttttttagtttgatggccaataatgtgtgtttttctccactaacatatttgaatctatgttcaatcaagttctcaaaaagaaagaagaagaggaaagaaaaactggtatccaaccagtcaagaaaattgggaaagctgaatctccaaatctccaaagtttcgtgaagcagcagttctcgggtactcctccagatcagcagaaagttaacactctaggacctgaggataggcctaaggacacaactcatacagaagatgctacgacagacaatgagaggtatactgaaccaacgggaactggtgccactttcaagccagggacttggcagccaccaacatgaatgccaacatgaactttagaagatgaaggacggtgtaccggagcattttcctttcacctatctgtgtaacattttaacatttgctctgaaagaatcactagcctatgttccttctttcagatggttacccatctgatggagttatagccttaagttccttcttttagatgcttacccatctgatggagttataggtgatcgggggctcccacggtatgctgttttttttgtggctaaattgtcctctgtaatctttactgtgatagcaactgtaataaactggaccagtgttttgcatcagggctctcttagagacactgttcaacatattctagtatgtctgatgctgcgaaatattgttttgtacggtag

SEQ ID NO: 26746 - DNA, 2524 bp, Zea Mays
agacacccatactgattcgctggcggcaggccgacggctacggagacggaagtggcgaccggttccggcgaggcgcaggcgacagataggggacagggcgaccatttctagcgaggcaggagcggggaagatccggaagctgcgatgtcgaagcggctgctgtcgcggctgctcggcatgttccaatcgcggacgcaggtgggcgtcgacaaggccggcaaccgctacttcacccgcgttgaggaggtcgacggcacaatgaaggagaggcgctgggtggagttcaagggcgcagaccaggactcgaccaccgttccagtcatgtcgtgcttgtagtcgagtggatttgctggctgaatggccaaaggaagaaagctccaacaccagaggaattggctgagctggaggcaagacgtgaacgtgtcaagcaaaacattcagcgtatgtatgcggtgtttcctacttgtgtactcatgtatgattttattaataagcctcactgtgtgcagtgagcaagagcccaaacatgttttcttaggcatttgcagttgagtaacccatgttaattgcctcaactactttatagtagcccatatgtatcataatatgcactgtatgctactttccataccgttcactggacaaggctaagagaaatgaaataaaatgctggttagatatgtgtgtttcttgtatttgatgctaaattcttattttgtaaatagaaactgtattgtattttgtgctaggatcgtcaacaaggttgtatgagacatgatcacttgaaaactttgatctctattactccatccatccacaaaagggtgcaattttcacttttcgaggagccaaacagtttgaagttggaccataattataccaagaagtattaacctttatggtaagataagtagaatggcagacccagtgccggaggctcccacatgagtggtgtgtgggaaagggataaaccgaggcaagtctttccctacaaatacgaagagctttgagcccgtgacctgatgactctagtgagacaactctcaccgctgcaccaagcctgtccataaaattaattatgagatatattttcgtagtaaatctagttagggacataaatgttaatattattcactataaacttggtcaaactagtttgacttgcacaaatcccacagttgcatccttttgtcccattagctgcatccttttgtggatagagggagtacaactttgcaagcattccatctacgaattagaataacgttaacagtcagttgttttggtgtgtgattggtgattataaaagtaacaggacatgctgtcgtgcactcaaaatttggtttgttaacctcgtgattagggatgtaagctctgacaccatatagttgtgggccagttagctacttagctagctaacttctatcccgcatcccttcctttgatatttggatttgttcaatcgagtattgggttgatccaatgtcctaggaatgcaaaactcccatccctactcacgatctgaattttgatgatgtctgctatatatctatttaaatttattcacgaaaaatatgttgaaagtgctggcgtattgtttatggcctgaattttgtagagaatagttgttacaatgtaatatactggatacgtttgcagctatgaagctttcattctagttgaagacttgcatcgcggtaaaagatctgattcacaccagcatatgtttgtcacagcttcttttaagttttgtttcttcaaggatcaagattctcatgcatgtaattttgcattaaccttggttattcataaagctgtcatctttttttagtttgatggccaataatgtgtgtttttctccactaacatatttgaatctatgttcaatcaagttctcaaaaagaaagaagaagaggaaagaaaaactggtatccaaccagtcaagaaaattgggaaagctgaatctccaaatctccaaagtttcgtgaagcagcagttctcgggtactcctccagatcagcagaaaggacctgaggataggcctaaggacacaactcatacagaagatgctacgacagacaatgagaggtatactgaaccaacgggaactggtgccactttcaagccagggacttggcagccaccaacatgaatgccaacatgaactttagaagatgaaggacggtgtaccggagcattttcctttcacctatctgtgtaacattttaacatttgctctgaaagaatcactagcctatgttccttctttcagatggttacccatctgatggagttatagccttaagttccttcttttagatgcttacccatctgatggagttataggtgatcgggggctcccacggtatgctgttttttttgtggctaaattgtcctctgtaatctttactgtgatagcaactgtaataaactggaccagtgttttgcatcagggctctcttagagacactgttcaacatattctagtatgtctgatgctgcgaaatattgttttgtacggtag

SEQ ID NO: 26747 - DNA, 2520 bp, Zea Mays
cagacacccatactgattcgctggcggcaggccgacggctacggagacggaagtggcgaccggttccggcgaggcgcaggcgacagataggggacagggcgaccatttctagcgaggcaggagcggggaagatccggaagctgcgatgtcgaagcggctgctgtcgcggctgctcggcatgttccaatcgcggacgcaggtgggcgtcgacaaggccggcaaccgctacttcacccgcgttgaggaggtcgacggcacaatgaaggagaggcgctgggtggagttcaagggcgcagaccaggactcgaccaccgttccagtcgagtggatttgctggctgaatggccaaaggaagaaagctccaacaccagaggaattggctgagctggaggcaagacgtgaacgtgtcaagcaaaacattcagcgtatgtatgcggtgtttcctacttgtgtactcatgtatgattttattaataagcctcactgtgtgcagtgagcaagagcccaaacatgttttcttaggcatttgcagttgagtaacccatgttaattgcctcaactactttatagtagcccatatgtatcataatatgcactgtatgctactttccataccgttcactggacaaggctaagagaaatgaaataaaatgctggttagatatgtgtgtttcttgtatttgatgctaaattcttattttgtaaatagaaactgtattgtattttgtgctaggatcgtcaacaaggttgtatgagacatgatcacttgaaaactttgatctctattactccatccatccacaaaagggtgcaattttcacttttcgaggagccaaacagtttgaagttggaccataattataccaagaagtattaacctttatggtaagataagtagaatggcagacccagtgccggaggctcccacatgagtggtgtgtgggaaagggataaaccgaggcaagtctttccctacaaatacgaagagctttgagcccgtgacctgatgactctagtgagacaactctcaccgctgcaccaagcctgtccataaaattaattatgagatatattttcgtagtaaatctagttagggacataaatgttaatattattcactataaacttggtcaaactagtttgacttgcacaaatcccacagttgcatccttttgtcccattagctgcatccttttgtggatagagggagtacaactttgcaagcattccatctacgaattagaataacgttaacagtcagttgttttggtgtgtgattggtgattataaaagtaacaggacatgctgtcgtgcactcaaaatttggtttgttaacctcgtgattagggatgtaagctctgacaccatatagttgtgggccagttagctacttagctagctaacttctatcccgcatcccttcctttgatatttggatttgttcaatcgagtattgggttgatccaatgtcctaggaatgcaaaactcccatccctactcacgatctgaattttgatgatgtctgctatatatctatttaaatttattcacgaaaaatatgttgaaagtgctggcgtattgtttatggcctgaattttgtagagaatagttgttacaatgtaatatactggatacgtttgcagctatgaagctttcattctagttgaagacttgcatcgcggtaaaagatctgattcacaccagcatatgtttgtcacagcttcttttaagttttgtttcttcaaggatcaagattctcatgcatgtaattttgcattaaccttggttattcataaagctgtcatctttttttagtttgatggccaataatgtgtgtttttctccactaacatatttgaatctatgttcaatcaagttctcaaaaagaaagaagaagaggaaagaaaaactggtatccaaccagtcaagaaaattgggaaagctgaatctccaaatctccaaagtttcgtgaagcagcagttctcgggtactcctccagatcagcagaaagttaacactctaggacctgaggataggcctaaggacacaactcatacagaagatgctacgacagacaatgagaggtatactgaaccaacgggaactggtgccactttcaagccagggacttggcagccaccaacatgaatgccaacatgaactttagaagatgaaggacggtgtaccggagcattttcctttcacctatctgtgtaacattttaacatttgctctgaaagaatcactagcctatgttccttctttcagatggttacccatctgatggagttatagccttaagttccttcttttagatgcttacccatctgatggagttataggtgatcgggggctcccacggtatgctgttttttttgtggctaaattgtcctctgtaatctttactgtgatagcaactgtaataaactggaccagtgttttgcatcagggctctcttagagacactgttcaacatattctagtatgtctgatgctgcgaaatattgttttgtacggtag

SEQ ID NO: 26748 - DNA, 1161 bp, Zea Mays
accagacacccatactgattcgctggcggcaggccgacggctacggagacggaagtggcgaccggttccggcgaggcgcaggcgacagataggggacagggcgaccatttctagcgaggcaggagcggggaagatccggaagctgcgatgtcgaagcggctgctgtcgcggctgctcggcatgttccaatcgcggacgcaggtgggcgtcgacaaggccggcaaccgctacttcacccgcgttgaggaggtcgacggcacaatgaaggagaggcgctgggtggagttcaagggcgcagaccaggactcgaccaccgttccaggttaccttcctcccttcctgctcattttcccgatgaggatgttgtgatgtgactgaagaagtgaagaatcctaatgtaactgctacggcaccgtgtttgcagtcgagtggatttgctggctgaatggccaaaggaagaaagctccaacaccagaggaattggctgagctggaggcaagacgtgaacgtgtcaagcaaaacattcagcttctcaaaaagaaagaagaagaggaaagaaaaactggtatccaaccagtcaagaaaattgggaaagctgaatctccaaatctccaaagtttcgtgaagcagcagttctcgggtactcctccagatcagcagaaaggacctgaggataggcctaaggacacaactcatacagaagatgctacgacagacaatgagaggtatactgaaccaacgggaactggtgccactttcaagccagggacttggcagccaccaacatgaatgccaacatgaactttagaagatgaaggacggtgtaccggagcattttcctttcacctatctgtgtaacattttaacatttgctctgaaagaatcactagcctatgttccttctttcagatggttacccatctgatggagttatagccttaagttccttcttttagatgcttacccatctgatggagttataggtgatcgggggctcccacggtatgctgttttttttgtggctaaattgtcctctgtaatctttactgtgatagcaactgtaataaactggaccagtgttttgcatcagggctctcttagagacactgttcaacatattctagtatgtctgatgctgcgaaatattgttttgtacggtag

SEQ ID NO: 26749 - DNA, 2523 bp, Zea Mays
gcgccgtctgtggaccagacacccatactgattcgctggcggcaggccgacggctacggagacggaagtggcgaccggttccggcgaggcgcaggcgacagataggggacagggcgaccatttctagcgaggcaggagcggggaagatccggaagctgcgatgtcgaagcggctgctgtcgcggctgctcggcatgttccaatcgcggacgcaggtgggcgtcgacaaggccggcaaccgctacttcacccgcgttgaggaggtcgacggcacaatgaaggagaggcgctgggtggagttcaagggcgcagaccaggactcgaccaccgttccagtcgagtggatttgctggctgaatggccaaaggaagaaagctccaacaccagaggaattggctgagctggaggcaagacgtgaacgtgtcaagcaaaacattcagcgtatgtatgcggtgtttcctacttgtgtactcatgtatgattttattaataagcctcactgtgtgcagtgagcaagagcccaaacatgttttcttaggcatttgcagttgagtaacccatgttaattgcctcaactactttatagtagcccatatgtatcataatatgcactgtatgctactttccataccgttcactggacaaggctaagagaaatgaaataaaatgctggttagatatgtgtgtttcttgtatttgatgctaaattcttattttgtaaatagaaactgtattgtattttgtgctaggatcgtcaacaaggttgtatgagacatgatcacttgaaaactttgatctctattactccatccatccacaaaagggtgcaattttcacttttcgaggagccaaacagtttgaagttggaccataattataccaagaagtattaacctttatggtaagataagtagaatggcagacccagtgccggaggctcccacatgagtggtgtgtgggaaagggataaaccgaggcaagtctttccctacaaatacgaagagctttgagcccgtgacctgatgactctagtgagacaactctcaccgctgcaccaagcctgtccataaaattaattatgagatatattttcgtagtaaatctagttagggacataaatgttaatattattcactataaacttggtcaaactagtttgacttgcacaaatcccacagttgcatccttttgtcccattagctgcatccttttgtggatagagggagtacaactttgcaagcattccatctacgaattagaataacgttaacagtcagttgttttggtgtgtgattggtgattataaaagtaacaggacatgctgtcgtgcactcaaaatttggtttgttaacctcgtgattagggatgtaagctctgacaccatatagttgtgggccagttagctacttagctagctaacttctatcccgcatcccttcctttgatatttggatttgttcaatcgagtattgggttgatccaatgtcctaggaatgcaaaactcccatccctactcacgatctgaattttgatgatgtctgctatatatctatttaaatttattcacgaaaaatatgttgaaagtgctggcgtattgtttatggcctgaattttgtagagaatagttgttacaatgtaatatactggatacgtttgcagctatgaagctttcattctagttgaagacttgcatcgcggtaaaagatctgattcacaccagcatatgtttgtcacagcttcttttaagttttgtttcttcaaggatcaagattctcatgcatgtaattttgcattaaccttggttattcataaagctgtcatctttttttagtttgatggccaataatgtgtgtttttctccactaacatatttgaatctatgttcaatcaagttctcaaaaagaaagaagaagaggaaagaaaaactggtatccaaccagtcaagaaaattgggaaagctgaatctccaaatctccaaagtttcgtgaagcagcagttctcgggtactcctccagatcagcagaaaggacctgaggataggcctaaggacacaactcatacagaagatgctacgacagacaatgagaggtatactgaaccaacgggaactggtgccactttcaagccagggacttggcagccaccaacatgaatgccaacatgaactttagaagatgaaggacggtgtaccggagcattttcctttcacctatctgtgtaacattttaacatttgctctgaaagaatcactagcctatgttccttctttcagatggttacccatctgatggagttatagccttaagttccttcttttagatgcttacccatctgatggagttataggtgatcgggggctcccacggtatgctgttttttttgtggctaaattgtcctctgtaatctttactgtgatagcaactgtaataaactggaccagtgttttgcatcagggctctcttagagacactgttcaacatattctagtatgtctgatgctgcgaaatattgttttgtacggtag

SEQ ID NO: 26750 - DNA, 2074 bp, Zea Mays
cgtctttctcccaagccataaatcccggagcactgcccctcaatggtgagctgccagagaccgtcatttgctcggcctgccggcggagcgcggtggctacacggttacacctccgcccgctccgtcccgttttgaccgccttttctcccctctcctgcgcgagcgccgccgcagtataacccggtggtaacccaccgccgcaagcatcccaccgcgccgagctacgcgacggatgcggcgcgcggcccacaacccaaccgcagcggcaacaaccgctctataaagcaatcccccacctaccggttccgcggcctcggtcgcttcgctttcccccaaatccattgcagactcgagctcgcagtagacgagagacgacccaagacttcctcaccctccctttgcttcctgcgcaattcctgcggcagcgcctttgtttgtttcaatggacagcgactacattgccagcctgctcatgggctcatccgcccctgcactcagcttcgccgcgctggacgccgggttcctcgacacgctacgcggcggcggcggcgggggcctcttcggggtgcccgcggaggcagggtgtggcggcgggtctccggaggggtcgtcggtgtccgacccagcgtgggcgcgcgctagggactacggcaatgccaggaaacgcaaggcgccgcccacggggtccgccggtggcaaggaggcctgcttgagcaaggttgcggaggccaagggtccggacgggaagaggtgcagagtagtgggtgccagcgacagtccggtgaagccgaaggaagaggaggaggaggcggcggcgagcgacgccttggttgaagtcaaagcgcagaagaagggcaaggggaagagctcgaagccggcagtcgaaccgcccaaagactacgtccatgtccgggcgcggcgggggcaggcgactgacagccacagccttgcagagaggaagagagaagattagccagaggatgaaatttctacaggacctagtgccaggatgcaacaaggtggtcggcaaggcactcatgctcgatgagatcataaactacgtccagtcgctgcagcagcaagttgagttcctgtccatgaagctcgccactgtgaacccagagcttgatttcagcaacctatcgacactcctgcacaaagacatgtaccaacagccatgtggtggcccttcggcaagttcggtctttccactggaaagcgccggcgcagcttttccattctgcgagcaggcggatcttttccacagctttggctcgggtggtagcggtagcggtagtggtatggaggatcagtgctctctaagcctgctgctagacacggctctgccccacgcggccagcccacagtttgcttttcaaaagcagcaaagggacttgtgggaggatggcctacagcatgctttgcctacccctactaccggtagcgagcaaaggcaggaggaggatgggcttttagtacccgacctttgatggccagttgcaagctgatcaggcgaaggctgagttctagcccgtccctggtgatctgcaagggctggtatttttgtacataggtggtggtggtaccaagacctgtgtgtgggctgtgtgtttcaagcagagctctcctctgctaagctgaccatcattagcgtttaggcctgcgactgcgactgcgagctgaaattcattccgtgatactgctgcacgtatgtcacatggcgactcgattcttgccccccatagagatcgtgcgacccatctcgtgaaaaattggagtaggtcgtgtgctaggtagatatggcgcaaatattacatgcgccatcatctgaagctgtactgattattactcctatgtaagaccgctggtggctggtactggaacgataccgtgtcatgtttgttgcattttttttctgatcttacgattatgacgaaagtgcaagtatatgaggtttctctcctttagcttgctttgctgcaaatgttctgcgccatcgttttttttattagttttgctgcaactgagtgtggcatgggctcatcatttacagactatatatagtgaagtgttc

SEQ ID NO: 26751 - DNA, 2083 bp, Zea Mays
cgtctttctcccaagccataaatcccggagcactgcccctcaatggtgagctgccagagaccgtcatttgctcggcctgccggcggagcgcggtggctacacggttacacctccgcccgctccgtcccgttttgaccgccttttctcccctctcctgcgcgagcgccgccgcagtataacccggtggtaacccaccgccgcaagcatcccaccgcgccgagctacgcgacggatgcggcgcgcggcccacaacccaaccgcagcggcaacaaccgctctataaagcaatcccccacctaccggttccgcggcctcggtcgcttcgctttcccccaaatccattgcagactcgagctcgcagtagacgagagacgacccaagacttcctcaccctccctttgcttcctgcgcaattcctgcggcagcgcctttgtttgtttcaatggacagcgactacattgccagcctgctcatgggctcatccgcccctgcactcagcttcgccgcgctggacgccgggttcctcgacacgctacgcggcggcggcggcgggggcctcttcggggtgcccgcggaggcagggtgtggcggcgggtctccggaggggtcgtcggtgtccgacccagcgtgggcgcgcgctagggactacggcaatgccaggaaacgcaaggcgccgcccacggggtccgccggtggcaaggaggcctgcttgagcaaggttgcggaggccaagggtccggacgggaagaggtgcagagtagtgggtgccagcgacagtccggtgaagccgaaggaagaggaggaggaggcggcggcgagcgacgccttggttgaagtcaaagcgcagaagaagggcaaggggaagagctcgaagccggcagtcgaaccgcccaaagactacgtccatgtccgggcgcggcgggggcaggcgactgacagccacagccttgcagagagggttagaagagagaagattagccagaggatgaaatttctacaggacctagtgccaggatgcaacaaggtggtcggcaaggcactcatgctcgatgagatcataaactacgtccagtcgctgcagcagcaagttgagttcctgtccatgaagctcgccactgtgaacccagagcttgatttcagcaacctatcgacactcctgcacaaagacatgtaccaacagccatgtggtggcccttcggcaagttcggtctttccactggaaagcgccggcgcagcttttccattctgcgagcaggcggatcttttccacagctttggctcgggtggtagcggtagcggtagtggtatggaggatcagtgctctctaagcctgctgctagacacggctctgccccacgcggccagcccacagtttgcttttcaaaagcagcaaagggacttgtgggaggatggcctacagcatgctttgcctacccctactaccggtagcgagcaaaggcaggaggaggatgggcttttagtacccgacctttgatggtatgccagttgcaagctgatcaggcgaaggctgagttctagcccgtccctggtgatctgcaagggctggtatttttgtacataggtggtggtggtaccaagacctgtgtgtgggctgtgtgtttcaagcagagctctcctctgctaagctgaccatcattagcgtttaggcctgcgactgcgactgcgagctgaaattcattccgtgatactgctgcacgtatgtcacatggcgactcgattcttgccccccatagagatcgtgcgacccatctcgtgaaaaattggagtaggtcgtgtgctaggtagatatggcgcaaatattacatgcgccatcatctgaagctgtactgattattactcctatgtaagaccgctggtggctggtactggaacgataccgtgtcatgtttgttgcattttttttctgatcttacgattatgacgaaagtgcaagtatatgaggtttctctcctttagcttgctttgctgcaaatgttctgcgccatcgttttttttattagttttgctgcaactgagtgtggcatgggctcatcatttacagactatatatagtgaagtgttc

SEQ ID NO: 26752 - DNA, 782 bp, Zea Mays
ccctgccttgccatccatcggcgcagcggagccccccgaccatggagaccgacgacaagcgtcacggcggcaaggaggcggcggcgctcagcgggggccacctttgccatgtctgcgggtaccagtacccaaacccgcaccccagcgccaagcttcgccgctcccaccgcaagcactgcggtaaggcgcggccggcggcggccgaggccgaggccttggaggaggttgaggaaggcgctgtgggggtcggggttcgcgtggtgggcgagcgggaggacaggcccggccaccgcaaccgcattgcggccgggcggacgctgctcggtcgggaaggaggacgacagagagaggagactggcacgggcgaggccaatggagaaggcgaggcgtcgcgcggatttgcggggcaagttgacagttccgtggaggacaaggtggttgcagcagaacattattctcctacctgtactggagctcaaatcattgccactgaattaagtgcaaactacctgattaattgcggcagcagtgaaaatggttttcttgaagatactggagctcaaatcgacgccagtgaattaagtgaaaatggcctttttgactgcaccaacaattctatcgaaattgtaaacgaaggcagtggaactgaattactgattgcttgcactagtggaagtcaaaatgtcttgggacgtccagctgagcaagaagatagctttgatgagtaccaggatgcatctccgtttcttcgtcaatcagattctgaagatggtgctgcacca

SEQ ID NO: 26753 - DNA, 1415 bp, Zea Mays
tccgcctcgtggtcatggtcctcatggactcgcctgaagtgggcttgcttgctcggctgccccacttggcagggacgctgataatcacataagtcaccggagggtggaccgtggaccctattcacccaattgaaaggaagaagcgctccctacccaccgcggttgccccctttcggcctttccccttctcgatcgaactcgggtccttcggcgacgtgcggatttttcgtccctcccgatgctcccggggttcattgtgaagctgaggtgagtatataggcataaagagagcatgaacactgttagtggtacaaagcgtgcaccaaggagacagtcgcaagatgggtctggtgataaactagtggtgatcgtggaagcaagctcccggggggtggggagccgtcgtggaccacatgcccctattcctggcgccctaaactcacccattgatgtggaggccatcgaagatgaagttcaggcagtatctccttcgcgagtgcccctgccatgtattctgcagaggaggaacaggagaaccaggagggaacctataacagtggttgacttggaggttgaagctagccgggaagggagcaaacgccagagggttgaaccagtaggacgtcacctctatccagattggggagcaaggtctagcttgcagtcaaatgccgcacaaaccagcaaagagcctgccaaggaggtccccgaggaaccatcttttacctgcccaatatgttggaataagatggaggagccttccacgacgacttgtggccatgtcttctgcgacacgtgcatcaagcaggccatcaaggttcagaagaaatgccctacttgcaggaaggggctgaaaatgaatagtgttcatcgtatttaccttccgaacggttctagttaagctgagcagctttacatatctgatggcttgtaactttgggggcaattagcttaacctctgttatccgatacatgccgactggctttgtcaaagaaacttctggtaacgtaaggctgtgcaatgtactgtgaggatcagaaattcttagcctgaacaacagatagatgtttcatcccagtctgtattatttatcggcatcaccaggagttcatcatgagaacttcctgactagggaagtcgatatcagcctcagttttactctgcatccatggttcccagaatgttttgttaggatgtgaccataagatgatgcatataaccgtgcaaaacattattttgcaccctattatgtattatttatatcctattatgtattatttatatagtagagttgtaaaatataaatgatgagtaaagctgctgaagatagccttatatatattgggttattgtcttgggggattattgtaactgggatttgcttcgttctaaaacgataatagcgagttgaaat

SEQ ID NO: 26754 - DNA, 3945 bp, Zea Mays
ctccctctctcttcgcgacgactgtgcgaccgccgccgccgacctacgccaggttccccgatcttcgttgggcgcttcgccggcgacgagcacccatcagggtgtatatttgtaatcctatgccctttactgggtccgcccctggttgattctagccctgttcaggagtgatggggaagaacgagaaggctaagcgcaagaaccctcggaaagcgcatgaacgggatcttccagcctcgtcctcggaggttggacctggtgatgcagcatcgcaggatgcaagccactcagcagaggaagcagctgcttcggctaatggccgggagcattgcggccactatggccgtgacaatgcccacttagataaggtcctcctggagatcttgtcttccaagcacgttgcttcatgtgagcactgccgagaagatgcaccaagaaagaaagggggtgctggtagcagggagaaagggggtaagcagaagaagaaaggaggcgcctccaaaggcgctactgccaaggcacaggcaaaggcagacacaagtcatacatgggtctgcttggactgtggtcggcatttttgtggtggtgcagcagatgataccaagccctatggccatgccagacggcatgctaagcaggaccggcattggtgggccgcaaggtatgatgacccaacagttgcttattgtttgtcatgtgaaaaggaggtgtcagttgagatgcccaaattagagacagttgttgcaccagcagtggaagataaggtggccggtgcagcggatactgatttatgtggtttggttaacccggatgctaatgtgatcaaaggacttccaaatctgggaaatacatgcttcttcaatgcagtgctgcagagcatcctcgcggttgataggttgcgcaggaagatgttaggaccagatgttcctacaggagcccttgctatgtcactgaagaagctttttgcagagacaagtgcttcaaaccatgcaggaggcatgctaagcccgaagaacctcttctcaagcatttgctcaaaatatccacagttcaggggctaccagatgcaggatagccatgaattgctccgttgttttcttgatggtttacgcatggaggaaactgaagcacggaagctagcagaggaagcttcagatgcaggtgttcccacaattgtggactccatttttggtggtcagctatctagtactgtgtccagcacagaatgctcacacagttccgttaaacatgatcaattccttgacctctcactaccagttccatcaaggagacctccaaccaagagtgtttcatcaccaccagttaagaggaccaaacagtccatacgagataggaacaaaaaccgcagatacgggaaggttccagctcgagcatctccttcagtagagagtaacaaagaacaagttcattcaattgctgagcgcaattcccaaattcctggttcagaacttgaacaggtagtcagcgaaaaagatgctgagccctctggatgcagtgagtcatgtggttctgtgcctaatcaagaacaaaatgccactacaaatgtggagaatagcatctgctggttggattatgtcgctgatgcggatgaaacaaaatctgagattcttgattctgcagattctactgaaacaggacaaatttgggaatgcagggatgctgcacatggtcccttgcaccctcaggatgatgccctacccaaagagcagatcttgggttctgagcactcaggcgaaaacactgttgatgatgatgcctccttacagactgttatcttacttccttacaaagaatttggtactactgccaaggaaagggatgaagccatagaaaatccatataattcagagtgtacagttcctcctttagttgtttctccagtaagagaaaataatacacaacctgaatattgtggagatgtggagcaagatgactatgttggtcttggtgatatgttcaatgaaccagaagttacttctgaagtcaagaaagaagctggtaaagtagaagatattgatgtaatggcttggagtagtaacagtgctgatgatgaggtagatgatagtaatgctcctgtatcagttgagggatgcttggctgtgtatactgaaccagagctgctttctgaaccatggctttgtgagcactgtactaatgctgcacgcataaactctaatgaaagagaaaatgtcatggagatgaaggaccgagctaatgaaataaaggatggtgaggagatgatggcagatggcgatggaaaaaaagatggtgagaagttgatcgtgagctgcagcaaacaggtggacattgatcaggttatgggaactgatggttgcaaaaagcacattgaccagattatggcaactggtgattgctctgacaatatgcattctgatatgcattgcaaggaaggtgggtgtgttaatccttcttcggctgaccctgaacaaaaatgtgatggcaattttccagatatagaaaatacttctatgcagagaactgatgtagtcttcactatgaatgagactgaacaatcaagcagtcagactagccacaaggaacagtgtatggatttgaaaagcttagaaccggagtcctcatctttgaataaccaacaacatgattcatctgtccaatataatgattgtcataacgtggatataaccgttaaaggagcaagtgcaccactgagttgtggcgattctgtgtcttgcaatgcaactaacaatgttgaagctcaacctgttggtggtgctgaagaagttgtgtcgagtagccttccatcagatgcacaaaaaaccttgctgggtgcaaaagataatgaagatgccatcacaaagaatcagggcaggaggaagcgaatgaagatggttggtaaggcacagctagtgcaaggtaaccaaaataagcagaaagaggacgagacaaaggttttcagagctgcattgagaagaattcttataagcaaatctccacctgtattgacgattaacttgaacagattcagccaggattctcatggtcgatataagaaactgaaagggcatgtgcgctttaatgagatgcttgatatacaaccattcatggacccaaggtgtaaggtgaacaactccagcacttatcgtctagttggcgttgtcgagcacttgggaaccatgacgtcaggtcattatattgcatacgcgagagcttgcaagattggaggtcggcagcagcagagcagtggctcaaagtcttggttttacgcaagcgatgggcaagtcagagaagcctctctggaggaggtgctaaactgcgaggcctacattctcttttacgagagggtgggcgactaagacaagctctgtgccagcctgctcttcagtcagtcagtcatttatcagagcaagatcactggggggggggggggggggggtggcaaactgggaattgaagacaacattttttttgtgggcacagcccaatgagtttgcatactaatgtagctacccaccaagtccattctgttccttcgaccgagtcattccatggcccgaggtggctccattaccattcatctgctcggtcgaagagattttcgcaattggacttgcacagcagaactgttcatactcgcctacatccattctttcttttcccccctttttggcctttgaagaacatagctggtggtgcggggattggtcaaaattggcagggtttttttgtcgaacggttcatggtcagcttgagacatttcttcggcatgtggatgcccctagattttgagtgatgggggcactgtaaaacggctttaggagctatcctgtagttgcaacaatcgcagtcgttttcacacagcgtcgcccgaagtgattgtatctgagagatgtttatatatatgatcagattcttttttgttatggatttcccgcttgagatttt

SEQ ID NO: 26755 - DNA, 3998 bp, Zea Mays
cttttagtagaagtagagatactcaggttcagttcagcacgcgtgcgctgtctccctctctcttcgcgacgactgtgcgaccgccgccgccgacctacgccaggttccccgatcttcgttgggcgcttcgccggcgacgagcacccatcagcaggtgtatatttgtaatcctatgccctttactgggtccgcccctggttgattctagccctgttcaggagtgatggggaagaacgagaaggctaagcgcaagaaccctcggaaagcgcatgaacgggatcttccagcctcgtcctcggaggttggacctggtgatgcagcatcgcaggatgcaagccactcagcagaggaagcagctgcttcggctaatggccgggagcattgcggccactatggccgtgacaatgcccacttagataaggtcctcctggagatcttgtcttccaagcacgttgcttcatgtgagcactgccgagaagatgcaccaagaaagaaagggggtgctggtagcagggagaaagggggtaagcagaagaagaaaggaggcgcctccaaaggcgctactgccaaggcacaggcaaaggcagacacaagtcatacatgggtctgcttggactgtggtcggcatttttgtggtggtgcagcagatgataccaagccctatggccatgccagacggcatgctaagcaggaccggcattggtgggccgcaaggtatgatgacccaacagttgcttattgtttgtcatgtgaaaaggaggtgtcagttgagatgcccaaattagagacagttgttgcaccagcagtggaagataaggtggccggtgcagcggatactgatttatgtggtttggttaacccggatgctaatgtgatcaaaggacttccaaatctgggaaatacatgcttcttcaatgcagtgctgcagagcatcctcgcggttgataggttgcgcaggaagatgttaggaccagatgttcctacaggagcccttgctatgtcactgaagaagctttttgcagagacaagtgcttcaaaccatgcaggaggcatgctaagcccgaagaacctcttctcaagcatttgctcaaaatatccacagttcaggggctaccagatgcaggatagccatgaattgctccgttgttttcttgatggtttacgcatggaggaaactgaagcacggaagctagcagaggaagcttcagatgcaggtgttcccacaattgtggactccatttttggtggtcagctatctagtactgtgtccagcacagaatgctcacacagttccgttaaacatgatcaattccttgacctctcactaccagttccatcaaggagacctccaaccaagagtgtttcatcaccaccagttaagaggaccaaacagtccatacgagataggaacaaaaaccgcagatacgggaaggttccagctcgagcatctccttcagtagagagtaacaaagaacaagttcattcaattgctgagcgcaattcccaaattcctggttcagaacttgaacaggtagtcagcgaaaaagatgctgagccctctggatgcagtgagtcatgtggttctgtgcctaatcaagaacaaaatgccactacaaatgtggagaatagcatctgctggttggattatgtcgctgatgcggatgaaacaaaatctgagattcttgattctgcagattctactgaaacaggacaaatttgggaatgcagggatgctgcacatggtcccttgcaccctcaggatgatgccctacccaaagagcagatcttgggttctgagcactcaggcgaaaacactgttgatgatgatgcctccttacagactgttatcttacttccttacaaagaatttggtactactgccaaggaaagggatgaagccatagaaaatccatataattcagagtgtacagttcctcctttagttgtttctccagtaagagaaaataatacacaacctgaatattgtggagatgtggagcaagatgactatgttggtcttggtgatatgttcaatgaaccagaagttacttctgaagtcaagaaagaagctggtaaagtagaagatattgatgtaatggcttggagtagtaacagtgctgatgatgaggtagatgatagtaatgctcctgtatcagttgagggatgcttggctgtgtatactgaaccagagctgctttctgaaccatggctttgtgagcactgtactaatgctgcacgcataaactctaatgaaagagaaaatgtcatggagatgaaggaccgagctaatgaaataaaggatggtgaggagatgatggcagatggcgatggaaaaaaagatggtgagaagttgatcgtgagctgcagcaaacaggtggacattgatcaggttatgggaactgatggttgcaaaaagcacattgaccagattatggcaactggtgattgctctgacaatatgcattctgatatgcattgcaaggaaggtgggtgtgttaatccttcttcggctgaccctgaacaaaaatgtgatggcaattttccagatatagaaaatacttctatgcagagaactgatgtagtcttcactatgaatgagactgaacaatcaagcagtcagactagccacaaggaacagtgtatggatttgaaaagcttagaaccggagtcctcatctttgaataaccaacaacatgattcatctgtccaatataatgattgtcataacgtggatataaccgttaaaggagcaagtgcaccactgagttgtggcgattctgtgtcttgcaatgcaactaacaatgttgaagctcaacctgttggtggtgctgaagaagttgtgtcgagtagccttccatcagatgcacaaaaaaccttgctgggtgcaaaagataatgaagatgccatcacaaagaatcagggcaggaggaagcgaatgaagatggttggtaaggcacagctagtgcaaggtaaccaaaataagcagaaagaggacgagacaaaggttttcagagctgcattgagaagaattcttataagcaaatctccacctgtattgacgattaacttgaacagattcagccaggattctcatggtcgatataagaaactgaaagggcatgtgcgctttaatgagatgcttgatatacaaccattcatggacccaaggtgtaaggtgaacaactccagcacttatcgtctagttggcgttgtcgagcacttgggaaccatgacgtcaggtcattatattgcatacgcgagagcttgcaagattggaggtcggcagcagcagagcagtggctcaaagtcttggttttacgcaagcgatgggcaagtcagagaagcctctctggaggaggtgctaaactgcgaggcctacattctcttttacgagagggtgggcgactaagacaagctctgtgccagcctgctcttcagtcagtcagtcatttatcagagcaagatcactggggggggggggggggggggtggcaaactgggaattgaagacaacattttttttgtgggcacagcccaatgagtttgcatactaatgtagctacccaccaagtccattctgttccttcgaccgagtcattccatggcccgaggtggctccattaccattcatctgctcggtcgaagagattttcgcaattggacttgcacagcagaactgttcatactcgcctacatccattctttcttttcccccctttttggcctttgaagaacatagctggtggtgcggggattggtcaaaattggcagggtttttttgtcgaacggttcatggtcagcttgagacatttcttcggcatgtggatgcccctagattttgagtgatgggggcactgtaaaacggctttaggagctatcctgtagttgcaacaatcgcagtcgttttcacacagcgtcgcccgaagtgattgtatctgagagatgtttatatatatgatcagattcttttttgttatggatttcccgcttgagatttt

SEQ ID NO: 26756 - DNA, 4009 bp, Zea Mays
tcggctttggctcttttagtagaagtagagatactcaggttcagttcagcacgcgtgcgctgtctccctctctcttcgcgacgactgtgcgaccgccgccgccgacctacgccaggttccccgatcttcgttgggcgcttcgccggcgacgagcacccatcagaggtgtatatttgtaatcctatgccctttactgggtccgcccctggttgattctagccctgttcaggagtgatggggaagaacgagaaggctaagcgcaagaaccctcggaaagcgcatgaacgggatcttccagcctcgtcctcggaggttggacctggtgatgcagcatcgcaggatgcaagccactcagcagaggaagcagctgcttcggctaatggccgggagcattgcggccactatggccgtgacaatgcccacttagataaggtcctcctggagatcttgtcttccaagcacgttgcttcatgtgagcactgccgagaagatgcaccaagaaagaaagggggtgctggtagcagggagaaagggggtaagcagaagaagaaaggaggcgcctccaaaggcgctactgccaaggcacaggcaaaggcagacacaagtcatacatgggtctgcttggactgtggtcggcatttttgtggtggtgcagcagatgataccaagccctatggccatgccagacggcatgctaagcaggaccggcattggtgggccgcaaggtatgatgacccaacagttgcttattgtttgtcatgtgaaaaggaggtgtcagttgagatgcccaaattagagacagttgttgcaccagcagtggaagataaggtggccggtgcagcggatactgatttatgtggtttggttaacccggatgctaatgtgatcaaaggacttccaaatctgggaaatacatgcttcttcaatgcagtgctgcagagcatcctcgcggttgataggttgcgcaggaagatgttaggaccagatgttcctacaggagcccttgctatgtcactgaagaagctttttgcagagacaagtgcttcaaaccatgcaggaggcatgctaagcccgaagaacctcttctcaagcatttgctcaaaatatccacagttcaggggctaccagatgcaggatagccatgaattgctccgttgttttcttgatggtttacgcatggaggaaactgaagcacggaagctagcagaggaagcttcagatgcaggtgttcccacaattgtggactccatttttggtggtcagctatctagtactgtgtccagcacagaatgctcacacagttccgttaaacatgatcaattccttgacctctcactaccagttccatcaaggagacctccaaccaagagtgtttcatcaccaccagttaagaggaccaaacagtccatacgagataggaacaaaaaccgcagatacgggaaggttccagctcgagcatctccttcagtagagagtaacaaagaacaagttcattcaattgctgagcgcaattcccaaattcctggttcagaacttgaacaggtagtcagcgaaaaagatgctgagccctctggatgcagtgagtcatgtggttctgtgcctaatcaagaacaaaatgccactacaaatgtggagaatagcatctgctggttggattatgtcgctgatgcggatgaaacaaaatctgagattcttgattctgcagattctactgaaacaggacaaatttgggaatgcagggatgctgcacatggtcccttgcaccctcaggatgatgccctacccaaagagcagatcttgggttctgagcactcaggcgaaaacactgttgatgatgatgcctccttacagactgttatcttacttccttacaaagaatttggtactactgccaaggaaagggatgaagccatagaaaatccatataattcagagtgtacagttcctcctttagttgtttctccagtaagagaaaataatacacaacctgaatattgtggagatgtggagcaagatgactatgttggtcttggtgatatgttcaatgaaccagaagttacttctgaagtcaagaaagaagctggtaaagtagaagatattgatgtaatggcttggagtagtaacagtgctgatgatgaggtagatgatagtaatgctcctgtatcagttgagggatgcttggctgtgtatactgaaccagagctgctttctgaaccatggctttgtgagcactgtactaatgctgcacgcataaactctaatgaaagagaaaatgtcatggagatgaaggaccgagctaatgaaataaaggatggtgaggagatgatggcagatggcgatggaaaaaaagatggtgagaagttgatcgtgagctgcagcaaacaggtggacattgatcaggttatgggaactgatggttgcaaaaagcacattgaccagattatggcaactggtgattgctctgacaatatgcattctgatatgcattgcaaggaaggtgggtgtgttaatccttcttcggctgaccctgaacaaaaatgtgatggcaattttccagatatagaaaatacttctatgcagagaactgatgtagtcttcactatgaatgagactgaacaatcaagcagtcagactagccacaaggaacagtgtatggatttgaaaagcttagaaccggagtcctcatctttgaataaccaacaacatgattcatctgtccaatataatgattgtcataacgtggatataaccgttaaaggagcaagtgcaccactgagttgtggcgattctgtgtcttgcaatgcaactaacaatgttgaagctcaacctgttggtggtgctgaagaagttgtgtcgagtagccttccatcagatgcacaaaaaaccttgctgggtgcaaaagataatgaagatgccatcacaaagaatcagggcaggaggaagcgaatgaagatggttggtaaggcacagctagtgcaaggtaaccaaaataagcagaaagaggacgagacaaaggttttcagagctgcattgagaagaattcttataagcaaatctccacctgtattgacgattaacttgaacagattcagccaggattctcatggtcgatataagaaactgaaagggcatgtgcgctttaatgagatgcttgatatacaaccattcatggacccaaggtgtaaggtgaacaactccagcacttatcgtctagttggcgttgtcgagcacttgggaaccatgacgtcaggtcattatattgcatacgcgagagcttgcaagattggaggtcggcagcagcagagcagtggctcaaagtcttggttttacgcaagcgatgggcaagtcagagaagcctctctggaggaggtgctaaactgcgaggcctacattctcttttacgagagggtgggcgactaagacaagctctgtgccagcctgctcttcagtcagtcagtcatttatcagagcaagatcactggggggggggggggggggggtggcaaactgggaattgaagacaacattttttttgtgggcacagcccaatgagtttgcatactaatgtagctacccaccaagtccattctgttccttcgaccgagtcattccatggcccgaggtggctccattaccattcatctgctcggtcgaagagattttcgcaattggacttgcacagcagaactgttcatactcgcctacatccattctttcttttcccccctttttggcctttgaagaacatagctggtggtgcggggattggtcaaaattggcagggtttttttgtcgaacggttcatggtcagcttgagacatttcttcggcatgtggatgcccctagattttgagtgatgggggcactgtaaaacggctttaggagctatcctgtagttgcaacaatcgcagtcgttttcacacagcgtcgcccgaagtgattgtatctgagagatgtttatatatatgatcagattcttttttgttatggatttcccgcttgagatttt

SEQ ID NO: 26757 - DNA, 3216 bp, Zea Mays
ctcaggttcagttcagcacgcgtgcgctgtctccctctctcttcgcgacgactgtgcgaccgccgccgccgacctacgccaggttccccgatcttcgttgggcgcttcgccggcgacgagcacccatcagggtgtatatttgtaatcctatgccctttactgggtccgcccctggttgattctagccctgttcaggagtgatggggaagaacgagaaggctaagcgcaagaaccctcggaaagcgcatgaacgggatcttccagcctcgtcctcggaggttggacctggtgatgcagcatcgcaggatgcaagccactcagcagaggaagcagctgcttcggctaatggccgggagcattgcggccactatggccgtgacaatgcccacttagataaggtcctcctggagatcttgtcttccaagcacgttgcttcatgtgagcactgccgagaagatgcaccaagaaagaaagggggtgctggtagcagggagaaagggggtaagcagaagaagaaaggaggcgcctccaaaggcgctactgccaaggcacaggcaaaggcagacacaagtcatacatgggtctgcttggactgtggtcggcatttttgtggtggtgcagcagatgataccaagccctatggccatgccagacggcatgctaagcaggaccggcattggtgggccgcaaggtatgatgacccaacagttgcttattgtttgtcatgtgaaaaggaggtgtcagttgagatgcccaaattagagacagttgttgcaccagcagtggaagataaggtggccggtgcagcggatactgatttatgtggtttggttaacccggatgctaatgtgatcaaaggacttccaaatctgggaaatacatgcttcttcaatgcagtgctgcagagcatcctcgcggttgataggttgcgcaggaagatgttaggaccagatgttcctacaggagcccttgctatgtcactgaagaagctttttgcagagacaagtgcttcaaaccatgcaggaggcatgctaagcccgaagaacctcttctcaagcatttgctcaaaatatccacagttcaggggctaccagatgcaggatagccatgaattgctccgttgttttcttgatggtttacgcatggaggaaactgaagcacggaagctagcagaggaagcttcagatgcaggtgttcccacaattgtggactccatttttggtggtcagctatctagtactgtgtccagcacagaatgctcacacagttccgttaaacatgatcaattccttgacctctcactaccagttccatcaaggagacctccaaccaagagtgtttcatcaccaccagttaagaggaccaaacagtccatacgagataggaacaaaaaccgcagatacgggaaggttccagctcgagcatctccttcagtagagagtaacaaagaacaagttcattcaattgctgagcgcaattcccaaattcctggttcagaacttgaacaggtagtcagcgaaaaagatgctgagccctctggatgcagtgagtcatgtggttctgtgcctaatcaagaacaaaatgccactacaaatgtggagaatagcatctgctggttggattatgtcgctgatgcggatgaaacaaaatctgagattcttgattctgcagattctactgaaacaggacaaatttgggaatgcagggatgctgcacatggtcccttgcaccctcaggatgatgccctacccaaagagcagatcttgggttctgagcactcaggcgaaaacactgttgatgatgatgcctccttacagactgttatcttacttccttacaaagaatttggtactactgccaaggaaagggatgaagccatagaaaatccatataattcagagtgtacagttcctcctttagttgtttctccagtaagagaaaataatacacaacctgaatattgtggagatgtggagcaagatgactatgttggtcttggtgatatgttcaatgaaccagaagttacttctgaagtcaagaaagaagctggtaaagtagaagatattgatgtaatggcttggagtagtaacagtgctgatgatgaggtagatgatagtaatgctcctgtatcagttgagggatgcttggctgtgtatactgaaccagagctgctttctgaaccatggctttgtgagcactgtactaatgctgcacgcataaactctaatgaaagagaaaatgtcatggagatgaaggaccgagctaatgaaataaaggatggtgaggagatgatggcagatggcgatggaaaaaaagatggtgagaagttgatcgtgagctgcagcaaacaggtggacattgatcaggttatgggaactgatggttgcaaaaagcacattgaccagattatggcaactggtgattgctctgacaatatgcattctgatatgcattgcaaggaaggtgggtgtgttaatccttcttcggctgaccctgaacaaaaatgtgatggcaattttccagatatagaaaatacttctatgcagagaactgatgtagtcttcactatgaatgagactgaacaatcaagcagtcagactagccacaaggaacagtgtatggatttgaaaagcttagaaccggagtcctcatctttgaataaccaacaacatgattcatctgtccaatataatgattgtcataacgtggatataaccgttaaaggagcaagtgcaccactgagttgtggcgattctgtgtcttgcaatgcaactaacaatgttgaagctcaacctgttggtggtgctgaagaagttgtgtcgagtagccttccatcagatgcacaaaaaaccttgctgggtgcaaaagataatgaagatgccatcacaaagaatcagggcaggaggaagcgaatgaagatggttggtaaggcacagctagtgcaaggtaaccaaaataagcagaaagaggacgagacaaaggttttcagagctgcattgagaagaattcttataagcaaatctccacctgtattgacgattaacttgaacagattcagccaggattctcatggtcgatataagaaactgaaagggcatgtgcgctttaatgagatgcttgatatacaaccattcatggacccaaggccataagcctacttactgaaacagaagagtaaaaggaataaatgatacatcatgatgtacttgtgaaaat

SEQ ID NO: 26758 - DNA, 3176 bp, Zea Mays
ggctcttttagtagaagtagagatactcaggttcagttcagcacgcgtgcgctgtctccctctctcttcgcgacgactgtgcgaccgccgccgccgacctacgccaggttccccgatcttcgttgggcgcttcgccggcgacgagcacccatcaggagtgatggggaagaacgagaaggctaagcgcaagaaccctcggaaagcgcatgaacgggatcttccagcctcgtcctcggaggttggacctggtgatgcagcatcgcaggatgcaagccactcagcagaggaagcagctgcttcggctaatggccgggagcattgcggccactatggccgtgacaatgcccacttagataaggtcctcctggagatcttgtcttccaagcacgttgcttcatgtgagcactgccgagaagatgcaccaagaaagaaagggggtgctggtagcagggagaaagggggtaagcagaagaagaaaggaggcgcctccaaaggcgctactgccaaggcacaggcaaaggcagacacaagtcatacatgggtctgcttggactgtggtcggcatttttgtggtggtgcagcagatgataccaagccctatggccatgccagacggcatgctaagcaggaccggcattggtgggccgcaaggtatgatgacccaacagttgcttattgtttgtcatgtgaaaaggaggtgtcagttgagatgcccaaattagagacagttgttgcaccagcagtggaagataaggtggccggtgcagcggatactgatttatgtggtttggttaacccggatgctaatgtgatcaaaggacttccaaatctgggaaatacatgcttcttcaatgcagtgctgcagagcatcctcgcggttgataggttgcgcaggaagatgttaggaccagatgttcctacaggagcccttgctatgtcactgaagaagctttttgcagagacaagtgcttcaaaccatgcaggaggcatgctaagcccgaagaacctcttctcaagcatttgctcaaaatatccacagttcaggggctaccagatgcaggatagccatgaattgctccgttgttttcttgatggtttacgcatggaggaaactgaagcacggaagctagcagaggaagcttcagatgcaggtgttcccacaattgtggactccatttttggtggtcagctatctagtactgtgtccagcacagaatgctcacacagttccgttaaacatgatcaattccttgacctctcactaccagttccatcaaggagacctccaaccaagagtgtttcatcaccaccagttaagaggaccaaacagtccatacgagataggaacaaaaaccgcagatacgggaaggttccagctcgagcatctccttcagtagagagtaacaaagaacaagttcattcaattgctgagcgcaattcccaaattcctggttcagaacttgaacaggtagtcagcgaaaaagatgctgagccctctggatgcagtgagtcatgtggttctgtgcctaatcaagaacaaaatgccactacaaatgtggagaatagcatctgctggttggattatgtcgctgatgcggatgaaacaaaatctgagattcttgattctgcagattctactgaaacaggacaaatttgggaatgcagggatgctgcacatggtcccttgcaccctcaggatgatgccctacccaaagagcagatcttgggttctgagcactcaggcgaaaacactgttgatgatgatgcctccttacagactgttatcttacttccttacaaagaatttggtactactgccaaggaaagggatgaagccatagaaaatccatataattcagagtgtacagttcctcctttagttgtttctccagtaagagaaaataatacacaacctgaatattgtggagatgtggagcaagatgactatgttggtcttggtgatatgttcaatgaaccagaagttacttctgaagtcaagaaagaagctggtaaagtagaagatattgatgtaatggcttggagtagtaacagtgctgatgatgaggtagatgatagtaatgctcctgtatcagttgagggatgcttggctgtgtatactgaaccagagctgctttctgaaccatggctttgtgagcactgtactaatgctgcacgcataaactctaatgaaagagaaaatgtcatggagatgaaggaccgagctaatgaaataaaggatggtgaggagatgatggcagatggcgatggaaaaaaagatggtgagaagttgatcgtgagctgcagcaaacaggtggacattgatcaggttatgggaactgatggttgcaaaaagcacattgaccagattatggcaactggtgattgctctgacaatatgcattctgatatgcattgcaaggaaggtgggtgtgttaatccttcttcggctgaccctgaacaaaaatgtgatggcaattttccagatatagaaaatacttctatgcagagaactgatgtagtcttcactatgaatgagactgaacaatcaagcagtcagactagccacaaggaacagtgtatggatttgaaaagcttagaaccggagtcctcatctttgaataaccaacaacatgattcatctgtccaatataatgattgtcataacgtggatataaccgttaaaggagcaagtgcaccactgagttgtggcgattctgtgtcttgcaatgcaactaacaatgttgaagctcaacctgttggtggtgctgaagaagttgtgtcgagtagccttccatcagatgcacaaaaaaccttgctgggtgcaaaagataatgaagatgccatcacaaagaatcagggcaggaggaagcgaatgaagatggttggtaaggcacagctagtgcaaggtaaccaaaataagcagaaagaggacgagacaaaggttttcagagctgcattgagaagaattcttataagcaaatctccacctgtattgacgattaacttgaacagattcagccaggattctcatggtcgatataagaaactgaaagggcatgtgcgctttaatgagatgcttgatatacaaccattcatggacccaaggccataagcctacttactgaaacagaagagtaaaaggaataaatgatacatcatgatgtacttgtgaaaat

SEQ ID NO: 26759 - DNA, 3398 bp, Zea Mays
atttgcattcaagcttatttacggtgatgtcatcgatttgtttatgcaagtgctgatctaatttcaaagtccgacaatatgtacggtcgtatatgagccgaactcggaggggagggaggggactgaccgagcgagaatcggagagccctttcggctttggctcttttagtagaagtagagatactcaggttcagttcagcacgcgtgcgctgtctccctctctcttcgcgacgactgtgcgaccgccgccgccgacctacgccaggttccccgatcttcgttgggcgcttcgccggcgacgagcacccatcaggtgtatatttgtaatcctatgccctttactgggtccgcccctggttgattctagccctgttcaggagtgatggggaagaacgagaaggctaagcgcaagaaccctcggaaagcgcatgaacgggatcttccagcctcgtcctcggaggttggacctggtgatgcagcatcgcaggatgcaagccactcagcagaggaagcagctgcttcggctaatggccgggagcattgcggccactatggccgtgacaatgcccacttagataaggtcctcctggagatcttgtcttccaagcacgttgcttcatgtgagcactgccgagaagatgcaccaagaaagaaagggggtgctggtagcagggagaaagggggtaagcagaagaagaaaggaggcgcctccaaaggcgctactgccaaggcacaggcaaaggcagacacaagtcatacatgggtctgcttggactgtggtcggcatttttgtggtggtgcagcagatgataccaagccctatggccatgccagacggcatgctaagcaggaccggcattggtgggccgcaaggtatgatgacccaacagttgcttattgtttgtcatgtgaaaaggaggtgtcagttgagatgcccaaattagagacagttgttgcaccagcagtggaagataaggtggccggtgcagcggatactgatttatgtggtttggttaacccggatgctaatgtgatcaaaggacttccaaatctgggaaatacatgcttcttcaatgcagtgctgcagagcatcctcgcggttgataggttgcgcaggaagatgttaggaccagatgttcctacaggagcccttgctatgtcactgaagaagctttttgcagagacaagtgcttcaaaccatgcaggaggcatgctaagcccgaagaacctcttctcaagcatttgctcaaaatatccacagttcaggggctaccagatgcaggatagccatgaattgctccgttgttttcttgatggtttacgcatggaggaaactgaagcacggaagctagcagaggaagcttcagatgcaggtgttcccacaattgtggactccatttttggtggtcagctatctagtactgtgtccagcacagaatgctcacacagttccgttaaacatgatcaattccttgacctctcactaccagttccatcaaggagacctccaaccaagagtgtttcatcaccaccagttaagaggaccaaacagtccatacgagataggaacaaaaaccgcagatacgggaaggttccagctcgagcatctccttcagtagagagtaacaaagaacaagttcattcaattgctgagcgcaattcccaaattcctggttcagaacttgaacaggtagtcagcgaaaaagatgctgagccctctggatgcagtgagtcatgtggttctgtgcctaatcaagaacaaaatgccactacaaatgtggagaatagcatctgctggttggattatgtcgctgatgcggatgaaacaaaatctgagattcttgattctgcagattctactgaaacaggacaaatttgggaatgcagggatgctgcacatggtcccttgcaccctcaggatgatgccctacccaaagagcagatcttgggttctgagcactcaggcgaaaacactgttgatgatgatgcctccttacagactgttatcttacttccttacaaagaatttggtactactgccaaggaaagggatgaagccatagaaaatccatataattcagagtgtacagttcctcctttagttgtttctccagtaagagaaaataatacacaacctgaatattgtggagatgtggagcaagatgactatgttggtcttggtgatatgttcaatgaaccagaagttacttctgaagtcaagaaagaagctggtaaagtagaagatattgatgtaatggcttggagtagtaacagtgctgatgatgaggtagatgatagtaatgctcctgtatcagttgagggatgcttggctgtgtatactgaaccagagctgctttctgaaccatggctttgtgagcactgtactaatgctgcacgcataaactctaatgaaagagaaaatgtcatggagatgaaggaccgagctaatgaaataaaggatggtgaggagatgatggcagatggcgatggaaaaaaagatggtgagaagttgatcgtgagctgcagcaaacaggtggacattgatcaggttatgggaactgatggttgcaaaaagcacattgaccagattatggcaactggtgattgctctgacaatatgcattctgatatgcattgcaaggaaggtgggtgtgttaatccttcttcggctgaccctgaacaaaaatgtgatggcaattttccagatatagaaaatacttctatgcagagaactgatgtagtcttcactatgaatgagactgaacaatcaagcagtcagactagccacaaggaacagtgtatggatttgaaaagcttagaaccggagtcctcatctttgaataaccaacaacatgattcatctgtccaatataatgattgtcataacgtggatataaccgttaaaggagcaagtgcaccactgagttgtggcgattctgtgtcttgcaatgcaactaacaatgttgaagctcaacctgttggtggtgctgaagaagttgtgtcgagtagccttccatcagatgcacaaaaaaccttgctgggtgcaaaagataatgaagatgccatcacaaagaatcagggcaggaggaagcgaatgaagatggttggtaaggcacagctagtgcaaggtaaccaaaataagcagaaagaggacgagacaaaggttttcagagctgcattgagaagaattcttataagcaaatctccacctgtattgacgattaacttgaacagattcagccaggattctcatggtcgatataagaaactgaaagggcatgtgcgctttaatgagatgcttgatatacaaccattcatggacccaaggccataagcctacttactgaaacagaagagtaaaaggaataaatgatacatcatgatgtacttgtgaaaat

SEQ ID NO: 26760 - DNA, 1415 bp, Zea Mays
ctcctctatataaacacaagcgaacggcggcacctgacgccccactaacagactgcagcttacttgtgaggccgagatactccagcaccatacgtccataccggtgcgggcggggagcccggggggtaggtctacgtagtcgtgggacgacgatgatagggtggggcgacgtgtacaaggtggtggcggccatggcgccgctctacttcgcgctggggctcggttacggctcggtgcggtggtggaagctgttctcgccggaccagtgcgatgccgtgaaccgcctcgtggcctacttcgccgtgcccttcttcgccttcgacttcgccgcgcgcatcgaccccttcgcgctcagctaccgggtcctggccgctgacgcgctgtccaagcttgccgtcgcgctcgctctcgctgcctgggccaccgcagcagcgtccgcgtccgcgcgccgtggcggcggcggcaagggcaaggacagagccctgtcgtggtgcatcacggggttctcgctcgccacgctcaacaacacgctcgtcgtgggcgtgccgctcctggacgccatgtacggcaagtgggcgcgcgatctcatcgtgcagatctccgtggtgcagatcatcgtctacttccccgctttgctgctcgcgttggaggccaggcgcgccggcaagctggccgtcgtcgcggaggaagctgcaggtgacgctgacgaaagcggcggcggcggctcgggtggcgggacgacggcggctcagtcgttatggccgctggtcacagcggtctggaagaaggtggcgaggaacccgaacgtctacgcgggcattcttggcgtctcgtgggcttgcgtcaccaacaggtggcacatcgagacgccgagcatcatcgagggctccgtgctcgtcatgtccaagacaggcgttggcctctccatgtttagcatggggctgttcatggcgctgcaggagaaggtcatcgtgtgcggcgcctggccaaccgtgctcggcatggcgctgcggttcgtggccgggccggccgccaccgccgccggggccgtggctctcggcctccgcggcgacgtcctgcgcctcgccgtcatgcaggccgcgctcccccagtccatcaccacgttcgtgttcgccagggagtacggcctgcacccggagggttatcttcgggacgctggcgtcgttgcccgtgctcatcgtctactacattgttctaggcttgatacggtgttagttaattagccatgaaacgagtagagttaccttcttttgtcagtgatgtaccccttattagtcgtcgtcagcaaacaattagaatattagctgcccatcaatgcaagcttgtgtgtttgctcttctgtaacaaataattaatggccactgtgcctgattccgggagggcagcgccagctt

SEQ ID NO: 26761 - DNA, 1563 bp, Zea Mays
gattcgaagcagcctctccacatttgatgggggaaggcttgcctcagtttatcccttcctcagacccctggtacggggtctgtccttatcttccctagaggggaatctatagtcaatgcatcagatgtcattattttggagggcattttagtgttccatgaccagagagttcgcaatctgatggacatgaaaatttttgtagacacagatgctgacattaggcttgctcgacgaatcagacgtgatacagttgaaagaggaagagatatcagctccgtgcttgaccaatatgggaggtttgtgaagccagcgttcgatgattttgttttgccttcaaagaagtatgctgacgtgatcattcctcgaggtggtgataaccatgtagcagttgatctgattgttcaacatatccgtacaaaacttggtcagcatgacttgtgcaaaatctatccaaatgttcatgttgttcaatcaacttttcagatccgaggaatgcatactcttatccgtgatagggacatcaccacacctgactttgtattttattcagatcgattgatccgtttggtagtggagcatggtcttggacatttgccatttacagaaaagcaggttattaccccaacaggatctgtttatatgggagttgacttttgtaagaagctctgtggagtctctattgtgcgaagtggtgagagtatggagaacgcattgcgtgcttgttgtaaaggaataaaaattgggaaaattctaattcatcgtgttggagacaatggacaacagcttgtttatcacaaactgcccatggatattgctgaacgacatgttctacttttggatccggtgcttggtacaggcaactcagtagcccaagcaattgaccttcttataagaaaaggtgttcctgaggatcggatcatttttctcaatctcatctcggctcctgaagggattcagtgtatctgcaagcgatttccttcgctgaagattgttacatctgaaatcgattatggtctgaacgaggaattcagggtgatcccaggactgggagaatatggcgaccgctacttcggcacagacaattgatggatcataccactctatggctgtgtgaagatctcacttggtccctggatagggatggtatcttgcaagtaatatttaatatggaggcgtaattgtgtttaatagtcggcatgccttagtaacatgtagaaccttctgcataaagcttgaccaaggacagcgggatgctagagaaggacctgtgaacggagaacgtggtgtgtgttttgtcttgtacgggtgcagaaacattgatgttttcaaataagtgtgtttgatccaaatactttacggtgaagtcatgagattaaatctgcaaagcactttaactctgttgttctattgggtttttaattccaacctacatcaacttgctcaggataaaaggctttattgtagtcattgatgcttacaactcttttatgttctttgctgatcaaacagcttgggacttgggtccgctagtttggattaagctgtcggtgctgtctgttgaag

SEQ ID NO: 26762 - DNA, 2090 bp, Zea Mays
gtacacaagctcgcctcgcaccagaaacccgcgaatcaatcccgaatcccgatcgaccggcggcgcgggaggcgatgccggacaaggcggtggacgacgtcatggaggccgcggtgggggcccacttcagcggcctccgcctcgaggcgctgcgcctctccacctctgcgccctcttccccttcctcctcccccgccgccgcggcgcacacgcactccaacggagccgtctacgccaacggcaccaccgagcttccctctcctgccgctgcccggcagccattcgtcatcggggtttctggagggacggcgtcggggaagacgacggtgtgcgacatgatcatccagcagctgcacgaccaccgtgtcgtgctcgttaaccaggattcgttttaccgtggccttactgctgaagagtctgcacatgcacaagactataattttgatcaccctgatgcatttgatacagagcaacttctagaatgcatggggcagctgaaatgtgctcaacctgtaaatgttcctatatatgatttcaagaagcatcgacggtgttctgaaagctttagaaaggtcaatgcatcagatgtcattattttggagggcattttagtgttccatgaccagagagttcgcaatctgatggacatgaaaatttttgtagacacagatgctgacattaggcttgctcgacgaatcagacgtgatacagttgaaagaggaagagatatcagctccgtgcttgaccaatatgggaggtttgtgaagccagcgttcgatgattttgttttgccttcaaagaagtatgctgacgtgatcattcctcgaggtggtgataaccatgtagcagttgatctgattgttcaacatatccgtacaaaacttggtcagcatgacttgtgcaaaatctatccaaatgttcatgttgttcaatcaacttttcagatccgaggaatgcatactcttatccgtgatagggacatcaccacacctgactttgtattttattcagatcgattgatccgtttggtagtggagcatggtcttggacatttgccatttacagaaaagcaggttattaccccaacaggatctgtttatatgggagttgacttttgtaagaagctctgtggagtctctattgtgcgaagtggtgagagtatggagaacgcattgcgtgcttgttgtaaaggaataaaaattgggaaaattctaattcatcgtgttggagacaatggacaacagagggagtatgcttaaaatgatcgagttaatcacgatggataactattataaactttctgcatctagcttgtttatcacaaactgcccatggatattgctgaacgacatgttctacttttggatccggtgcttggtacaggcaactcagtagcccaagcaattgaccttcttataagaaaaggtgttcctgaggatcggatcatttttctcaatctcatctcggctcctgaagggattcagtgtatctgcaagcgatttccttcgctgaagattgttacatctgaaatcgattatggtctgaacgaggaattcagggtgatcccaggactgggagaatatggcgaccgctacttcggcacagacaattgatggatcataccactctatggctgtgtgaagatctcacttggtccctggatagggatggtatcttgcaagtaatatttaatatggaggcgtaattgtgtttaatagtcggcatgccttagtaacatgtagaaccttctgcataaagcttgaccaaggacagcgggatgctagagaaggacctgtgaacggagaacgtggtgtgtgttttgtcttgtacgggtgcagaaacattgatgttttcaaataagtgtgtttgatccaaatactttacggtgaagtcatgagattaaatctgcaaagcactttaactctgttgttctattgggtttttaattccaacctacatcaacttgctcaggataaaaggctttattgtagtcattgatgcttacaactcttttatgttctttgctgatcaaacagcttgggacttgggtccgctagtttggattaagctgtcggtgctgtctgttgaag

SEQ ID NO: 26763 - DNA, 2015 bp, Zea Mays
gtacacaagctcgcctcgcaccagaaacccgcgaatcaatcccgaatcccgatcgaccggcggcgcgggaggcgatgccggacaaggcggtggacgacgtcatggaggccgcggtgggggcccacttcagcggcctccgcctcgaggcgctgcgcctctccacctctgcgccctcttccccttcctcctcccccgccgccgcggcgcacacgcactccaacggagccgtctacgccaacggcaccaccgagcttccctctcctgccgctgcccggcagccattcgtcatcggggtttctggagggacggcgtcggggaagacgacggtgtgcgacatgatcatccagcagctgcacgaccaccgtgtcgtgctcgttaaccaggattcgttttaccgtggccttactgctgaagagtctgcacatgcacaagactataattttgatcaccctgatgcatttgatacagagcaacttctagaatgcatggggcagctgaaatgtgctcaacctgtaaatgttcctatatatgatttcaagaagcatcgacggtgttctgaaagctttagaaaggtcaatgcatcagatgtcattattttggagggcattttagtgttccatgaccagagagttcgcaatctgatggacatgaaaatttttgtagacacagatgctgacattaggcttgctcgacgaatcagacgtgatacagttgaaagaggaagagatatcagctccgtgcttgaccaatatgggaggtttgtgaagccagcgttcgatgattttgttttgccttcaaagaagtatgctgacgtgatcattcctcgaggtggtgataaccatgtagcagttgatctgattgttcaacatatccgtacaaaacttggtcagcatgacttgtgcaaaatctatccaaatgttcatgttgttcaatcaacttttcagatccgaggaatgcatactcttatccgtgatagggacatcaccacacctgactttgtattttattcagatcgattgatccgtttggtagtggagcatggtcttggacatttgccatttacagaaaagcaggttattaccccaacaggatctgtttatatgggagttgacttttgtaagaagctctgtggagtctctattgtgcgaagtggtgagagtatggagaacgcattgcgtgcttgttgtaaaggaataaaaattgggaaaattctaattcatcgtgttggagacaatggacaacagcttgtttatcacaaactgcccatggatattgctgaacgacatgttctacttttggatccggtgcttggtacagtagcccaagcaattgaccttcttataagaaaaggtgttcctgaggatcggatcatttttctcaatctcatctcggctcctgaagggattcagtgtatctgcaagcgatttccttcgctgaagattgttacatctgaaatcgattatggtctgaacgaggaattcagggtgatcccaggactgggagaatatggcgaccgctacttcggcacagacaattgatggatcataccactctatggctgtgtgaagatctcacttggtccctggatagggatggtatcttgcaagtaatatttaatatggaggcgtaattgtgtttaatagtcggcatgccttagtaacatgtagaaccttctgcataaagcttgaccaaggacagcgggatgctagagaaggacctgtgaacggagaacgtggtgtgtgttttgtcttgtacgggtgcagaaacattgatgttttcaaataagtgtgtttgatccaaatactttacggtgaagtcatgagattaaatctgcaaagcactttaactctgttgttctattgggtttttaattccaacctacatcaacttgctcaggataaaaggctttattgtagtcattgatgcttacaactcttttatgttctttgctgatcaaacagcttgggacttgggtccgctagtttggattaagctgtcggtgctgtctgttgaag

SEQ ID NO: 26764 - DNA, 593 bp, Zea Mays
gtacacaagctcgcctcgcaccagaaacccgcgaatcaatcccgaatcccgatcgaccggcggcgcgggaggcgatgccggacaaggcggtggacgacgtcatggaggccgcggtgggggcccacttcagcggcctccgcctcgaggcgctgcgcctctccacctctgcgccctcttccccttcctcctcccccgccgccgcggcgcacacgcactccaacggagccgtctacgccaacggcaccaccgagcttccctctcctgccgctgcccggcagccattcgtcatcggggtttctggagggacggcgtcggggaagacgacggtgtgcgacatgatcatccagcagctgcacgaccaccgtgtcgtgctcgttaaccaggattcgttttaccgtggccttactgctgaagagtctgcacatgcacaagactataattttgatcaccctgatgcatttgatacagagcaacttctagaatgcatggggcagctgaaatgtgctcaacctgtaaatgttcctatatatgatttcaagaagcatcgacggtgttctgaaagctttagaaagagcatttgcaactttattttt

SEQ ID NO: 26765 - DNA, 863 bp, Zea Mays
atgagtccgtgaatgccgaagaaacaagagggctgacaaatgtgtactggcatcttctggctttcaaggtgatattaaggctctgcagaagaacctagctgccagagaattgctgtaccaacaccagcataataaaaggatgagctgccccgccatggcacagctcctctccaataccctgtactacaagcgattcttcccatattacgccttcaatgtgctcggtgggcttgacagcgaggggaaaggatgcgttttcacctatgatgcagtaggttcctatgagagaaccggttacagtgctcagggaacgggatctactttgatcatgccagtcctggacaatcaactaaaatcaccaagtcctctattactccctgtcagggatgctgtcacaccattgtcggagtcagaggccatcgatctagttaaggacgtgttcgcatctgcaactgagagagacatctacactggagacaagttggaaattgtagtcattaacaaggccggtactatgcgcgagtatatcgacctgagaaaggattaagccaacacttcagttgtgctgcagctgtcatttgctttgaactttttttcctagtctggtgatttatgtctaaagctgttgcttcataggaacacttgtgtttacttgcatatgtaatgtacggtatgtaccaggattcagtgagttttttttctgttgaaacaaattgcttggatactgaaacactgtatttattgcctgaattgtctattttagttttcgtatttggtaatttagggaccaaaatagaataaaatagagggactaaacattagtccctagaaaccaaacacctctattaaaattatttggtttc

SEQ ID NO: 26766 - DNA, 929 bp, Zea Mays
cttttttgtgtgcccagttttagggtttttgctctgcaaacttgttttatcctttgcttgagtgcccatagatgcacaacaagaaccataattaaaggctgacaaatgtgtactggcatcttctggctttcaaggtgatattaaggctctgcagaagaacctagctgccagagaattgctgtaccaacaccagcataataaaaggatgagctgccccgccatggcacagctcctctccaataccctgtactacaagcgattcttcccatattacgccttcaatgtgctcggtgggcttgacagcgaggggaaaggatgcgttttcacctatgatgcagtaggttcctatgagagaaccggttacagtgctcagggaacgggatctactttgatcatgccagtcctggacaatcaactaaaatcaccaagtcctctattactccctgtcagggatgctgtcacaccattgtcggagtcagaggccatcgatctagttaaggacgtgttcgcatctgcaactgagagagacatctacactggagacaagttggaaattgtagtcattaacaaggccggtactatgcgcgagtatatcgacctgagaaaggattaagccaacacttcagttgtgctgcagctgtcatttgctttgaactttttttcctagtctggtgatttatgtctaaagctgttgcttcataggaacacttgtgtttacttgcatatgtaatgtacggtatgtaccaggattcagtgagttttttttctgttgaaacaaattgcttggatactgaaacactgtatttattgcctgaattgtctattttagttttcgtatttggtaatttagggaccaaaatagaataaaatagagggactaaacattagtccctagaaaccaaacacctctattaaaattatttggtttc

SEQ ID NO: 26767 - DNA, 1157 bp, Zea Mays
agaggaacccaaaccacctcggccggtcggcccacgggccacgacccaaaaaaggatcaaggtgggagaaacaaaacacaaggcggcgtccgcagcttccccactccacgttccgtgtttccgactccggtgactccaccaccagcaacccgtgcagcgagcgcactccgaccatcgccatgtcgaggcgcggcgactgggtctacgagaacaacggacctgcgtggccatcgccggcgctgattactgtgtcgtcgctgcggacacccgcctctctgtaggatacagtatcctcacgcgtgatcactccaagatctgcgacctggctgacaaatgtgtactggcatcttctggctttcaaggtgatattaaggctctgcagaagaacctagctgccagagaattgctgtaccaacaccagcataataaaaggatgagctgccccgccatggcacagctcctctccaataccctgtactacaagcgattcttcccatattacgccttcaatgtgctcggtgggcttgacagcgaggggaaaggatgcgttttcacctatgatgcagtaggttcctatgagagaaccggttacagtgctcagggaacgggatctactttgatcatgccagtcctggacaatcaactaaaatcaccaagtcctctattactccctgtcagggatgctgtcacaccattgtcggagtcagaggccatcgatctagttaaggacgtgttcgcatctgcaactgagagagacatctacactggagacaagttggaaattgtagtcattaacaaggccggtactatgcgcgagtatatcgacctgagaaaggattaagccaacacttcagttgtgctgcagctgtcatttgctttgaactttttttcctagtctggtgatttatgtctaaagctgttgcttcataggaacacttgtgtttacttgcatatgtaatgtacggtatgtaccaggattcagtgagttttttttctgttgaaacaaattgcttggatactgaaacactgtatttattgcctgaattgtctattttagttttcgtatttggtaatttagggaccaaaatagaataaaatagagggactaaacattagtccctagaaaccaaacacctctattaaaattatttggtttc

SEQ ID NO: 26768 - DNA, 238 bp, Zea Mays
ggccgattgaaggggtgggtgttgccgatggtggggcgaggctggttggtggcaagggagatatggggcaaggttattgggggggaggggaggaggactccccttccctggagagcgcggacggatcgagagccggtgcagcgatccggggcggactcctcgccttccatggagagcgcggatgggattctggggagagagcagggattgcggcgatccaggcggaggactcgccatg

SEQ ID NO: 26769 - DNA, 1559 bp, Zea Mays
cgcgcttctatcttacaatatcataactacatatgtatgtgtgtacgttggttgtacgtacccggttgaagaccatgaagccgaggtcgagctgcacggtgctggcggcgtcggcgtcctcgacggccacggtcctggcgtgcccaccgaggcccacccaggcacccacctaccctgtgctcatttgcggagccttccaagctagccacttcactggtcactccattagcagatgcgctctgcatcttctcccctctggaacacactcccacacagaactagagctccaaggccatggagaaatggagaagacgcaggcacttgctgcttgctgttgcagccgtggccctggtggcagcaataacgctgccgtccgcggaggcgaagctgtccccggactactaccggtcgacgtgcccggacgtggaggcaatcgtgcaggcagtggtggccaagaaggtgaatgagaccttcgtcacagtcccggccacgctcaggctcttcttccacgactgcttcgtcgagggctgtgatgcgtcggtcatcatcgcgtcccgcgacaacgacgccgagaaggacgcgcccgacaacgtgtccctcgctggcgacggcttcgacaccgtggtgcgcgccaaggccgaggtcgagaagaagtgccccggcgtggtctcctgcgccgatatcctcgccatcgccgccagggacgtcgtcaccatgtcgtccggcccccactggaccgtccagcttggccggcttgacgggctcgtctccaaggccggcaacgtcgcgggcaagttgccgggacccaacatgcgcgtcaaggacctcgccgccctgttcgccaagcacaacctcaccacgctcgacatggtcgcgctctcgggagcgcacaccgtcgggttcgcgcactgcacccgcttcgcggaccgcctctaccaccacggcgtcggcgacagcgatggcgcgtcggtggacccgtcgtacaaccctgcgtacgcgcggcagctaatggacgcctgcccgcctggcgtcggcgcagacatcgccgtcaatatggacccaatcacaccgaccgccttcgataacgcctactacgccaacctcgccggcggcctgggattgttcacctcggaccaggcgctgtacagcgacggcgcgtcgcaaccggcggtgagggacttcgctaagaaccagacccgcttcttcgaggcgttcaaggacgccatggtcaagctgggcagtgttggggtgaagaccggccggcacggggagatcaggagtgactgcactgcattcaactagtagatcgaccacccattcttttgaagaaaaaaaaaacagccgcgtacctgagcgaactcaaccacgtccacgtgacagcacagaactcaatccttagagctaggatgaaaacggacgaaatcggtctaaaaaaccgctctcccgtttttatttttatattttatttcaggatagaaacgaactgttagaaacgagatcgaaaacggaactagcaggatgacggaaacgaacctaagcgaacggaacaaattgataac

SEQ ID NO: 26770 - DNA, 1972 bp, Zea Mays
gcaccgcacaggccctctctgccccctcgccaatcgccatggccatgaccgtggcggtcacctggctcccgtcgaccgcctcccgcgggagaaccttagccgctccgctccctccgttcgcgggccctatctccatccacatgccactgcgggcgccgcctcctattcccttccccacaagccgcgcctcgccgtcgcctccgcacagttcgatttctccagagctgttcaaacggtatggcgggtcggtaacgatgccgtggaggccggaagtaatcttgtcccaggttcagttccacgaccaattgctaggataggtgttgccgttgctgctgtgtcggttgcccttttccttcttaaatccattgtgtccactgcattgtttgttctggcaatgatgggcctcatatatctcggcttcctggctatgaacccaaaggaggcctccgactctaggttggatgaagcaacgggcgacccatcggaagaccaaattgaagaggcccgaaggataatggagaaatacaagtaatgaacctgcacaaaggtgttgtactctcagaggcccacccaggcacccacctaccctgtgctcatttgcggagccttccaagctagccacttcactggtcactccattagcagatgcgctctgcatcttctcccctctggaacacactcccacacagaactagagctccaaggccatggagaaatggagaagacgcaggcacttgctgcttgctgttgcagccgtggccctggtggcagcaataacgctgccgtccgcggaggcgaagctgtccccggactactaccggtcgacgtgcccggacgtggaggcaatcgtgcaggcagtggtggccaagaaggtgaatgagaccttcgtcacagtcccggccacgctcaggctcttcttccacgactgcttcgtcgagggctgtgatgcgtcggtcatcatcgcgtcccgcgacaacgacgccgagaaggacgcgcccgacaacgtgtccctcgctggcgacggcttcgacaccgtggtgcgcgccaaggccgaggtcgagaagaagtgccccggcgtggtctcctgcgccgatatcctcgccatcgccgccagggacgtcgtcaccatgtcgtccggcccccactggaccgtccagcttggccggcttgacgggctcgtctccaaggccggcaacgtcgcgggcaagttgccgggacccaacatgcgcgtcaaggacctcgccgccctgttcgccaagcacaacctcaccacgctcgacatggtcgcgctctcgggagcgcacaccgtcgggttcgcgcactgcacccgcttcgcggaccgcctctaccaccacggcgtcggcgacagcgatggcgcgtcggtggacccgtcgtacaaccctgcgtacgcgcggcagctaatggacgcctgcccgcctggcgtcggcgcagacatcgccgtcaatatggacccaatcacaccgaccgccttcgataacgcctactacgccaacctcgccggcggcctgggattgttcacctcggaccaggcgctgtacagcgacggcgcgtcgcaaccggcggtgagggacttcgctaagaaccagacccgcttcttcgaggcgttcaaggacgccatggtcaagctgggcagtgttggggtgaagaccggccggcacggggagatcaggagtgactgcactgcattcaactagtagatcgaccacccattcttttgaagaaaaaaaaaacagccgcgtacctgagcgaactcaaccacgtccacgtgacagcacagaactcaatccttagagctaggatgaaaacggacgaaatcggtctaaaaaaccgctctcccgtttttatttttatattttatttcaggatagaaacgaactgttagaaacgagatcgaaaacggaactagcaggatgacggaaacgaacctaagcgaacggaacaaattgataac

SEQ ID NO: 26771 - DNA, 1674 bp, Zea Mays
gttgatagcccagcggctcagccgtatcccatccgttcggctcctttcccgtccgttctgaccttcgggcaccggcgcaccgcacaggccctctctgccccctcgccaatcgccatggccatgaccgtggcggtcacctggctcccgtcgaccgcctcccgcgggagaaccttagccgctccgctccctccgttcgcgggccctatctccatccacatgccactgcgggcgccgcctcctattcccttccccacaagccgcgcctcgccgtcgcctccgcacagttcgatttctccagagctgttcaaacggtatggcgggtcggtaacgatgccgtggaggccggaagtaatcttgtcccaggttcagttccacgaccaattgctaggataggtgttgccgttgctgctgtgtcggttgcccttttccttcttaaatccattgtgtccactgcattgtttgttctggcaatgatgggcctcatatatctcggcttcctggctatgaacccaaaggaggcctccgactctaggttggatgaagcaacgggcgacccatcggaagaccaaattgaagaggcccgaaggataatggagaaatacaagtaatgaacctgcacaaaggtgttgtactctcagagggctgtgatgcgtcggtcatcatcgcgtcccgcgacaacgacgccgagaaggacgcgcccgacaacgtgtccctcgctggcgacggcttcgacaccgtggtgcgcgccaaggccgaggtcgagaagaagtgccccggcgtggtctcctgcgccgatatcctcgccatcgccgccagggacgtcgtcaccatgtcgtccggcccccactggaccgtccagcttggccggcttgacgggctcgtctccaaggccggcaacgtcgcgggcaagttgccgggacccaacatgcgcgtcaaggacctcgccgccctgttcgccaagcacaacctcaccacgctcgacatggtcgcgctctcgggagcgcacaccgtcgggttcgcgcactgcacccgcttcgcggaccgcctctaccaccacggcgtcggcgacagcgatggcgcgtcggtggacccgtcgtacaaccctgcgtacgcgcggcagctaatggacgcctgcccgcctggcgtcggcgcagacatcgccgtcaatatggacccaatcacaccgaccgccttcgataacgcctactacgccaacctcgccggcggcctgggattgttcacctcggaccaggcgctgtacagcgacggcgcgtcgcaaccggcggtgagggacttcgctaagaaccagacccgcttcttcgaggcgttcaaggacgccatggtcaagctgggcagtgttggggtgaagaccggccggcacggggagatcaggagtgactgcactgcattcaactagtagatcgaccacccattcttttgaagaaaaaaaaaacagccgcgtacctgagcgaactcaaccacgtccacgtgacagcacagaactcaatccttagagctaggatgaaaacggacgaaatcggtctaaaaaaccgctctcccgtttttatttttatattttatttcaggatagaaacgaactgttagaaacgagatcgaaaacggaactagcaggatgacggaaacgaacctaagcgaacggaacaaattgataac

SEQ ID NO: 26772 - DNA, 1364 bp, Zea Mays
gcaccgcacaggccctctctgccccctcgccaatcgccatggccatgaccgtggcggtcacctggctcccgtcgaccgcctcccgcgggagaaccttagccgctccgctccctccgttcgcgggccctatctccatccacatgccactgcgggcgccgcctcctattcccttccccacaagccgcgcctcgccgtcgcctccgcacagttcgatttctccagagctgttcaaacggtatggcgggtcggtaacgatgccgtggaggccggaagtaatcttgtcccaggttcagttccacgaccaattgctaggataggtgttgccgttgctgctgtgtcggttgcccttttccttcttaaatccattgtgtccactgcattgtttgttctggcaatgatgggcctcatatatctcggcttcctggctatgaacccaaaggaggcctccgactctaggttggatgaagcaacgggcgacccatcggaagaccaaattgaagaggcccgaaggataatggagaaatacaagtaatgaacctgcacaaaggtgttgtactctcagagactttcagatttttgtcaagtgtgaactgtcaagaagtagaactcaagactgcagcgagtagcgagtagcgacaacataatgtcttctccaaatgaagctccattttttgtggctggtgagtatgacccgaagagcgatcctacccgaaagccacggaagtctactgatccagggtggaagtatggattttggccagatcttcaaaataaagataaggtggaatgcaccctatgtggtcaggttgttagtggaatgcaccctatgtgtgatcttacatgggaccttgtggataatgccattggagcatcacaagcactccgtggccgaaacttaccaagaagagctcataatgtgtattcaagaagaagttctgttgctgcacaacatatgtcagaggctgaagaggaaggtgaagatgaagaagatgttccacatgatgatgcagaaatcacagattgtgaagatgaatctaatggtggcaatgatggtgaagaaggggaggcacccaatatcccaggagagtttgatgatgattttgagcgacgggagagtagctattgctagattgcattagcaatttagcatatttgctgcattacaaactgcagctagttactattaattatgcaattacaaactatctatgtggctatttcagatttggtattgtgctgttttaaattttgtgacttgctattgtgaatttgtgatgatttctagtttatgagctgtaacagctgtttggttgcttggtatttggctagtaaggcgtcgcctaggcgcccgcctaagtcgccta

SEQ ID NO: 26773 - DNA, 1160 bp, Zea Mays
ccagagtgcgtccaactcggcgcgagtcatccttatagaatcacctctccgcctccaagcgccagtcgccgcctctccccactccctctcgtcgccgtcctctcccgttcgcaacgccacgctccccaccgccgaaatggccccgaagcgaggtggcagggcaccggtgccggccaagaagaagacgtgacgaaccctctgttcgagaaaaggccgaagcagttcggcatcggcggcgcgttgcctcccaagaaggacctgcaccgattcgtcaagtggcccaaggtcgtgcgcatccagcgccagcgtcgcatcctcaagcagcgcctcaaggtgcctccggcgctcaaccagttcacccgcaccctcgacaagaacctcgctaccaacctgttcaagatgcttcttaagtaccggcccgaagacaaggctgccaagaaggagaggcttctgaagagggcccaggctgagaatgaaggaaaaactgttgaatccaagaaaccaattgttgtgaagtatggccttaaccatgtgacttacctcattgagcagaacaaggctcagctcgttgtcatcgctcatgatgtggatccgattgaactggttgtttggcttccagccctgtgcaggaagatggaggtcccatactgcattgttaaaggaaaggctcgccttggatcgatcgttcacaagaagactgcatcagtcttgtgtctgaccactgtcaagaacgaggacaagcttgagttcagcaagatcttggaggctattaaggcgaacttcaatgacaagtttgatgaagtcaggaagaagtggggaggtggcatcatgggctccaagtcgcaggccaagaccaaggccagggaaaagttgctggccaaggaggccgcccagcggatgacgtagattatccactgttgagtttgcccctgtagtttgacgtggaagaaccgatgagcattgtgcactcgtattgtgtttttttgaatctactttcatatgtttctgtccatcagaccgtgtttagaaactttggaagacagttctacagtgtttgtgcaatgtcttatatcgaagtatatcatttgcgcctcaggcagttttgcttttatttgcctaagcaattggtcccgaattcagcattcgtgctgttagtcatg

SEQ ID NO: 26774 - DNA, 1161 bp, Zea Mays
ccagagtgcgtccaactcggcgcgagtcatccttatagaatcacctctccgcctccaagcgccagtcgccgcctctccccactccctctcgtcgccgtcctctcccgttcgcaacgccacgctccccaccgccgaaatggccccgaagcgaggtggcagggcaccggtgccggccaagaagaagacggataaagtgacgaaccctctgttcgagaaaaggccgaagcagttcggcatcggcggcgcgttgcctcccaagaaggacctgcaccgattcgtcaagtggcccaaggtcgtgcgcatccagcgccagcgtcgcatcctcaagcagcgcctcaaggtgcctccggcgctcaaccagttcacccgcaccctcgacaagaacctcgctaccaacctgttcaagatgcttcttaagtaccggcccgaagacaaggctgccaagaaggagaggcttctgaagagggcccaggctgagaatgaaggaaaaactgttgaatccaagaaaccaattgttgtgaagtatggccttaaccatgtgacttacctcattgagcaggctcagctcgttgtcatcgctcatgatgtggatccgattgaactggttgtttggcttccagccctgtgcaggaagatggaggtcccatactgcattgttaaaggaaaggctcgccttggatcgatcgttcacaagaagactgcatcagtcttgtgtctgaccactgtcaagaacgaggacaagcttgagttcagcaagatcttggaggctattaaggcgaacttcaatgacaagtttgatgaagtcaggaagaagtggggaggtggcatcatgggctccaagtcgcaggccaagaccaaggccagggaaaagttgctggccaaggaggccgcccagcggatgacgtagattatccactgttgagtttgcccctgtagtttgacgtggaagaaccgatgagcattgtgcactcgtattgtgtttttttgaatctactttcatatgtttctgtccatcagaccgtgtttagaaactttggaagacagttctacagtgtttgtgcaatgtcttatatcgaagtatatcatttgcgcctcaggcagttttgcttttatttgcctaagcaattggtcccgaattcagcattcgtgctgttagtcatg

SEQ ID NO: 26775 - DNA, 1995 bp, Zea Mays
ctttttattcacctgtggggaatcaccatctgttgattgtttgaaacttaacttactagatggaatcagctttcttttactggccattgagcgtaatttcagcagaacctcctttcccccatcccttttctttcctgtttctccacccattctgttactctagattggccagttgggtgcaagctgatatcctcaaccaatatatgtaccagtccttcttctcaggttatagactgtggactctgtttacgagctattggggcttcttttgagatggtctacgacttgtgcacactgcacagttcccaggcaggcagtattgtgtttcattgagtttttcttgcaaggccggttcatatttggacctgatgtgagatccttgtttctcaccatattccttattcttgcaccagtggtggtcttctgcatatttgtggccagacatcttatcaatgactttcctgatcattggggagtttcagtcatggtcatagtgattgtcttcacaatatacgatttgacactgctccttcttacctctggtagagatcctggtatagtgcctcgtaacacccatcctcctgaacctgaagctattgatatgaacaatgatgctggaaatggtcagacaccacaacagttgcggttgccacggacaaaggatgttatcgtaaatgggaccattgtgaaagtcaagtactgtgacacctgcatgctgtacagaccacctcgatgctcacactgttctatctgtaataactgtgtggagcgctttgatcaccactgcccttgggttgggcagtgcataggattgattaaagacgcagagcagtcgacgttctggaaagcaatgttaaagaccccagcatcaatcgttctgatcatatactgcttcatctgtgtgtggtttgtgggtggtctgtctgtcttccatttctatctcatgagcactaaccagacaacctatgagaacttcagataccgctatgatcggcgggacaatccgtacaacagagggaccgtgaacaacttcatggagatattctgcacctcagtcgctccttccaaaaacaatttccgagctagggtcccagcagagcaaggtttacagcaagcacgtgcgccagcaaggggtttcatgagcccaaacatgggtaaacctattggggaacttgaattgggcaggaagccaatatcatgggatgaacctcggtcagcagctgatatcagagacttggaggttggtctaggcagcctactggacgagaaggaaggcagggtagcccatgcatccccggacctgagcagagaagcccttcctgagcttgtggaagggagggctggtacgcattcgaggcgatcaagctggggtcacagaagtgggacctcggcctccatggatagccttgctgcgcaaatggggaccgcagaatcaatggggctccattagcagtgtccatggtacaaccagtggagctcactagcaagccgctccacgtcttgatgcgtctctttgtgtaaacctgcctgataccaccaactaagaagcaacctttgcgtgctctgtgcgcctgtgcttttcactctacctaggatatacgtctgcagcgttttctttactcagcgccctgggagagcgcatcagttcttctgatgtgcttcccgtttggtgtcctaagcaaaaataacagaagtgccatttaactccttattagttgtttcttgtttggaccaaccactgtatatagatatatatcattgcaaattggaattgtctgcagaaagggtttgtcatgtttggctttcgcgcgtcctggtttcttcacgcccttcaaatttgcaccgtgttggaatggaatcgcatgggctttctattcacttgtgtgagcatgtcaactggtgccaggccgagtttacccacgggatgttgagcgcaatcatcccctgggtgcttgccaccaaaaatcatcaaaccgttttagaacaaaaaaaaaa

SEQ ID NO: 26776 - DNA, 2084 bp, Zea Mays
ctttttattcacctgtggggaatcaccatctgttgattgtttgaaacttaacttactagatggaatcagctttcttttactggccattgagcgtaatttcagcagaacctcctttcccccatcccttttctttcctgtttctccacccattctgttactctagattggccagttgggtgcaagctgatatcctcaaccaatatatgtaccagtccttcttctcaggttatagactgtggactctgtttacgagctattggggcttcttttgagatggtctacgacttgtgcacactgcacagttcccaggcaggcagtattgtgtttcatgagtttttcttgcaaggccggttcatatttggacctgatgtgagatccttgtttctcaccatattccttattcttgcaccagtggtggtcttctgcatatttgtggccagacatcttatcaatgactttcctgatcattggggagtttcagtcatggtcatagtgattgtcttcacaatatacgatttgacactgctccttcttacctctggtagagatcctggtatagtgcctcgtaacacccatcctcctgaacctgaagctattgatatgaacaatgatgctggaaatggtcagacaccacaacagttgcggttgccacggacaaaggatgttatcgtaaatgggaccattgtgaaagtcaagtactgtgacacctgcatgctgtacagaccacctcgatgctcacactgttctatctgtaataactgtgtggagcgctttgatcaccactgcccttgggttgggcagtgcataggattgcgcaattatcggttcttctatatgtttgtattctctacaacattactgtgtctctatgtatttggcttctgctttgtgtacattgtcaagattaaagacgcagagcagtcgacgttctggaaagcaatgttaaagaccccagcatcaatcgttctgatcatatactgcttcatctgtgtgtggtttgtgggtggtctgtctgtcttccatttctatctcatgagcactaaccagacaacctatgagaacttcagataccgctatgatcggcgggacaatccgtacaacagagggaccgtgaacaacttcatggagatattctgcacctcagtcgctccttccaaaaacaatttccgagctagggtcccagcagagcaaggtttacagcaagcacgtgcgccagcaaggggtttcatgagcccaaacatgggtaaacctattggggaacttgaattgggcaggaagccaatatcatgggatgaacctcggtcagcagctgatatcagagacttggaggttggtctaggcagcctactggacgagaaggaaggcagggtagcccatgcatccccggacctgagcagagaagcccttcctgagcttgtggaagggagggctggtacgcattcgaggcgatcaagctggggtcacagaagtgggacctcggcctccatggatagccttgctgcgcaaatggggaccgcagaatcaatggggctccattagcagtgtccatggtacaaccagtggagctcactagcaagccgctccacgtcttgatgcgtctctttgtgtaaacctgcctgataccaccaactaagaagcaacctttgcgtgctctgtgcgcctgtgcttttcactctacctaggatatacgtctgcagcgttttctttactcagcgccctgggagagcgcatcagttcttctgatgtgcttcccgtttggtgtcctaagcaaaaataacagaagtgccatttaactccttattagttgtttcttgtttggaccaaccactgtatatagatatatatcattgcaaattggaattgtctgcagaaagggtttgtcatgtttggctttcgcgcgtcctggtttcttcacgcccttcaaatttgcaccgtgttggaatggaatcgcatgggctttctattcacttgtgtgagcatgtcaactggtgccaggccgagtttacccacgggatgttgagcgcaatcatcccctgggtgcttgccaccaaaaatcatcaaaccgttttagaacaaaaaaaaaa

SEQ ID NO: 26777 - DNA, 2421 bp, Zea Mays
accgtgtacccccaggccgtgcgcgctcgcggaggcgcatttctgtcgcgagtgctcgaggacttgcctgctccgttttcttttcgcccacatccgccgttttgcctcgccgttctgccgcgccatcgcatcgtccgcgctccttctcatcgttcttcccccggtacggctcgacggcgggcgtgggcgctggagttgcggctccgaggccgaggcgccgggtggtgcgttgggtgcgctcggttcgggagatcccggactttgctgctcgcgcggtcagacagggagcgccggaggaggaggaggctgttcaagtgcaagctgtgctgaactaagggttctggcttcggactctgtgtacgcgccgcggcaggagggagctggagatgtacgggccgccgtcccgaggcggcgggggagccggcgctgccggagagcagccgagggtttaccaagtttggcatggaagcaacgtgagccctcgctctctctgtttctctagctcctgtttttggatttttgtgtgcttgtgaacagtgcgtctggatctgggcgtacggtgattaccaagggttttgtgagaagacggtagggtccctgacgcgattctgcacgagtggtgggaaaacttgatgctgcggctgtgcgttaggttcaggtgcctgtggagtttttcttgcaaggccggttcatatttggacctgatgtgagatccttgtttctcaccatattccttattcttgcaccagtggtggtcttctgcatatttgtggccagacatcttatcaatgactttcctgatcattggggagtttcagtcatggtcatagtgattgtcttcacaatatacgatttgacactgctccttcttacctctggtagagatcctggtatagtgcctcgtaacacccatcctcctgaacctgaagctattgatatgaacaatgatgctggaaatggtcagacaccacaacagttgcggttgccacggacaaaggatgttatcgtaaatgggaccattgtgaaagtcaagtactgtgacacctgcatgctgtacagaccacctcgatgctcacactgttctatctgtaataactgtgtggagcgctttgatcaccactgcccttgggttgggcagtgcataggattgcgcaattatcggttcttctatatgtttgtattctctacaacattactgtgtctctatgtatttggcttctgctttgtgtacattgtcaagattaaagacgcagagcagtcgacgttctggaaagcaatgttaaagaccccagcatcaatcgttctgatcatatactgcttcatctgtgtgtggtttgtgggtggtctgtctgtcttccatttctatctcatgagcactaaccagacaacctatgagaacttcagataccgctatgatcggcgggacaatccgtacaacagagggaccgtgaacaacttcatggagatattctgcacctcagtcgctccttccaaaaacaatttccgagctagggtcccagcagagcaaggtttacagcaagcacgtgcgccagcaaggggtttcatgagcccaaacatgggtaaacctattggggaacttgaattgggcaggaagccaatatcatgggatgaacctcggtcagcagctgatatcagagacttggaggttggtctaggcagcctactggacgagaaggaaggcagggtagcccatgcatccccggacctgagcagagaagcccttcctgagcttgtggaagggagggctggtacgcattcgaggcgatcaagctggggtcacagaagtgggacctcggcctccatggatagccttgctgcgcaaatggggaccgcagaatcaatggggctccattagcagtgtccatggtacaaccagtggagctcactagcaagccgctccacgtcttgatgcgtctctttgtgtaaacctgcctgataccaccaactaagaagcaacctttgcgtgctctgtgcgcctgtgcttttcactctacctaggatatacgtctgcagcgttttctttactcagcgccctgggagagcgcatcagttcttctgatgtgcttcccgtttggtgtcctaagcaaaaataacagaagtgccatttaactccttattagttgtttcttgtttggaccaaccactgtatatagatatatatcattgcaaattggaattgtctgcagaaagggtttgtcatgtttggctttcgcgcgtcctggtttcttcacgcccttcaaatttgcaccgtgttggaatggaatcgcatgggctttctattcacttgtgtgagcatgtcaactggtgccaggccgagtttacccacgggatgttgagcgcaatcatcccctgggtgcttgccaccaaaaatcatcaaaccgttttagaacaaaaaaaaaa

SEQ ID NO: 26778 - DNA, 1727 bp, Zea Mays
acccgacccgtgaccgtgagacagtgacgcgagcctgtgtgcggcccgctttcgttcgccgagtcaacaacaagaagccacgcgacgataacgcccagttcgtggaagattggaagaacactagagcgagaagcgatcagagcgaggcacggcgagggcgacgacagagccatgagttaccagaaggtcccggagtcctatccgccaccagggtactcgcagccgtacccaccgccccaggctccaccgcaggggccttactacccgccgccgcagcaaccacctccggggtaccagggctactttaacgacggccagcaaccctacggctatccgccgccgcagggtgggtattaccatcacggtcaccaccaccataacgaccaccatcaccatcatcatggtcaccaccaccaccaccacgaagatgatgactgctgccttggcttcttgaaaggatggctggccgctctttgctgctgctgcatgatggacgagtgctgctgctgctgcttctgacatacatgcacctgaagctcgctgtgtctgggcatcgtggcacggcaacatttgagtgattatggttgctggatagtgtttacttgaattttctctttgttattgttcgtaaataatctgaatagtacatcgtgttaataaaagggtatttgcagtgtttctttctgtgtgttctgagctgattggtcgtccatggaaaagacccggaatcctttcgtagatccctgtatcgttgaataacatatttgttttttttttcaataataccagttgtttccatcggatcatgagcgaggaatctaattcattcatagagcagattttctctaaaaaataagaagtaaaaagctgtgcagagatttttttttcttcggttgttatataatcacaaggtgcagcagcaagcagttccctgcattttatgagccttacctttttctccctcctgaatggaaggtaacagtgtcactcactgcatttcataacgtgctatctatcttgacaactctgcctactgcaggctgcagctgaaagaaatgaacagaacaaggggaaatagttgtccttggacaagaaacctcagccccattgcaccggatggtatggtcgaccgatcgaaagcgcgggatacactgctagctgcatctcgtcaggtccatccgtccatcctagggatcggtttcagataaggggcccgcccggactagccaaggagactgcctgtgatcgaggccacgaggcgagcaataaaacgtgcacaaggttttgcccgagccaagccaagccaagaagccacaggtgtagtaggtgacggagaggacttggtgtgggtaatggagccgtggttcatgctgattgttggggaccttcggcttccgaaggtcctcaaaaacataatttaacaatgtttctggagtaaaatacatgaacagatatcttcggactaggatcagaaccacagtatgaagcacaaagaacacgaaggttggtgcagagccgaagctatgagcaggagagcttcggcacgatagcagaaaaggaaaccgacttaaaaaggaaaaggctattcagacctcgatgggttactatagagtcattagcaaatgtaaagggcatgggtgtaattttacatgggctgagtcccgtgcctataaatagatgaataatgctcccgtactgttcacgctgacttgacatttgcttttgcg

SEQ ID NO: 26779 - DNA, 1791 bp, Zea Mays
ccacaatctaagccgtacccgacccgtgaccgtgagacagtgacgcgagcctgtgtgcggcccgctttcgttcgccgagtcaacaacaagaagccacgcgacgataacgcccagttcgtggaagattggaagaacactagagcgagaagcgatcagagcgaggcacggcgagggcgacgacagagccatgagttaccagaaggtcccggagtcctatccgccaccagggtactcgcagccgtacccaccgccccaggctccaccgcaggggccttactacccgccgccgcagcaaccacctccggggtaccagggctactttaacgacggccagcaaccctacggctatccgccgccgcagggtgggtattaccatcacggtcaccaccaccataacgaccaccatcaccatcatcatggtcaccaccaccaccaccacgaagatgatgactgctgccttggcttcttgaaaggatggctggccgctctttgctgctgctgcatgatggacgagtgctgctgctgctgcttctgacatacatgcacctgaagctcgctgtgtctgggcatcgtggcacggcaacatttgagtgattatggttgctggatagtgtttacttgaattttctctttgttattgttcgtaaataatctgaatagtacatcgtgttaataaaagggtatttgcagtgtttctttctgtgtgttctgagctgattggtcgtccatggaaaagacccggaatcctttcgtagatccctgtatcgttgaataacatatttgttttttttttcaataataccagttgtttccatcggatcatgagcgaggaatctaattcattcatagagcagattttctctaaaaaataagaagtaaaaagctgtgcagagatttttttttcttcggttgttatataatcacaaggtgcagcagcaagcagttccctgcattttatgagccttacctttttctccctcctgaatggaaggtaacagtgtcactcactgcatttcataacgtgctatctatcttgacaactctgcctactgcaggctgcagctgaaagaaatgaacagaacaaggggaaatagttgtccttggacaagaaacctcagccccattgcaccggatggtatggtcgaccgatcgaaagcgcgggatacactgctagctgcatctcgtcaggtccatccgtccatcctagattaactgaagaggagatgagcctagcatggaggatggaagccgctcagactagccaaggaggctgcctgcggggaccgcacgcggtggaggcggggccacgcaacgtccgcagcaggaggccacaggcagctcatccttggctaccgaagcagagcttccatcgccatgccaggtgtagtaggtgacggagaggacttggtgtgggtaatggagccgtggttcatgctgattgttggggaccttcggcttccgaaggtcctcaaaaacataatttaacaatgtttctggagtaaaatacatgaacagatatcttcggactaggatcagaaccacagtatgaagcacaaagaacacgaaggttggtgcagagccgaagctatgagcaggagagcttcggcacgatagcagaaaaggaaaccgacttaaaaaggaaaaggctattcagacctcgatgggttactatagagtcattagcaaatgtaaagggcatgggtgtaattttacatgggctgagtcccgtgcctataaatagatgaataatgctcccgtactgttcacgctgacttgacatttgcttttgcg

SEQ ID NO: 26780 - DNA, 1917 bp, Zea Mays
ccacaatctaagccgtacccgacccgtgaccgtgagacagtgacgcgagcctgtgtgcggcccgctttcgttcgccgagtcaacaacaagaagccacgcgacgataacgcccagttcgtggaagattggaagaacactagagcgagaagcgatcagagcgaggcacggcgagggcgacgacagagccatgagttaccagaaggtcccggagtcctatccgccaccagggtactcgcagccgtacccaccgccccaggctccaccgcaggggccttactacccgccgccgcagcaaccacctccggggtaccagggctactttaacgacggccagcaaccctacggctatccgccgccgcagggtgggtattaccatcacggtcaccaccaccataacgaccaccatcaccatcatcatggtcaccaccaccaccaccacgaagatgatgactgctgccttggcttcttgaaaggatggctggccgctctttgctgctgctgcatgatggacgagtgctgctgctgctgcttctgacatacatgcacctgaagctcgctgtgtctgggcatcgtggcacggcaacatttgagtgattatggttgctggatagtgtttacttgaattttctctttgttattgttcgtaaataatctgaatagtacatcgtgttaataaaagggtatttgcagtgtttctttctgtgtgttctgagctgattggtcgtccatggaaaagacccggaatcctttcgtagatccctgtatcgttgaataacatatttgttttttttttcaataataccagttgtttccatcggatcatgagcgaggaatctaattcattcatagagcagattttctctaaaaaataagaagtaaaaagctgtgcagagatttttttttcttcggttgttatataatcacaaggtgcagcagcaagcagttccctgcattttatgagccttacctttttctccctcctgaatggaaggtaacagtgtcactcactgcatttcataacgtgctatctatcttgacaactctgcctactgcaggctgcagctgaaagaaatgaacagaacaaggggaaatagttgtccttggacaagaaacctcagccccattgcaccggatggtatggtcgaccgatcgaaagcgcgggatacactgctagctgcatctcgtcaggtccatccgtccatcctagattaactgaagaggagatgagcctagcatggaggatggaagccgctcagactagccaaggaggctgcctgcggggaccgcacgcggtggaggcggggccacgcaacgtccgcagcaggaggccacaggcagctcatccttggctaccgaagcagagcttccatcgccatgccagggatcggtttcagataaggggcccgcccggactagccaaggagactgcctgtgatcgaggccacgaggcgagcaataaaacgtgcacaaggttttgcccgagccaagccaagccaagaagccacaggtgtagtaggtgacggagaggacttggtgtgggtaatggagccgtggttcatgctgattgttggggaccttcggcttccgaaggtcctcaaaaacataatttaacaatgtttctggagtaaaatacatgaacagatatcttcggactaggatcagaaccacagtatgaagcacaaagaacacgaaggttggtgcagagccgaagctatgagcaggagagcttcggcacgatagcagaaaaggaaaccgacttaaaaaggaaaaggctattcagacctcgatgggttactatagagtcattagcaaatgtaaagggcatgggtgtaattttacatgggctgagtcccgtgcctataaatagatgaataatgctcccgtactgttcacgctgacttgacatttgcttttgcg

SEQ ID NO: 26781 - DNA, 1211 bp, Zea Mays
acccgacccgtgaccgtgagacagtgacgcgagcctgtgtgcggcccgctttcgttcgccgagtcaacaacaagaagccacgcgacgataacgcccagttcgtggaagattggaagaacactagagcgagaagcgatcagagcgaggcacggcgagggcgacgacagagccatgagttaccagaaggtcccggagtcctatccgccaccagggtactcgcagccgtacccaccgccccaggctccaccgcaggggccttactacccgccgccgcagcaaccacctccggggtaccagggctactttaacgacggccagcaaccctacggctatccgccgccgcagggtgggtattaccatcacggtcaccaccaccataacgaccaccatcaccatcatcatggtcaccaccaccaccaccacgaagatgatgactgctgccttggcttcttgaaaggatggctggccgctctttgctgctgctgcatgatggacgagtgctgctgctgctgcttctgacatacatgcacctgaagctcgctgtgtctgggcatcgtggcacggcaacatttgagtgattatggttgctggatagtgtttacttgaattttctctttgttattgttcgtaaataatctgaatagtacatcgtgttaataaaagggtatttgcagtgtttctttctgtgtgttctgagctgattggtcgtccatggaaaagacccggaatcctttcgtagatccctgtatcgttgaataacatatttgttttttttttcaataataccagttgtttccatcggatcatgagcgaggaatctaattcattcatagagcagattttctctaaaaaataagaagtaaaaagctgtgcagagatttttttttcttcggttgttatataatcacaaggtgcagcagcaagcagttccctgcattttatgagccttacctttttctccctcctgaatggaaggtaacagtgtcactcactgcatttcataacgtgctatctatcttgacaactctgcctactgcaggctgcagctgaaagaaatgaacagaacaaggggaaatagttgtccttggacaagaaacctcagccccattgcaccggatggtatggtcgaccgatcgaaagcgcgggatacactgctagctgcatctcgtcaggtccatccgtccatcctaggaagattggataaattaaac

SEQ ID NO: 26782 - DNA, 1193 bp, Zea Mays
cgaattcctcccccaccggcccaccgtgcccacagcgggagcaccatgcccccgcctctgtgaccaccacgcctcgcccacacccgtcgcgcgatgcacgccgccgatttcgccccgtcccccagatgcgtgtgctgccccaaccccaccccgtcgtccctgcctctgtgaccccccacacacactcgtcgcatgatgcagcgccggtccacgctgcctccaaccccacctgccacctcgcgtgcccccacgcgatgacccgagtggccgacgccggatgcttcgtttaccttgacggcggacgcgaggggattaagcatgtttggcgcttcgtcctcgctcctctccctcatcccacgcacttgtagatggcaccgtccctcgccgagttcgtcgttgacctatgccatgtctccgccgccgcactcagggaccacggcgccgacccgccggagccggactaccttgtccgctccctccacaccgacatcactgcgcttccctgcctcccatggtgcaggtgcccgggggcgtgtggacaaggcgcggggggagggtcacccgagtgggcgacgtcggatgctttgtttgcctcgacggtggacgcaagggactcgtgcacgtctcccagatgctcggtcgacgccgcgctggcgccaccttcacgctcgggcaggtgtccttcaaggtcgtcttggtggacggcgccaagctagggctgtcaatggtagacgtcgatcaggatatagggaagggtcttcagtcgatgcgacgtcggcaccctgtggaggaggacgcgctgagggcaaatccgccaactaatcgctccagactcaccgggaggaggatggcggcagatcgatgagcgcacgcagctcgccaggaactgcagacatgccaaatggaaatactcaggattatcaagctggacattcttctattcatgggccactgcctcatttctgctagaatcctttgcatagtatgcaagcacctcaaatacaagtgccctattaagagttcatcggtaacaatgtggtaaatgtggtgcatggtttaaatccttctgccataggtcttcctttacatccaagaatgttggctctcccattcaatgttgaacacacttttgggcatctaatgcacccagctctgatgaactaagctaacaatggggctttaagaattcttcc

SEQ ID NO: 26783 - DNA, 273 bp, Zea Mays
atggtgttggtgctagttctgccagtaatggtaactggtgtcggtgtcgtgttaatgacaacaagggtggctctccctggccctcctacaacccctagaaaggctccttcatgtggcccacttgcaaccagcagcaacagccccacaatcctcagaccacgtgttcctgtgacactaagatttccactgacattgcctatccctctgcagcagcaccaccaacatcaacagcaggtgcaccagaccaccgtgtctcccaggaccgactcctag

SEQ ID NO: 26784 - DNA, 1733 bp, Zea Mays
agctcttccagcacattatagtttccacctagttgtggatcaacgaagctctcttctatagccatcaactcaattgtatactgaactatgtcacgaggcagggatcctttggcattgagccaggtaattggtgatgtgttggatcctttcataaagtcagcaacgatgaggattaattatggtgacaaggagatcacaaatggcactggactacgagcatctgctgtgctcaatgcaccacatgttgagattgaaggccacgaccaaacaaatctctacacacttgttatggtggatcctgatgcaccaagtccaagcaaaccagagtacagggaatatctgcattggattggatgcagccctctcaaaaaaggaggggggtgtttcttttccatccatcaacatctgaagaactcttgttatgtatgctattgggttggtaacagatataccagaggcaagagacatatgttctggttaaggatctcaagttgaggatctgacatcatggtattttctgtgggatccacttgatcactttagtcagtgtggcaatgaaatagttccctatgaaagcccaaggccaccagctggaattcatcgaattgtttttgtgctgttcaaacagcaagcaagacaaacagtttatgcaccaggatggcggcaaaatttcaacatcagagacttctcggcaatttacaatcttggagcaccagttgctgcattatacttcaactgccaaaaggaaagtggtgttggtggcagaaggtttctgggatcaagctgaagaaaagattcagagaaacatctacatggaggcagtaccattcacaattcagaaattagtccacctaaaatagttgaaaacatatgagatgttagttgacagttaggttctagagtaattgactcatatcatatggaacaaactagcatttgaaggtcatcttcctatgttacccacctcaataaagattactgagtttcattatgagaataagtgctcatttacaacaaatcgttggtgtttaagttcaagtatcacaaaatcttaataaagtataaaatctgcttggtggattctccaaatagaaaggagaccataccacatggacgtggccattctgcgtcttcagataacgcgccatctacaactagcagattggccggcccacgcccatccctccaagttacctgctaagggcctcacacacccagcagccagcgtccattccaactaggatacatcaggcaacgcgcctatgaaactcaaccggcgagatgcgaatcgaagtttgctttgaagtttgaaccaggcggccccggccgatcaccgtttggcactgcagcgatacctaatacgaaacgattgaatcacaggggtggggaccggaggagatacattgcctttgaggagaaagagaaccgcggctggacgacggcgagtcgagcggccgaggcgaacgaagctcataccagttgttcgtggagagcgcgggaggcgtcggaggaagcgatcgcgttggtcggcgtctgaacgagcctgggtgaggctgggttcgttttctcctccttggatggagtggagggtataggacggtgggcggtggcctccgacgccgacgaggtggtggctgacggcggcaagcagttcggattgctaaatgcggagtgtgggctgggctttatcctctggagcgtagttgggcttcatcggggtgagtagataggag

SEQ ID NO: 26785 - DNA, 2761 bp, Zea Mays
agctcttccagcacattatagtttccacctagttgtggatcaacgaagctctcttctatagccatcaactcaattgtatactgaactatgtcacgaggcagggatcctttggcattgagccaggtaattggtgatgtgttggatcctttcataaagtcagcaacgatgaggattaattatggtgacaaggagatcacaaatggcactggactacgagcatctgctgtgctcaatgcaccacatgttgagattgaaggccacgaccaaacaaatctctacacacttgttatggtggatcctgatgcaccaagtccaagcaaaccagagtacagggaatatctgcattggattggatgcagccctctcaaaaaaggaggggggtgtttcttttccatccatcaacatctgaagaactcttgttatgtatgctattgggttggtaacagatataccagaggcaagagacatatgttctggttaaggatctcaagttgaggatctgacatcatggtattttctgtgggatccacttgatcactttagtcagtgtggtgagacttctacaggaaataaagtagatggctattgttacctaattcattgcatgacaatatacaatgctcaactaatggtatcttctgtgtgcgcccacaaaaataaaggttgcagctatatattaaatctttgagatgtccttcagaatgtcacgcattagaacttccattctagacaaaaatgaaattgagcttagtgtttaaattaaatacgatactataaggtgtcaaaaatgtttcatgacctagatgtctccttcaggaagctttcaaccagatctcaaaaatactatatattagcatgatgatatcaaacatattaatggttatcaattgttgcatacataaaaaaatagatcaacctagaagaatgtaggtggcattttattaaaaagaaaataggcatcaaaatttgcctccatgaggacttcaacctaggtggtctggtcatacatccacactcttggcttgaccaactgagctagctcaactcccttgttatcaattatacaactacagaactacttctgtgacaaattttaaattgcaccagggatttcttcaaaatcaggaagcattactgtagactcataaacatatctttagcaatgcatgtttcatgcacaatctagcagcccaatcagcttaggctggcagatagaaaaacttctgactgtaagaaaaaagttaagaacattttaaacaaatgaaataaaactagcacatcataatcataatagacctcatgttttttgtgaatttatgatttatactctcaataatggggatattacacatgtacattatatatggtaagctttgatatttaatttacttttgattgtagaagctataagggtctacatttaatatgctataggtagcaataacttcatcatcagaacctatcgtgtgtgtatttcttttctttttgggtgggtggatgtgttgattttctttgtgtgtgtgtgttgggggggggggggtggcatggtgccaactgaacacaatgttgaggacagcaggcaatgaaatagttccctatgaaagcccaaggccaccagctggaattcatcgaattgtttttgtgctgttcaaacagcaagcaagacaaacagtttatgcaccaggatggcggcaaaatttcaacatcagagacttctcggcaatttacaatcttggagcaccagttgctgcattatacttcaactgccaaaaggaaagtggtgttggtggcagaaggtttctgggatcaagctgaagaaaagattcagagaaacatctacatggaggcagtaccattcacaattcagaaattagtccacctaaaatagttgaaaacatatgagatgttagttgacagttaggttctagagtaattgactcatatcatatggaacaaactagcatttgaaggtcatcttcctatgttacccacctcaataaagattactgagtttcattatgagaataagtgctcatttacaacaaatcgttggtgtttaagttcaagtatcacaaaatcttaataaagtataaaatctgcttggtggattctccaaatagaaaggagaccataccacatggacgtggccattctgcgtcttcagataacgcgccatctacaactagcagattggccggcccacgcccatccctccaagttacctgctaagggcctcacacacccagcagccagcgtccattccaactaggatacatcaggcaacgcgcctatgaaactcaaccggcgagatgcgaatcgaagtttgctttgaagtttgaaccaggcggccccggccgatcaccgtttggcactgcagcgatacctaatacgaaacgattgaatcacaggggtggggaccggaggagatacattgcctttgaggagaaagagaaccgcggctggacgacggcgagtcgagcggccgaggcgaacgaagctcataccagttgttcgtggagagcgcgggaggcgtcggaggaagcgatcgcgttggtcggcgtctgaacgagcctgggtgaggctgggttcgttttctcctccttggatggagtggagggtataggacggtgggcggtggcctccgacgccgacgaggtggtggctgacggcggcaagcagttcggattgctaaatgcggagtgtgggctgggctttatcctctggagcgtagttgggcttcatcggggtgagtagataggag

SEQ ID NO: 26786 - DNA, 1652 bp, Zea Mays
atttgatagctcttccagcacattatagtttccacctagttgtggatcaacgaagctctcttctatagccatcaactcaattgtatactgaactatgtcacgaggcagggatcctttggcattgagccaggtaattggtgatgtgttggatcctttcataaagtcagcaacgatgaggattaattatggtgacaaggagatcacaaatggcactggactacgagcatctgctgtgctcaatgcaccacatgttgagattgaaggccacgaccaaacaaatctctacacacttgttatggtggatcctgatgcaccaagtccaagcaaaccagagtacagggaatatctgcattggttggtaacagatataccagaggcaagagacatatgttctggttaaggatctcaagttgaggatctgacatcatggtattttctgtgggatccacttgatcactttagtcagtgtggcaatgaaatagttccctatgaaagcccaaggccaccagctggaattcatcgaattgtttttgtgctgttcaaacagcaagcaagacaaacagtttatgcaccaggatggcggcaaaatttcaacatcagagacttctcggcaatttacaatcttggagcaccagttgctgcattatacttcaactgccaaaaggaaagtggtgttggtggcagaaggtttctgggatcaagctgaagaaaagattcagagaaacatctacatggaggcagtaccattcacaattcagaaattagtccacctaaaatagttgaaaacatatgagatgttagttgacagttaggttctagagtaattgactcatatcatatggaacaaactagcatttgaaggtcatcttcctatgttacccacctcaataaagattactgagtttcattatgagaataagtgctcatttacaacaaatcgttggtgtttaagttcaagtatcacaaaatcttaataaagtataaaatctgcttggtggattctccaaatagaaaggagaccataccacatggacgtggccattctgcgtcttcagataacgcgccatctacaactagcagattggccggcccacgcccatccctccaagttacctgctaagggcctcacacacccagcagccagcgtccattccaactaggatacatcaggcaacgcgcctatgaaactcaaccggcgagatgcgaatcgaagtttgctttgaagtttgaaccaggcggccccggccgatcaccgtttggcactgcagcgatacctaatacgaaacgattgaatcacaggggtggggaccggaggagatacattgcctttgaggagaaagagaaccgcggctggacgacggcgagtcgagcggccgaggcgaacgaagctcataccagttgttcgtggagagcgcgggaggcgtcggaggaagcgatcgcgttggtcggcgtctgaacgagcctgggtgaggctgggttcgttttctcctccttggatggagtggagggtataggacggtgggcggtggcctccgacgccgacgaggtggtggctgacggcggcaagcagttcggattgctaaatgcggagtgtgggctgggctttatcctctggagcgtagttgggcttcatcggggtgagtagataggag

SEQ ID NO: 26787 - DNA, 2887 bp, Zea Mays
ctggaacgaaatgagaaccctgatgcataagcatgtattgattttcatacatttgttgcttacactccagtatatagtcttatatgctattcagaaaaaaaggtgaaagaagcctgagaaagcacggtgtacttgacgacaaagcggaatataaggcagaggatggcttttagagtataaagtagagcagaacgtacataatgtagtaggcagtgcacctcaccttttattccctgctgaaagaagaaaacaaatctgcatgaattgtttatggcagttgcacatattgaggcttctgtggaggtccgaggcagaatgtggtgttccgcctgaaacaacttcaatgcaatctccatggtatgatgagtctattctcagaagttctgaatgcccattcacaccatcgaaagtgtaatttcttcttgcatagacattttaaatgtcgtgaggaatctggaataagtccatctgatgatattaagacactgatgtgtcgattcaggccaggagatgcttctttggtcccagtttggtccgaataatcctctacatgcatacatttgtattgtgcggacgaggggcaaagtaccaacatgtgaatatatgacaatggcacaatggtaaatggaaacacacactagaccatgaaaatagacatttaaaactgaaaatgaacagagaagtcatgtatgtaatgtatggggacattgtagacaagagcatgaactaaggccttatgaaacaagtccacagaacagttttcaagcaagggtcaagagggaagtgcttgatacttcaattgccgtcaaggaaaagaaaatgaagagaagaaagaagattgctaatgacctggctctacctccccaggtttcgtactgctgcattgtgatgttgatccaaagaatctttctacatctatgtgctcaccactcaagagaagtatcgttgaacatcaaatggcacatcgtgaacctttggccaagcccaggcaaggcgccatgcaggggaggctaactcttgaagctttaaacatacctcctgtctttggagaatatatgcatgaaaaactgaccatagatatcattcacaaagatcgtgcaggttcaactacaactaggccatctggaggttgataggtactctacatgtccatgcaacaaagaagcaaatataaggaaaaataatgatatattaaaagtaagattctatcttcttatagtgctcaatggaatgttgtgaacataaagtggatgcttcacaactaatataaatttacaaagaactgctctgttctccccacacacaaaatcatttgatagctcttccagcacattatagtttccacctagttgtggatcaacgaagctctcttctatagccatcaactcaattgtatactgaactatgtcacgaggcagggatcctttggcattgagccaggtaattggtgatgtgttggatcctttcataaagtcagcaacgatgaggattaattatggtgacaaggagatcacaaatggcactggactacgagcatctgctgtgctcaatgcaccacatgttgagattgaaggccacgaccaaacaaatctctacacacttgttatggtggatcctgatgcaccaagtccaagcaaaccagagtacagggaatatctgcattggttggtaacagatataccagaggcaagagacatatgttctggcaatgaaatagttccctatgaaagcccaaggccaccagctggaattcatcgaattgtttttgtgctgttcaaacagcaagcaagacaaacagtttatgcaccaggatggcggcaaaatttcaacatcagagacttctcggcaatttacaatcttggagcaccagttgctgcattatacttcaactgccaaaaggaaagtggtgttggtggcagaaggtttctgggatcaagctgaagaaaagattcagagaaacatctacatggaggcagtaccattcacaattcagaaattagtccacctaaaatagttgaaaacatatgagatgttagttgacagttaggttctagagtaattgactcatatcatatggaacaaactagcatttgaaggtcatcttcctatgttacccacctcaataaagattactgagtttcattatgagaataagtgctcatttacaacaaatcgttggtgtttaagttcaagtatcacaaaatcttaataaagtataaaatctgcttggtggattctccaaatagaaaggagaccataccacatggacgtggccattctgcgtcttcagataacgcgccatctacaactagcagattggccggcccacgcccatccctccaagttacctgctaagggcctcacacacccagcagccagcgtccattccaactaggatacatcaggcaacgcgcctatgaaactcaaccggcgagatgcgaatcgaagtttgctttgaagtttgaaccaggcggccccggccgatcaccgtttggcactgcagcgatacctaatacgaaacgattgaatcacaggggtggggaccggaggagatacattgcctttgaggagaaagagaaccgcggctggacgacggcgagtcgagcggccgaggcgaacgaagctcataccagttgttcgtggagagcgcgggaggcgtcggaggaagcgatcgcgttggtcggcgtctgaacgagcctgggtgaggctgggttcgttttctcctccttggatggagtggagggtataggacggtgggcggtggcctccgacgccgacgaggtggtggctgacggcggcaagcagttcggattgctaaatgcggagtgtgggctgggctttatcctctggagcgtagttgggcttcatcggggtgagtagataggag

SEQ ID NO: 26788 - DNA, 239 bp, Zea Mays
cttacccttcctcccctcaactcatcaactgttcatctgcgaggacatcctgggacgacgatgcccaagcgctggggtcctggtcctctacctctcacccaccactcgtactacctccgtaaccttagttccaacaatatggtaccagagatgccaagttccgacgacgtgccgccgggatcagcaccacccgccacctccactaatcgcctgcggcaacattccaaattagtattctt

SEQ ID NO: 26789 - DNA, 1845 bp, Zea Mays
gatgttgtctcgcttcttaatccatcctagccgttggttttcatatactagcccacgagacccagcccagccggcttggatctcaacccataggtggcgctctcctcttcggcttcggttgcaagaaagaaaaaggtatccgtatgtgactggtacttcagtcattgccttgaaatacaaggatggtgtgatcatggcatgtgacactggagcatcctatggatcaactttgagatacaagagtgtggaacgcattaaggctgttggcaagcatagcatcattggagcaagcggagagttcagcgatttccaggagatcctgcgctatctggatgaactaactctttctgatcatatgtgggatgatggaaattctctgggccccaaagagatccacagttatttgacaagagtgatgtacaacagacgcaacaagtttgatcctctctggaactcacttgtacttggtggagtgaaaaagggtccaaagggtgatgagaagtatcttggcatggttaatatgattggtacccacttcgaggaaaaccatgtcgcaactggatttgcaaatcatctggcgatcccgatactccgtgctgaatggcgcgaggatatgacttttgaagaagctgttaagctggttgagaagtgcttgctggtcttgctgtaccgtgacaggtcatctatcaacaaattccagattgccaagatcacaactgaaggatcaaccatctacccaccatattccttgaagacctactggggcttctctcactttgaaaacccagcccagggcgctgtgggatcatggtagatttatgcgccgcgcacgccgcatatcatgccatgaacttaggcgaaaccaatctgtgctgctgaaatcgaacacttatgaacgtttgttctgaacatcactggaactctgcatttgcttgtatgacatgcttatggttcagcgagtttaattccaacgtttgatcacatgttgtgaatgtggaaaatggattgtgcgattgcgacctcagatgccgttgttgattgtactatgttgaaaacttgaaatgctaaattagtataggtaggtgacctttgccttgttgtcgttgcgtgaactctgatttctacggtttcttgcgtttgctttatgattcatgctagtgttaatgccctctgcgagtgatgggatcttggtagtctgtagtagatgcacaaactgtgttggcaaaactttccatgtacggatctaggagggaggttctccgtcagttaaagattccaatttttgacggaaagcgataccatcaggtgccaaaactactgctacgatgagaaagcgcaatgagaaatcaacaaagggtacaaggcatgaagacagaatcctgaggtacaacaaatgttgaggaatgtacatgacaaatctacgaagggtgcacttgctgtatcattcatggtaaaactgtgtcactgacacgagagcattaggcagatttgttacaaggcatggaacggcccaagattaaccactactattctttcgttacaaagaggctgtacaacaaaaaaaaagaagaagaatccggagttaaaaattgttgctgctctcaacgaatgtcgacaaatacctaactactaactgcctacgatcctcgttgctttctttacttgacaactctattgctcagcctctcgagctgcggcacgccgtagcttgcagtgagttccatgaatcgttgctttaggacttctagctgtcctagcaagtcgccagtagccacggtagtggcaatttgaccgttctcagactccgtgggttcagggcttctttcgttgtaccatttgactgct

SEQ ID NO: 26790 - DNA, 2671 bp, Zea Mays
ctccttcatgcgataagcataaagtgacacggtcacactggagaagcatcaggcaaacgatacagcccttccctcttcaatcctctcgtcatttcctctcgcttctgctcagctgcaacccagcgcttagatcttattcttggacgagaactctcctcaagctctccgatttctgttctcgcgccgcttagcaattcaaccccgaaattcttttgcggcgcagtcttcacctgaatcttgggtcgtagccaagaagatgaacaaagacaaagctccgatgccgggagacggcggccccagcgacggcttgccgccgcagtccacgcgccgtgccggggcgccgccctcgtcgtctaccccgccgctggagtgcgacatcagccgcatgccggacttccctacccggagcaccggccaccggcgtgcgcactccgagatcctgggcctacccgacgacctcgacctcagtgctcccggaggcggcgaaggaccgtcgctgtcggacgagaacgatgaggagctcttctccatgttccttgacgtcgacaagctgaactcatcgtgcggggcgtcgtcggaggccgaggctgagtcctcctcggccgcgggtggcggcggtgagggggctgagctggccgacgcgcccaggccaaggcatcagcacagccagtccatggatgggtccatgtcgatcaaggcggaacagctggtgggtgcgccggggatggaggggatgtcatctgcagaggccaagaaagcagtgtctgcggcgaaactggctgagcttgctcttgttgacccaaagagggctaaaaggatttgggctaatagacaatctgctgcaagatcaaaggaaaggaagatgcaatatattggcgaactcgagctcaaggtgcaaaccctgcaaacagaagccacaacattgtcagctcagctagcattgctgcagagagacaccactgggctaacaaccgagaatagtgagctgaagattcgcctgcagaccatggaacaacaagtccacttacaagatgctttgaatgacaccctgaaaacagaggtccagcggctgaaggtggcaacaggacaggtgggcaatggtggtggagggatgatgctgaactttggggccatgccacgcctggtcggaggcaaccagcagatgttccacagcagccaagcgatgcaatccgtgctggcgacgcaccagctgcagcagctccagctccactcccagcctcagcagcagcaactgcactcgctgcagctccagcaggtggcgagagacctcaagatgaaagggcatctgggcggccaaggccagtggggcgatgggaagtctgggagtgggagcaggagcagcggcagctgagcctactggcaccgtggcacgggagttttggtgtatgtggtgagcaggaatggtgatcccttgttttgggggatgttgctgtgcaggtgtaattatcgttaactcagttgtctatctataggcccagttcagcttgagttttatggttaactcggcgatctttataggctcagctcacctgcaacgcacttcagttcagaaactcggatggtggcagatgtttgtctgttggatgttgtttgtatctcttttgctagtttaagggtaaaaatggttggcatttcagtgtttcagatgaagatctcccgtctcagccaggcgctaaaagttagcacggtactagtagggtattcgatttaggccttgttcgtttttgtcggattgcacctggaatcgttagaatcatgtcaccatcaaaaaactcacaatgcactacatcattgataatagtcatttctcaaaccaaacatctcataacatattttttttcatgcgccgctcacttaatttgatccttgtatcaacgagaacatcaccatgtttatgaattactgccatacaaaaaatacattacgcccatggccctaccgaagattaccatgatattttgcctaattctgtttcacctgaaaatatttcttaactactaatgaggtcataatgatggagaaggctggttatcaatcctagtggcaccacttatgcgtcatcagcttattgtaaatgaactgttgcgtcaaagcaaaattctttccctggttcaaatgctgcctcaagctcttcatagctctgctgaactttcatattcttcgatacagtcaggccctccttttgaacatactcagcaaccgtgctacttataattttcttgattgtttctttcttcacttttgatggcccgattaagtgtagagcaacttctttcggtatcttcagcaccacaaaagagtaattactaatcagtaagttagaacaacttctgcctatatgcaaatgagttcaactgatataaactgaaatggctacttttgagtgggaacttacgtctggagttttccctgaatatttaagatagcatcacgtggaagacaatgtcaacaaacttaaacagtattagttttcatatgccaaatttaaacaacatatagtataatatgcaagcaaccaaatttaatatcttatttacagcctaactggtatggcatattgaactcagtatcctttaagtacatctgaggtgaattcagaatttgcaggatgagagtacgaatcacatgcacagttttaggcaatttaaaa

SEQ ID NO: 26791 - DNA, 4173 bp, Zea Mays
acactggagaagcatcaggcaaacgatacagcccttccctcttcaatcctctcgtcatttcctctcgcttctgctcagctgcaacccagcgcttagatcttattcttggacgagaactctcctcaagctctccgatttctgttctcgcgccgcttagcaattcaaccccgaaattcttttgcggcgcagtcttcacctgaatcttgggtcgtagccaagaagatgaacaaagacaaagctccgatgccgggagacggcggccccagcgacggcttgccgccgcagtccacgcgccgtgccggggcgccgccctcgtcgtctaccccgccgctggagtgcgacatcagccgcatgccggacttccctacccggagcaccggccaccggcgtgcgcactccgagatcctgggcctacccgacgacctcgacctcagtgctcccggaggcggcgaaggaccgtcgctgtcggacgagaacgatgaggagctcttctccatgttccttgacgtcgacaagctgaactcatcgtgcggggcgtcgtcggaggccgaggctgagtcctcctcggccgcgggtggcggcggtgagggggctgagctggccgacgcgcccaggccaaggcatcagcacagccagtccatggatgggtccatgtcgatcaaggcggaacagctggtgggtgcgccggggatggaggggatgtcatctgcagaggccaagaaagcagtgtctgcggcgaaactggctgagcttgctcttgttgacccaaagagggctaaaaggatttgggctaatagacaatctgctgcaagatcaaaggaaaggaagatgcaatatattggcgaactcgagctcaaggtgcaaaccctgcaaacagaagccacaacattgtcagctcagctagcattgctgcaggtaagaactatttctctttagctcccttatggatttttctggttttgaagttattttctacactggccgcaaccgaatttcatcacgatagtaacgaaattacaaagtatagtatgcaatattccagccaaaaaaatgtaggaacgataaggctatctccagcagatcccatatcgcatcccctatttcacacttctctctgcaaacagtgtcatctacagttccacgtcccatattttacacactctactgaagacagtctaaactccctgattctgatcacccagggatcagacatcgaggacctaaaaccacccagtaacgtatcaaccaaacacggcaacagcgaccagacagaaatgaagcctccaaatacatggccctcggctttgaactggctattgtggttcttctcgagatcatccaggtttagtaactgatagacaatcattataccaaagaagcataatttaaaaaaccaaactagccattgaatcgctcaaactcagttctggggctcagaccagcagtggagtagtagtcgtgtggttcaaattaagttagatgccataatatatatttccatacactgcagcctagcccctggctccctgctgccgcacacccaggaacccaggagtccaggacccgaattctacacttctgctccaatcgacatgtgttttcagggacctatggtttttaacccatactatgttttgccttgtcatatgcacgataagcatatttgggcgttaggcatagtcgtttgattgcaaaatgcttaaatgctatttaatccaaggtgaagctataggcttatagctttttcgttgccataagttataaccataactagtgttttcttgggtgttagtttgggagttttgtggagatcgggggttcagcccatccatatttatgtcataacagctgccagttttttttttgggtgtgaaccagctctgttccgttttaaaaggttgtgctaaagtagaactatctgttgataacatatcgatctgtccaatatactgtatcatggttcttctcagatgttgctgctttttgtaatataaaatactattgagtagatttgttctctttatggaaatgaatgatgttccatcaatgaaagatgtatatatctgttcaaatatgcaaacacaagtgcgatctagatgtgtccttgcactgcacaaaacatcacatacatgtgttttactacagtacagccacatgtgatgagatatagcttggaaggatcattttctaagttgcgatatctcataggcctgtggtttggaactattgatcaatttccctgtggtttgaaactattgatcaaaatcagccacaatgacatgccagctttgtaatggctacttgttacgtcttcataccattcacacagttacccaagtaatggggtgtgtttggtgttcccttgatggatataatgttcagaagaaaatactgttatagatgatatactttggagtttcttatgtcacaagtgaagtgatctttttttatccgttgtcataatatcttaatgattggccaaatttatgctgtattatgcagaaaagtatgccacgttacaaaagttgacatcttaaagctttactgaaatgaggtccccaacttcaacaatttcttattttgtatggagcatcattcctttctagagctaccaattaacatacaaaatacttgtggagggcgcctggatgcttgtgtttcactatgctcatgcggttatatatacgttaacagtagtgcgctcatttaccttgcttttgctactactgttattctgcttgtgttgctatgtcagagagacaccactgggctaacaaccgagaatagtgagctgaagattcgcctgcagaccatggaacaacaagtccacttacaagatgctttgaatgacaccctgaaaacagaggtccagcggctgaaggtggcaacaggacaggtgggcaatggtggtggagggatgatgctgaactttggggccatgccacgcctggtcggaggcaaccagcagatgttccacagcagccaagcgatgcaatccgtgctggcgacgcaccagctgcagcagctccagctccactcccagcctcagcagcagcaactgcactcgctgcagctccagcaggtggcgagagacctcaagatgaaagggcatctgggcggccaaggccagtggggcgatgggaagtctgggagtgggagcaggagcagcggcagctgagcctactggcaccgtggcacgggagttttggtgtatgtggtgagcaggaatggtgatcccttgttttgggggatgttgctgtgcaggtgtaattatcgttaactcagttgtctatctataggcccagttcagcttgagttttatggttaactcggcgatctttataggctcagctcacctgcaacgcacttcagttcagaaactcggatggtggcagatgtttgtctgttggatgttgtttgtatctcttttgctagtttaagggtaaaaatggttggcatttcagtgtttcagatgaagatctcccgtctcagccaggcgctaaaagttagcacggtactagtagggtattcgatttaggccttgttcgtttttgtcggattgcacctggaatcgttagaatcatgtcaccatcaaaaaactcacaatgcactacatcattgataatagtcatttctcaaaccaaacatctcataacatattttttttcatgcgccgctcacttaatttgatccttgtatcaacgagaacatcaccatgtttatgaattactgccatacaaaaaatacattacgcccatggccctaccgaagattaccatgatattttgcctaattctgtttcacctgaaaatatttcttaactactaatgaggtcataatgatggagaaggctggttatcaatcctagtggcaccacttatgcgtcatcagcttattgtaaatgaactgttgcgtcaaagcaaaattctttccctggttcaaatgctgcctcaagctcttcatagctctgctgaactttcatattcttcgatacagtcaggccctcctgtaatatagcagtgagaaacacgtgaccatgtgttaacctaaaaatgccaggactggacatctgattgaaaacatgtctaatcactgcagcttggtgtttccaatgtaagatagcttctactaacaagttgttacaaaaatttgtcattggaaaaaacaataaaa

SEQ ID NO: 26792 - DNA, 1605 bp, Zea Mays
cgccagcttcgcgggctcgtccacgacgaccacggccagcggcgaggacacggtggcggggggcggtttgagcttgtagatgccgaaggcggacaggtccgtggcgagagcggcgctcacccaggacgtagctcggcgccggcgctcggccgtgatggcagcggcctcctcgtcggtagcggaacacaccgtcccagcgtcgctggctgccgagcaatctggcgaggctgcagatgtggcagacttggcgagggtgtcggtgatcaccgtggcgcgcgagagcgcggcgtggagggtgaggaactgctctacggctggctgcgggttctgctcttccgccgtggagctcacctccgcgtacgagctgctccgtccaacacaaggcaggtgtacagttaggttagtaactagaatcaacacggatagtaaaaaaaaatcagacagtgaattcacgacaccaacttttcaacaccaagttgaaatccagacagtggattcgacattagcaatcattggattaactggagaatatactgaagctagcaatgtaaataaacagatacttccagtagaagacaatagcatgcagctacaagtacaggtacagcatgagaaacttcctgtttgtccaccacagcatctgtagcatcattgtacagtacaatagcatggttcggcgacagtttcagaaacatgttgatccatgtcctggaccatctggatgccaacaagcaagactatcgcatcaactgtatgtaaacctgtataccgcaatacaagattgccttttacctgttctctgggttgtactaccccttctggaagcttgtactttctagcacgtccaaatggccagttcacaaatgtttgactcaagaataccaattattatgtttcgggttcacaaaagttaagctctgcgagttaatcttgatgtgtgaaaacattttgttttaattcgaaaaagcatctgtacaaacattcatagctaacgtctgccatcagatcagaaaaaaaaagaaagatggaaagcagggaccactccaccatgggtcccgtcccgagctccaaaagggaggaaccgagctggtcgataacattattgcaacatgctagacagctcgaactgagagagacctacgggggggctattcatgatcttgcccccacccagtgaggtgcgatcagaaaccaacccatgtgacattgaacagcaggctttgctaaaagcacagccgataccacctgtcctggttcccgatcaccatgccctgtatctagcatagcatgttcgtcagcacgggaacaggcaatcaaggctgtctacggccccggatgcatgtgacctttgaaggcttcgtagggcttgtccccggggatcatagttgactcatttctgttaagaggatttctagaacaatggaacagcagaagagcactgttggagagcacggaagtgtaagttcaatgtggaaatttggcagaagagcagctttgtttctgagaatgagggagtatattttagcatatgatgccatctaagtgtcaaacatgcgtttatagttatctaagggcccgtttggtagagcttatttttcagcttcg

SEQ ID NO: 26793 - DNA, 939 bp, Zea Mays
cccgacggctcccagtctcccaccttctccgcctcgtcgtccgacgtccctgctgcataaaactaccacctccaggcctcctaccatttcttcctcgcccggtcgtccccctttcccccgcggccccgccccccatgcccctcgcgtacgcgcccataccgtaccgctcccgaaacactagggcgcggcacgcaccctcctcgtgagcgcggggtcgggcgcaggcggcatggcgccgcaggccgcggggtcgacccctgcggtggcggcgctcgggttcctcctccctacctgctgggagatcgaggtcacgtgcgccgccgcgatgatcctcgtcgcgctctacgctgcgtacgagctcctcaacccgcgccccttccaggctgcagcggcgggcgacgccgacgagctcctcgtgcgggggctagacggcaccaacaaggggggtgcgagcggccgttctgcgtatgtactgaagaattgttggctgctaggaatttgatggcggcgaacttaaatgggacatctgacccgtatgcattgatcacttgtggtgcagagaagcgtttcagctccatggttcctggctcaagaaacccaatgtggggagaggaattcaatttttttgttgatagtcttcctgtaaagataaatgtcacgatatatgactgggacattgtatggaaaagcacaatccttggttctgttactgttcctattgagtctgagataccgagtgggccagtttggcatacacttgatagcacatcgggccaggtttgtcttcatattaaagtaatcaaggttcatgaaagttcctccagctcaatcgaagccccgactgagaaaggtcacgaaagcaggtcccccgtgcaacatgagggtccgccccttataggtcagatctttactcatgcaatcatgctttgagctctccca

SEQ ID NO: 26794 - DNA, 867 bp, Zea Mays
cccgacggctcccagtctcccaccttctccgcctcgtcgtccgacgtccctgctgcataaaactaccacctccaggcctcctaccatttcttcctcgcccggtcgtccccctttcccccgcggccccgccccccatgcccctcgcgtacgcgcccataccgtaccgctcccgaaacactagggcgcggcacgcaccctcctcgtgagcgcggggtcgggcgcaggcggcatggcgccgcaggccgcggggtcgacccctgcggtggcggcgctcgggttcctcctccctacctgctgggagatcgaggtcacgtgcgccgccgcgatgatcctcgtcgcgctctacgctgcgtacgagctcctcaacccgcgccccttccaggctgcagcggcgggcgacgccgacgagctcctcgtgcgggggctagacggcaccaacaaggggggtgcgagcggccgttctgcgtatgtactgaagctagaattgttggctgctaggaatttgatggcggcgaacttaaatgggacatctgacccgtatgcattgatcacttgtggtgcagagaagcgtttcagataaatgtcacgatatatgactgggacattgtatggaaaagcacaatccttggttctgttactgttcctattgagtctgagataccgagtgggccagtttggcatacacttgatagcacatcgggccaggtttgtcttcatattaaagtaatcaaggttcatgaaagttcctccagctcaatcgaagccccgactgagaaaggtcacgaaagcaggtcccccgtgcaacatgagggtccgccccttataggtcagatctttactcatgcaatcatgctttgagctctccca

SEQ ID NO: 26795 - DNA, 689 bp, Zea Mays
ctcccctagttttcaatcaaattcacttactcgagcaatcgctgatggcgacgacgacatataagttctagtttacaacgaacaatttaaaattaagcaacaatgatctaggataaatattagcttcgatgatctaggataaatttcatggtatatataaccacatgtacatatataaggaaccaccactgaattctacccaacaaatgttcactaggtgcactgttggctatcctcaaccatgcgccaaacaacagaacactcgggattctacaggttggttgacgacgacgccactgtttactactaacccatgcattaattaattgcatgcccacagagcttcgttcacagattaagtcacaataaatccaacgtatattatttttgcagggctttgctactgggcttatgctcagcatgtctttctttgacttggcttacgatgctgtcaacgccatcggctttctgagagggaacctctgggtaagctaattaaggtattctgttcggcgtttaatttgtaagatcttctcagccagcgtgcattattattttgatttttttgacatgtgcagtttttcgctggagcgctgctgttttcaacaatcgcggacgttttccctgagccagactgcagtgcggcagatgaaaacaatcctagatcaattctgaaaagaagatcaggt

SEQ ID NO: 26796 - DNA, 1171 bp, Zea Mays
gttcagttgaagcagatggcgataatcagtctgatcccattgcattgaccgctaacttcacctttgtcgcacgcgattctaagactggaaaatctgctccggttaaccgcctttcacctgaaaccgaaagagagaagcagctatttggagaaagtgaagcacgcgataagatgagaaaaaggaagagagaagaacagaagggaggactcgaaaatgggatacataggctccgtgccgaggccgagaggctggacgtgttgctcgcggagggccgtgttttctctgacctgcctgctttggccgatagagatagcatcttgctgaaggatacccgcctggagaattctcttgtctgccagccccaacaacggaacttgcatggtcgaattttcggtggtttcctgatgcaccgagcatttgagcttgccttctcgactgcgtatgcttttgttgggcagagaccttgtttccttgaagtcgatcatgttgacttcttgaaaccagtggacgtaggggacttccttcgattcaaatcatgtgtcttgtacacccagcttgacaatccagagcagcctctggtcaacgtcgaagttgttgctcatgtaacaagacctgagctccggaaaagtgaggtctccaacaccttccatttcaccttcacggtctgtagtgacacgctgaagaacgggttgaagattcgcaatgttgtcccctcgaccgaagaagaggcgcggcggatattggagcgcatggaggcagagggtttatgcaactaatctttccgcagatccacttgtttcggagttcggacgtgctttacttgatatatgtctcacttaccgttccacggtaccagctaaaacggggggatttggcgacgatttgagcagcagccagcagctatcataacacgccggcaatagaacggcatagctgtagctccatgcctccatggtactatttgtgattttttttacagagaccgcatgttgcgtataataacatactcctcgagactcaaaatgttcttttgagaaagcatcaaagcactatcgtttttttttatttgctcttgaaatggacggcggccgttcccatgactccaagaaccatgagtcccttttccccagttgcctttggcatcatcgctttgtcaaagggtcttgtcggt

SEQ ID NO: 26797 - DNA, 2029 bp, Zea Mays
ttttctaccacaccggcacacccacaccttcccacaaggccggaggtgagccccgcatccgcggccaagtacccatgacgacgaggctgacagcgacgttgttgctctccagaaccctcgtccgccgcgtaacctcgcgaaccccgacacccctcggccctttcggtctcgaaccatccgcaggaatccccatctcctggtccagacgcgcctcctcgaccgcctcgggagatcggggccaggaaccgccaccggccatggattcgcctatcaaggtggtttctcacctggggggcggacgaggaggaggagggggagagggagagggagagggagagggaggggccgcagcgatcgacgcggggaagtcggcacggaggccgctcagcctgtggcccgggatgtaccactccccggtgaccaacgcgctctgggaggcgcggtccagcatcttcgagcggatgatggacgctgggaacggcgcttcctctgccgagcagcggccgcagactgagctgctcgtcaagacgcccgcgcagagccggaccagcatcgtgtacaagttcgccaccgacgacatcctcagggagcagtaccgggacccctggaacgaggtgcgcatcggcaagctgctcgaggatcttgacgccctcgccggcaccatcgccgtcaagcactgttcagatgaagacagcacaacaagaccccttttggttgtgactgcttccgttgacaaaatggagctgaaaaagccaattcgtgtggacactgatttgaagatagctggcgctgttacttatgttgggcgttcatcaattgacatacagattgaagtgactcaggttgataaaggtattattggttcagttgaagatggcgataatcagtctgatcccattgcattgaccgctaacttcacctttgtcgcacgcgattctaagactggaaaatctgctccggttaaccgcctttcacctgaaaccgaaagagagaagcagctatttggagaaagtgaagcacgcgataagatgagaaaaaggaagagagaagaacagaagggaggactcgaaaatgggatacataggctccgtgccgaggccgagaggctggacgtgttgctcgcggagggccgtgttttctctgacctgcctgctttggccgatagagatagcatcttgctgaaggatacccgcctggagaattctcttgtctgccagccccaacaacggaacttgcatggtcgaattttcggtggtttcctgatgcaccgagcatttgagcttgccttctcgactgcgtatgcttttgttgggcagagaccttgtttccttgaagtcgatcatgttgacttcttgaaaccagtggacgtaggggacttccttcgattcaaatcatgtgtcttgtacacccagcttgacaatccagagcagcctctggtcaacgtcgaagttgttgctcatgtaacaagacctgagctccggaaaagtgaggtctccaacaccttccatttcaccttcacggtctgtagtgacacgctgaagaacgggttgaagattcgcaatgttgtcccctcgaccgaagaagaggcgcggcggatattggagcgcatggaggcagagggtttatgcaactaatctttccgcagatccacttgtttcggagttcggacgtgctttacttgatatatgtctcacttaccgttccacggtaccagctaaaacggggggatttggcgacgatttgagcagcagccagcagctatcataacacgccggcaatagaacggcatagctgtagctccatgcctccatggtactatttgtgattttttttacagagaccgcatgttgcgtataataacatactcctcgagactcaaaatgttcttttgagaaagcatcaaagcactatcgtttttttttatttgctcttgaaatggacggcggccgttcccatgactccaagaaccatgagtcccttttccccagttgcctttggcatcatcgctttgtcaaagggtcttgtcggt

SEQ ID NO: 26798 - DNA, 2248 bp, Zea Mays
actgacccaaccgtgtgactgtgtgagtctgactctgatcgctgccaaggtctcaagtctcaacgcgatgttgcgaggaagctgtggcccacctgcctctcttttttctaccacaccggcacacccacaccttcccacaaggccggaggtgagccccgcatccgcggccaagtacccatgacgacgaggctgacagcgacgttgttgctctccagaaccctcgtccgccgcgtaacctcgcgaaccccgacacccctcggccctttcggtctcgaaccatccgcaggaatccccatctcctggtccagacgcgcctcctcgaccgcctcgggagatcggggccaggaaccgccaccggccatggattcgcctatcaaggtggtttctcacctggggggcggacgaggaggaggagggggagagggagagggagagggagagggaggggccgcagcgatcgacgcggggaagtcggcacggaggccgctcagcctgtggcccgggatgtaccactccccggtgaccaacgcgctctgggaggcgcggtccagcatcttcgagcggatgatggacgctgggaacggcgcttcctctgccgagcagcggccgcagactgagctgctcgtcaagacgcccgcgcagagccggaccagcatcgtgtacaagttcgccaccgacgacatcctcagggagcagtaccgggacccctggaacgaggtgcgcatcggcaagctgctcgaggatcttgacgccctcgccggcaccatcgccgtcaagcactgttcagatgaagacagcacaacaagaccccttttggttgtgactgcttccgttgacaaaatggagctgaaaaagccaattcgtgtggacactgatttgaagatagctggcgctgttacttatgttgggcgttcatcaattgacatacagattgaagtgactcaggttgataaaggtattattggttcagttgaagatggcgataatcagtctgatcccattgcattgaccgctaacttcacctttgtcgcacgcgattctaagactggaaaatctgctccggttaaccgcctttcacctgaaaccgaaagagagaagcagctatttggagaaagtgaagcacgcgataagatgagaaaaaggaagagagaagaacagaagggaggactcgaaaatgggatacataggctccgtgccgaggccgagaggctggacgtgttgctcgcggagggccgtgttttctctgacctgcctgctttggccgatagagatagcatcttgctgaaggatacccgcctggagaattctcttgtctgccagccccaacaacggaacttgcatggtcgaattttcggtggtttcctgatgcaccgagcatttgagcttgccttctcgactgcgtatgcttttgttgggcagagaccttgtttccttgaagtcgatcatgttgacttcttgaaaccagtataaacatgtcgttgtcaggggcggaccgacgttgagctgagtgggggcacaggcccccactcaattttcttggtgtagtggatttttttaccttatttactgtagttacaaaggtggacgtaggggacttccttcgattcaaatcatgtgtcttgtacacccagcttgacaatccagagcagcctctggtcaacgtcgaagttgttgctcatgtaacaagacctgagctccggaaaagtgaggtctccaacaccttccatttcaccttcacggtctgtagtgacacgctgaagaacgggttgaagattcgcaatgttgtcccctcgaccgaagaagaggcgcggcggatattggagcgcatggaggcagagggtttatgcaactaatctttccgcagatccacttgtttcggagttcggacgtgctttacttgatatatgtctcacttaccgttccacggtaccagctaaaacggggggatttggcgacgatttgagcagcagccagcagctatcataacacgccggcaatagaacggcatagctgtagctccatgcctccatggtactatttgtgattttttttacagagaccgcatgttgcgtataataacatactcctcgagactcaaaatgttcttttgagaaagcatcaaagcactatcgtttttttttatttgctcttgaaatggacggcggccgttcccatgactccaagaaccatgagtcccttttccccagttgcctttggcatcatcgctttgtcaaagggtcttgtcggt

SEQ ID NO: 26799 - DNA, 2115 bp, Zea Mays
cactgacccaaccgtgtgactgtgtgagtctgactctgatcgctgccaaggtctcaagtctcaacgcgatgttgcgaggaagctgtggcccacctgcctctcttttttctaccacaccggcacacccacaccttcccacaaggccggaggtgagccccgcatccgcggccaagtacccatgacgacgaggctgacagcgacgttgttgctctccagaaccctcgtccgccgcgtaacctcgcgaaccccgacacccctcggccctttcggtctcgaaccatccgcaggaatccccatctcctggtccagacgcgcctcctcgaccgcctcgggagatcggggccaggaaccgccaccggccatggattcgcctatcaaggtggtttctcacctggggggcggacgaggaggaggagggggagagggagagggagagggagagggaggggccgcagcgatcgacgcggggaagtcggcacggaggccgctcagcctgtggcccgggatgtaccactccccggtgaccaacgcgctctgggaggcgcggtccagcatcttcgagcggatgatggacgctgggaacggcgcttcctctgccgagcagcggccgcagactgagctgctcgtcaagacgcccgcgcagagccggaccagcatcgtgtacaagttcgccaccgacgacatcctcagggagcagtaccgggacccctggaacgaggtgcgcatcggcaagctgctcgaggatcttgacgccctcgccggcaccatcgccgtcaagcactgttcagatgaagacagcacaacaagaccccttttggttgtgactgcttccgttgacaaaatggagctgaaaaagccaattcgtgtggacactgatttgaagatagctggcgctgttacttatgttgggcgttcatcaattgacatacagattgaagtgactcaggttgataaagcagatggcgataatcagtctgatcccattgcattgaccgctaacttcacctttgtcgcacgcgattctaagactggaaaatctgctccggttaaccgcctttcacctgaaaccgaaagagagaagcagctatttggagaaagtgaagcacgcgataagatgagaaaaaggaagagagaagaacagaagggaggactcgaaaatgggatacataggctccgtgccgaggccgagaggctggacgtgttgctcgcggagggccgtgttttctctgacctgcctgctttggccgatagagatagcatcttgctgaaggatacccgcctggagaattctcttgtctgccagccccaacaacggaacttgcatggtcgaattttcggtggtttcctgatgcaccgagcatttgagcttgccttctcgactgcgtatgcttttgttgggcagagaccttgtttccttgaagtcgatcatgttgacttcttgaaaccagtggacgtaggggacttccttcgattcaaatcatgtgtcttgtacacccagcttgacaatccagagcagcctctggtcaacgtcgaagttgttgctcatgtaacaagacctgagctccggaaaagtgaggtctccaacaccttccatttcaccttcacggtctgtagtgacacgctgaagaacgggttgaagattcgcaatgttgtcccctcgaccgaagaagaggcgcggcggatattggagcgcatggaggcagagggtttatgcaactaatctttccgcagatccacttgtttcggagttcggacgtgctttacttgatatatgtctcacttaccgttccacggtaccagctaaaacggggggatttggcgacgatttgagcagcagccagcagctatcataacacgccggcaatagaacggcatagctgtagctccatgcctccatggtactatttgtgattttttttacagagaccgcatgttgcgtataataacatactcctcgagactcaaaatgttcttttgagaaagcatcaaagcactatcgtttttttttatttgctcttgaaatggacggcggccgttcccatgactccaagaaccatgagtcccttttccccagttgcctttggcatcatcgctttgtcaaagggtcttgtcggt

SEQ ID NO: 26800 - DNA, 1389 bp, Zea Mays
cctgcctctcttttttctaccacaccggcacacccacaccttcccacaaggccggaggtgagccccgcatccgcggccaagtacccatgacgacgaggctgacagcgacgttgttgctctccagaaccctcgtccgccgcgtaacctcgcgaaccccgacacccctcggccctttcggtctcgaaccatccgcaggaatccccatctcctggtccagacgcgcctcctcgaccgcctcgggagatcggggccaggaaccgccaccggccatggattcgcctatcaaggtggtttctcacctggggggcggacgaggaggaggagggggagagggagagggagagggagagggaggggccgcagcgatcgacgcggggaagtcggcacggaggccgctcagcctgtggcccgggatgtaccactccccggtgaccaacgcgctctgggaggcgcggtccagcatcttcgagcggatgatggacgctgggaacggcgcttcctctgccgagcagcggccgcagactgagctgctcgtcaagacgcccgcgcagagccggaccagcatcgtgtacaagttcgccaccgacgacatcctcagggagcagtaccgggacccctggaacgaggtgcgcatcggcaagctgctcgaggatcttgacgccctcgccggcaccatcgccgtcaagcactgttcagatgaagacagcacaacaagaccccttttggttgtgactgcttccgttgacaaaatggagctgaaaaagccaattcgtgtggacactgatttgaagatagctggcgctgttacttatgttgggcgttcatcaattgacatacagattgaagtgactcaggttgataaagcagatggcgataatcagtctgatcccattgcattgaccgctaacttcacctttgtcgcacgcgattctaagactggaaaatctgctccggttaaccgcctttcacctgaaaccgaaagagagaagcagctatttggagaaagtgaagcacgcgataagatgagaaaaaggaagagagaagaacagaagggaggactcgaaaatgggatacataggctccgtgccgaggccgagaggctggacgtgttgctcgcggagggccgtgttttctctgacctgcctgctttggccgatagagatagcatcttgctgaaggatacccgcctggagaattctcttgtctgccagccccaacaacggaacttgcatggtcgaattttcggtggtttcctgatgcaccgagcatttgagcttgccttctcgactgcgtatgcttttgttgggcagagaccttgtttccttgaagtcgatcatgttgacttcttgaaaccagtataaacatgtcgttgtcaggggcggaccgacg

SEQ ID NO: 26801 - DNA, 962 bp, Zea Mays
cctgtgtttatgagttaagaagcctttggactacactcggtagcaaagggtttttaacacgttatcagcacgattgctcttgtgatataggagttcacaaaggtaagaatctagtcacactacaacgtacagagatatgtagcaggcatgtatttttttctcattcctttgttcttgattccaagtttgcaacacgcaaggcagcagccgcccatcggctcaagtgccgctcgagcacgcggccacaacagccaccgcaccgccctgcgcgcaggcgagcatgcgggcacaacggccatggcaccgccacgcaggtgagcgagcaggccgcgctgccgtacgcagggcaccgccacgcaggcgagcgagcaggtcgcgttgccgtacgcaggcgcgcgagcacgggcccagccgctactactgcaggcgaaaccagacatcgccgctccggcaagtgggcgcgcagccgtcgcagcaccacctctacgacacgagggcgtcgcgccgctgttgcttcaaaggtgtgctgacgtgtgacgagcagacgcgaccccatcgtgaccgagcacaggccatcgctgttgcgtacgaagctcatgctgttgctgcgcaggccagctcccatgcgccgacgccgtcccgcggcaagcgcgcaagccaagccactgcgccgcgagcacgaacacaggttaagccacctgcgccgttgcaagtgaatatgtaggcgcggctgattccgcgggcggcgttccgactgccgccgctgccactccatgggcacgcgagcctgcaggcaccgaccgccaccggcgacacgacctcgaagatacgcaggctggcgcgggcaccatcgccccgaaggctggcaggcgcgccagccgccgccgcagcctcggaggtaggtaggcacgaccgccgccaccccaaatttgcacgaaccaaaaataggaaggaaagaaaaa

SEQ ID NO: 26802 - DNA, 2710 bp, Zea Mays
taaacaagacataaaaaatatactctctaaagagtctaaattatactctctaaatcaccatttgaagagtcatttgcataaatgtcactttctatatcttttcaatctctggtagtctttctatattttgtttgcactcacgttatttatacttggctagcgagaaactcggaataaaatatggctatattttgatagccatttagataagatgttcgagaatattttttataaaaaaaactttatttatatatattagaaagaatatagggagtttattggagttgctcttagaacaacaacaataaaaatgctgtacatatcctgctggaaggagaaaatggtggccggccgagctatacgttgcctgcggcgaccctctccgcagttcaattccagcacacgtctccatcacgcttctctctcgcccatgggccatcgacaagcgacgtcgtgcttttctatggacgggaggcgacgagatacctggccggaaatgtggggttgcattgtggacggtgcgtcgcccacgtgagctcggtgatctggagtctggaccctcaggctcagccgctcaggtgggagtggatccacagggctgggttgaggcgtgcccagcctagccttcagaggacaaggctgtccagattgctttctgccttcctcgctccacggcctgggtcttccattggtgacgagaaatccaccctcttcttgttcagccggtgaatcaatattggccaatgtgttaacttacgtagcgtttggtttcgaagccacttgggatagaatggcttcgttcccgctagcggctccatccaaaagattttgagaagctaaaatggttcaacatttgagcataatttttcatttttagaaccactccatgctatatagaatcaatccaaacaataataacaacaataaattaaaagcgaagccactccaaaaccatactacaaaactaaacactaccttagttgcccttgcattgtttgcagcgataccaaagaggcgctatcgtggtataataggtagcatatgttatcactaaggtcatctccagcaggtcgtgcaaagtactgttttgtactgtagattacattgtttgcaaagtatagaaaatctgttagagatagtctaagaacaaatataataagatgatgtagatgggctgcaagggatgatataccaaattataatgatgtgaaagaaagagaaataaagagagagaaaatcagattactcactagtagctagactctataaaagaaagagtttgacgaagtattaaatgtgcagtttttatcgtgagagagttattatagctacaggcctgcttacacgacattttttcttacgtggaagagagagataaaaaattaggagaagtgggctcttatacaagagtcagctgctacacgagctccaaaataaaaagataaaagacaaaaagacaaaatagtaatctaagagtcaaccttatagttaacaccattatatgaatgttttattgatggctatagaggttttaagcccaccataggcactattgttaaacttgctcttataaagctcactataggttgcgttattaagcttgctctaagagtaagtataattaagaggttagaagctagctaaatgctgagatggatgaaaaagaagagaagagaagcggactgtaaatttaccgccaaatttagacacaagaaccaagaaactttgtgagagagataagtaagatcctgcattaatagcgaaaagctaactactaatacaaatgtgctaaatagtgtattgaacactttcaatgtgctaaatagtgtattgaacacttgcatgaaacgaacaaactagtagagctgctctatagtagacctgtgtggatttggaactgatgaagctctgccaaacatcttaaaaaaatgctagctaccctagcacctgattacattttttctattgatttatttatataacaacataataccggatgatagctcacctttttccattgatctgcagaacattgtaaatatatttttttattttaaataacaaatgtaacacattgcataacatgcagtgatttttcttagccaaaacgcaggttcagcaattatttacacacttaagtaaaaaatgtgcatagctaatctgaaatctttgttatcatgtgattttagtttaataaagaaaaagatatgaactattttgctgaaagggtccacaggttcagttcaagacaaagcagcatttacaagtcacaccacctgaacagatggggaatgatggaacttctctggaaagacaactttagaggccatcgtatgatggaacttctccggaaagcaagcaaaatgcggacgaaaaagattttattgtaacatttgataattttttattccattttaatttatatttatatcgcttcactaatatatcaaacttggataagcagcaaaaaaaataagatgttttcgaattggtctaaaaactgccttttcaaagtagtagcagaaagtgttcaggaaacacctttttccaaaagtcaggttagaggccaacattgagatatacctctcatcaattcaaactatcggtgtgctctcagttcctcttacattcaggaacagacatagggtgtatttggttcagttttttgaaccaaattcgctgccaaaattccggaatttcaaccaaatga

SEQ ID NO: 26803 - DNA, 2097 bp, Zea Mays
aagccaaagccgaaagaaatcagttacctgtacctgagacgcagccattcgagcaatgtcgtgcaatggtgacagcgtcccattcgagcgaagagataaactgtttcctttccattttttcctaacatcgcggcattaattttattatggcgaagcccacccggccatttcccataatagcaaaaatctcttctcccagtgcttgggccgcccagtggccagtatatatcgttagttcgctacacatggccgtcccgggcaaagaagcaccgacaacagtcgacacgatggccagcccgttgctgtccctggccaccgcggcgctggccgtagccgtcctcatctccacgacagaggcttggcgcgcgacgccaacgccgctgccagtgctgccgatcccgtcggcggcgcagctgaaatggcagcgccgcgaggtgatcatgttcttccacttcggcatgaacaccttcacggactccgagtggggcacggggtgggaggacccgtccctgttctaccccgcgaggctcgacgccacccagtggatggacgctgcgcgggcggcgggggcctcgctcgccatcctcgtcgccaagcaccacgacgggttctgcgtctggccgtccgagtacacggcccactccgtgcgcgccagcccctggcgcgggggccgcggcgacgtggtgagggaattcgtggacgccgcccgcgcgcgcggcgttgacaccgggttgtacctctcgccgtgggaccggcacgacgagcggtacggccaagaggtcgcgtacaacgagtactatgagtcccagctccacgagctcctcaccgggtacgggagcgtgtcggagatttggttcgacggcgccaagggcaaggacgcgaccaatatgacgtaccacttccaggaatggttccagacggtgaagcagctgcagccctccatcaacatcttctccgccgtcgggcccgacgtccggtgggtcggcgacgagacaggcgaagccggaaccacctgttggtccaccgtcaaccgctccatgatcaccataggcgaagccagcgacgagaagtacctgaacgagggcgatccgcgggggagcgactgggtgccgccggagtgcgacgtgtcgatccggccaggctggttctggcacaagagcgagacggccaagccgctgcgccagctgcttgagatctactacaactccgtcggccggaactgcgtgctcctgctcaacgtgccgcccaactccacgggccttgtcgaggacgccgacatggcgcggctgcgcgagttcggggccgccgtggccaccatcttcggcacggacctcgccgcgggcagcgaggccagggccagcagcgtgcgcggcgccgggttcgcggcgcgcaacgtgctggacggccgcgaggacacgtactgggcgccgacggccgaggacgggcgaagggacgtttactggatcgagctgcggcggccgccgggcgcgcaggcgcggccgttcaacgtggtccggatccaggagcacgtggcgctggggcagcgcgtggagcggcacgcggtgtacgtcgacggcgcgcccgtggcctacggcacaacagtggggcacaagcggctgcaccggctgccctgccccgtcgccggcgggacggtgagggtctggatcacggcgcggcgtggcccgcctctgctctcggcggtgggcctccactacgaccccttcgtcgcggcggccaccatgtgacgtggcgagcgcaagggacttaggctgtctccagcaacgaaccctaaatggtcctgtactctaaatttagaggatgagacgtccgctatcggctccagcagcaacctgtaaatgaaactgtaaaatagcggacgactttgacgagcgctaaagccagagcgtacttgttcatccgctatcctgctctcacatgcagtccagcctcttcctctctctactttttctcctgcgcttgtcagatgccgtacagatgccatacaaatttgtctgctatcgcttggttgtagtcggttttaaaaattaattagtctctaattaattcttggatcacatgaatgattttttgtttccg

SEQ ID NO: 26804 - DNA, 1295 bp, Zea Mays
cggagtcggagcatggcgtctgcagtggtggtggacgccggcgacgcgccggagcccacggttcgtaacctcctggaccaggagtccctcaagtgggtcttcgtcggcgggaagggcggcgtcggcaagactacctgcagctccatcctctccgtcctcctcgccggggtccgctcgtccgtgctcgtcatctccaccgaccccgcgcacaacctcagcgacgccttccagcagcgcttcaccaagttccccactctcgtccgcggattcaccaacctctacgccatggaaattgacccaaaggtagaaaatgatgatttatccaatgaaggaatggaaggattcctgtcagaactgacaaatgcgattccaggagtagatgaagctatgagttttgctgaaatgctaaaattagtccaaacaatggattactctgttgtagtttttgatactgctcctacagggcatacattacggttgcttcagttcccagcaaccctagagaagggtcttgagaaaatgatggagttgaaaaatagatttggcggtctgttgaatcaggccagtcgattgtttggtcttggtgatgagctgaacgaggatgcaatgcttgggaaacttgagggtatgaaggatgtgatcgaacaagtgaacaggcaatttaaagatccaaaagattggtgcaagagttagcgaagtttgagattgattcacacaatattattattaatcaagttatatttgatgaggaagctgtcgagtcaaaactgctaaaagcacggatgaaaatgcaacaaaaatacattgatcagttccatatgttatacgatgacttcaacatcaccaagcttcccttgctttcagaagaggtttgtggtgttcaagctctccaaaacttttcccagcacttccttacaccatacaagtctactcttaaaaggggcaccgtcgaggagctcgaacagagaataactatattaaaatctgcactgcaagaagctgagacagagttagatagggttaggaaagggaagcagtcagtgtgattttttttccacaggtcaagtgtgtaaaaccagagagacgatcaattttttcgtgtcattacactcttgttgatttcactatcatgtttcctcatcgaggagtttagacttgtaatagctatcggcagagaagtgtttgattcacacaagatatatagatccattctttttgccggttattcgcgtgtctaactctgaagaagtgaagatcagttttagaatccattcccccctcgtactgtttggtca

SEQ ID NO: 26805 - DNA, 1377 bp, Zea Mays
caggtgccagcgccatcgccgttcgcctcctctccacactccgccagatcccatccctctcgcccacgcgcgggtatcggagtcggagcatggcgtctgcagtggtggtggacgccggcgacgcgccggagcccacggttcgtaacctcctggaccaggagtccctcaagtgggtcttcgtcggcgggaagggcggcgtcggcaagactacctgcagctccatcctctccgtcctcctcgccggggtccgctcgtccgtgctcgtcatctccaccgaccccgcgcacaacctcagcgacgccttccagcagcgcttcaccaagttccccactctcgtccgcggattcaccaacctctacgccatggaaattgacccaaaggtagaaaatgatgatttatccaatgaaggaatggaaggattcctgtcagaactgacaaatgcgattccaggagtagatgaagctatgagttttgctgaaatgctaaaggcatacattacggttgcttcagttcccagcaaccctagagaagggtcttgagaaaatgatggagttgaaaaatagatttggcggtctgttgaatcaggccagtcgattgtttggtcttggtgatgagctgaacgaggatgcaatgcttgggaaacttgagggtatgaaggatgtgatcgaacaagtgaacaggcaatttaaagatccagacttgacaacttttgtatgtgtttgtatcccggaatttctttcattgtatgaaacagaaagattggtgcaagagttagcgaagtttgagattgattcacacaatattattattaatcaagttatatttgatgaggaagctgtcgagtcaaaactgctaaaagcacggatgaaaatgcaacaaaaatacattgatcagttccatatgttatacgatgacttcaacatcaccaagcttcccttgctttcagaagaggtttgtggtgttcaagctctccaaaacttttcccagcacttccttacaccatacaagtctactcttaaaaggggcaccgtcgaggagctcgaacagagaataactatattaaaatctgcactgcaagaagctgagacagagttagatagggttaggaaagggaagcagtcagtgtgattttttttccacaggtcaagtgtgtaaaaccagagagacgatcaattttttcgtgtcattacactcttgttgatttcactatcatgtttcctcatcgaggagtttagacttgtaatagctatcggcagagaagtgtttgattcacacaagatatatagatccattctttttgccggttattcgcgtgtctaactctgaagaagtgaagatcagttttagaatccattcccccctcgtactgtttggtca

SEQ ID NO: 26806 - DNA, 1155 bp, Zea Mays
cgcttctgcccccagcaggtgccagcgccatcgccgttcgcctcctctccacactccgccagatcccatccctctcgcccacgcgcgggtatcggagtcggagcatggcgtctgcagtggtggtggacgccggcgacgcgccggagcccacggttcgtaacctcctggaccaggagtccctcaagtgggtcttcgtcggcgggaagggcggcgtcggcaagactacctgcagctccatcctctccgtcctcctcgccggggtccgctcgtccgtgctcgtcatctccaccgaccccgcgcacaacctcagcgacgccttccagcagcgcttcaccaagttccccactctcgtccgcggattcaccaacctctacgccatggaaattgacccaaaggtagaaaatgatgatttatccaatgaaggaatggaaggattcctgtcagaactgacaaatgcgattccaggagtagatgaagctatgagttttgctgaaatgctaaagccagtcgattgtttggtcttggtgatgagctgaacgaggatgcaatgcttgggaaacttgagggtatgaaggatgtgatcgaacaagtgaacaggcaatttaaagatccactgtcgagtcaaaactgctaaaagcacggatgaaaatgcaacaaaaatacattgatcagttccatatgttatacgatgacttcaacatcaccaagcttcccttgctttcagaagaggtttgtggtgttcaagctctccaaaacttttcccagcacttccttacaccatacaagtctactcttaaaaggggcaccgtcgaggagctcgaacagagaataactatattaaaatctgcactgcaagaagctgagacagagttagatagggttaggaaagggaagcagtcagtgtgattttttttccacaggtcaagtgtgtaaaaccagagagacgatcaattttttcgtgtcattacactcttgttgatttcactatcatgtttcctcatcgaggagtttagacttgtaatagctatcggcagagaagtgtttgattcacacaagatatatagatccattctttttgccggttattcgcgtgtctaactctgaagaagtgaagatcagttttagaatccattcccccctcgtactgtttggtca

SEQ ID NO: 26807 - DNA, 1312 bp, Zea Mays
cagtaccgcttctgcccccagcaggtgccagcgccatcgccgttcgcctcctctccacactccgccagatcccatccctctcgcccacgcgcgggtatcggagtcggagcatggcgtctgcagtggtggtggacgccggcgacgcgccggagcccacggttcgtaacctcctggaccaggagtccctcaagtgggtcttcgtcggcgggaagggcggcgtcggcaagactacctgcagctccatcctctccgtcctcctcgccggggtccgctcgtccgtgctcgtcatctccaccgaccccgcgcacaacctcagcgacgccttccagcagcgcttcaccaagttccccactctcgtccgcggattcaccaacctctacgccatggaaattgacccaaaggtagaaaatgatgatttatccaatgaaggaatggaaggattcctgtcagaactgacaaatgcgattccaggagtagatgaagctatgagttttgctgaaatgctaaaattagtccaaacaatggattactctgttgtagtttttgatactgctcctacagggcatacattacggttgcttcagttcccagcaaccctagagaagggtcttgagaaaatgatggagttgaaaaatagatttggcggtctgttgaatcaggccagtcgattgtttggtcttggtgatgagctgaacgaggatgcaatgcttgggaaacttgagggtatgaaggatgtgatcgaacaagtgaacaggcaatttaaagatccactgtcgagtcaaaactgctaaaagcacggatgaaaatgcaacaaaaatacattgatcagttccatatgttatacgatgacttcaacatcaccaagcttcccttgctttcagaagaggtttgtggtgttcaagctctccaaaacttttcccagcacttccttacaccatacaagtctactcttaaaaggggcaccgtcgaggagctcgaacagagaataactatattaaaatctgcactgcaagaagctgagacagagttagatagggttaggaaagggaagcagtcagtgtgattttttttccacaggtcaagtgtgtaaaaccagagagacgatcaattttttcgtgtcattacactcttgttgatttcactatcatgtttcctcatcgaggagtttagacttgtaatagctatcggcagagaagtgtttgattcacacaagatatatagatccattctttttgccggttattcgcgtgtctaactctgaagaagtgaagatcagttttagaatccattcccccctcgtactgtttggtca

SEQ ID NO: 26808 - DNA, 1420 bp, Zea Mays
ccagtaccgcttctgcccccagcaggtgccagcgccatcgccgttcgcctcctctccacactccgccagatcccatccctctcgcccacgcgcgggtatcggagtcggagcatggcgtctgcagtggtggtggacgccggcgacgcgccggagcccacggttcgtaacctcctggaccaggagtccctcaagtgggtcttcgtcggcgggaagggcggcgtcggcaagactacctgcagctccatcctctccgtcctcctcgccggggtccgctcgtccgtgctcgtcatctccaccgaccccgcgcacaacctcagcgacgccttccagcagcgcttcaccaagttccccactctcgtccgcggattcaccaacctctacgccatggaaattgacccaaaggtagaaaatgatgatttatccaatgaaggaatggaaggattcctgtcagaactgacaaatgcgattccaggagtagatgaagctatgagttttgctgaaatgctaaatttttgatactgctcctacagggcatacattacggttgcttcagttcccagcaaccctagagaagggtcttgagaaaatgatggagttgaaaaatagatttggcggtctgttgaatcaggccagtcgattgtttggtcttggtgatgagctgaacgaggatgcaatgcttgggaaacttgagggtatgaaggatgtgatcgaacaagtgaacaggcaatttaaagatccagacttgacaacttttgtatgtgtttgtatcccggaatttctttcattgtatgaaacagaaagattggtgcaagagttagcgaagtttgagattgattcacacaatattattattaatcaagttatatttgatgaggaagctgtcgagtcaaaactgctaaaagcacggatgaaaatgcaacaaaaatacattgatcagttccatatgttatacgatgacttcaacatcaccaagcttcccttgctttcagaagaggtttgtggtgttcaagctctccaaaacttttcccagcacttccttacaccatacaagtctactcttaaaaggggcaccgtcgaggagctcgaacagagaataactatattaaaatctgcactgcaagaagctgagacagagttagatagggttaggaaagggaagcagtcagtgtgattttttttccacaggtcaagtgtgtaaaaccagagagacgatcaattttttcgtgtcattacactcttgttgatttcactatcatgtttcctcatcgaggagtttagacttgtaatagctatcggcagagaagtgtttgattcacacaagatatatagatccattctttttgccggttattcgcgtgtctaactctgaagaagtgaagatcagttttagaatccattcccccctcgtactgtttggtca

SEQ ID NO: 26809 - DNA, 1301 bp, Zea Mays
ccagtaccgcttctgcccccagcaggtgccagcgccatcgccgttcgcctcctctccacactccgccagatcccatccctctcgcccacgcgcgggtatcggagtcggagcatggcgtctgcagtggtggtggacgccggcgacgcgccggagcccacggttcgtaacctcctggaccaggagtccctcaagtgggtcttcgtcggcgggaagggcggcgtcggcaagactacctgcagctccatcctctccgtcctcctcgccggggtccgctcgtccgtgctcgtcatctccaccgaccccgcgcacaacctcagcgacgccttccagcagcgcttcaccaagttccccactctcgtccgcggattcaccaacctctacgccatggaaattgacccaaaggtagaaaatgatgatttatccaatgaaggaatggaaggattcctgtcagaactgacaaatgcgattccaggagtagatgaagctatgagttttgctgaaatgctaaagccagtcgattgtttggtcttggtgatgagctgaacgaggatgcaatgcttgggaaacttgagggtatgaaggatgtgatcgaacaagtgaacaggcaatttaaagatccagacttgacaacttttgtatgtgtttgtatcccggaatttctttcattgtatgaaacagaaagattggtgcaagagttagcgaagtttgagattgattcacacaatattattattaatcaagttatatttgatgaggaagctgtcgagtcaaaactgctaaaagcacggatgaaaatgcaacaaaaatacattgatcagttccatatgttatacgatgacttcaacatcaccaagcttcccttgctttcagaagaggtttgtggtgttcaagctctccaaaacttttcccagcacttccttacaccatacaagtctactcttaaaaggggcaccgtcgaggagctcgaacagagaataactatattaaaatctgcactgcaagaagctgagacagagttagatagggttaggaaagggaagcagtcagtgtgattttttttccacaggtcaagtgtgtaaaaccagagagacgatcaattttttcgtgtcattacactcttgttgatttcactatcatgtttcctcatcgaggagtttagacttgtaatagctatcggcagagaagtgtttgattcacacaagatatatagatccattctttttgccggttattcgcgtgtctaactctgaagaagtgaagatcagttttagaatccattcccccctcgtactgtttggtca

SEQ ID NO: 26810 - DNA, 1749 bp, Zea Mays
ctttcttgagatgcagaaacttagcaggactaaacgaaggcaatgaaactggattatgaaatcctcccgctccaagaaaatgtactctggaagaacgctctgtcgtacgtattagttcaaaacagcaccttaattttgccagactgacagtaatattctgaaacaaatttaagtgagaaatttcataagctatcaaaaaggtgagaattttacctttttagccaccggggaccgagctggaatgctaatttatcaaatcaaacgatgaaaagttgaaaacgtccagaagaggaaaggtattttccaattatttcattttccacctagacaattccagtaccgcttctgcccccagcaggtgccagcgccatcgccgttcgcctcctctccacactccgccagatcccatccctctcgcccacgcgcgggtatcggagtcggagcatggcgtctgcagtggtggtggacgccggcgacgcgccggagcccacggttcgtaacctcctggaccaggagtccctcaagtgggtcttcgtcggcgggaagggcggcgtcggcaagactacctgcagctccatcctctccgtcctcctcgccggggtccgctcgtccgtgctcgtcatctccaccgaccccgcgcacaacctcagcgacgccttccagcagcgcttcaccaagttccccactctcgtccgcggattcaccaacctctacgccatggaaattgacccaaaggtagaaaatgatgatttatccaatgaaggaatggaaggattcctgtcagaactgacaaatgcgattccaggagtagatgaagctatgagttttgctgaaatgctaaaattagtccaaacaatggattactctgttgtagtttttgatactgctcctacagggcatacattacggttgcttcagttcccagcaaccctagagaagggtcttgagaaaatgatggagttgaaaaatagatttggcggtctgttgaatcaggccagtcgattgtttggtcttggtgatgagctgaacgaggatgcaatgcttgggaaacttgagggtatgaaggatgtgatcgaacaagtgaacaggcaatttaaagatccagacttgacaacttttgtatgtgtttgtatcccggaatttctttcattgtatgaaacagaaagattggtgcaagagttagcgaagtttgagattgattcacacaatattattattaatcaagttatatttgatgaggaagctgtcgagtcaaaactgctaaaagcacggatgaaaatgcaacaaaaatacattgatcagttccatatgttatacgatgacttcaacatcaccaagcttcccttgctttcagaagagcacttccttacaccatacaagtctactcttaaaaggggcaccgtcgaggagctcgaacagagaataactatattaaaatctgcactgcaagaagctgagacagagttagatagggttaggaaagggaagcagtcagtgtgattttttttccacaggtcaagtgtgtaaaaccagagagacgatcaattttttcgtgtcattacactcttgttgatttcactatcatgtttcctcatcgaggagtttagacttgtaatagctatcggcagagaagtgtttgattcacacaagatatatagatccattctttttgccggttattcgcgtgtctaactctgaagaagtgaagatcagttttagaatccattcccccctcgtactgtttggtca

SEQ ID NO: 26811 - DNA, 666 bp, Zea Mays
actggtccatggtgatttgagtgaatacaatattctatattttgagctttggactttctgaaggaagattgcttgcatgtttctgacttctttaaaaaacgtggtgttcctgtcatgacagtaaccgatttgtttaattttgttattgatcaaagcatttctgatgaaggtgttgatgattatctggaaaaggctcagcaaaagattttggaaaacggtggtgcggttccaaatgatgatgaaattactccaacagtcatggtgcagacgttggactacgtgaagcaatgtgaggcagatattgtcaacatgtcaataatgcaacgttcatcctctggctatgagccaaccgcagataagctttatgaccagccattgttaggatttgtgcggactaaaaacacacacactgaaaaggagcaaggacaaccggcacgaaacttagttgaggttgaagaagacgagagcgaatcttgctcgagttctgatgaagatgattcgtggcacgaggatgatcctaaggtgggacccgaggaaaggaaggctgctcggaaggaaaacaagaagaaagtgaaggaagagaagagggaggcccgcaagaccaagatcccaaaagctgagaagaagaagaggaagaaaatggcaaaggcaaaatgcaagcggtag

SEQ ID NO: 26812 - DNA, 849 bp, Zea Mays
atctatttacaattggtatttattttactgttggatttcattgtatgtattgttttcagttttctcatactacttacggcaccttttcagataattacaacaatgcggactctttaccaaacgtgcaaactggtccatggtgatttgagtgaatacaatattctatattttgagggtcacttgtatattattgatgtttcacaatccgtcgatcttgatcacccttcagctttggactttctgaaggaagattgcttgcatgtttctgacttctttaaaaaacgtggtgttcctgtcatgacagtaaccgatttgtttaattttgttattgatcaaagcatttctgatgaaggtgttgatgattatctggaaaaggctcagcaaaagattttggaaaacggtggtgcggttccaaatgatgatgaaattactccaacagtcatggtgcagacgttggactacgtgaagcaatgtgaggcagatattgtcaacatgtcaataatgcaacgttcatcctctggctatgagccaaccgcagataagctttatgaccagccattgttaggatttgtgcggactaaaaacacacacactgaaaaggagcaaggacaaccggcacgaaacttagttgaggttgaagaagacgagagcgaatcttgctcgagttctgatgaagatgattcgtggcacgaggatgatcctaaggtgggacccgaggaaaggaaggctgctcggaaggaaaacaagaagaaagtgaaggaagagaagagggaggcccgcaagaccaagatcccaaaagctgagaagaagaagaggaagaaaatggcaaaggcaaaatgcaagcggtag

SEQ ID NO: 26813 - DNA, 2188 bp, Zea Mays
aaccagaaaccataggcatcggccttgggcgccacacgatttccggcagcatcaacaaccgttcaggctttactccatagtccatacaaatatttatacggcccttaccgcctcgagcctataaaagcgccgcgcctcgcccctgcacagctcacctcacctcactcaaaccgagcgccagttgccagcacgaagagtaggagtaggaatcgaagagtgagtgaaactgaaagacgaggaggagccatggcgaccccggatgaccgcggcagctggttgctgtacctgtccctagccgccaaatgcgccggcgagcagccttaccgcctcgcgggcttcctggccgtctgcgccgtggccttcgtcgtgacatgcctcctccactggtgcttcccgggaggcccggcgtgggggaggtggtggtggacgcggcggctcggtgccggtgccggtggcggcgcgacggcggtggcggcggccctgccggggccgaggggcctgcccgtggtcgggagcatgtggctcatgacgggcctggcgcaccgcaagctcgcggcggcggcggggagcctcggcgccaggcgcctgatggccttctccctcgggggcacgagggtggtggtggcctcgcacccggacgtggcgcgcgagatcctcagcagcccggcgttcgcggaccggcccatcaaggagtccgcgtacgggctcctgttccaccgcgccatcggcttcgcgccctacggcgcctactggcgcgcgctgcgccgcgtggcgtccacgcacctcttctccccgcggcaggtcgccgcgtcggccgcgcagcgcgccgtcatcgcgcgccagatggtcggcgccgtcaaggagctgtcggcggcctcgccggggcggcgcggcggcgtcgaggtccgccgcgtcctgcgccgcggctccctgcacagcgtcatgtggtcggtgttcggccggcggtacgacctggagctggacccggccagggagagccccgagacgcgggagctgaggcgactcgtggacgaagggtacgacctgctgggccagatcaactggtccgaccacctccccggcctcgcgtgcctcgacctgcagagcaccagggccaggtgcgaccgcctcgtcccgctcgtgacccgcttcgtcggcggcatcgtcgacgagcaccgcgcccggaaccacctccgctctgctccgcctgccgtcgtggacttcaccgacgtcctgctctcgctgccggccgacgacaggctcaccgacgctgacatgatcgccgtcctctgggaaatggtgttccgtggaactgacaccgtcgccgtgctgatggagtgggcgctggccaggctcgtgctgcaccctgacgtgcaggcccgcgtccacgacgagctggaccgcgtggtcgggccccaccgggccgtcaccgagtccgacacggcgtcactggtctacctgcacgccgtgatcaaggaggtgctcaggatgcacccgccgggcccgctgctgtcgtgggctcgcctggccacgtcagacgtgcacgtcgacggacacctcatccccgccgggaccaccgcgatggtgaacatgtgggccattacgcacgacccagacgtgtgggccgagccgacggagttccagccggagaggttcatggggtccaccgagttcccgatcatggggtcggacctcaggctcgcgccgttcggggcgggccggcgcagctgccccgggaagagcctcgccatggccaccgtggccttctggctcgcgacgctgctgcacgagttcgagctgctcccctcgcccgtcgacctgtcggaggtgctcaagctgtcgtgcgagatggccgtcccgctggcgctggccgtgacggcgaggccccggcaagcggttcagaagtcggttggggtatcagtctcactgtgagcaatagcatggcgggctggcgctactgtacatggaaagtgcttctgcttgcaggttgctactactcggtcgacatgggtatatgcttttcatgttactgtctttgatgtgtatcgatcaggtgccgaatgtgatactttggcttgtactgttagctcttttcctgggtgctcttttctttctttttcttagtactcgctgtaagactcgtcaaatgtatatgctggtttggatggttttggattgtaaaaaagaa

SEQ ID NO: 26814 - DNA, 3007 bp, Zea Mays
ggagtagagcaaatggctagcgaggagcggatcttggtgtcggtgcgactgcggccggtgaacgcacgagaggcggagcgcggtgatggctccgactgggagtgcacgagcacgaccaccctcatgttccgcggcaacatccctgagcgcgccatgttccccgcctcctacacctacgacagggtgttcaacccgaagtgcagcacgcgccaggtgtacgaggaaggggctaagcagcatatttgcgtacggtcagacgagcagcgggaagacgtacacgatggtcggcatcacggagcgcagcatgtcagacatctacgactacattgacaagcatcccgagagggaattcgtcctgaaattttcggcgatggagatatacaacgaagccgtgagggatctcttaagacctgatgcaacacaactaaggctactggatgatccagagaaaggaactgtggtagagaaactcaccgaggaaactctcaaggacaaaggccatctcttggagctccttgcagtgtgtgaagctcaaagacagatcggggaaacttctatgaatgaagcgagctccagatctcatcagatactcagattggttggcccttacgatcgagagttcagcaaagcagttcatgggacgaggaaactcaagcacccttctggcttgtgtgaattttgttgatttagcaggaagtgagcgtgcctctcagacacaatcagctggtatgaggcttaaggaaggcagccacattaacagaagcctgctaactttgggaaaggtcattcgccaactcagcaagggaagaaatgggcatatcccttacagagattcaaagctcactcgcatattgcagtcatctttaggcggcaacgcgagaactgctattatctgcacaatgagcccagcacactgccatatcgagcagtccaggaacacacttttgtttgcaaattgtgctaaaaatgtagttactgacgcaaaggtcaatgtggtgatgtctgacaaggtgttagtgaaacatcttcagagagaaattgcaaggctagagaatgagttgaagtttcatggatcagcctataccagcaatcatgctgatgctttgagagaaaaagatgagctgatcaaacagctcgaagaacaattgaaggaattgatggggcagaaagaaaccgttcagtctcaacttgacaattttcgtagagttgcaatagatgaaaattttgatgaccatgcaataagacaatgggatcaacgaaataggtcttcagagtcccttccacataatgtgtctgaagatgctctttcttcttttgatacttacgatgttgtttatggagaacaagatggtctaggcccaaaagcatttgatgtacatccaatatctatcttgcatcaaccaagaaaccatatttctgataacattcagatatatcaaccaaataaggaggcttcctcagaggtctctgaggagcattgcaaggaagtccagtgcatcgaaacaaatgagcttaggaggagtccattattctttcctgttgatcgatatcatgttggcacaaacattgatgaaggaaagcatgatgaaaacataacggacacatcagacagtgccatcaaattgtacacatgtgattctgagccatcttctgataccgaaaaaacaaataatgatgaatctttagccctgaagaggtgcgtgataagctctagggatagtgtactaactagaagcagaagttgcagagctagctttatggtcattccaaatagttggtttggtgattcgttggatatgagaatgacaagaccaggtgacattttcaaatattctcaaagaaggccaaagaacgttaggagtttgtatcctgaaaatggtcattgttcaaatgatcttacattcacttgtaatgaagaagatgaagacgccatcaacaatgtcgttggcataacaaaagtggaagagaagttagaagagtgttgtacatcccagctagagggcaatcaggatgacgttactgaagaaattttggacataaaacatgccaatgatgttgataaagatatatcagtgaccagtgtcgactctccttcacggtggcctattaactttgagaaaaaacagaaggaaatcattgagttgtggcatgaatgcaatgtatctatagtacacagaacatatttcttcctcctctttaagggggacaaagaagacaatatttacttggaagtggagcacagaagattatccttcattaaaagttctttcagtgttgcatctgaggctaatgctgctgctacatcaagcttgagaaatcttcggcatgaaagagacatgttgtacaggcaaatgctaaggagactcaatcttttggaaagagagagcctttacaacaaatgggggatcgatcttaattccaaacaacgaagactacagctatcacgtcgcatctggacacagactgacatggaacacgtgagggaaagtgtcgctcttgtcgcaaaactagtagaacacctggagaaggggcaggtcatcaaggagatgtttgggttgaccttcacactgaacccacaagctgaacgaagaccttttcagttgtgttagtgctcattcctaaactaagcattgcgataatgacaattatgatggttgaatgtctggatgagacaacaacaatggcataatggtaaacgatgaatacatagtaatatagatctcttgtcgggtctgaactcatcccaacattggttttcaccaatgtctgcatataattagtatcacttattatacagacgtgcatggtgatgccaaccctttgcacctaactatatgatgtgttggactatggtactatcaaaagcaaaccacatgagatgacaacccttgcacccaattgtatgatgtattgctattctgatattttctacatcaaatatatatctaatctacttgattgttttgtaaggtagagcaaatgctatgaaaatgccaacatttgttgt

SEQ ID NO: 26815 - DNA, 3152 bp, Zea Mays
tctcctcctcctctttccttgcgcgaaggagaggaggaggaagcgcttcgcctgtattatcctatagctttcaccaagcccacgaaccaccgtcgtcgtcttgccggagcaagcaagcgcggagtagagcaaatggctagcgaggagcggatcttggtgtcggtgcgactgcggccggtgaacgcacgagaggcggagcgcggtgatggctccgactgggagtgcacgagcacgaccaccctcatgttccgcggcaacatccctgagcgcgccatgttccccgcctcctacacctacgacagggtgttcaacccgaagtgcagcacgcgccaggtgtacgaggaaggggctaagcaggtggccctgtcggtgctcagcggcatcaattcaagcatatttgcgtacggtcagacgagcagcgggaagacgtacacgatggtcggcatcacggagcgcagcatgtcagacatctacgactacattgacaagcatcccgagagggaattcgtcctgaaattttcggcgatggagatatacaacgaagccgtgagggatctcttaagacctgatgcaacacaactaaggctactggatgatccagagaaaggaactgtggtagagaaactcaccgaggaaactctcaaggacaaaggccatctcttggagctccttgcagtgtgtgaagctcaaagacagatcggggaaacttctatgaatgaagcgagctccagatctcatcagatactcagattgacgatcgagagttcagcaaagcagttcatgggacgaggaaactcaagcacccttctggcttgtgtgaattttgttgatttagcaggaagtgagcgtgcctctcagacacaatcagctggtatgaggcttaaggaaggcagccacattaacagaagcctgctaactttgggaaaggtcattcgccaactcagcaagggaagaaatgggcatatcccttacagagattcaaagctcactcgcatattgcagtcatctttaggcggcaacgcgagaactgctattatctgcacaatgagcccagcacactgccatatcgagcagtccaggaacacacttttgtttgcaaattgtgctaaaaatgtagttactgacgcaaaggtcaatgtggtgatgtctgacaaggtgttagtgaaacatcttcagagagaaattgcaaggctagagaatgagttgaagtttcatggatcagcctataccagcaatcatgctgatgctttgagagaaaaagatgagctgatcaaacagctcgaagaacaattgaaggaattgatggggcagaaagaaaccgttcagtctcaacttgacaattttcgtagagttgcaatagatgaaaattttgatgaccatgcaataagacaatgggatcaacgaaataggtcttcagagtcccttccacataatgtgtctgaagatgctctttcttcttttgatacttacgatgttgtttatggagaacaagatggtctaggcccaaaagcatttgatgtacatccaatatctatcttgcatcaaccaagaaaccatatttctgataacattcagatatatcaaccaaataaggaggcttcctcagaggtctctgaggagcattgcaaggaagtccagtgcatcgaaacaaatgagcttaggaggagtccattattctttcctgttgatcgatatcatgttggcacaaacattgatgaaggaaagcatgatgaaaacataacggacacatcagacagtgccatcaaattgtacacatgtgattctgagccatcttctgataccgaaaaaacaaataatgatgaatctttagccctgaagaggtgcgtgataagctctagggatagtgtactaactagaagcagaagttgcagagctagctttatggtcattccaaatagttggtttggtgattcgttggatatgagaatgacaagaccaggtgacattttcaaatattctcaaagaaggccaaagaacgttaggagtttgtatcctgaaaatggtcattgttcaaatgatcttacattcacttgtaatgaagaagatgaagacgccatcaacaatgtcgttggcataacaaaagtggaagagaagttagaagagtgttgtacatcccagctagagggcaatcaggatgacgttactgaagaaattttggacataaaacatgccaatgatgttgataaagatatatcagtgaccagtgtcgactctccttcacggtggcctattaactttgagaaaaaacagaaggaaatcattgagttgtggcatgaatgcaatgtatctatagtacacagaacatatttcttcctcctctttaagggggacaaagaagacaatatttacttggaagtggagcacagaagattatccttcattaaaagttctttcagtgttgcatctgaggctaatgctgctgctacatcaagcttgagaaatcttcggcatgaaagagacatgttgtacaggcaaatgctaaggagactcaatcttttggaaagagagagcctttacaacaaatgggggatcgatcttaattccaaacaacgaagactacagctatcacgtcgcatctggacacagactgacatggaacacgtgagggaaagtgtcgctcttgtcgcaaaactagtagaacacctggagaaggggcaggtcatcaaggagatgtttgggttgaccttcacactgaacccacaagctgaacgaagaccttttcagttgtgttagtgctcattcctaaactaagcattgcgataatgacaattatgatggttgaatgtctggatgagacaacaacaatggcataatggtaaacgatgaatacatagtaatatagatctcttgtcgggtctgaactcatcccaacattggttttcaccaatgtctgcatataattagtatcacttattatacagacgtgcatggtgatgccaaccctttgcacctaactatatgatgtgttggactatggtactatcaaaagcaaaccacatgagatgacaacccttgcacccaattgtatgatgtattgctattctgatattttctacatcaaatatatatctaatctacttgattgttttgtaaggtagagcaaatgctatgaaaatgccaacatttgttgt

SEQ ID NO: 26816 - DNA, 229 bp, Zea Mays
gcgctgtcgcgtcctccttaggctcatccaccacgtagttaggaactaacacaccaaatcatcaatagcctcatgagatcttcgggtcaggcgtaactcaagtcagacttctttttttctttcaactttcaaagaaataaattcgcatacaaaagcaaacaactttgtggattcggctgcaaatatcaatcaaacagactgcagagctccggcgtatcgggttagggtt

SEQ ID NO: 26817 - DNA, 608 bp, Zea Mays
agatgaacgggggtggctcggcacaccttgatttctttctttctcaatctaacgctctcgtgtttcttcttgggcacactgatcagagagcaggttttccatgacatgatggtggcgcctaatttgctggtcgtgtgtgccggatatcacgatgtcagtagatcggcatggtaaagagtcaaaaacagttgttgtgccatctctaggactagctttttatttcattcagacctttggacgggttgtgccatctctgggatgagcactaacatctgctgtttcccttgttctagaaatgctgtcgagaagggagaaggccacaaacttcaaaccagactatgatattgatatccatatgaaggtcttagctatgagtgggcaagaatccagtattcttacaggctacaaactgaagtgctgatacggtggtaggaaatgagataatgatgggtatttttggtgcttcatttgcatgtccagtaccatagctcataacctgcttgcctctaggaatgttgcgaacaacgatttcactggttagattcccaatcagcttaagaagataaacaatctacagactgatggaattcttggagcaaaggaccagc

SEQ ID NO: 26818 - DNA, 252 bp, Zea Mays
gagtcaaaaacagttgttgtgccatctctaggactagctttttatttcattcagacctttggacgggttgtgccatctctgggatgagcactaacatctgctgtttcccttgttctagaaatgctgtcgagaagggagaaggccacaaacttcaaaccagactatgatattgatatccatatgaaggaatgttgcgaacaacgatttcactggttagattcccaatcagcttaagaagataaacaatctaca

SEQ ID NO: 26819 - DNA, 317 bp, Zea Mays
ggcatggtaaagagtcaaaaacagttgttgtgccatctctaggactagctttttatttcattcagacctttggacgggttgtgccatctctgggatgagcactaacatctgctgtttcccttgttctagaaatgctgtcgagaagggagaaggccacaaacttcaaaccagactatgatattgatatccatatgaaggtcttagctatgagtgggcaagaatccagtattcttacaggctacaaactgaaggaatgttgcgaacaacgatttcactggttagattcccaatcagcttaagaagataaacaatctaca

SEQ ID NO: 26820 - DNA, 2100 bp, Zea Mays
ctcactctgctaccagcagcagcggcagcagcacacaggccacagcggccgcgctgctgtgctggtgtggtgccttgtctcttctctcgtggtgcggaaagcaggtagagaaggagaagcggggggagagagagcgtcaggcaggcaataaatggcagtttaggtgcgcgcaggccgatggcggcgtggcaggtcctctctgtcgcctccaccgtcttagtataactccgtccgcgcatcagtcgcagagcgcatgagctagcacagactaccagcagccgtctgtactctgtagtaaggggagggaagcggggaggagagatcggggcggcgggcgcgctgctctctctgaccttcaccttccctgccacggcgcacggcacggaggcctatggatttgggcgcatggcggggttccctctaggcggaggaagccacacccagagccgcgacgcgcccgcctcgtccgtcccgccggtgcatccctccgacgccgcgtccttcctctacgcggcgcgcgcgggagcgggcctgcagctatggcagcagcagcagcaacacccgttctacaactccaacatcatccgcttctccgatgatccacccggcgccgcgccctcgctcacgggcgccgcgtcgccgtcgtcgccgtcgcgcggcccgagggccggcgggggaagcggcggcggcggcggggtcagctgccaggactgtggcaaccaggccaagaaggactgcgtgcaccagcgctgccgcacctgctgcaaaagccgcggcttcgcctgcagcacccacgtcaagtccacctgggtctctgctgccaagagacgcgagcgccagcagcagctcgccgcgctcgcggcctccgccggcgacacagccgcggccgccggcccgtcccgcgacccgaccaagcgcccgcgcgcacgcctctccgtcgccaccccgacgaccacgtcctcgggggatcagcagatggtcacggtcgccgagaggttcccgagggaggtgagctcggaggcgctgttccggtgcgtgcgcctggggccggtcgaccgggccgaggcggaggtcgcgtaccagaccaccgtcagcatcggcggccacgtgttcaagggcatcctccacgacgtcggccctcgtagcttgcctgccgctggaggcggcgccgccgccgccgccatcgagtactacttccgccacgccgcggacggatcgccgccgagcaccacaggcgccgctggcgaagcgtgcggcgccggtggtgtgggcaatgtcgtcgtgtcatcggctgtggtgatggacccgtacccgacgcccggaccctacaccgccttcctgcctggcgcgccgttcttcccaggccacccgagacagtgaccggcggctcgctcgatcgccagccgtctcgctgtgtaacgacatcacgactccatctccagctcgctagatctgtcaatttcgttgggtttcaattgcatgcatgtgaaaggaaatagtgacaagatgatgcttcagtaatgttgctgtccgacctcatgtacagaagaggatatatgtatatacacactgacacacaagcacatatggactcaatataagcaaaatcattggcaatttgatggcttctaactttttcttcgtacacgtgatattattgtcgttgctgtttgactagtgaactgggttatttgatagattaaataaatagtttgagcatcaaaacatcacaagacatacgcggccctatatatattgtttgtttcaaatctagtgtaccgattggtgcatatgatgagtattataattattgtttttattgtcgaatataaccgatgggatttaggggtgacaatgagctctcaattttacactatatgatttaaggatcgaattagatcaggtcttatttttattttttttgaactaaaattatttaggtctctactattttgtgaataagcatttgaattatgatctactaccacccctaatgggattcttccagcagattagtgtttcataggatgtattttcagcttcattccaaatcgaaactgtttgaaatattcatgtccactcaaaattatactataaatc

SEQ ID NO: 26821 - DNA, 2142 bp, Zea Mays
ccctcctcgctccttttccgactcttctctcgcaagcaacgagtgctctcactctgctaccagcagcagcggcagcagcacacaggccacagcggccgcgctgctgtgctggtgtggtgccttgtctcttctctcgtggtgcggaaagcaggtagagaaggagaagcggggggagagagagcgtcaggcaggcaataaatggcagtttaggtgcgcgcaggccgatggcggcgtggcaggtcctctctgtcgcctccaccgtcttagtataactccgtccgcgcatcagtcgcagagcgcatgagctagcacagactaccagcagccgtctgtactctgtagtaaggggagggaagcggggaggagagatcggggcggcgggcgcgctgctctctctgaccttcaccttccctgccacggcgcacggcacggaggcctatggatttgggcgcatggcggggttccctctaggcggaggaagccacacccagagccgcgacgcgcccgcctcgtccgtcccgccggtgcatccctccgacgccgcgtccttcctctacgcggcgcgcgcgggagcgggcctgcagctatggcagcagcagcagcaacacccgttctacaactccaacatcatccgcttctccgatgatccacccggcgccgcgccctcgctcacgggcgccgcgtcgccgtcgtcgccgtcgcgcggcccgagggccggcgggggaagcggcggcggcggcggggtcagctgccaggactgtggcaaccaggccaagaaggactgcgtgcaccagcgctgccgcacctgctgcaaaagccgcggcttcgcctgcagcacccacgtcaagtccacctgggtctctgctgccaagagacgcgagcgccagcagcagctcgccgcgctcgcggcctccgccggcgacacagccgcggccgccggcccgtcccgcgacccgaccaagcgcccgcgcgcacgcctctccgtcgccaccccgacgaccacgtcctcgggggatcagcagatggtcacggtcgccgagaggttcccgagggaggtgagctcggaggcgctgttccggtgcgtgcgcctggggccggtcgaccgggccgaggcggaggtcgcgtaccagaccaccgtcagcatcggcggccacgtgttcaagggcatcctccacgacgtcggccctcgtagcttgcctgccgctggaggcggcgccgccgccgccgccatcgagtactacttccgccacgccgcggacggatcgccgccgagcaccacaggcgccgctggcgaagcgtgcggcgccggtggtgtgggcaatgtcgtcgtgtcatcggctgtggtgatggacccgtacccgacgcccggaccctacaccgccttcctgcctggcgcgccgttcttcccaggccacccgagacagtgaccggcggctcgctcgatcgccagccgtctcgctgtgtaacgacatcacgactccatctccagctcgctagatctgtcaatttcgtttcaattgcatgcatgtgaaaggaaatagtgacaagatgatgcttcagtaatgttgctgtccgacctcatgtacagaagaggatatatgtatatacacactgacacacaagcacatatggactcaatataagcaaaatcattggcaatttgatggcttctaactttttcttcgtacacgtgatattattgtcgttgctgtttgactagtgaactgggttatttgatagattaaataaatagtttgagcatcaaaacatcacaagacatacgcggccctatatatattgtttgtttcaaatctagtgtaccgattggtgcatatgatgagtattataattattgtttttattgtcgaatataaccgatgggatttaggggtgacaatgagctctcaattttacactatatgatttaaggatcgaattagatcaggtcttatttttattttttttgaactaaaattatttaggtctctactattttgtgaataagcatttgaattatgatctactaccacccctaatgggattcttccagcagattagtgtttcataggatgtattttcagcttcattccaaatcgaaactgtttgaaatattcatgtccactcaaaattatactataaatc

SEQ ID NO: 26822 - DNA, 2390 bp, Zea Mays
aaagttctgtaaccttggcaaagtttatagaaaaacatcaaaatcgacgacattaaattagtttatttaatgtcctagatgttaatatatttttatctgaacttcgtcaaacttaaagatgtctgacttaggaccaaactaaaatgatatatattttggaacgaagggggtatattttttgtgaatttcaacattgcattatctgaatgcattgttttacacctgaaattggtaagcattgacatattttgtttgtctgcagatcccaacggtaagaatgatgatcaggaaccaacggcaatgaagaacctcaaatcttttttgcctaaggaggaatcacgcatcgccctcttggaaaactaatgatctagtcactgagaagagcatggatgtcgatgacaaggctaaagctgaaatcagtttgccagaacatgatctaccaacaaatagatcacccaaagatccagatgaacatcaagctgacaatgcagcaaaagtagctcgaaggaaacttagggagacaaggcgcgagaagagagcaatggatttggttcataaagatgatgaagcacatgttaagcaggagaatgccgctattgagcgatcaaaagctgtcgattctgctgtgcttggaaaatacagcatatggcgaaaagagaacgagaattcagattctacagttaggctgatgagggaccaaattattatggctcgtgtctattctgcgcttgctaaatcaaagaacaagagtgatctatatcaaaaactgcagacccgaatcaaggaaagccagcgggctgttggagatgcttctgctgatgctggcctgcatcacagcgcacctgagaaaatcatagcgatgggtcaagttttatcaaaggctagagaagaagtttataattgtatggcaatcactcagaaactaagggctatgcttcagtcagcagatgaacaggtcaggtgcttgaagaagcagagtacatttcttagccaattggctgcaaagacaattccaaacagcattcactgcttgtctatgcgtttgacgattgattactatctcctcctccttgaggaacgaaaatttccaaggagtgaaaatttagaaaatccaaatctctatcactatgcacttttctcagataatgtcttggcagcttctgttgttgtgaactcaaccatcatgaatgctaagaaaccagagaaacatgttttccatcttgtgactgacaagttaaactttggagccatgaacatgtggtttctgctgaacccacctggcaaggctaccatccatgttgagaatgtggacgaatttaagtggttgaactcatcatactgtcctgtgttgcggcaacttgagtctgctgccatgaaagagtactatttcaaagctgatcggcccaccagtctctcagcaggttcttcaaacctaaagtatcggaaccccaagtacctctctatgctgaaccacttgaggttctatctcccagaggtctatccaaaggtggataagatactcttcctcgacgatgacatagttgtgcagaaagatttgacagggttgtgggatgttaatcttaatggaaaggtcaatggtgctgtggaaacctgtggggagagtttccaccgttttgacaagtatctcaatttttcaaatccacacattgctcggaactttgatccaaatgcatgtggctgggcttatgggatgaacatctttgatctgaaggagtggaagaagaaagatattactgggatctaccacaaatggcaaaatatgaatgaaggcagagttctttggaagcttgggacacttccgcctggcctcttgaccttctacaagttgacgcacccactggacaagtcatggcatgttcttggactaggatacaacccaagcgtagaccgttcagagatagacagtgctgctgttgttcattacaatgggaacatgaagccatggttggagctagcaatgaccaaataccgaccatattggaccaggtatatcaagtatgatcacccttacatccgtggatgcaacttgagggagtagtagatatagtcgtgctgaaacactgacagatgaggacgagcctgctggacagaagtgttccatgtccttgcggtgcgttgttttactgagcaaactggtactacctgaagctcttggttggacataacgacatagttgctcatgtgagagtagaccagacttagacacaatcacacaagaggattcactcacgtggaatacatttgccctacgttgaaattgatgctactttgaaaaccagtctgcaagaaattagattagtgaggagaagataaacctgcgcacggcggcgtaagaaaccagaaatgtccgctggtcgcccggcattctc

SEQ ID NO: 26823 - DNA, 3372 bp, Zea Mays
gaagcgtaggcacactgctctccggcgagcagccagccgccggcggatcggatccggatctcgaccagcactggcattgccgcgacggagatgccgaccccgaagcagcggctcccctgctcgaccttcggccgaggcggaggagggaggcgcgccgcctgcggctccgccgtgctgccacccgtggtggtcctcgtgttcctgttcgtggtcgcgccttcgctcttcttcgtcgtgcgcaatggcggtcgcggctacggccacggccacgtagccgtagcctccggtccgattcgcgttccctcctcgagagcacctgttgcttgtgccgacgcgaggtgttcaattctgcattgccttgttcgatgagcgccgagattgggtggagctcggtggaatctgtctaggttttgggattgatgcgctctccagccgtagtttgatgcgacttagttggataaggggatcatctgagtagtttcagagcggtttagggcttttatatttgttactggctgcgctgttgcttgatttcccgtttggatggaaccgtgtatgtggctctaaggaaatgaacctagtcaccctagggattgcagaaatcattatcccctggcactcagatattattggattacaggaattgttgtcccttatatgttgatgtttctaggttgtatatatatgatatataagtgggtagcgatgggttaatgttatggaaattgaagtgcatgcatacaatagtgactaacaaaactataatgaaactgtgtaataggtggtcataagcattaaaagcatgctgaacaataatacatggcatggccattgttggccgaaatgtagtatatctatataaaacaatgtattactcctccttttccaaaatgtattttgatttagtttgcttcttagtcaaagttctgtaaccttggcaaagtttatagaaaaacatcaaaatcgacgacattaaattagtttatttaatgtcctagatgttaatatatttttatctgaacttcgtcaaacttaaagatgtctgacttaggaccaaactaaaatgatatatattttggaacgaagggggtatattttttgtgaatttcaacattgcattatctgaatgcattgttttacacctgaaattggtaagcattgacatattttgtttgtctgcagatcccaacggtaagaatgatgatcaggaaccaacggcaatgaagaacctcaaatcttttttgcctaaggaggtgtttgatgctataactgctagacaacaagaatcagacactttgagtcttgatttttttaggaatcacgcatcgccctcttggaaaactaatgatctagtcactgagaagagcatggatgtcgatgacaaggctaaagctgaaatcagtttgccagaacatgatctaccaacaaatagatcacccaaagatccagatgaacatcaagctgacaatgcagcaaaagtagctcgaaggaaacttagggagacaaggcgcgagaagagagcaatggatttggttcataaagatgatgaagcacatgttaagcaggagaatgccgctattgagcgatcaaaagctgtcgattctgctgtgcttggaaaatacagcatatggcgaaaagagaacgagaattcagattctacagttaggctgatgagggaccaaattattatggctcgtgtctattctgcgcttgctaaatcaaagaacaagagtgatctatatcaaaaactgcagacccgaatcaaggaaagccagcgggctgttggagatgcttctgctgatgctggcctgcatcacagcgcacctgagaaaatcatagcgatgggtcaagttttatcaaaggctagagaagaagtttataattgtatggcaatcactcagaaactaagggctatgcttcagtcagcagatgaacaggtcaggtgcttgaagaagcagagtacatttcttagccaattggctgcaaagacaattccaaacagcattcactgcttgtctatgcgtttgacgattgattactatctcctcctccttgaggaacgaaaatttccaaggagtgaaaatttagaaaatccaaatctctatcactatgcacttttctcagataatgtcttggcagcttctgttgttgtgaactcaaccatcatgaatgctaagaaaccagagaaacatgttttccatcttgtgactgacaagttaaactttggagccatgaacatgtggtttctgctgaacccacctggcaaggctaccatccatgttgagaatgtggacgaatttaagtggttgaactcatcatactgtcctgtgttgcggcaacttgagtctgctgccatgaaagagtactatttcaaagctgatcggcccaccagtctctcagcaggttcttcaaacctaaagtatcggaaccccaagtacctctctatgctgaaccacttgaggttctatctcccagaggtctatccaaaggtggataagatactcttcctcgacgatgacatagttgtgcagaaagatttgacagggttgtgggatgttaatcttaatggaaaggtcaatggtgctgtggaaacctgtggggagagtttccaccgttttgacaagtatctcaatttttcaaatccacacattgctcggaactttgatccaaatgcatgtggctgggcttatgggatgaacatctttgatctgaaggagtggaagaagaaagatattactgggatctaccacaaatggcaaaatatgaatgaaggcagagttctttggaagcttgggacacttccgcctggcctcttgaccttctacaagttgacgcacccactggacaagtcatggcatgttcttggactaggatacaacccaagcgtagaccgttcagagatagacagtgctgctgttgttcattacaatgggaacatgaagccatggttggagctagcaatgaccaaataccgaccatattggaccaggtatatcaagtatgatcacccttacatccgtggatgcaacttgagggagtagtagatatagtcgtgctgaaacactgacagatgaggacgagcctgctggacagaagtgttccatgtccttgcggtgcgttgttttactgagcaaactggtactacctgaagctcttggttggacataacgacatagttgctcatgtgagagtagaccagacttagacacaatcacacaagaggattcactcacgtggaatacatttgccctacgttgaaattgatgctactttgaaaaccagtctgcaagaaattagattagtgaggagaagataaacctgcgcacggcggcgtaagaaaccagaaatgtccgctggtcgcccggcattctc

SEQ ID NO: 26824 - DNA, 4005 bp, Zea Mays
gaagcgtaggcacactgctctccggcgagcagccagccgccggcggatcggatccggatctcgaccagcactggcattgccgcgacggagatgccgaccccgaagcagcggctcccctgctcgaccttcggccgaggcggaggagggaggcgcgccgcctgcggctccgccgtgctgccacccgtggtggtcctcgtgttcctgttcgtggtcgcgccttcgctcttcttcgtcgtgcgcaatggcggtcgcggctacggccacggccacgtagccgtagcctccggtccgattcgcgttccctcctcgagagcacctgttgcttgtgccgacgcgaggtgttcaattctgcattgccttgttcgatgagcgccgagattgggtggagctcggtggaatctgtctaggttttgggattgatgcgctctccagccgtagtttgatgcgacttagttggataaggggatcatctgagtagtttcagagcggtttagggcttttatatttgttactggctgcgctgttgcttgatttcccgtttggatggaaccgtgtatgtggctctaaggaaatgaacctagtcaccctagggattgcagaaatcattatcccctggcactcagatattattggattacaggaattgttgtcccttatatgttgatgtttctaggttgtatatatatgatatataagtgggtagcgatgggttaatgttatggaaattgaagtgcatgcatacaatagtgactaacaaaactataatgaaactgtgtaataggtggtcataagcattaaaagcatgctgaacaataatacatggcatggccattgttggccgaaatgtagtatatctatataaaacaatgtattactcctccttttccaaaatgtattttgatttagtttgcttcttagtcaaagttctgtaaccttggcaaagtttatagaaaaacatcaaaatcgacgacattaaattagtttatttaatgtcctagatgttaatatatttttatctgaacttcgtcaaacttaaagatgtctgacttaggaccaaactaaaatgatatatattttggaacgaagggggtatattttttgtgaatttcaacattgcattatctgaatgcattgttttacacctgaaattggtaagcattgacatattttgtttgtctgcagatcccaacggtaagaatgatgatcaggaaccaacggcaatgaagaacctcaaatcttttttgcctaaggaggtcagaatgtcttgtgaccagccatgcaagggtttcaattgcttcactaaaaatactttcgatttttcacatttcacatatcctccttaggttaaaatgctttagatacttctcctatcgtactaatactaagtccagctgttctacttttcaattatgtgtgtagcttatgcaccaaactatgtcaatggatggcccatgtcataattgtagtgaataaatcatagatttagaccttgttaatgacccagttttttgtctcattctttgcaactgttgttatttccctgtcttatgtagttatctgttatagaaaatattattcccagtctagtctgtctgactaaccttgttccactatttttgtgcactttctgtatttgccgtttctccatttcctcttcttttttgctttctggttctatttcccttttctttttctgtttgggtccaaacttattatttgatcttttcattatttaacttattatctactggctatactattggagtctgtttattgcaggtttgtgttaattcagtaattagtattcatggtgttggttgtgtttgaaacagccgttaatatcttttatgtgtccttaatttttttgtgtttggatattttttttcgtcttcaggtgtttgatgctataactgctagacaacaagaatcagacactttgagtcttgatttttttaggaatcacgcatcgccctcttggaaaactaatgatctagtcactgagaagagcatggatgtcgatgacaaggctaaagctgaaatcagtttgccagaacatgatctaccaacaaatagatcacccaaagatccagatgaacatcaagctgacaatgcagcaaaagtagctcgaaggggagacaaggcgcgagaagagagcaatggatttggttcataaagatgatgaagcacatgttaagcaggagaatgccgctattgagcgatcaaaagctgtcgattctgctgtgcttggaaaatacagcatatggcgaaaagagaacgagaattcagattctacagttaggctgatgagggaccaaattattatggctcgtgtctattctgcgcttgctaaatcaaagaacaagagtgatctatatcaaaaactgcagacccgaatcaaggaaagccagcgggctgttggagatgcttctgctgatgctggcctgcatcacagcgcacctgagaaaatcatagcgatgggtcaagttttatcaaaggctagagaagaagtttataattgtatggcaatcactcagaaactaagggctatgcttcagtcagcagatgaacaggtcaggtgcttgaagaagcagagtacatttcttagccaattggctgcaaagacaattccaaacagcattcactgcttgtctatgcgtttgacgattgattactatctcctcctccttgaggaacgaaaatttccaaggagtgaaaatttagaaaatccaaatctctatcactatgcacttttctcagataatgtcttggcagcttctgttgttgtgaactcaaccatcatgaatgctaagaaaccagagaaacatgttttccatcttgtgactgacaagttaaactttggagccatgaacatgtggtttctgctgaacccacctggcaaggctaccatccatgttgagaatgtggacgaatttaagtggttgaactcatcatactgtcctgtgttgcggcaacttgagtctgctgccatgaaagagtactatttcaaagctgatcggcccaccagtctctcagcaggttcttcaaacctaaagtatcggaaccccaagtacctctctatgctgaaccacttgaggttctatctcccagaggtctatccaaaggtggataagatactcttcctcgacgatgacatagttgtgcagaaagatttgacagggttgtgggatgttaatcttaatggaaaggtcaatggtgctgtggaaacctgtggggagagtttccaccgttttgacaagtatctcaatttttcaaatccacacattgctcggaactttgatccaaatgcatgtggctgggcttatgggatgaacatctttgatctgaaggagtggaagaagaaagatattactgggatctaccacaaatggcaaaatatgaatgaaggcagagttctttggaagcttgggacacttccgcctggcctcttgaccttctacaagttgacgcacccactggacaagtcatggcatgttcttggactaggatacaacccaagcgtagaccgttcagagatagacagtgctgctgttgttcattacaatgggaacatgaagccatggttggagctagcaatgaccaaataccgaccatattggaccaggtatatcaagtatgatcacccttacatccgtggatgcaacttgagggagtagtagatatagtcgtgctgaaacactgacagatgaggacgagcctgctggacagaagtgttccatgtccttgcggtgcgttgttttactgagcaaactggtactacctgaagctcttggttggacataacgacatagttgctcatgtgagagtagaccagacttagacacaatcacacaagaggattcactcacgtggaatacatttgccctacgttgaaattgatgctactttgaaaaccagtctgcaagaaattagattagtgaggagaagataaacctgcgcacggcggcgtaagaaaccagaaatgtccgctggtcgcccggcattctc

SEQ ID NO: 26825 - DNA, 3026 bp, Zea Mays
gaagcgtaggcacactgctctccggcgagcagccagccgccggcggatcggatccggatctcgaccagcactggcattgccgcgacggagatgccgaccccgaagcagcggctcccctgctcgaccttcggccgaggcggaggagggaggcgcgccgcctgcggctccgccgtgctgccacccgtggtggtcctcgtgttcctatcccaacggtaagaatgatgatcaggaaccaacggcaatgaagaacctcaaatcttttttgcctaaggaggtcagaatgtcttgtgaccagccatgcaagggtttcaattgcttcactaaaaatactttcgatttttcacatttcacatatcctccttaggttaaaatgctttagatacttctcctatcgtactaatactaagtccagctgttctacttttcaattatgtgtgtagcttatgcaccaaactatgtcaatggatggcccatgtcataattgtagtgaataaatcatagatttagaccttgttaatgacccagttttttgtctcattctttgcaactgttgttatttccctgtcttatgtagttatctgttatagaaaatattattcccagtctagtctgtctgactaaccttgttccactatttttgtgcactttctgtatttgccgtttctccatttcctcttcttttttgctttctggttctatttcccttttctttttctgtttgggtccaaacttattatttgatcttttcattatttaacttattatctactggctatactattggagtctgtttattgcaggtttgtgttaattcagtaattagtattcatggtgttggttgtgtttgaaacagccgttaatatcttttatgtgtccttaatttttttgtgtttggatattttttttcgtcttcaggtgtttgatgctataactgctagacaacaagaatcagacactttgagtcttgatttttttaggaatcacgcatcgccctcttggaaaactaatgatctagtcactgagaagagcatggatgtcgatgacaaggctaaagctgaaatcagtttgccagaacatgatctaccaacaaatagatcacccaaagatccagatgaacatcaagctgacaatgcagcaaaagtagctcgaaggggagacaaggcgcgagaagagagcaatggatttggttcataaagatgatgaagcacatgttaagcaggagaatgccgctattgagcgatcaaaagctgtcgattctgctgtgcttggaaaatacagcatatggcgaaaagagaacgagaattcagattctacagttaggctgatgagggaccaaattattatggctcgtgtctattctgcgcttgctaaatcaaagaacaagagtgatctatatcaaaaactgcagacccgaatcaaggaaagccagcgggctgttggagatgcttctgctgatgctggcctgcatcacagcgcacctgagaaaatcatagcgatgggtcaagttttatcaaaggctagagaagaagtttataattgtatggcaatcactcagaaactaagggctatgcttcagtcagcagatgaacaggtcaggtgcttgaagaagcagagtacatttcttagccaattggctgcaaagacaattccaaacagcattcactgcttgtctatgcgtttgacgattgattactatctcctcctccttgaggaacgaaaatttccaaggagtgaaaatttagaaaatccaaatctctatcactatgcacttttctcagataatgtcttggcagcttctgttgttgtgaactcaaccatcatgaatgctaagaaaccagagaaacatgttttccatcttgtgactgacaagttaaactttggagccatgaacatgtggtttctgctgaacccacctggcaaggctaccatccatgttgagaatgtggacgaatttaagtggttgaactcatcatactgtcctgtgttgcggcaacttgagtctgctgccatgaaagagtactatttcaaagctgatcggcccaccagtctctcagcaggttcttcaaacctaaagtatcggaaccccaagtacctctctatgctgaaccacttgaggttctatctcccagaggtctatccaaaggtggataagatactcttcctcgacgatgacatagttgtgcagaaagatttgacagggttgtgggatgttaatcttaatggaaaggtcaatggtgctgtggaaacctgtggggagagtttccaccgttttgacaagtatctcaatttttcaaatccacacattgctcggaactttgatccaaatgcatgtggctgggcttatgggatgaacatctttgatctgaaggagtggaagaagaaagatattactgggatctaccacaaatggcaaaatatgaatgaaggcagagttctttggaagcttgggacacttccgcctggcctcttgaccttctacaagttgacgcacccactggacaagtcatggcatgttcttggactaggatacaacccaagcgtagaccgttcagagatagacagtgctgctgttgttcattacaatgggaacatgaagccatggttggagctagcaatgaccaaataccgaccatattggaccaggtatatcaagtatgatcacccttacatccgtggatgcaacttgagggagtagtagatatagtcgtgctgaaacactgacagatgaggacgagcctgctggacagaagtgttccatgtccttgcggtgcgttgttttactgagcaaactggtactacctgaagctcttggttggacataacgacatagttgctcatgtgagagtagaccagacttagacacaatcacacaagaggattcactcacgtggaatacatttgccctacgttgaaattgatgctactttgaaaaccagtctgcaagaaattagattagtgaggagaagataaacctgcgcacggcggcgtaagaaaccagaaatgtccgctggtcgcccggcattctc

SEQ ID NO: 26826 - DNA, 2853 bp, Zea Mays
cttctcccaaactgatggattcccattagaacgacttgcaagcatctgggaaagaaattaccagaacccctcccggtatgccgatggagaggaaggatggaggaaagatacaaacgaagaaatgagcaggcttggctatcccaacggtaagaatgatgatcaggaaccaacggcaatgaagaacctcaaatcttttttgcctaaggaggtcagaatgtcttgtgaccagccatgcaagggtttcaattgcttcactaaaaatactttcgatttttcacatttcacatatcctccttaggttaaaatgctttagatacttctcctatcgtactaatactaagtccagctgttctacttttcaattatgtgtgtagcttatgcaccaaactatgtcaatggatggcccatgtcataattgtagtgaataaatcatagatttagaccttgttaatgacccagttttttgtctcattctttgcaactgttgttatttccctgtcttatgtagttatctgttatagaaaatattattcccagtctagtctgtctgactaaccttgttccactatttttgtgcactttctgtatttgccgtttctccatttcctcttcttttttgctttctggttctatttcccttttctttttctgtttgggtccaaacttattatttgatcttttcattatttaacttattatctactggctatactattggagtctgtttattgcaggtgtttgatgctataactgctagacaacaagaatcagacactttgagtcttgatttttttaggaatcacgcatcgccctcttggaaaactaatgatctagtcactgagaagagcatggatgtcgatgacaaggctaaagctgaaatcagtttgccagaacatgatctaccaacaaatagatcacccaaagatccagatgaacatcaagctgacaatgcagcaaaagtagctcgaaggaaacttagggagacaaggcgcgagaagagagcaatggatttggttcataaagatgatgaagcacatgttaagcaggagaatgccgctattgagcgatcaaaagctgtcgattctgctgtgcttggaaaatacagcatatggcgaaaagagaacgagaattcagattctacagttaggctgatgagggaccaaattattatggctcgtgtctattctgcgcttgctaaatcaaagaacaagagtgatctatatcaaaaactgcagacccgaatcaaggaaagccagcgggctgttggagatgcttctgctgatgctggcctgcatcacagcgcacctgagaaaatcatagcgatgggtcaagttttatcaaaggctagagaagaagtttataattgtatggcaatcactcagaaactaagggctatgcttcagtcagcagatgaacaggtcaggtgcttgaagaagcagagtacatttcttagccaattggctgcaaagacaattccaaacagcattcactgcttgtctatgcgtttgacgattgattactatctcctcctccttgaggaacgaaaatttccaaggagtgaaaatttagaaaatccaaatctctatcactatgcacttttctcagataatgtcttggcagcttctgttgttgtgaactcaaccatcatgaatgctaagaaaccagagaaacatgttttccatcttgtgactgacaagttaaactttggagccatgaacatgtggtttctgctgaacccacctggcaaggctaccatccatgttgagaatgtggacgaatttaagtggttgaactcatcatactgtcctgtgttgcggcaacttgagtctgctgccatgaaagagtactatttcaaagctgatcggcccaccagtctctcagcaggttcttcaaacctaaagtatcggaaccccaagtacctctctatgctgaaccacttgaggttctatctcccagaggtctatccaaaggtggataagatactcttcctcgacgatgacatagttgtgcagaaagatttgacagggttgtgggatgttaatcttaatggaaaggtcaatggtgctgtggaaacctgtggggagagtttccaccgttttgacaagtatctcaatttttcaaatccacacattgctcggaactttgatccaaatgcatgtggctgggcttatgggatgaacatctttgatctgaaggagtggaagaagaaagatattactgggatctaccacaaatggcaaaatatgaatgaaggcagagttctttggaagcttgggacacttccgcctggcctcttgaccttctacaagttgacgcacccactggacaagtcatggcatgttcttggactaggatacaacccaagcgtagaccgttcagagatagacagtgctgctgttgttcattacaatgggaacatgaagccatggttggagctagcaatgaccaaataccgaccatattggaccaggtatatcaagtatgatcacccttacatccgtggatgcaacttgagggagtagtagatatagtcgtgctgaaacactgacagatgaggacgagcctgctggacagaagtgttccatgtccttgcggtgcgttgttttactgagcaaactggtactacctgaagctcttggttggacataacgacatagttgctcatgtgagagtagaccagacttagacacaatcacacaagaggattcactcacgtggaatacatttgccctacgttgaaattgatgctactttgaaaaccagtctgcaagaaattagattagtgaggagaagataaacctgcgcacggcggcgtaagaaaccagaaatgtccgctggtcgcccggcattctc

SEQ ID NO: 26827 - DNA, 2511 bp, Zea Mays
aaactgccttttcttccggcttccaacttccaagtggcgactgctgccgactgccgggtgcgagaagagggagagatcagagtatcagacaagctgttgtccgaatccactccggcgaggacgagtgctgaggtcgaaatggggagaggagcggatgaggtggtgaaggtcgtggattcggaggacggcgagggggaggaggaagaggcagaggccgcggcggcggaggggtcgagcaaggagacgccgatgctgccaaggatgccggtgcgcgtgctactcgccgagggcgacgactccacgcgccacgtcatctccgcgctgctacgcaagtgcggctaccgagttgctgcagcctctgatggtgtgaaggcgtgggacatattaaaggaaaaatctttcaacatagaccttgttttaactgaagttgaactgcctttgatgtctgggttcctcttgttatccacgatcatggagcatgatgcatccaagaacatccctgttataatgatgtcttcacacgactctgtaagcatggttttcaaatgcatgctaaagggtgcatcagatttccttgttaagccgctaagaaagaacgaattaaggaacttgtggcagcacgtttggagaaaacaactggcaaacggtgggcccgatgtgcagcacatacaagaagagaatcttgcagaaagaatggaacagaagactggcgtgacaaaagatgataatttgaacagcgatggtccctgtaaaaatagagaatgcagtgaacaagaaagtgatgctcaaagttcttgcacaaggtcagagttggaggctgaaagtaagcaaactaacaacattttggagtatatgcaatcaactgaaaggcatttgtctattcgtagccacaaggatttagagctaaatggagagaccaaaacacgaacagctaagggtaataacttgattccaacaagagaagacgatttattgccaaagaaaagaacatgtttgaatgacaataattctgagagaacttccagagatatggagctagtccacattatggacaatcagcagaagcatgacacacagagggatgtggatactatgagaacaacatccaggagaaatgatgagaagaactccatcccagcacaccagttggaactttctcttagaagaactgactatggaaaattagagaaccacgagaaaaatgatagaagaacactgaaccattcaacttcatctgcattttacttgtataattgcaggacagcgtccagcttaggaaatgctggtgatggtcaattatgcagcacctcagaaacactagtggatgttgaaaatagaaatggagatttggcagctctgtctgaagacacgactgaaacaaatcgtcctcctatcagagttgtaccatttcctgtccctgttcaatgcttcacatttgatgggcagccgttctggaatggtacaccggtggcatctccattctacccacagtcagctccccccatttggaatagcaaaacaccaacgtggcaagaatcaactccacaagcaacttcactgccacaaaaatcgcaacagaaagaaccagttgaaatggatgctaaaccagttgaaaatgcagaggaacaatttgtcgtaggtcctcccagtgccagtgggaagcagctgcatgttgaaattcctaaagatgatctacggcatatttctcctgtgaccggtgaaagtggaatcagtacggtgctagacagcaccagaaatactctgagcagcagtggctgtgatagcacttccaaccagatcaccgcccctactgaaccatcatccaatgtatacaggggcgttcctgaaaccgcaagagccgaaggtttacgacacctgagccagcgtgaggctgcactgaacaagttccggctaaagaggaaggacagatgctttgagaagaaggttcggtaccagagccggaaattactcgcagagcagcgtccacgggtcaagggccagtttgtccgtcaagatcatagcatccaaggaagctagggtccagttactgagctggaactctttcccattatctacaaaaaaaagtcactgtaagtgactccactgcggggtaccctgatgtcaggttttttcgaagagttggaagcaaccacactgagttaggcacaggacctggcacgttctagacggtttgtcggtagacgttaaaaaatacaggcatacttgtgtcctccagtagcacgtgtgctttaagccttgtattatgtaactagccaagttgtttttgatgtttcggattagatgtacactgtggatgtatggcgtgaaggatgtccaccaaagtatgctcgtttctgtgtagcttgttgcaatgaacattgttggcctggttttagtaatgctctcttgccttgagtattagtactgtgaaattttctacagacggtatgaagtgctaaatttgggtgacggtttttataagaagatcatgtctccagtttgcctggttgt

SEQ ID NO: 26828 - DNA, 2398 bp, Zea Mays
aaactgccttttcttccggcttccaacttccaagtggcgactgctgccgactgccgggtgcgagaagagggagagatcagagtatcagacaagctgttgtccgaatccactccggcgaggacgagtgctgaggtcgaaatggggagaggagcggatgaggtggtgaaggtcgtggattcggaggacggcgagggggaggaggaagaggcagaggccgcggcggcggaggggtcgagcaaggagacgccgatgctgccaaggatgccggtgcgcgtgctactcgccgagggcgacgactccacgcgccacgtcatctccgcgctgctacgcaagtgcggctaccgagttgctgcagcctctgatggtgtgaaggcgtgggacatattaaaggaaaaatctttcaacatagaccttgttttaactgaagttgaactgcctttgatgtctgggttcctcttgttatccacgatcatggagcatgatgcatccaagaacatccctgttataatgatgtcttcacacgactctgtaagcatggttttcaaatgcatgctaaagggtgcatcagatttccttgttaagccgctaagaaagaacgaattaaggaacttgtggcagcacgtttggagaaaacaactggcaaacggtgggcccgatgtgcagcacatacaagaagagaatcttgcagaaagaatggaacagaagactggcgtgacaaaagatgataatttgaacagcgatggtccctgtaaaaatagagaatgcagtgaacaagaaagtgatgctcaaagttcttgcacaaggtcagagttggaggctgaaactaagggtaataacttgattccaacaagagaagacgatttattgccaaagaaaagaacatgtttgaatgacaataattctgagagaacttccagagatatggagctagtccacattatggacaatcagcagaagcatgacacacagagggatgtggatactatgagaacaacatccaggagaaatgatgagaagaactccatcccagcacaccagttggaactttctcttagaagaactgactatggaaaattagagaaccacgagaaaaatgatagaagaacactgaaccattcaacttcatctgcattttacttgtataattgcaggacagcgtccagcttaggaaatgctggtgatggtcaattatgcagcacctcagaaacactagtggatgttgaaaatagaaatggagatttggcagctctgtctgaagacacgactgaaacaaatcgtcctcctatcagagttgtaccatttcctgtccctgttcaatgcttcacatttgatgggcagccgttctggaatggtacaccggtggcatctccattctacccacagtcagctccccccatttggaatagcaaaacaccaacgtggcaagaatcaactccacaagcaacttcactgccacaaaaatcgcaacagaaagaaccagttgaaatggatgctaaaccagttgaaaatgcagaggaacaatttgtcgtaggtcctcccagtgccagtgggaagcagctgcatgttgaaattcctaaagatgatctacggcatatttctcctgtgaccggtgaaagtggaatcagtacggtgctagacagcaccagaaatactctgagcagcagtggctgtgatagcacttccaaccagatcaccgcccctactgaaccatcatccaatgtatacaggggcgttcctgaaaccgcaagagccgaaggtttacgacacctgagccagcgtgaggctgcactgaacaagttccggctaaagaggaaggacagatgctttgagaagaaggttcggtaccagagccggaaattactcgcagagcagcgtccacgggtcaagggccagtttgtccgtcaagatcatagcatccaaggaagctagggtccagttactgagctggaactctttcccattatctacaaaaaaaagtcactgtaagtgactccactgcggggtaccctgatgtcaggttttttcgaagagttggaagcaaccacactgagcacaggacctggcacgttctagacggtttgtcggtagacgttaaaaaatacaggcatacttgtgtcctccagtagcacgtgtgctttaagccttgtattatgtaactagccaagttgtttttgatgtttcggattagatgtacactgtggatgtatggcgtgaaggatgtccaccaaagtatgctcgtttctgtgtagcttgttgcaatgaacattgttggcctggttttagtaatgctctcttgccttgagtattagtactgtgaaattttctacagacggtatgaagtgctaaatttgggtgacggtttttataagaagatcatgtctccagtttgcctggttgt

SEQ ID NO: 26829 - DNA, 2335 bp, Zea Mays
aaactgccttttcttccggcttccaacttccaagtggcgactgctgccgactgccgggtgcgagaagagggagagatcagagtatcagacaagctgttgtccgaatccactccggcgaggacgagtgctgaggtcgaaatggggagaggagcggatgaggtggtgaaggtcgtggattcggaggacggcgagggggaggaggaagaggcagaggccgcggcggcggaggggtcgagcaaggagacgccgatgctgccaaggatgccggtgcgcgtgctactcgccgagggcgacgactccacgcgccacgtcatctccgcgctgctacgcaagtgcggctaccgagttgctgcagcctctgatggtgtgaaggcgtgggacatattaaaggaaaaatctttcaacatagaccttgttttaactgaagttgaactgcctttgatgtctgggttcctcttgttatccacgatcatggagcatgatgcatccaagaacatccctgttataatgatgtcttcacacgactctgtaagcatggttttcaaatgcatgctaaagggtgcatcagatttccttgttaagccgctaagaaagaacgaattaaggaacttgtggcagcacgtttggagaaaacaactggcaaacggtgggcccgatgtgcagcacatacaagaagagaatcttgcagaaagaatggaacagaagactggcgtgacaaaagatgataatttgaacagcgatggtccctgtaaaaatagagaatgcagtgaacaagaaagtgatgctcaaagttcttgcacaaggtcagagttggaggctgaaactaagggtaataacttgattccaacaagagaagacgatttattgccaaagaaaagaacatgtttgaatgacaataattctgagagaacttccagagatatggagctagtccacattatggacaatcagcagaagcatgacacacagagggatgtggatactatgagaacaacatccaggagaaatgatgagaagaactccatcccagcacaccagttggaactttctcttagaagaactgactatggaaaattagagaaccacgagaaaaatgatagaagaacactgaaccattcaacttcatctgcattttacttgtataattgcaggacagcgtccagcttaggaaatgctggtgatggtcaattatgcagcacctcagaaacactagtggatgttgaaaatagaaatggagatttggcagctctgtctgaagacacgactgaaacaaatcgtcctcctatcagagttgtaccatttcctgtccctgttcaatgcttcacatttgatgggcagccgttctggaatggtacaccggtggcatctccattctacccacagtcagctccccccatttggaatagcaaaacaccaacgtggcaagaatcaactccacaagcaacttcactgccacaaaaatcgcaacagaaagaaccagttgaaatggatgctaaaccagttgaaaatgcagaggaacaatttgtcgtaggtcctcccagtgccagtgggaagcagctgcatgttgaaattcctaaagatgatctacggcatatttctcctgtgaccggtgaaagtggaatcagtacggtgctagacagcaccagaaatactctgagcagcagtggctgtgatagcacttccaaccagatcaccgcccctactgaaccatcatccaatgtatacaggggcgttcctgaaaccgcaagagccgaaggtttacgacacctgagccagcgtgaggctgcactgaacaagttccggctaaagaggaaggacagatgctttgagaagaaggttcggtaccagagccggaaattactcgcagagcagcgtccacgggtcaagggccagtttgtccgtcaagatcatagcatccaaggaagctagggtccagttactgagctggaactctttcccattatctacaaaaaaaagtcactgttaggcacaggacctggcacgttctagacggtttgtcggtagacgttaaaaaatacaggcatacttgtgtcctccagtagcacgtgtgctttaagccttgtattatgtaactagccaagttgtttttgatgtttcggattagatgtacactgtggatgtatggcgtgaaggatgtccaccaaagtatgctcgtttctgtgtagcttgttgcaatgaacattgttggcctggttttagtaatgctctcttgccttgagtattagtactgtgaaattttctacagacggtatgaagtgctaaatttgggtgacggtttttataagaagatcatgtctccagtttgcctggttgt

SEQ ID NO: 26830 - DNA, 2576 bp, Zea Mays
cacaaactgccttttcttccggcttccaacttccaagtggcgactgctgccgactgccgggtgcgagaagagggagagatcagagtatcagacaagctgttgtccgaatccactccggcgaggacgagtgctgaggtcgaaatggggagaggagcggatgaggtggtgaaggtcgtggattcggaggacggcgagggggaggaggaagaggcagaggccgcggcggcggaggggtcgagcaaggagacgccgatgctgccaaggatgccggtgcgcgtgctactcgccgagggcgacgactccacgcgccacgtcatctccgcgctgctacgcaagtgcggctaccgagcctctgatggtgtgaaggcgtgggacatattaaaggaaaaatctttcaacatagaccttgttttaactgaagttgaactgcctttgatgtctgggttcctcttgttatccacgatcatggagcatgatgcatccaagaacatccctgttataatgatgtcttcacacgactctgtaagcatggttttcaaatgcatgctaaagggtgcatcagatttccttgttaagccgctaagaaagaacgaattaaggaacttgtggcagcacgtttggagaaaacaactggcaaacggtgggcccgatgtgcagcacatacaagaagagaatcttgcagaaagaatggaacagaagactggcgtgacaaaagatgataatttgaacagcgatggtccctgtaaaaatagagaatgcagtgaacaagaaagtgatgctcaaagttcttgcacaaggtcagagttggaggctgaaagtaagcaaactaacaacattttggagtatatgcaatcaactgaaaggcatttgtctattcgtagccacaaggatttagagctaaatggagagaccaaaacacgaactaagggtaataacttgattccaacaagagaagacgatttattgccaaagaaaagaacatgtttgaatgacaataattctgagagaacttccagagatatggagctagtccacattatggacaatcagcagaagcatgacacacagagggatgtggatactatgagaacaacatccaggagaaatgatgagaagaactccatcccagcacaccagttggaactttctcttagaagaactgactatggaaaattagagaaccacgagaaaaatgatagaagaacactgaaccattcaacttcatctgcattttacttgtataattgcaggacagcgtccagcttaggaaatgctggtgatggtcaattatgcagcacctcagaaacactagtggatgttgaaaatagaaatggagatttggcagctctgtctgaagacacgactgaaacaaatcgtcctcctatcagagttgtaccatttcctgtccctgttcaatgcttcacatttgatgggcagccgttctggaatggtacaccggtggcatctccattctacccacagtcagctccccccatttggaatagcaaaacaccaacgtggcaagaatcaactccacaagcaacttcactgccacaaaaatcgcaacagaaagaaccagttgaaatggatgctaaaccagttgaaaatgcagaggaacaatttgtcgtaggtcctcccagtgccagtgggaagcagctgcatgttgaaattcctaaagatgatctacggcatatttctcctgtgaccggtgaaagtggaatcagtacggtgctagacagcaccagaaatactctgagcagcagtggctgtgatagcacttccaaccagatcaccgcccctactgaaccatcatccaatgtatacaggggcgttcctgaaaccgcaagagccgaaggtttacgacacctgagccagcgtgaggctgcactgaacaagttccggctaaagaggaaggacagatgctttgagaagaaggttcggtaccagagccggaaattactcgcagagcagcgtccacgggtcaagggccagtttgtccgtcaagatcatagcatccaaggaagctagggtccagttactgagctggaactctttcccattatctacaaaaaaaagtcactgtaagtgactccactgcggggtaccctgatgtcaggttttttcgaagagttggaagcaaccacactgagttacggtttgctgtgtatgtttgctaaagcttgtaatatatgtatgtataggctgactcttttctttccttaggttaggcacaggacctggcacgttctagacggtttgtcggtagacgttaaaaaatacaggcatacttgtgtcctccagtagcacgtgtgctttaagccttgtattatgtaactagccaagttgtttttgatgtttcggattagatgtacactgtggatgtatggcgtgaaggatgtccaccaaagtatgctcgtttctgtgtagcttgttgcaatgaacattgttggcctggttttagtaatgctctcttgccttgagtattagtactgtgaaattttctacagacggtatgaagtgctaaatttgggtgacggtttttataagaagatcatgtctccagtttgcctggttgt

SEQ ID NO: 26831 - DNA, 2555 bp, Zea Mays
ctccaacgcccactggtctgccgggccagcgggtgcgtggcccacttgtctgtggcagaggtcgggtgcacgtatataggccgcggcgtttcggctttgtcgttcttctcacaaactgccttttcttccggcttccaacttccaagtggcgactgctgccgactgccgggtgcgagaagagggagagatcagagtatcagacaagctgttgtccgaatccactccggcgaggacgagtgctgaggtcgaaatggggagaggagcggatgaggtggtgaaggtcgtggattcggaggacggcgagggggaggaggaagaggcagaggccgcggcggcggaggggtcgagcaaggagacgccgatgctgccaaggatgccggtgcgcgtgctactcgccgagggcgacgactccacgcgccacgtcatctccgcgctgctacgcaagtgcggctaccgagttgctgcagcctctgatggtgtgaaggcgtgggacatattaaaggaaaaatctttcaacatagaccttgttttaactgaagttgaactgcctttgatgtctgggttcctcttgttatccacgatcatggagcatgatgcatccaagaacatccctgttataatgatgtcttcacacgactctgtaagcatggttttcaaatgcatgctaaagggtgcatcagatttccttgttaagccgctaagaaagaacgaattaaggaacttgtggcagcacgtttggagaaaacaactggcaaacggtgggcccgatgtgcagcacatacaagaagagaatcttgcagaaagaatggaacagaagactggcgtgacaaaagatgataatttgaacagcgatggtccctgtaaaaatagagaatgcagtgaacaagaaagtgatgctcaaagttcttgcacaaggtcagagttggaggctgaaagtaagcaaactaacaacattttggagtatatgcaatcaactgaaaggcatttgtctattcgtagccacaaggatttagagctaaatggagagaccaaaacacgaacagctaagggtaataacttgattccaacaagagaagacgatttattgccaaagaaaagaacatgtttgaatgacaataattctgagagaacttccagagatatggagctagtccacattatggacaatcagcagaagcatgacacacagagggatgtggatactatgagaacaacatccaggagaaatgatgagaagaactccatcccagcacaccagttggaactttctcttagaagaactgactatggaaaattagagaaccacgagaaaaatgatagaagaacactgaaccattcaacttcatctgcattttacttgtataattgcaggacagcgtccagcttaggaaatgctggtgatggtcaattatgcagcacctcagaaacactagtggatgttgaaaatagaaatggagatttggcagctctgtctgaagacacgactgaaacaaatcgtcctcctatcagagttgtaccatttcctgtccctgttcaatgcttcacatttgatgggcagccgttctggaatggtacaccggtggcatctccattctacccacagtcagctccccccatttggaatagcaaaacaccaacgtggcaagaatcaactccacaagcaacttcactgccacaaaaatcgcaacagaaagaaccagttgaaatggatgctaaaccagttgaaaatgcagaggaacaatttgtcgtaggtcctcccagtgccagtgggaagcagctgcatgttgaaattcctaaagatgatctacggcatatttctcctgtgaccggtgaaagtggaatcagtacggtgctagacagcaccagaaatactctgagcagcagtggctgtgatagcacttccaaccagatcaccgcccctactgaaccatcatccaatgtatacaggggcgttcctgaaaccgcaagagccgaaggtttacgacacctgagccagcgtgaggctgcactgaacaagttccggctaaagaggaaggacagatgctttgagaagaaggttcggtaccagagccggaaattactcgcagagcagcgtccacgggtcaagggccagtttgtccgtcaagatcatagcatccaaggaagctagggtccagttactgagctggaactctttcccattatctacaaaaaaaagtcactgttaggcacaggacctggcacgttctagacggtttgtcggtagacgttaaaaaatacaggcatacttgtgtcctccagtagcacgtgtgctttaagccttgtattatgtaactagccaagttgtttttgatgtttcggattagatgtacactgtggatgtatggcgtgaaggatgtccaccaaagtatgctcgtttctgtgtagcttgttgcaatgaacattgttggcctggttttagtaatgctctcttgccttgagtattagtactgtgaaattttctacagacggtatgaagtgctaaatttgggtgacggtttttataagaagatcatgtctccagtttgcctggttgt

SEQ ID NO: 26832 - DNA, 2723 bp, Zea Mays
ctcgagcccacctgcccacctgccaccggctccaacgcccactggtctgccgggccagcgggtgcgtggcccacttgtctgtggcagaggtcgggtgcacgtatataggccgcggcgtttcggctttgtcgttcttctcacaaactgccttttcttccggcttccaacttccaagtggcgactgctgccgactgccgggtgcgagaagagggagagatcagagtatcagacaagctgttgtccgaatccactccggcgaggacgagtgctgaggtcgaaatggggagaggagcggatgaggtggtgaaggtcgtggattcggaggacggcgagggggaggaggaagaggcagaggccgcggcggcggaggggtcgagcaaggagacgccgatgctgccaaggatgccggtgcgcgtgctactcgccgagggcgacgactccacgcgccacgtcatctccgcgctgctacgcaagtgcggctaccgagttgctgcagcctctgatggtgtgaaggcgtgggacatattaaaggaaaaatctttcaacatagaccttgttttaactgaagttgaactgcctttgatgtctgggttcctcttgttatccacgatcatggagcatgatgcatccaagaacatccctgttataatgatgtcttcacacgactctgtaagcatggttttcaaatgcatgctaaagggtgcatcagatttccttgttaagccgctaagaaagaacgaattaaggaacttgtggcagcacgtttggagaaaacaactggcaaacggtgggcccgatgtgcagcacatacaagaagagaatcttgcagaaagaatggaacagaagactggcgtgacaaaagatgataatttgaacagcgatggtccctgtaaaaatagagaatgcagtgaacaagaaagtgatgctcaaagttcttgcacaaggtcagagttggaggctgaaagtaagcaaactaacaacattttggagtatatgcaatcaactgaaaggcatttgtctattcgtagccacaaggatttagagctaaatggagagaccaaaacacgaactaagggtaataacttgattccaacaagagaagacgatttattgccaaagaaaagaacatgtttgaatgacaataattctgagagaacttccagagatatggagctagtccacattatggacaatcagcagaagcatgacacacagagggatgtggatactatgagaacaacatccaggagaaatgatgagaagaactccatcccagcacaccagttggaactttctcttagaagaactgactatggaaaattagagaaccacgagaaaaatgatagaagaacactgaaccattcaacttcatctgcattttacttgtataattgcaggacagcgtccagcttaggaaatgctggtgatggtcaattatgcagcacctcagaaacactagtggatgttgaaaatagaaatggagatttggcagctctgtctgaagacacgactgaaacaaatcgtcctcctatcagagttgtaccatttcctgtccctgttcaatgcttcacatttgatgggcagccgttctggaatggtacaccggtggcatctccattctacccacagtcagctccccccatttggaatagcaaaacaccaacgtggcaagaatcaactccacaagcaacttcactgccacaaaaatcgcaacagaaagaaccagttgaaatggatgctaaaccagttgaaaatgcagaggaacaatttgtcgtaggtcctcccagtgccagtgggaagcagctgcatgttgaaattcctaaagatgatctacggcatatttctcctgtgaccggtgaaagtggaatcagtacggtgctagacagcaccagaaatactctgagcagcagtggctgtgatagcacttccaaccagatcaccgcccctactgaaccatcatccaatgtatacaggggcgttcctgaaaccgcaagagccgaaggtttacgacacctgagccagcgtgaggctgcactgaacaagttccggctaaagaggaaggacagatgctttgagaagaaggttcggtaccagagccggaaattactcgcagagcagcgtccacgggtcaagggccagtttgtccgtcaagatcatagcatccaaggaagctagggtccagttactgagctggaactctttcccattatctacaaaaaaaagtcactgtaagtgactccactgcggggtaccctgatgtcaggttttttcgaagagttggaagcaaccacactgagttacggtttgctgtgtatgtttgctaaagcttgtaatatatgtatgtataggctgactcttttctttccttaggttaggcacaggacctggcacgttctagacggtttgtcggtagacgttaaaaaatacaggcatacttgtgtcctccagtagcacgtgtgctttaagccttgtattatgtaactagccaagttgtttttgatgtttcggattagatgtacactgtggatgtatggcgtgaaggatgtccaccaaagtatgctcgtttctgtgtagcttgttgcaatgaacattgttggcctggttttagtaatgctctcttgccttgagtattagtactgtgaaattttctacagacggtatgaagtgctaaatttgggtgacggtttttataagaagatcatgtctccagtttgcctggttgt

SEQ ID NO: 26833 - DNA, 1784 bp, Zea Mays
atttgttaggtcttctatcaaatgatgtttgtttagtaaaagggtatctgtgagcaatccagtgatgcttctagatgaaattgacaagactggttctgatgtacgtggtgatccagcatcagcactactggaagttcttgatcctgagcagaacaaagcattcaacgatcactatttgaatgtgccgttcgacctgtcgaaagtcatatttgttgcaactgccaataagatgcaacctataccccctcctctgttagataggatggaagtcattgagctgccaggctacacacctgaagagaagttaaaaatagccatgaaacatctcataccaagggtattggagcagcatggcttgagtacggcaaatcttcagattcctgaggctatggtcaaactgatcatcgagaggtacactagagaagctggtgtgcgcaatcttgagcggaacctagctgcattggcccgtgcagctgctgttaaggttgcagagcaagttaaaactcttagacttggcaaggaaatacaaccaatcactacaactcttcttgattcgaggcttgctgatggtggtgaagttgaaatggaagttattcccatggggcatgatatgtcaaacacttatgaaaatccatctcctatgactgttgatgaggctatgctagaaaaagtacttgggcctcctagatttgatgatacagaagctgcagatcgtgtagcaagcccaggagtatcagttggccttgtctggacttcggttggtggggaagttcagtttgtggaggctacagccatggtgggcaagggtgacttgcatttgactgggcagcttggtgatgttattaaggagtcagcacagttagctttgacatgggtgagagcaagagctgctgacctcaatttgtcacctgcttctgatatcaacttattggagagccgtgatattcacatacattttccagctggtgctgtgccaaaggatggcccttctgcaggcgtgacattggtaacggcactggtgtcactttttagtaacagaaaagtcagagcagatactgctatgactggagagatgactctaaggggcattgtattgccagttggtggtgttaaggacaaggtacttgcggcacatcgttatggaatcaagagagtaattttacgtgaaaggaacatgaaggacttatcagaggttccatcaccgattctctctggcatggagattctgcttgtgaaacacatcgaggacgtactcgaccatgctttcgaaggcggatgtccacttaaatcacgctccaagttatagcatccaactcgcctttgctatggatatttgcttcggaggatcatcgtcaacagtaccacgaatggtcaacagtcagaataagagcctagctctcttgccagcacaggtcttgacacgcccatttttgttaggcttcgcatctgaatgtgtatactggtcagaattcggagagcagtcagaagatctgctcgttcacctgctgggactcattgcatagtttctcgacaccagctgttgatgtttatgcacagatgcaacagaaatcagggaggaattacgctggttggtttctctgtcgtgggtgtatatatgtatgtatgcatgtaatctaatccagggaaatatagctacaacaaggttgtcaaaactaaagacatcgagaaacatcacacgtcctttgggcttgggtgactttattataaatgtatgtacatataacccaaaatgcgcacgtgcgtggtcctgcattctgtctaac

SEQ ID NO: 26834 - DNA, 2608 bp, Zea Mays
gcagaagacagttggtaggacaaaggtgctccttgatacggttcctgtttacaggctagctgatatttttgttgctagctttgagataagttttgaggagcagctttcaatgctggattcagttgacttgaaagttagactttcaaaggcaaatgaacttgtagatagacacttgcagtccattcttgtagctgaaaaaataactcaaaaggttgaggggcagctatcaaagtcacaaaaagagtttctactgcgccaacagatgagggccataaaagaggaacttggcgataacgatgatgaagaagatgatgtggctgcactggaaagaaagatgcagaatgcaggaatgcctgctaatatttggaagcttgctcaaagggaaatgaggtaagctatcatgccatatccttctatctttgtgcacatgtggtattggagatttttgtatctagttagcctttttgtacaggcgcctacgaaagatgcaacctcagcaacctggttatagtagctctcgagcctacttggaacttcttgctgaccttccttggcaaaaggtcagtgaagaaagggagcttgaccttagagctgcaaaagagagccttgaccaggatcattatggactaacaaaagttaagcaaaggattattgagtatttggctgttcgtaaggggtccagtgctgtgttttgttggaccacctggtgttgggaagacttctttggcctcctccatagcaaaggccctgaacagaaaattcttaagaatctctcttggtggtgtaaaagatgaagctgatattaggggccaccgaaggacatacattggaagcatgccagggagacttattgatggactaaagagggtatctgtgagcaatccagtgatgcttctagatgaaattgacaagactggttctgatgtacgtggtgatccagcatcagcactactggaagttcttgatcctgagcagaacaaagcattcaacgatcactatttgaatgtgccgttcgacctgtcgaaagtcatatttgttgcaactgccaataagatgcaacctataccccctcctctgttagataggatggaagtcattgagctgccaggctacacacctgaagagaagttaaaaatagccatgaaacatctcataccaagggtattggagcagcatggcttgagtacggcaaatcttcagattcctgaggctatggtcaaactgatcatcgagaggtacactagagaagctggtgtgcgcaatcttgagcggaacctagctgcattggcccgtgcagctgctgttaaggttgcagagcaagttaaaactcttagacttggcaaggaaatacaaccaatcactacaactcttcttgattcgaggcttgctgatggtggtgaagttgaaatggaagttattcccatggggcatgatatgtcaaacacttatgaaaatccatctcctatgactgttgatgaggctatgctagaaaaagtacttgggcctcctagatttgatgatacagaagctgcagatcgtgtagcaagcccaggagtatcagttggccttgtctggacttcggttggtggggaagttcagtttgtggaggctacagccatggtgggcaagggtgacttgcatttgactgggcagcttggtgatgttattaaggagtcagcacagttagctttgacatgggtgagagcaagagctgctgacctcaatttgtcacctgcttctgatatcaacttattggagagccgtgatattcacatacattttccagctggtgctgtgccaaaggatggcccttctgcaggcgtgacattggtaacggcactggtgtcactttttagtaacagaaaagtcagagcagatactgctatgactggagagatgactctaaggggcattgtattgccagttggtggtgttaaggacaaggtacttgcggcacatcgttatggaatcaagagagtaattttacgtgaaaggaacatgaaggacttatcagaggttccatcaccgattctctctggcatggagattctgcttgtgaaacacatcgaggacgtactcgaccatgctttcgaaggcggatgtccacttaaatcacgctccaagttatagcatccaactcgcctttgctatggatatttgcttcggaggatcatcgtcaacagtaccacgaatggtcaacagtcagaataagagcctagctctcttgccagcacaggtcttgacacgcccatttttgttaggcttcgcatctgaatgtgtatactggtcagaattcggagagcagtcagaagatctgctcgttcacctgctgggactcattgcatagtttctcgacaccagctgttgatgtttatgcacagatgcaacagaaatcagggaggaattacgctggttggtttctctgtcgtgggtgtatatatgtatgtatgcatgtaatctaatccagggaaatatagctacaacaaggttgtcaaaactaaagacatcgagaaacatcacacgtcctttgggcttgggtgactttattataaatgtatgtacatataacccaaaatgcgcacgtgcgtggtcctgcattctgtctaac

SEQ ID NO: 26835 - DNA, 2582 bp, Zea Mays
gcagaagacagttggtaggacaaaggtgctccttgatacggttcctgtttacaggctagctgatatttttgttgctagctttgagataagttttgaggagcagctttcaatgctggattcagttgacttgaaagttagactttcaaaggcaaatgaacttgtagatagacacttgcagtccattcttgtagctgaaaaaataactcaaaaggttgaggggcagctatcaaagtcacaaaaagagtttctactgcgccaacagatgagggccataaaagaggaacttggcgataacgatgatgaagaagatgatgtggctgcactggaaagaaagatgcagaatgcaggaatgcctgctaatatttggaagcttgctcaaagggaaatgaggtaagctatcatgccatatccttctatctttgtgcacatgtggtattggagatttttgtatctagttagcctttttgtacaggcgcctacgaaagatgcaacctcagcaacctggttatagtagctctcgagcctacttggaacttcttgctgaccttccttggcaaaaggtcagtgaagaaagggagcttgaccttagagctgcaaaagagagccttgaccaggatcattatggactaacaaaagttaagcaaaggattattgagtatttggctgttcgtaaggggtccagtgctgtgttttgttggaccacctggtgttgggaagacttctttggcctcctccatagcaaaggccctgaacagaaaattcttaagaatctctcttggtggtgtaaaagatgaagctgatattaggggccaccgaaggacatacattggaagcatgccagggagacttattgatggactaaagagggtatctgtgagcaatccagtgatgcttctagatgaaattgacaagactggttctgatgtacgtggtgatccagcatcagcactactggaagttcttgatcctgagcagaacaaagcattcaacgatcactatttgaatgtgccgttcgacctgtcgaaagtcatatttgttgcaactgccaataagatgcaacctataccccctcctctgttagataggatggaagtcattgagctgccaggctacacacctgaagagaagttaaaaatagccatgaaacatctcataccaagggtattggagcagcatggcttgagctatggtcaaactgatcatcgagaggtacactagagaagctggtgtgcgcaatcttgagcggaacctagctgcattggcccgtgcagctgctgttaaggttgcagagcaagttaaaactcttagacttggcaaggaaatacaaccaatcactacaactcttcttgattcgaggcttgctgatggtggtgaagttgaaatggaagttattcccatggggcatgatatgtcaaacacttatgaaaatccatctcctatgactgttgatgaggctatgctagaaaaagtacttgggcctcctagatttgatgatacagaagctgcagatcgtgtagcaagcccaggagtatcagttggccttgtctggacttcggttggtggggaagttcagtttgtggaggctacagccatggtgggcaagggtgacttgcatttgactgggcagcttggtgatgttattaaggagtcagcacagttagctttgacatgggtgagagcaagagctgctgacctcaatttgtcacctgcttctgatatcaacttattggagagccgtgatattcacatacattttccagctggtgctgtgccaaaggatggcccttctgcaggcgtgacattggtaacggcactggtgtcactttttagtaacagaaaagtcagagcagatactgctatgactggagagatgactctaaggggcattgtattgccagttggtggtgttaaggacaaggtacttgcggcacatcgttatggaatcaagagagtaattttacgtgaaaggaacatgaaggacttatcagaggttccatcaccgattctctctggcatggagattctgcttgtgaaacacatcgaggacgtactcgaccatgctttcgaaggcggatgtccacttaaatcacgctccaagttatagcatccaactcgcctttgctatggatatttgcttcggaggatcatcgtcaacagtaccacgaatggtcaacagtcagaataagagcctagctctcttgccagcacaggtcttgacacgcccatttttgttaggcttcgcatctgaatgtgtatactggtcagaattcggagagcagtcagaagatctgctcgttcacctgctgggactcattgcatagtttctcgacaccagctgttgatgtttatgcacagatgcaacagaaatcagggaggaattacgctggttggtttctctgtcgtgggtgtatatatgtatgtatgcatgtaatctaatccagggaaatatagctacaacaaggttgtcaaaactaaagacatcgagaaacatcacacgtcctttgggcttgggtgactttattataaatgtatgtacatataacccaaaatgcgcacgtgcgtggtcctgcattctgtctaac

SEQ ID NO: 26836 - DNA, 649 bp, Zea Mays
acccaaccctctatcctcgtcgtcttccacctcacgccctctttttactctccagttttttttttctctgctttgccgtacgttggtgcgcctctcccctcctcagctcctctccacggctccaacccacctcggcatcgacgccgatttgttacatggcggactcgccggtggagctgccgaaccggctcgccatactgcctttccgcaacaaggtgctgctccctggagccatcgttcggatccgatgcaccaaccccatgtgaagttggtggagcaagagctctggcagaaggaagataaaggactgatcggggtacttcctgtgcgggactcggaggcaacagctattggctctttgctgtctcctggtgtgggcagtgattcaggcggaggaggcagtaaggccgtcggttctgcaggagagtcatcaaagcagcacctaaaaaatgggaaggagcccattcagtggcacaccaagggagttgctgccagagctttacacctttccagaggggtggagaagccaagtggaagggttacatacattgttgttcttgaaggtctatgtaggttcagcgttcaggaactaaatgcaagaggaccataccattttgcccgtgtttcgcgccttgacatgacaaagact

SEQ ID NO: 26837 - DNA, 648 bp, Zea Mays
ggaaactgctcccctgacaccggacagttccgtactcgcccgccgacccaaccctctatcctcgtcgtcttccacctcacgccctctttttactctccagttttttttttctctgctttgccgtacgttggtgcgcctctcccctcctcagctcctctccacggctccaacccacctcggcatcgacgccgatttgttacatggcggactcgccggtggagctgccgaaccggctcgccatactgcctttccgcaacaagtgtgaagttggtggagcaagagctctggcagaaggaagataaaggactgatcggggtacttcctgtgcgggactcggaggcaacagctattggctctttgctgtctcctggtgtgggcagtgattcaggcggaggaggcagtaaggccgtcggttctgcaggagagtcatcaaagcagcacctaaaaaatgggaaggagcccattcagtggcacaccaagggagttgctgccagagctttacacctttccagaggggtggagaagccaagtggaagggttacatacattgttgttcttgaaggtctatgtaggttcagcgttcaggaactaaatgcaagaggaccataccattttgcccgtgtttcgcgccttgacatgacaaagact

SEQ ID NO: 26838 - DNA, 1822 bp, Zea Mays
agaagcgggccctccactacaccccctgctggcctgctctctctcgcaacagccccacgtcttacaaccgatcccgagactacacggcacgctcgtctcctggcgcggctgtagcctgtagggaacggcgggtgcgggtgacatgagctgcttgggctggttcaagcggaggtcgaggagcggaggatcggcggcgaagcgaggagcgtcggcgccggtgtcggcgtcgggccccgcgaccacaacgacgaccacgacgacggccacgacagcgtcggcggtgagcacgagccggtcggacgactcgggcgcggcgcggccggcgagcaagtcggcggggtcggccggctcgtcgtcgcagtcgcaccggagcatctcctcgctgtacgaggagcggggccacggccagctgcgggtgttcggctacgaggagctccagggcgccacggccgacttcagccgcgcgcagaagctcggcgagggcggcttcggcagcgtctacaagggcttcatccgcggcgccgacggcaagggggaccgcgtccccgtcgccgtcaagaagctcaaccagcgcgggacataagcaatggttggcggaagtacagtttcttggtgttctggagcacccaaatctcgtaaagctacttggatattgcgctgttgatagcgaacgaggggcacaaagattgctagtctacgagtttatgcccaataagagcctggaagaccacttgttcaggcgagctaatcctcctatatcatggaacacaaggcttcaggttatcttgggggccgcagaaggattggcttacctgcatgaaggggtggaagttcaggtaatctaccgggacttcaaaacgtccaacgttctattggacaaggacttcagagcaaagctatcagacttcggcctagccagggaggggccaactggagcaaacactcacgtctcgactgcggtcgtcgggacgcacgggtacgctgcgccggagtacatggacacggggcacctgacggcgaagagcgacgtgtggagcttcggcgtggtgctctacgagatcctgacgggacggcggtcgctggaccggaacagaccggcggcggagcagaagctgctggagtgggtggcccagttcccgccggacagccgcaacttccggatgatcatggaccccaggctccgcggcgagtactcggcgaaggccgcccgggagatcgccaagctggccgacagctgcctgctcaagaacgccaaggagcggcccaccatgagcgaggtggtcgaggtcctcaggcgggccgtgcaggcgcacgccgagcctgacggccggactcccggccccggcgccagggggaagaaagccgccgccgccgccgccgccgccgcgccgtccaggcggtgatggctacatgtcgtcaccggtaaaggcgcgctgttgccttatttctgagaccattgtttggtcagtcctagccgtgactcggtgagttgtgattgtgacagcacaaaaggaatgtttatgcttgggtacattcttggacacattgcttagacgacttgtgtacatatagatgagttggcggattgaactttgttagctttcgaaagtgagcattttgaaagaaaaaaaatatataggtctcaaggagtcaaggatttcgaaagtgggcaactgagaagatgttgcgctggctctacaaaaggatcttgttttggcagtatccagtgaaaccagacacgagcgcacaaattttcagaaaccagctggcaagaactccgtcaagcataatttataaaattagcgcactgttttgattttaa

SEQ ID NO: 26839 - DNA, 1338 bp, Zea Mays
cccgtgtccggtggttgcggttgccccttgcccgcatcatcccacctcgcgaacgaggacggcttctagtccctcgcctaccccgcccccgaacctggcgtctgccctaccaaccgcagcagcgacactagaatggccgcggcgccgtcatccctcgcgtcctcccacctctccccaatcgcggcggtgtccactcccgccgtcccacatcagcttcgcatcggctgctcccgccgccgcgccgggcgcatcgttgccatggctggatccggcaagttcttcgtcggaggcaactggaagtgcgttaagaattcactaactggtcgcattgaggtttctgctcagaatgtgtggattggaaaaggaggagcctacaccggagagatcagtgccgaacaactggtggacatcggctgtcaatgggttattcttggacactctgagcgtagacatattattggtgaaaatgatgagtttattggaaagaaggctgcatatgcattgagccaaaatgttaaggttattgcctgcataggagagctgctggaagagagggaagcaggcaaaacttttgatgtatgttttaggcagatgaaggcttttgcagatagtatttcaaactgggcagatgttgtaattgcatacgagcctgtttgggctattggaaccggaaaagttgctactcctgaacaagcccaggaagttcatgctgctgtacgcaattggctgaagaccaacatatcacccgatgttgcctctagcactcgaataatctatggaggttctgtgaatgcagccaactgtgcggagctagcaaagaaagaagatattgatggttttcttgttggtggtgcctctttgaagggccctgatttcgccaccattatcaactcggtgaccgctaagaaagttgcagcctgatgagccctgtctgttagaaataagtggtcatctgtgtttcaacctcacctgccacgccgtaaagcctgtaggaggtgatccgtgtgatggtgtgccgtcaccttcctgcctttgctgatttgcagcaccacggaaacagaaaataacgcaagatgtcacaattttttttttgttctcgtagtccgtagaccttgtgtacgttacgggagttcagttgcacgttggcgatgtacgtttagaatattcttttgctctgtccttttgtaaggggaaaataatttgttgacagacgaggagaaatgataagtgctttttttatgcctcggtacttgaactacaagttgtagtagaaatggtaagtgccttttttaagcataataaatttattttgtaatgatatacatgtaagttctaaaa

SEQ ID NO: 26840 - DNA, 1442 bp, Zea Mays
cccgtgtccggtggttgcggttgccccttgcccgcatcatcccacctcgcgaacgaggacggcttctagtccctcgcctaccccgcccccgaacctggcgtctgccctaccaaccgcagcagcgacactagaatggccgcggcgccgtcatccctcgcgtcctcccacctctccccaatcgcggcggtgtccactcccgccgtcccacatcagcttcgcatcggctgctcccgccgccgcgccgggcgcatcgttgccatggctggatccggcaagttcttcgtcggaggcaactggaagtgcaatggaacaaaggactccattagcaaacttgtctctgaattgaatgctgctacccttgaaactgatatgttgtggtggcacctccatttatctatattgatcaggttaagaattcactaactggtcgcattgaggtttctgctcagaatgtgtggattggaaaaggaggagcctacaccggagagatcagtgccgaacaactggtggacatcggctgtcaatgggttattcttggacactctgagcgtagacatattattggtgaaaatgatgagtttattggaaagaaggctgcatatgcattgagccaaaatgttaaggttattgcctgcataggagagctgctggaagagagggaagcaggcaaaacttttgatgtatgttttaggcagatgaaggcttttgcagatagtatttcaaactgggcagatgttgtaattgcatacgagcctgtttgggctattggaaccggaaaagttgctactcctgaacaagcccaggaagttcatgctgctgtacgcaattggctgaagaccaacatatcacccgatgttgcctctagcactcgaataatctatggaggttctgtgaatgcagccaactgtgcggagctagcaaagaaagaagatattgatggttttcttgttggtggtgcctctttgaagggccctgatttcgccaccattatcaactcggtgaccgctaagaaagttgcagcctgatgagccctgtctgttagaaataagtggtcatctgtgtttcaacctcacctgccacgccgtaaagcctgtaggaggtgatccgtgtgatggtgtgccgtcaccttcctgcctttgctgatttgcagcaccacggaaacagaaaataacgcaagatgtcacaattttttttttgttctcgtagtccgtagaccttgtgtacgttacgggagttcagttgcacgttggcgatgtacgtttagaatattcttttgctctgtccttttgtaaggggaaaataatttgttgacagacgaggagaaatgataagtgctttttttatgcctcggtacttgaactacaagttgtagtagaaatggtaagtgccttttttaagcataataaatttattttgtaatgatatacatgtaagttctaaaa

SEQ ID NO: 26841 - DNA, 1296 bp, Zea Mays
cccgtgtccggtggttgcggttgccccttgcccgcatcatcccacctcgcgaacgaggacggcttctagtccctcgcctaccccgcccccgaacctggcgtctgccctaccaaccgcagcagcgacactagaatggccgcggcgccgtcatccctcgcgtcctcccacctctccccaatcgcggcggtgtccactcccgccgtcccacatcagcttcgcatcggctgctcccgccgccgcgccgggcgcatcgttgccatggctggatccggcaagttcttcgtcggaggcaactggaagtgcaatgtgtggattggaaaaggaggagcctacaccggagagatcagtgccgaacaactggtggacatcggctgtcaatgggttattcttggacactctgagcgtagacatattattggtgaaaatgatgagtttattggaaagaaggctgcatatgcattgagccaaaatgttaaggttattgcctgcataggagagctgctggaagagagggaagcaggcaaaacttttgatgtatgttttaggcagatgaaggcttttgcagatagtatttcaaactgggcagatgttgtaattgcatacgagcctgtttgggctattggaaccggaaaagttgctactcctgaacaagcccaggaagttcatgctgctgtacgcaattggctgaagaccaacatatcacccgatgttgcctctagcactcgaataatctatggaggttctgtgaatgcagccaactgtgcggagctagcaaagaaagaagatattgatggttttcttgttggtggtgcctctttgaagggccctgatttcgccaccattatcaactcggtgaccgctaagaaagttgcagcctgatgagccctgtctgttagaaataagtggtcatctgtgtttcaacctcacctgccacgccgtaaagcctgtaggaggtgatccgtgtgatggtgtgccgtcaccttcctgcctttgctgatttgcagcaccacggaaacagaaaataacgcaagatgtcacaattttttttttgttctcgtagtccgtagaccttgtgtacgttacgggagttcagttgcacgttggcgatgtacgtttagaatattcttttgctctgtccttttgtaaggggaaaataatttgttgacagacgaggagaaatgataagtgctttttttatgcctcggtacttgaactacaagttgtagtagaaatggtaagtgccttttttaagcataataaatttattttgtaatgatatacatgtaagttctaaaa

SEQ ID NO: 26842 - DNA, 1008 bp, Zea Mays
cccgtgtccggtggttgcggttgccccttgcccgcatcatcccacctcgcgaacgaggacggcttctagtccctcgcctaccccgcccccgaacctggcgtctgccctaccaaccgcagcagcgacactagaatggccgcggcgccgtcatccctcgcgtcctcccacctctccccaatcgcggcggtgtccactcccgccgtcccacatcagcttcgcatcggctgctcccgccgccgcgccgggcgcatcgttgccatggctggatccggcaagttcttcgtcggaggcaactggaagtgcaatggaacaaaggactccattagcaaacttgtctctgaattgaatgctgctacccttgaaactgatgtagatgttgtggtggcacctccatttatctatattgatcaggttaagaattcactaactggtcgcattgaggtttctgctcagaatgtgtggattggaaaaggaggagcctacaccggagagatcagtgccgaacaactggtggacatcggctgtcaatgggttattcttggacactctgagcgtagacatattattggtgaaaatgatgagtttattggaaagaaggctgcatatgcattgagccaaaatgttaaggttattgcctgcataggagagctgctggaagagagggaagcaggcaaaacttttgatgtatgttttaggcagatgaaggcttttgcagatagtatttcaaactgggcagatgttgtaattgcatacgagcctgtttgggctattggaaccggaaaagttgctactcctgaacaagcccaggaagttcatgctgctgtacgcaattggctgaagaccaacatatcacccgatgttgcctctagcactcgaataatctatggaggttctgtgaatgcagccaactgtgcggagctagcaaagaaagaagatattgatggttttcttgttggtggtgcctctttgaagtggtgttgaatagggctatgctatttgatgtgtcca

SEQ ID NO: 26843 - DNA, 2273 bp, Zea Mays
gatcagaaattttgaggtgttttggtgttgcctcaagtcttcaaactaacttgcaaaaaagtttctcctacccaattcagtgcaattttgagagaactgcgttggctgttcaaaccttggggtgtgcctcaaaaaactttcccacaacctatcttggtctccctctgagcagcaaaaaacttagtgctgaagacctcgctcactggatagagaaaattgctgccaagcttccaggatggaaggctgaacttttaaatcttgcggggagaatcactcttatcaaatctgtactctctgccatcccagtttacttatttattgatcttaatgctcctaaatgggttataaaagccattgataaaattcaacgaaacttcttatggaaaggaagaaagaaggctagaggaggtaactgccttgtatcttgggataaaatctctcggcctcttgatttggggggccttggaattcctaatctccaaaagatgaactgggccctacaattgcgatggctttggctataaaaaactgctccttctaagccttggagtggcctggatcttaaaatagcatcccaggcccgagctttatttcaggttgcagtgtctaccactattggtaatggtatttcaactttcttttggaaagataagtggattcatgggtattctattatggatatagctccccttattgctgctgcagttccgaagaaaattaaagttgtaaggactgtgcagcaggctcttacctctcacttctgggttcatgatatccagaggaatctctctctggctgagattgagcaatatctacaattatgggaggtaattgattcttttcagcttcaaaattcaaatgaccaacatgtgtggatttttagcagcaatggactgtatacctccaaaactgcctatagagcttttttcattggagcggaatcctttgagccctagaaaagaatttggaagagctgggcagcccctaagtgtaaggtctttgtttggctggccataaacaataaatgttggacagctgacagactcaaaaaaagagggcttgatcaccctgaaaattgtgttttatgtgaccaagaggacgaaactgtgcagcatattttatctaattgcgtcttcacaagacagttttggcatagtatcttaactccaattgatctctcttatgtgggtcctaaaagaagagattcagactttgctgaatggtcgagaaaggcttcatccaagattcccaagagcaaaagaaagggatttaatagtatggtaatccttggggcttggagtatttggaagcagcgaaacaggtgtgtttttttatggtgctcgaccctgcctttctaccttagaggatggatttaaagacgagatgagattgtgggtttctgctggagccaggaacctgcgctctcttttcgaccctggatagagaaaggaaagacttgaagcctattgaaagactggggtgttggtgtgtcgtatgtgtctgtgttgtgtgtgttttgtgggtgtgagtgtgtgttttgttttgtgtttgttctgtttgtcccgggcctcaggccttttttcctctattttaatttaatgatacgcagccctcccgcgtattcgagaaaaaagatataagcttatctcaaattcatgggatgaaggatggaaaatgattttatgtatcagtagaatttgtttctactctacaacttataagacgctcttcggttaacccctctacagtaaaaatgtagcacataaatatctccgacattttgctaataatattatataaatatattttgtataaaaccgaattagcttaattgatatgtgcctaaattactattattagaatggaattcaattccaatgatccaaacggggtattcttccttcaaatgtacagattgctgccctgttactgtgaccttgaataccattgcattctatgttttatatgcaaccaattttttgttcaaggaaaaaatgatgaactaaacacaactgcacaactacaataagaacatcagttgacaaaccattagcctgcctagcggcccacagaaaaatcttaagttttttatttcggttagaagttaccaaacatagtatactatacagactagttgtgataaaaacattcctccttcaggtacaggcgtgtgtgacagtctgagatacttcacagaatcacaatagtatttaaggaccaatgagttaatggaatgaactttctagacattcaactatgtggagcttaagaag

SEQ ID NO: 26844 - DNA, 1371 bp, Zea Mays
accccggcggtcgcccggcgccgctgcaggccgcagttgtaggtacagggacaaatccccggttctttctccaccctccgaccggccggcggccgctgcaagtttcaccgcagttggcaactggcaaccccgctctgacctaggaggatgtcgggtttcggcgatgggtacgtggggacggcgcaggacgcggtgaagatccggcggctggagaagcagcgcgaggcggagcgccgcaagatcgaggagctcaagaacaagtccgcggacgggcagcccggcctcctccagttcggctccagcacctccgagattcttgagactgcatttaagaaggaaacagttggtctcgtcaccagggagcagtatgtcgagaagagggttaacattcgaaccaagattgaggaggaagagaaagagaaacttcaaaagctgcaacaagaaagaattgcaaatgcagaaaaggaaaaagaggagagtgaagagtgatccacgcttatctttctgtgatgacattgagaatggaagtgacgaagatgattttgagaatcaagaaaccaagaaaaatggccctgccaaacttgggaaggatccaactgtggagacaagttttctacctgatagagaaagggaggcagaggaacaagcagaacgagaacgactgaagaagcagtggtcgcatgagcaggaattgattaaaaatgaacctctttcaattacttacagttactgggatgggactgggcacagaagagcaatccaggtccgtaaaggtgacaccattggagaatttctaagggctgttcaacagcagcttgcccctgaattccgtgaagtacggacaacttcagttgagaatctactttatgtgaaggaagatcttatcatccctcatcaacacagcttttatgaattaattatcaacaaagcaaggggcaagagtggaccacttttccattttgacgttcatgaggatgttcgtaccattgccgacgcaacaaaagaaaaggatgagtcccacgcggggaaagttgtagagaggcattggtatgagaaaaataagcatatattcccagcctcaagatgggagatctatgacccaacgaagaagtgggaacgctacacaatccatggggattagcatggaacatcatacatagagagttaaattattttgtactttggatgtccgaaattaccagcactcaagaatatgagaatggcacaagtgacgatttgaatagcataaattattactgttgtttgcaaacatgtcctgcatagagtactaggtaaagcctctttctcacactccaaatatgttgctttaactattaaaggggcaagagtactacctctacaactattaag

SEQ ID NO: 26845 - DNA, 1387 bp, Zea Mays
accccggcggtcgcccggcgccgctgcaggccgcagttgtaggtacagggacaaatccccggttctttctccaccctccgaccggccggcggccgctgcaagtttcaccgcagttggcaactggcaaccccgctctgacctaggaggatgtcgggtttcggcgatgggtacgtggggacggcgcaggacgcggtgaagatccggcggctggagaagcagcgcgaggcggagcgccgcaagatcgaggagctcaagaacaagtccgcggacgggcagcccggcctcctccagttcggctccagcacctccgagattcttgagactgcatttaagaaggaaacagttggtctcgtcaccagggagcagtatgtcgagaagagggttaacattcgaaccaagattgaggaggaagagaaagagaaacttcaaaagctgcaacaagaagaagaagaattgcaaatgcagaaaaggaaaaagaggagagtgaagagtgatccacgcttatctttctgtgatgacattgagaatggaagtgacgaagatgattttgagaatcaagaaaccaagaaaaatggccctgccaaacttgggaaggatccaactgtggagacaagttttctacctgatagtgatccttcagagaaagggaggcagaggaacaagcagaacgagaacgactgaagaagcagtggtcgcatgagcaggaattgattaaaaatgaacctctttcaattacttacagttactgggatgggactgggcacagaagagcaatccaggtccgtaaaggtgacaccattggagaatttctaagggctgttcaacagcagcttgcccctgaattccgtgaagtacggacaacttcagttgagaatctactttatgtgaaggaagatcttatcatccctcatcaacacagcttttatgaattaattatcaacaaagcaaggggcaagagtggaccacttttccattttgacgttcatgaggatgttcgtaccattgccgacgcaacaaaagaaaaggatgagtcccacgcggggaaagttgtagagaggcattggtatgagaaaaataagcatatattcccagcctcaagatgggagatctatgacccaacgaagaagtgggaacgctacacaatccatggggattagcatggaacatcatacatagagagttaaattattttgtactttggatgtccgaaattaccagcactcaagaatatgagaatggcacaagtgacgatttgaatagcataaattattactgttgtttgcaaacatgtcctgcatagagtactaggtaaagcctctttctcacactccaaatatgttgctttaactattaaaggggcaagagtactacctctacaactattaag

SEQ ID NO: 26846 - DNA, 1389 bp, Zea Mays
accccggcggtcgcccggcgccgctgcaggccgcagttgtaggtacagggacaaatccccggttctttctccaccctccgaccggccggcggccgctgcaagtttcaccgcagttggcaactggcaaccccgctctgacctaggaggatgtcgggtttcggcgatgggtacgtggggacggcgcaggacgcggtgaagatccggcggctggagaagcagcgcgaggcggagcgccgcaagatcgaggagctcaagaacaagtccgcggacgggcagcccggcctcctccagttcggctccagcacctccgagattcttgagactgcatttaagaaggaaacagttggtctcgtcaccagggagcagtatgtcgagaagagggttaacattcgaaccaagattgaggaggaagagaaagagaaacttcaaaagctgcaacaagaagaagaagaattgcaaatgcagaaaaggaaaaagaggagagtgaagagtgatccacgcttatctttctgtgatgacattgagaatggaagtgacgaagatgattttgagaatcaagaaaccaagaaaaatggccctgccaaacttgggaaggatccaactgtggagacaagttttctacctgatagagtgatccttcagagaaagggaggcagaggaacaagcagaacgagaacgactgaagaagcagtggtcgcatgagcaggaattgattaaaaatgaacctctttcaattacttacagttactgggatgggactgggcacagaagagcaatccaggtccgtaaaggtgacaccattggagaatttctaagggctgttcaacagcagcttgcccctgaattccgtgaagtacggacaacttcagttgagaatctactttatgtgaaggaagatcttatcatccctcatcaacacagcttttatgaattaattatcaacaaagcaaggggcaagagtggaccacttttccattttgacgttcatgaggatgttcgtaccattgccgacgcaacaaaagaaaaggatgagtcccacgcggggaaagttgtagagaggcattggtatgagaaaaataagcatatattcccagcctcaagatgggagatctatgacccaacgaagaagtgggaacgctacacaatccatggggattagcatggaacatcatacatagagagttaaattattttgtactttggatgtccgaaattaccagcactcaagaatatgagaatggcacaagtgacgatttgaatagcataaattattactgttgtttgcaaacatgtcctgcatagagtactaggtaaagcctctttctcacactccaaatatgttgctttaactattaaaggggcaagagtactacctctacaactattaag

SEQ ID NO: 26847 - DNA, 2396 bp, Zea Mays
ctttatcgactcgtgtcatcgtgtgcctgtctttgttgttgaatgagttccgtggagtttgttgtcgcattgctttcgtctcggcgcttgcgggcgccgccgcggctggagctgggttcggtcggcgcggacgcgcggtgcccgttttgcgggttacggcgaacttttcttaatgccgatggaggttgcggacgtgtgccaccaggtactgttacatctggcctggtggtgcgcgcgtctgtggtggtggccggcttgatgtttgacgaaatgccgaagcgcttttgaacaaaaggctgcagcgacacgcgataaatccaccggctcacacattcagacagagtcaaaggagcatatgaaaggttttttgtcatcttttggtggatgtggatgcactaagaaaaggggctcatggaacaggggcatacgtgtttcacggggtgggggtgggggcctggcagatcgacatcagcgacaggaaaaagggagacgaacctaatccatctatcgccgtaatcaaatcaggaacaggtttgcgtcaggggcggcggtggcggtgcggttaattagctgttaaaacagcgcgcgtccagcgtggtggtggtggtggtgggagagtggtaggcatccatccatcagcacaagcacacacggtggttgtcgcttacctcactttacacctaaccgccggagttcccgttccacgggtcacggcccccggcgtcctctttgcgaaactcagtggcagtgatgagctggggtggggccgtgggggagtcctaccgctaccacccaccaactcagctctctagaagacctaccctcccgcgattcctcagtcaagtgcctatgcctatctataaaatccagccccgcttcacccacacacccttggccttggcctggcgctcgcacctcacagcagcagcagcaacaacaacctccactgccgcaacccaccgagaggcgagaccggcggcggcaaaaggacgatacaaaagcagccagggttgctggcaacagcgtcggtcgcccgcccgctcgccatggggaggtcgccgtgctgcgagaaggcgcacaccaacaagggcgcgtggaccaaggaggaggacgagcgcctggtcgcgcacatcagggcgcacggcgaggggtgctggcgctcgctgcccaaggccgccggcctcctgcgctgcggcaagagctgccgcctccgctggatcaactacctccgccccgacctcaagcgcggcaacttcacggaggaggaggacgagctcatcgtcaagctgcacagcgtcctcggcaacaagtggtccctgatcgccggaaggctgcccggcaggacggacaacgagatcaagaactactggaacacgcacatccggaggaagctgctgagcagggggatcgacccggtgacgcaccgcccggtcacggagcaccacgcgtccaacatcaccatatcgttcgagacggaggtgggcgccgtcttccggctggaggaggaggaggagcgcaacaaggcgacgatggtcgtcggccgcgaccggcagagccagagccagagccacagccaccccgccggcgagtggggccaggggaagaggccgctcaagtgccccgacctcaacctggacctctgcatcagcccgccgtgccaggaggaggaggagatggaggaggctgcgatgagagtgagaccggcggtgaagcgggaggccgggctctgcttcggctgcagcctggggctccccaggaccgcggactgcaagtgcagcagcagcagcttcctcgggctcaggaccgccatgctcgacttcagaagcctcgagatgaaatgagcgcgcttctaccctctctgtgtagcttctcccccccgtcgtcctcgtttttgttttgccacacctcacatggatgatgaattgatgatacgtggttggttagttttttcgtaggtgaaaaatacgcgatggtgagcgagtgaaagagagattttgtgccctgggtcctcctccctgctctctcttgctgctccattttgcctccctctgtcctctctctctctctctctctctctctctctctctctctctctgtatctctgtaattaccatcgccaaatgatcatgggggcaatatcatgctaggtctctggaaattgacgctaatcccgtttccaggagctgaggctaggttcagttgcctggtgtggccgccggccgtgcagtctcagaaaagaaacactggagcatgtgctgaggcctgagccagatcttacgtttaccaaacctctagaccagcagcatgtgagcatcgcctaatcgtgcagtccccataaagcgcctcgtgccttagacgacgcctttttccaatctgacctgcttcttcttcttttt

SEQ ID NO: 26848 - DNA, 2849 bp, Zea Mays
gttgttgaatgagttccgtggagtttgttgtcgcattgctttcgtctcggcgcttgcgggcgccgccgcggctggagctgggttcggtcggcgcggacgcgcggtgcccgttttgcgggttacggcgaacttttcttaatgccgatggaggttgcggacgtgtgccaccaggtactgttacatctggcctggtggtgcgcgcgtctgtggtggtggccggcttgatgtttgacgaaatgccgaagcgcttttgaacaaaaggctgcagcgacacgcgataaatccaccggctcacacattcagacagagtcaaaggagcatatgaaaggttttttgtcatcttttggtggatgtggatgcactaagaaaaggggctcatggaacagggtaagcatgatattttgttggttgtaagcactgtttcaaaacttgagtgcttctaatacggcaaaccagaaatgttaggtgaacaagagcaacaggcattttgagtctatgatgctaattaatataacaactgctgaaatacaaaaatattatcaccttcactaaacaaattaaactcttttttttaaaaaaagtaaataaatagattaaactttatttttaaaattttaagaaaaagaaaagaaataaaacttttaaacatgctagaatgccaaatttttagaacagcgtcttttcattaatgggcccaagttcatggagttctttatctatttatgtcttcacaccgaatctccgacgatgaaggattgtttgcattgattcacgattgaactctgatttggaattatatgaatggatatagggcataggtttctattcgaccttatgttgttcgacttattcaaaagacaagtcaaagtctctggtcgtcgggcaatgtactagcgttgaaggttttctagtcatcctagaataacagcactaattagatgattatgtggtcaaacgttaatctgggcaataagtttatagtgtgtttggtttgagggatgggctagtccatcatcttctcactcctcacttttttgtttggtttgtggattgggatgagttgatctatcaccaccttattcctcatagttaattagttagtactaatatgaggattgaggtcattccaccaaatttgaggaatggattcatgatgcaccacctcattttggatggaatgatttctcaaaccaaacacccccttatagattaaaactcccagatctggttcttgcacctaatcttataggcaatcgcactaaacaatgcgaggattggtagtctggtaggtaagagagaagattaaggttgaaaagaatgatgcatggagggagttggggagctttatatgcaggcctatatggggcatgtaggtaggcaggggaaacaaagagcgagttggaataagtgtcattcgtgtctgtgcctgccgtctcgtggggatggtgattttgcccgtgactttcctgaagagacgacagcaaacccctacccacctcttctccccttaccttctttctccttccccccaaccaaaaacagcccagcttgcaccacaagtgtgtggctgagaaagtggaaggtagaactaatgcacataaccaacaccacgtctcaactacaaaccatttccctaccttcctcttgcctgacttcatactttctagaaccagtgcctaccatttagctaacaaaaagtcatgatgccagcgcgtcggtcagggattgcactcctgctgctagccaggatggtgagtaaggtacaattgaagttgtttactagctatagctaagcgcagcaaacaaacgaaggggctattaaaaacttattaaatcaaccggtaacaaactgacaggacttaagctcgatttctagtcagtggacatcaaattgatttaccactcagttctctcccagggccatgcacaaatattgaagaactgagtggtaaatcaatttgatgcctaacactctggcccgcgattgttggattgctaggtttcaaacacgcctcttgtcgtagatgttgtattttcttatactgtcaattgttataaactgctacatctatctgtttgtttatttatttttaaaaaaacgcactgttcatctatctgttatgaaatgctcagtttttcattgatttttatctgaatagacccataccggcatgtctcaaatcagcaagaaatctaggtactaaaccaactatccttcccatccacacacacacacacacacacacacacaaaaagaacagaaattggagttagatctggagctacgatcactcaacgacaagaggaaagatagaagggagacgcacaccagaaacagaaacagtgcatacgggaggaccatcgtggagtgcggagtcccaaccattctggccccaaccagaactaatggcttccggattatttcctctccttgcgcccccggccaactagaaacggtccatagtttggtaaccatccccgaaacgaatatattaggtaggcagctgggtttcgtttcgtcgctcgcggacatgcaagtttctcctaacaagtagtagtaacagttgatggtcccacctcgcggagtgagtcatatataatttcgtatgcttttagcagtgcggaatgtatcatgttctttcttttttttatcgaaaataatcataagcatatgagataaattcggctatactagtagtcaacgagcgatgctgcgacagagagtcagtgcacgtgtttattattaataacaaataaaaggaagtggagaaggacctgatcctagatggtctatcattaaggaatcacagataacgtccggttatcatcgccgtgtcgatcgattggcc

SEQ ID NO: 26849 - DNA, 1740 bp, Zea Mays
agttcttggagttgatgtggccttatcttaacaaggctatctgcagaactgcacaggatatcgcgaagccaattattgctgagaacactgcaaagtataagatagactctgttgagtttgaatcacttactttgggtagcttaccacccacctttcaagggatgaaagtctatgtcacagaggagcaagagctgataatggaaccatctcttaaatgggctgcaaacccaaatattactgttgctgtaaaagcctatggtttgaaagctactatccagattgtggatctacaagtctttgcatcacctcgcattactctgaagccattggtgcctacatttccttgctttgcaaaaatccttgtctcactcatggagaagccacatgttgactttgggctaaaacttcttggagcagatgtaatggctattcctggtctttacagatttgttcaggagaccatcaagaaacaagtagcaagcatgtatttgtggccgaagacactagaagtacctataatggatccctcaaaagcatcaaaaaggcctgttggaattctacttgtgaaggttgtgagagcccaaaatctgcggaagaaggatctgctgggtaaatctgacccatacgtgaaacttaagatgtcagatgataaacttccatccaagaagacaactgtaaagcgcagcaatctcaatccagagtggggtgaagacttcaagtttgttgtgacagatccagaaaaccaggctcttgaagttaatgtcttcgactgggaacaggttgggaaacatgaaaagatgggaatgaacatgatcccacttagagaactcctaccagaggggactaaagttactaccctcaacttgcttaagaccatggacccaaacgatgtacaaaatgagaagtctcgtggtgagcttactctagagctcacatacaagcctttcaaggaagaagatatagagaaagaagatacacagggtgctgatgtgatagagaaagctccagatggcactccagctggtggtggcttgctttatgttgttgttcatgaagcccaagatcttgaggggaagcaccatacaaacccatatgcaaaaataattttcaaaggcgaggagaagaaaactaaggtcatcaagaagaatagggatccaagatgggaggatgagtttgagttcgtgtgtgaggagcctcctgtgaatgataaactgcatgttgaagtcataagtaaagccccgaaggcagggctgatacatggcaaggaaactttgggctatattgatattagccttgcagacgtgatcagcaacaagcggattaatgaaaagtaccatctcatagactcgaaaaatggtcagatccagatcgagttgcagtggagaacttcctagacaggaaggagccagaatgccttgatgttcctctattcagtttgcgtatatctgtgattgagattgaggtcatgtagatatttcttttttttatagacatctgttgttcggatcttctcttaatcgatcaagtttccgacaagaactatgcagacatgttacagaccctgagaatggaactgaacaaatgacacgtcatacaattacactcggcattctggcatactgagaatttacaccatgctccaaatatatttcactgctatcttctaagagcatttagcgtgtgccgtgtggcatgcgtaccgaaatggttcgatgaacttgcaaagttgtatattaccaa

SEQ ID NO: 26850 - DNA, 1877 bp, Zea Mays
aaagcataggagagacagtcgatgaaccttgtaatttgttgggttttggaaggaatccaagatgggtgtaatcagcacagtgctgggtttctctggttttggctttgggttctcggctggcattgttattggttacttcctcttcatctacgtccagccaactgatgtcaaggctatctgcagaactgcacaggatatcgcgaagccaattattgctgagaacactgcaaagtataagatagactctgttgagtttgaatcacttactttgggtagcttaccacccacctttcaagggatgaaagtctatgtcacagaggagcaagagctgataatggaaccatctcttaaatgggctgcaaacccaaatattactgttgctgtaaaagcctatggtttgaaagctactatccagattgtggatctacaagtctttgcatcacctcgcattactctgaagccattggtgcctacatttccttgctttgcaaaaatccttgtctcactcatggagaagccacatgttgactttgggctaaaacttcttggagcagatgtaatggctattcctggtctttacagatttgttcaggagaccatcaagaaacaagtagcaagcatgtatttgtggccgaagacactagaagtacctataatggatccctcaaaagcatcaaaaaggcctgttggaattctacttgtgaaggttgtgagagcccaaaatctgcggaagaaggatctgctgggtaaatctgacccatacgtgaaacttaagatgtcagatgataaacttccatccaagaagacaactgtaaagcgcagcaatctcaatccagagtggggtgaagacttcaagtttgttgtgacagatccagaaaaccaggctcttgaagttaatgtcttcgactgggaacaggttgggaaacatgaaaagatgggaatgaacatgatcccacttagagaactcctaccagaggggactaaagttactaccctcaacttgcttaagaccatggacccaaacgatgtacaaaatgagaagtctcgtggtgagcttactctagagctcacatacaagcctttcaaggaagaagatatagagaaagaagatacacagggtgctgatgtgatagagaaagctccagatggcactccagctggtggtggcttgctttatgttgttgttcatgaagcccaagatcttgaggggaagcaccatacaaacccatatgcaaaaataattttcaaaggcgaggagaagaaaactaaggtcatcaagaagaatagggatccaagatgggaggatgagtttgagttcgtgtgtgaggagcctcctgtgaatgataaactgcatgttgaagtcataagtaaagccccgaaggcagggctgatacatggcaaggaaactttgggctatattgatattagccttgcagacgtgatcagcaacaagcggattaatgaaaagtaccatctcatagactcgaaaaatggtcagatccagatcgagttgcagtggagaacttcctagacaggaaggagccagaatgccttgatgttcctctattcagtttgcgtatatctgtgattgagattgaggtcatgtagatatttcttttttttatagacatctgttgttcggatcttctcttaatcgatcaagtttccgacaagaactatgcagacatgttacagaccctgagaatggaactgaacaaatgacacgtcatacaattacactcggcattctggcatactgagaatttacaccatgctccaaatatatttcactgctatcttctaagagcatttagcgtgtgccgtgtggcatgcgtaccgaaatggttcgatgaacttgcaaagttgtatattaccaa

SEQ ID NO: 26851 - DNA, 1861 bp, Zea Mays
gggatattgctctggaagtcgcttgcgttttggaaggaatccaagatgggtgtaatcagcacagtgctgggtttctctggttttggctttgggttctcggctggcattgttattggttacttcctcttcatctacgtccagccaactgatgtcaaggctatctgcagaactgcacaggatatcgcgaagccaattattgctgagaacactgcaaagtataagatagactctgttgagtttgaatcacttactttgggtagcttaccacccacctttcaagggatgaaagtctatgtcacagaggagcaagagctgataatggaaccatctcttaaatgggctgcaaacccaaatattactgttgctgtaaaagcctatggtttgaaagctactatccagattgtggatctacaagtctttgcatcacctcgcattactctgaagccattggtgcctacatttccttgctttgcaaaaatccttgtctcactcatggagaagccacatgttgactttgggctaaaacttcttggagcagatgtaatggctattcctggtctttacagatttgttcaggagaccatcaagaaacaagtagcaagcatgtatttgtggccgaagacactagaagtacctataatggatccctcaaaagcatcaaaaaggcctgttggaattctacttgtgaaggttgtgagagcccaaaatctgcggaagaaggatctgctgggtaaatctgacccatacgtgaaacttaagatgtcagatgataaacttccatccaagaagacaactgtaaagcgcagcaatctcaatccagagtggggtgaagacttcaagtttgttgtgacagatccagaaaaccaggctcttgaagttaatgtcttcgactgggaacaggttgggaaacatgaaaagatgggaatgaacatgatcccacttagagaactcctaccagaggggactaaagttactaccctcaacttgcttaagaccatggacccaaacgatgtacaaaatgagaagtctcgtggtgagcttactctagagctcacatacaagcctttcaaggaagaagatatagagaaagaagatacacagggtgctgatgtgatagagaaagctccagatggcactccagctggtggtggcttgctttatgttgttgttcatgaagcccaagatcttgaggggaagcaccatacaaacccatatgcaaaaataattttcaaaggcgaggagaagaaaactaaggtcatcaagaagaatagggatccaagatgggaggatgagtttgagttcgtgtgtgaggagcctcctgtgaatgataaactgcatgttgaagtcataagtaaagccccgaaggcagggctgatacatggcaaggaaactttgggctatattgatattagccttgcagacgtgatcagcaacaagcggattaatgaaaagtaccatctcatagactcgaaaaatggtcagatccagatcgagttgcagtggagaacttcctagacaggaaggagccagaatgccttgatgttcctctattcagtttgcgtatatctgtgattgagattgaggtcatgtagatatttcttttttttatagacatctgttgttcggatcttctcttaatcgatcaagtttccgacaagaactatgcagacatgttacagaccctgagaatggaactgaacaaatgacacgtcatacaattacactcggcattctggcatactgagaatttacaccatgctccaaatatatttcactgctatcttctaagagcatttagcgtgtgccgtgtggcatgcgtaccgaaatggttcgatgaacttgcaaagttgtatattaccaa

SEQ ID NO: 26852 - DNA, 1359 bp, Zea Mays
tttttttttttttttcaagcatgtatttgtggccgaagacactagaagtacctataatggatccctcaaaagcatcaaaaaggcctgttggaattctacttgtgaaggttgtgagagcccaaaatctgcggaagaaggatctgctgggtaaatctgacccatacgtgaaacttaagatgtcagatgataaacttccatccaagaagacaactgtaaagcgcagcaatctcaatccagagtggggtgaagacttcaagtttgttgtgacagatccagaaaaccaggctcttgaagttaatgtcttcgactgggaacaggttgggaaacatgaaaagatgggaatgaacatgatcccacttagagaactcctaccagaggggactaaagttactaccctcaacttgcttaagaccatggacccaaacgatgtacaaaatgagaagtctcgtggtgagcttactctagagctcacatacaagcctttcaaggaagaagatatagagaaagaagatacacagggtgctgatgtgatagagaaagctccagatggcactccagctggtggtggcttgctttatgttgttgttcatgaagcccaagatcttgaggggaagcaccatacaaacccatatgcaaaaataattttcaaaggcgaggagaagaaaactaaggtattgtgtaaacaaattatgttttatatcttcatggaatggccatgacatatccatctctttatttactcttcatcctaggtcatcaagaagaatagggatccaagatgggaggatgagtttgagttcgtgtgtgaggagcctcctgtgaatgataaactgcatgttgaagtcataagtaaagccccgaaggcagggctgatacatggcaaggaaactttgggctatattgatattagccttgcagacgtgatcagcaacaagcggattaatgaaaagtaccatctcatagactcgaaaaatggtcagatccagatcgagttgcagtggagaacttcctagacaggaaggagccagaatgccttgatgttcctctattcagtttgcgtatatctgtgattgagattgaggtcatgtagatatttcttttttttatagacatctgttgttcggatcttctcttaatcgatcaagtttccgacaagaactatgcagacatgttacagaccctgagaatggaactgaacaaatgacacgtcatacaattacactcggcattctggcatactgagaatttacaccatgctccaaatatatttcactgctatcttctaagagcatttagcgtgtgccgtgtggcatgcgtaccgaaatggttcgatgaacttgcaaagttgtatattaccaa

SEQ ID NO: 26853 - DNA, 1151 bp, Zea Mays
ggcactcacccacaacaatcccaatgtgtcagtggagagtgtgatcctgcctgacggcgaaaagtacaaagatatggtgtttgacaaggcagtcgagtcccggtttgaccgccggtgcacatttgtagcactgggtggtggtgtcatcggggacatgtgtggatttgcagctgctgcattcctccggggcgtcaatttcatacagataccaactactctgatggcccaggtggattcatctgttggcgggaaaactgggattaaccacccactagggaagaacttgattggagcattctaccagccacaatgtgttctaattgacacagatacactgaacacattgcctgacagggagctagcctcaggcattgccgaggtagtgaagtatgggctcataagggatgcaccattctttgagtggcaagagaaaaacatgcctgaattgttagcaagagaaccaaatgctttggcctatgctatcaagagatcttgtgaaaacaaagctgaggtggtcgcacaagatgagaaggaaagtggcctacgagcaacactaaacctgggtcacacatttggccatgctatcgagactgggactggatatggagcatggctccatggggaggctgtcgcaactggaatagttatggcagctgatatgtctcatcgcctggggtggatagatgactccataaaagaacgtgtgtttgccatactaaagcaagccaaacttcccattgcacctccagagaccatgaccgtggagaagtttaaaaacatcattgctgttgacaagaaggttgctgatggtctgttgagactcatccttctgaaaggaccactagggcgctgtgtctttaccggggattatgaccggaatgcgctcgatgaaacccttcacgcattctgcaacaactgacccatctcagttttggacttcacttctattgtacgaaggaaatccgggaacaactgctggccggggcgagaaaacactgtgggagtgggactaagattttataagccttttgtttagctggattctaatctgctctaatccatatgtaaaaatggaaaaagttttttttatccttatccattcagtatatcctgaagccaattctattgagaaaatatattgaatatgaaaa

SEQ ID NO: 26854 - DNA, 3156 bp, Zea Mays
cactccttaggtcctaaatttgaattacaatgggagcgaatttcaagctgaggttaaaaaatgtcactcgctggttcccttggtcgtgttgcacgggggaccggctttcgtgaactttctcggtcgaggctccgattgagcttcttcttaatataatactgtgggacggtcattcccctactggacaagttttcttatttccttggttgaacatcacaaatcatacaaacttcttacatcagacataatcagaataacataagacacaaaacgtataaagccatgctcaaatttccctcaaggtgtgctggtgcctatacttgccacttttccttaaacctccgtctcaatcacctcagaatattatcataaacaattatggaaaatctatatgaactggagttactatggacactattcaaacataatcagttagtttacagaataagataagacataaaaagtaccaatccatgcaggcctgctcaaatttccctcttgtttgctgcaactttctgctattttaatctggctgcgactgcggctactacaatattttgtctctatggattgcagttgcagcagtctgaacaggcttatttttttcttaaacctacatatcaatccccttcagttgaccagttattatcataaataattatgaaaaatctatatgagcttgagttacttcacatattgttctaatcccattttcatttaatataatacaaacaaatgcacatagtatcattaggaaaagaaaagaagtacaaatcaaattgctccgatgcatcaagtcacactataatcaagttactgtaactatatgagccgaaaatgcggggacagtgaataaagagcactgagcacattaattgaaacaggagcatccaacgggacattacctcaaacacatgttgtgcatccagaacagagctccactcctagaggagagaccccacaagcaaatcttctgttcataacccctccttcgtcgggctccatgacaagccataaccctccgcctcgtgtcccctgagcacaacagcggcgtcgctctttccgttgtcgtagccatcgccgagatggtacacgtgcacctcgtcgacgcacattttggtcggcaccgtatagggacgctgcggcctgcggcatgcagcgcgcgcggttgacctcgcacggtgtggcgccacgctggagacggacatggacgggaacaggacggcgccgcccgaggcagcggcggctgcagcgaggcgaggtgggagcggaagcaccgcgtccaagaccattggcctcgtcggaggtgtgagtgcccacgacgagccgaggacttcgatgggagcgagtgagccacttcacggtgagcgacggccactcgagcgggtgggagatgacgaggtcgtaaagcacagccgcattcctcttccagttccggtactccatctccgccgccgtaggtggggtgcccgccggtgtggacgatccgccgtccatggttactttgatttgatgatttgcacgagaaccggaggcggcatgctgcttgtctcccgccaacagggatttggacgaagcggcgggtgggtaggtaaggagagagcttttaacgcggactagttgggtctcaagacataaaaggcccaaacacatgctagtaactactagagcaagcccgcccattttcggctcatgagcccacgaagtagaggcttggcttgagcttatcaagcactctctcgaactcgcgtccgtttgcagcaccctccgccgtcgagccgccgcgatgatgcagtcgcacctgccctccccggcgaggctggggctcacaacctcgtcgccgtcgctcccgcccaatccggtccccttgaatcccacatcctcgccttcacatggtagcctgccctcgagtgcagccgccggcaccagcgctgccccaaccctaatcacctcgccgtcgctgctaccgctcctgccgccgcttccgcgcgcgcaatcgctgctccagcttatatcgtcgctcgccaccaacctcttcgagctctcgcccaaccgcgccgcgtggatcttatcgtaccgggggtcgctccccaccttcctcccatcggcgtcctcctccgcgccgccgctcccaacatcgatctcctctaccaaggacgcgctctctcttctcaccaccctgcagacgcagctcttcgaggccgtcgccgagctgcaagagaccctcgacctgcaggatgcgcgcgctcgccttgtccgtgaggcgcgtgccaaggatgcttcgctggtaacctttgcgaagaagctgcacgaggctcaccaggtacttgaccgcctcgtcgacgattacgctgactaccgccgcgatcccaaacgcccacgtggcgccgctgcggctgacgatcccgagccggcgtcggaaggcgacttcggcacgtccctccactccagccttaagctggatgacatcctgacctacgcgcaccgcataagttacacaacctttgctccgccggagcatggggctgggctgcctctccgtgtcagcctgccacctgtaccacaggaaaatcagatgagggcgtcgcagctgtatctttttgctgatttggatgtaggtgtgcccaagaagccattggatgcgaaggagggaatcgcaccagaagtggaggctgcgccgctgtatgagccacctcaggaggggccatcgaggctaccaaacaccttgccacccatgttccctaaggagctaaagccgccaccgggatggaagcctggtgacccgatcacgataccacttgatgagatactacctggtatcaagggtgcagagccacagccccctgtgccgcaggcacctgtttcagtgagaccagtggcgccaatgggcccagagccaatacaggtcaagcctgtgcagcttgattttgagagcagtagtagtgatgagtacagtagtgatgttgggagctcagaagaagatgatgaggattagtgctcggggttatgccagatcttctcaatcactggaagcttatcattcacattgtgaaggggtggaacctctgattccgacataaaatacaaatttcacttcataaagggcatagagagattggttcaaggttaagacactgcaagaatcgatatatgcag

SEQ ID NO: 26855 - DNA, 2406 bp, Zea Mays
tattgttctaatcccattttcatttaatataatacaaacaaatgcacatagtatcattaggaaaagaaaagaagtacaaatcaaattgctccgatgcatcaagtcacactataatcaagttactgtaactatatgagccgaaaatgcggggacagtgaataaagagcactgagcacattaattgaaacaggagcatccaacgggacattacctcaaacacatgttgtgcatccagaacagagctccactcctagaggagagaccccacaagcaaatcttctgttcataacccctccttcgtcgggctccatgacaagccataaccctccgcctcgtgtcccctgagcacaacagcggcgtcgctctttccgttgtcgtagccatcgccgagatggtacacgtgcacctcgtcgacgcacattttggtcggcaccgtatagggacgctgcggcctgcggcatgcagcgcgcgcggttgacctcgcacggtgtggcgccacgctggagacggacatggacgggaacaggacggcgccgcccgaggcagcggcggctgcagcgaggcgaggtgggagcggaagcaccgcgtccaagaccattggcctcgtcggaggtgtgagtgcccacgacgagccgaggacttcgatgggagcgagtgagccacttcacggtgagcgacggccactcgagcgggtgggagatgacgaggtcgtaaagcacagccgcattcctcttccagttccggtactccatctccgccgccgtaggtggggtgcccgccggtgtggacgatccgccgtccatggttactttgatttgatgatttgcacgagaaccggaggcggcatgctgcttgtctcccgccaacagggatttggacgaagcggcgggtgggtaggtaaggagagagcttttaacgcggactagttgggtctcaagacataaaaggcccaaacacatgctagtaactactagagcaagcccgcccattttcggctcatgagcccacgaagtagaggcttggcttgagcttatcaagcactctctcgaactcgcgtccgtttgcagcaccctccgccgtcgagccgccgcgatgatgcagtcgcacctgccctccccggcgaggctggggctcacaacctcgtcgccgtcgctcccgcccaatccggtccccttgaatcccacatcctcgccttcacatggtagcctgccctcgagtgcagccgccggcaccagcgctgccccaaccctaatcacctcgccgtcgctgctaccgctcctgccgccgcttccgcgcgcgcaatcgctgctccagcttatatcgtcgctcgccaccaacctcttcgagctctcgcccaaccgcgccgcgtggatcttatcgtaccgggggtcgctccccaccttcctcccatcggcgtcctcctccgcgccgccgctcccaacatcgatctcctctaccaaggacgcgctctctcttctcaccaccctgcagacgcagctcttcgaggccgtcgccgagctgcaagagaccctcgacctgcaggatgcgcgcgctcgccttgtccgtgaggcgcgtgccaaggatgcttcgctggtaacctttgcgaagaagctgcacgaggctcaccaggtgtgcccaagaagccattggatgcgaaggagggaatcgcaccagaagtggaggctgcgccgctgtatgagccacctcaggaggggccatcgaggctaccaaacaccttgccacccatgttccctaaggagctaaagccgccaccgggatggaagcctggtgacccgatcacgataccacttgatgagatactacctggtatcaagggtgcagagccacagccccctgtgccgcaggcacctgtttcagtgagaccagtggcgccaatgggcccagagccaatacaggtcaagcctgtgcagcttgattttgagagcagtagtagtgatgagtacagtagtgatgttgggagctcagaagaagatgatgaggattagtgctcggggttatgccagatcttctcaatcactggaagcttatcattcacattgtgaagtaaggatgaactcgagtacaattgaataacttggtgaatcatttttaatagatattccaactaccttgttattgcatatactttgttgatgaatagtctaggctagttggatgatccacgtgcgattcactattcagtaaatgatttgttggctccgtttgcatgtctaaccttggggatgtagctgtttaaatgcaacctggaactttatttaagcttttggtgtgatgtgcaaggtatcatacgcaattgcaacgatactgcacgtccacattccagcatttgcttattttgacccttgagtatattgggacaagggataaattgtcttcaattggtat

SEQ ID NO: 26856 - DNA, 3029 bp, Zea Mays
cactccttaggtcctaaatttgaattacaatgggagcgaatttcaagctgaggttaaaaaatgtcactcgctggttcccttggtcgtgttgcacgggggaccggctttcgtgaactttctcggtcgaggctccgattgagcttcttcttaatataatactgtgggacggtcattcccctactggacaagttttcttatttccttggttgaacatcacaaatcatacaaacttcttacatcagacataatcagaataacataagacacaaaacgtataaagccatgctcaaatttccctcaaggtgtgctggtgcctatacttgccacttttccttaaacctccgtctcaatcacctcagaatattatcataaacaattatggaaaatctatatgaactggagttactatggacactattcaaacataatcagttagtttacagaataagataagacataaaaagtaccaatccatgcaggcctgctcaaatttccctcttgtttgctgcaactttctgctattttaatctggctgcgactgcggctactacaatattttgtctctatggattgcagttgcagcagtctgaacaggcttatttttttcttaaacctacatatcaatccccttcagttgaccagttattatcataaataattatgaaaaatctatatgagcttgagttacttcacatattgttctaatcccattttcatttaatataatacaaacaaatgcacatagtatcattaggaaaagaaaagaagtacaaatcaaattgctccgatgcatcaagtcacactataatcaagttactgtaactatatgagccgaaaatgcggggacagtgaataaagagcactgagcacattaattgaaacaggagcatccaacgggacattacctcaaacacatgttgtgcatccagaacagagctccactcctagaggagagaccccacaagcaaatcttctgttcataacccctccttcgtcgggctccatgacaagccataaccctccgcctcgtgtcccctgagcacaacagcggcgtcgctctttccgttgtcgtagccatcgccgagatggtacacgtgcacctcgtcgacgcacattttggtcggcaccgtatagggacgctgcggcctgcggcatgcagcgcgcgcggttgacctcgcacggtgtggcgccacgctggagacggacatggacgggaacaggacggcgccgcccgaggcagcggcggctgcagcgaggcgaggtgggagcggaagcaccgcgtccaagaccattggcctcgtcggaggtgtgagtgcccacgacgagccgaggacttcgatgggagcgagtgagccacttcacggtgagcgacggccactcgagcgggtgggagatgacgaggtcgtaaagcacagccgcattcctcttccagttccggtactccatctccgccgccgtaggtggggtgcccgccggtgtggacgatccgccgtccatggttactttgatttgatgatttgcacgagaaccggaggcggcatgctgcttgtctcccgccaacagggatttggacgaagcggcgggtgggtaggtaaggagagagcttttaacgcggactagttgggtctcaagacataaaaggcccaaacacatgctagtaactactagagcaagcccgcccattttcggctcatgagcccacgaagtagaggcttggcttgagcttatcaagcactctctcgaactcgcgtccgtttgcagcaccctccgccgtcgagccgccgcgatgatgcagtcgcacctgccctccccggcgaggctggggctcacaacctcgtcgccgtcgctcccgcccaatccggtccccttgaatcccacatcctcgccttcacatggtagcctgccctcgagtgcagccgccggcaccagcgctgccccaaccctaatcacctcgccgtcgctgctaccgctcctgccgccgcttccgcgcgcgcaatcgctgctccagcttatatcgtcgctcgccaccaacctcttcgagctctcgcccaaccgcgccgcgtggatcttatcgtaccgggggtcgctccccaccttcctcccatcggcgtcctcctccgcgccgccgctcccaacatcgatctcctctaccaaggacgcgctctctcttctcaccaccctgcagacgcagctcttcgaggccgtcgccgagctgcaagagaccctcgacctgcaggatgcgcgcgctcgccttgtccgtgaggcgcgtgccaaggatgcttcgctggtaacctttgcgaagaagctgcacgaggctcaccaggtacttgaccgcctcgtcgacgattacgctgactaccgccgcgatcccaaacgcccacgtggcgccgctgcggctgacgatcccgagccggcgtcggaaggcgacttcggcacgtccctccactccagccttaagctggatgacatcctgacctacgcgcaccgcataagttacacaacctttgctccgccggagcatggggctgggctgcctctccgtgtcagcctgccacctgtaccacaggaaaatcagatgagggcgtcgcagctgtatctttttgctgatttggatgtaggtgtgcccaagaagccattggatgcgaaggagggaatcgcaccagaagtggaggctgcgccgctgtatgagccacctcaggaggggccatcgaggctaccaaacaccttgccacccatgttccctaaggagctaaagccgccaccgggatggaagcctggtgacccgatcacgataccacttgatgagatactacctggtatcaagggtgcagagccacagccccctgtgccgcaggcacctgtttcagtgagaccagtggcgccaatgggcccagagccaatacaggtcaagcctgtgcagcttgattttgagagcagtagtagtgatgagtacagtagtgatgttgggagctcagaagaagatgatgaggattagtgctcgtaccttgggcagacccattgcggaaggc

SEQ ID NO: 26857 - DNA, 1683 bp, Zea Mays
gtttactatccttcttatgttagttaatgtttgtttttggttattacttagtttgtgatttgttcctctcatagtggcatgagtatggtgtgttatctctgttgtttgatgacatactgatttacctaatctatgatttgtttctctcatagtgacatgagtttgatgtgttatctccattgtttgttttataatgattatagcttatttatactacttccatctggaaagggacatgattctatttccatctctagtcaaactttctaaagtttgaccaaatctataaaaagagcatcaatatttatagcacgaaataggtattactatggaaatatatctcatgaagggtctattgacactggttatcataaatattgataccttttgtataaagttggtcaaactcaatagtttgactccataatatgctagaattgcattctttccctgaatggaggaagtttgtttaactaaaccgactaatcgagcaaaaaaattacaatggggatattggattgatcagtgcaacactacagcttgaacttgcaattgcaatcatctgttgtatatttcagcctttgttctactctcttctgtgtttattcttcttactgggtaataagcagattgcaatttaggctagcttctcccttttgtgttttgttattataataacttaattttgccttctgcatttgcatacattcaataccatctgcccttgccacggtacttatgcttactatactttcttgtttgcaatcatttcttgtttgcaaattgttctactgaacttctaacggtaatttgaagaattgttgaagatgagggcatttacgagcttggttgacaccaactacatattagatgctatccgtggttctgagttattggaagtgcagggagataatgttcggaggcgcaatgattggatggaatggctacttcattaacgctgtccactagcaaatcaggttaagatgccaaaatgcagccgcatgctatcttcggggaactgaatagaagtcttgtggaaaattatatggaggagtcctgcaaattgacgcatttacatgacaatctcgatgcatgctacacgtctctgcgtactaatgtgaaactagatcaaatcttggcacgtttaggagccagtgtccctgcccaggccatcgataggtcgactccatgttgtatattggctagctctgtagcttggctcactggctcttaaacgtgggaaggcttgatctagtttgagattggtgcacaagggcatgtggcatggatcaagatcgtactataaacgcgtcggtttgcaggatatagattttattttctaagtcttgggtgatttgatcatgggcaccgggtaccggatccgtggactgatgtacagtgggtctattggaagcgggaagattttgtttgtttagatcggacatgatggctgcacgtaaagccactattgaggggataaataacaggaaataaatttacttaaaagtactttttttgcggtgtgtatagttgttcgaaaagaagtgtgatcctaccttttcatcatggattattggtcctggtgaacgatttggtgctacctagggtttattcttggaatcttagttttgtggtttgagtagtataccctgtatttgactctccttatgagcgaatttttat

SEQ ID NO: 26858 - DNA, 2273 bp, Zea Mays
cgccttccccattcgcccggccgattcaccagcgccccaaacccccagccgaatccgcgtcgcctcgcctcgcctcccgatgtcgccggctgctggtggccccgcgcccacgcccgctcaatcggcgcccgccgtcccgcaggcgatcgcgccgccgccggggcccggccgtgcggcgcccgcggcgccccgccgggatccgccgggcgaccccgagggggccgatcccgccaatgcggcggcgaggaagacgccgtggagcatgctggtgcagccccccgccgcggcgtcggcggcggcggcgggggagaccccagagagtggcggcatcatcggtggggatgcttcgtggccggcgctcgcggggtcgacgcgcgcgggccccaagtcgggctcgtccgactccctcaaggcactctccgatgcgtccggcccgtcgcctcaggaggttccaattgccgctccatcggtacccccatatccagttgtgggggctaatccgattcccaccgcccaaaaccctacctccatacctcctcccatggccgcggcttcctctcagcagaacggtggcacaacccagacgattccagttcggcgcggtggcagcagcggtggaaacggtggaggtggcagtcgtgggtatggtagcattggtggtcgcagggctgccaatagtaatggaggtgatgggagcagcggcagcggtggtgatgataactggaataatggaagccttggtactggcagtggttgcaacagcaccaatggcgatggttctatcaacttggatgataatgcccctggcgctggtcatgctggtgggaatggcaatggcagcagcagagatgctcctgggaatagacactggaaccacaacatacgtggtggtatcagcagtaacggtgctggtagtggtgatgggaacaatagaaatagtagtggtagcagcaaccactggaataataatccccgaattagtagtggcagtagcaatggcgttggaggtcgtggtggttaccgtggtcgccgtgaccatgagagaggggctaacttccctaggaatttccccagagttccagtaatgccatatcaacagcagcagcagcctggcatctaccagcctggacctttttaccgaccgccgccacctgctgcccattttatggtgccacaacatttttatgctccaccatttccctaccctggtgagcagtttcagaacatgcatcttgttcgaccacccatgcagccttcatgggttcctcctcaggatctgccaaatctccaagatgatattaggaatcagatagagttctattttagcacaaataatctatgccatgacacattcttgagaagacatatgaacgatcaaggatgggtacctatcaacctaatcttagggttcaatcggatgagggcatttacgagcttggttgacaccaactacatattagatgctatccgtggttctgagttattggaagtgcagggagataatgttcggaggcgcaatgattggatggaatggctacttcattaacgctgtccactagcaaatcaggttaagatgccaaaatgcagccgcatgctatcttcggggaactgaatagaagtcttgtggaaaattatatggaggagtcctgcaaattgacgcatttacatgacaatctcgatgcatgctacacgtctctgcgtactaatgtgaaactagatcaaatcttggcacgtttaggagccagtgtccctgcccaggccatcgataggtcgactccatgttgtatattggctagctctgtagcttggctcactggctcttaaacgtgggaaggcttgatctagtttgagattggtgcacaagggcatgtggcatggatcaagatcgtactataaacgcgtcggtttgcaggatatagattttattttctaagtcttgggtgatttgatcatgggcaccgggtaccggatccgtggactgatgtacagtgggtctattggaagcgggaagattttgtttgtttagatcggacatgatggctgcacgtaaagccactattgaggggataaataacaggaaataaatttacttaaaagtactttttttgcggtgtgtatagttgttcgaaaagaagtgtgatcctaccttttcatcatggattattggtcctggtgaacgatttggtgctacctagggtttattcttggaatcttagttttgtggtttgagtagtataccctgtatttgactctccttatgagcgaatttttat

SEQ ID NO: 26859 - DNA, 2266 bp, Zea Mays
atgctggattcacacctgcgcgaaagcgaagagcgagctgagactgagacacctgcacagaaaagctggatgacacaggcacatacgcacatcctacagaaatacaacgcgcccacggtacatgatcagtagtagtaccacaagtggcagtgttgagcacgaacatcaccgccgcgctaatccaccattcaaacgagattagtaaaaaaacaaacggggagctcagagaaaaaggaataaacaaatagaggaagcagcgcagtcggaggcagtgagctcgctctcctgctcctacaggctgcagttgcgctgtgcctgtgcgtccagttccatcgctttccctcctccccagtccccactcccagatgcgatttccctctccaccgccacagcgcctagcttagccagccagccggcggccatcgccgccgcaatggcgaccgcgtcggaggacgaggccgcctcggaccgctgcagcggcagctacagccccagcgccgacgtcagcgagtccgaaacctccagtgactgctccgcgcccaccacgcgccgcttcgcctcctcctcctcggcctccgccaccgtctcccgcctcgcgtcctcctcctcgtcgctccccaccccggcatcggccgccgccttctacctctccaagccaacccccgacctctccgagatcgacatgatgaaggagcgcttcgcgaagctcctgctcggcgaggacatgtcgggcagcgggaagggcgtctgcaccgcgctcgccatctccaatgccatcaccaacctctccgccaccgtgttcggcgagctgtggaggctggagccgctcgcgacggcgaggaaggcgatgtggacgcgggagatggagtggctgctctccgtcgctgactccatcgtcgagctcaccccctccatccaggagctccccgaaggcggcggccagttcgaggtcatggtcccgcgcccgcgcagcgacctctacatgaacctccccgcgctcaagaaactcgacgccatgctcctcgcgatgattgacgggttcaaggatacggagttctgtgcggcaggaggacaagtggtggttgccctgcccaagagtgccgcccaaggggctgtctgaggacgcgaggaggaagttgcagcaaagcagggattgtgcaaaccagatactcaaggcggccatggcgattaacagcgatgtgctcgccgagatggaaatccccgaagtgtacctggagacactgcccaagaacggtaaatcttgcttgggtgagataatttatcgatacataacagctgagcagttctcaccagaatgtctcctagattgcttggatctatcatccgagcaccacacacttgaagtggcaaacagaatagaaggtgccatccatgtttggaaactgaaaggccaaaaaaagtcgacacctcaagccaaatcaaagatatcttggggtggaaaagtgaagggtcttgttggagataaggagaagagccacactttgtctgaaagagctgatggtctattgcagagcttaagattgagatatccaggcctgccacaaacttcccttgacatgaacaagatacagtataacaaggatgtcgggcagtccatacttgaatgctactcaagggttctggagagcttggcatttaacataattgcaagaattgatgatgtgatctatgttgatgatgctacaaacagatcagctgctgctgagtctgtttcgatcttcaatcgtggcacaggtgtgccagttcagaagaggatctctccaagcccattctctattcagaattcgccgtatggctctccgttcgcaacacccactttctgctcatccaccccagttacaggcagccctggaagggtacagcccccattaaacaaaaacattctaggaactcaagaaatcaaggtcgaaaagctcttttctggtgatctagagaaggtctggacatatgcaggaaacttgagcgctaggaaagacgctggagatgctcctgagagagactgaagggcgatggaggaaggtagacatgtaccgacagccgacagatcctgtaattgctagtagctagatcttcctgtacagaagcagcatgagtatttttttttgttctttttgtagcgagccgatcattgtgtgctctgcttacaatgaatggatgtcacctgatctgaacagagaaacttgtagtttcagctgtagtttttttttgttgttgtctggattggctgtttagcagtgtaaaataa

SEQ ID NO: 26860 - DNA, 1519 bp, Zea Mays
cttcttaacagtcggaactcggaatcggaagtggcgtgaagcaacgaaacagcgacacgccatcaacagtaccattcagatcggaatcccagttagctctctgtgccctacctgtcagtgacacagaaatccagtcggcggggctgccgcctgccgcatcctcccctcgcccaccgtcgacgacttgatcccctcccaccgttgaggccgcctcctcacggcagcgagccagcgactcctctcttcgtctcctacaagtagccagacaccactccgactttgccggcaacccgtcgacagcgacgaggcgcagcataaggcatacgggcacggcggccatggcgaccagctccaaacccgccgcgcccgtggaccccatggtcgtgctcgcccacgagttccccgaggtgtcattcgactacgacgagagggatgtagcgttgtacgcgctcggggttggtgcctgcggcgatgacgccgtcgacgagaaggagcttcacttcgtgtaccacagggatgggcagccacacattaagacccttcctacttttgtttctttatttcccaacaagaacagcaatgggcttggatttgttgatgtgcctggccttaactttgatgcaagccttctactgcatggtcaacaatacatagagatctataggccaatcccttcgtatgccagtgttgtaaacagggttaaagtagctggtttgcacgacaaggggaaagcaactattcttgagctcgaaactaccacaagcctcaaagagtcaggggaaattttatgcatgaacaggagtactatctacttgcgtggtgctggagggttttcagactcttcacggccatactcatatgctacctatcctgctaatcaagtttctcgcatttctattccaaattcggcaccttctgcagtatgcgacgaccagacaaagcaatcccaggcattgttatacaggctatctggggattacaatcctttgcattcagacccagatattgcacagcttgctgggttcacccgtccaatcctgcacggcctctgcaccctaggattcgctgctcgcgccgtcataaaatctttctgcaacggcgaaccgactgcggtgaagagcatcttcggccgtttccttctgcacgtctaccccggggaaacgttgtccactgagatgtggcttgacggccagaaggtgcactaccaaacgaaggccaaggagcggaaccgagctgtcctctctggatatgtgttgctccagcacatcccctcgtcattgatggatgacaagatcaaagataataaagtagttcagtaatctagaaaactgttttcttcggtcgtactgtaaagaagatatgaacttatagcttaatatatataagtctaataagttgggtgtggtatacactatacactatacactagatagcactaggtaacatgagggcatgaggctcaaaagctgtatgaaacaaccaatgttcatgaaagttttttttttaatgtttggaagag

SEQ ID NO: 26861 - DNA, 1520 bp, Zea Mays
cttcttaacagtcggaactcggaatcggaagtggcgtgaagcaacgaaacagcgacacgccatcaacagtaccattcagatcggaatcccagttagctctctgtgccctacctgtcagtgacacagaaatccagtcggcggggctgccgcctgccgcatcctcccctcgcccaccgtcgacgacttgatcccctcccaccgttgaggccgcctcctcacggcagcgagccagcgactcctctcttcgtctcctacaagtagccagacaccactccgactttgccggcaacccgtcgacagcgacgaggcgcagcataaggcatacgggcacggcggccatggcgaccagctccaaacccgccgcgcccgtggaccccatggtcgtgctcgcccacgagttccccgaggtgtcattcgactacgacgagagggatgtagcgttgtacgcgctcggggttggtgcctgcggcgatgacgccgtcgacgagaaggagcttcacttcgtgtaccacagggatgggcagccacacattaagacccttcctacttttgtttctttatttcccaacaagaacagcaatgggcttggatttgttgatgtgcctggccttaactttgatgcaagccttctactgcatggtcaacaatacatagagatctataggccaatcccttcgtatgccagtgttgtaaacagggttaaagtagctggtttgcacgacaaggggaaagcaactattcttgagctcgaaactaccacaagcctcaaagagtcaggggaaattttatgcatgaacaggagtactatctacttgcgtggtgctggagggttttcagactcttcacggccatactcatatgctacctatcctgctaatcaagtttctcgcatttctattccaaattcggcaccttctgcagtatgcgacgaccagacaaagcaatcccaggcattgttatacaggctatctggggattacaatcctttgcattcagacccagatattgcacagcttgctgggttcacccgtccaatcctgcacggcctctgcaccctaggattcgctgctcgcgccgtcataaaatctttctgcaacggcgaaccgactgcggtgaagagcatcttcggccgtttccttctgcacgtctaccccggggaaacgttgtccactgagatgtggcttgacggccagaaggtgcactaccaaacgaaggccaaggagcggaaccgagctgtcctctctggatatgtgttgctccagcacatcccctcgtcattgtaagtaaaagttttgtttcttaaaattggtgcccgctgaaagcatttggcttggctgtgataaattgagcacgaggtgggctgccactgtaatgatagccatgtatgggtctgcacataacacattcgtactgtattgataagaagcacgtaccacttaaatacgcagatccgaacagataaaaatactatagaagtagtagaattattatcattgctattcaagttacatttcctgaac

SEQ ID NO: 26862 - DNA, 1443 bp, Zea Mays
cttcttaacagtcggaactcggaatcggaagtggcgtgaagcaacgaaacagcgacacgccatcaacagtaccattcagatcggaatcccagttagctctctgtgccctacctgtcagtgacacagaaatccagtcggcggggctgccgcctgccgcatcctcccctcgcccaccgtcgacgacttgatcccctcccaccgttgaggccgcctcctcacggcagcgagccagcgactcctctcttcgtctcctacaagtagccagacaccactccgactttgccggcaacccgtcgacagcgacgaggcgcagcataaggcatacgggcacggcggccatggcgaccagctccaaacccgccgcgcccgtggaccccatggtcgtgctcgcccacgagttccccgaggtgtcattcgactacgacgagagggatgtagcgttgtacgcgctcggggttggtgcctgcggcgatgacgccgtcgacgagaaggagcttcacttcgtgtaccacagggatgggcagccacacattaagctttgatgcaagccttctactgcatggtcaacaatacatagagatctataggccaatcccttcgtatgccagtgttgtaaacagggttaaagtagctggtttgcacgacaaggggaaagcaactattcttgagctcgaaactaccacaagcctcaaagagtcaggggaaattttatgcatgaacaggagtactatctacttgcgtggtgctggagggttttcagactcttcacggccatactcatatgctacctatcctgctaatcaagtttctcgcatttctattccaaattcggcaccttctgcagtatgcgacgaccagacaaagcaatcccaggcattgttatacaggctatctggggattacaatcctttgcattcagacccagatattgcacagcttgctgggttcacccgtccaatcctgcacggcctctgcaccctaggattcgctgctcgcgccgtcataaaatctttctgcaacggcgaaccgactgcggtgaagagcatcttcggccgtttccttctgcacgtctaccccggggaaacgttgtccactgagatgtggcttgacggccagaaggtgcactaccaaacgaaggccaaggagcggaaccgagctgtcctctctggatatgtgttgctccagcacatcccctcgtcattgtaagtaaaagttttgtttcttaaaattggtgcccgctgaaagcatttggcttggctgtgataaattgagcacgaggtgggctgccactgtaatgatagccatgtatgggtctgcacataacacattcgtactgtattgataagaagcacgtaccacttaaatacgcagatccgaacagataaaaatactatagaagtagtagaattattatcattgctattcaagttacatttcctgaac

SEQ ID NO: 26863 - DNA, 1537 bp, Zea Mays
cttcttaacagtcggaactcggaatcggaagtggcgtgaagcaacgaaacagcgacacgccatcaacagtaccattcagatcggaatcccagttagctctctgtgccctacctgtcagtgacacagaaatccagtcggcggggctgccgcctgccgcatcctcccctcgcccaccgtcgacgacttgatcccctcccaccgttgaggccgcctcctcacggcagcgagccagcgactcctctcttcgtctcctacaagtagccagacaccactccgactttgccggcaacccgtcgacagcgacgaggcgcagcataaggcatacgggcacggcggccatggcgaccagctccaaacccgccgcgcccgtggaccccatggtcgtgctcgcccacgagttccccgaggtgtcattcgactacgacgagagggatgtagcgttgtacgcgctcggggttggtgcctgcggcgatgacgccgtcgacgagaaggagcttcacttcgtgtaccacagggatgggcagccacacattaagacccttcctacttttgtttctttatttcccaacaagaacagcaatgggcttggatttgttgatgtgcctggccttaactttgatgcaagccttctactgcatggtcaacaatacatagagatctataggccaatcccttcgtatgccagtgttgtaaacagggttaaagtagctggtttgcacgacaaggggaaagcaactattcttgagctcgaaactaccacaagcctcaaagagtcaggggaaattttatgcatgaacaggagtactatctacttgcgtggtgctggagggttttcagactcttcacggccatactcatatgctacctatcctgctaatcaagtttctcgcatttctattccaaattcggcaccttctgcagtatgcgacgaccagacaaagcaatcccaggcattgttatacaggctatctggggattacaatcctttgcattcagacccagatattgcacagcttgctgggttcacccgtccaatcctgcacggcctctgcaccctaggattcgctgctcgcgccgtcataaaatctttctgcaacggcgaaccgactgcggtgaagagcatcttcggccgtttccttctgcacgtctaccccggggaaacgttgtccactgagatgtggcttgacggccagaaggtgcactaccaaacgaaggccaaggagcggaaccgagctgtcctctctggatatgtgttgctccagcacatcccctcgtcattgtaattgattttttgttaagtcggtgggtaagaaaaagcttctgaaccaagagactcaagtgaggtctgttcggtgccgtcgttgctctggcctagcaatcgtcagcccgtgaccaatccagcgtcagactggacattgtcattcataaaagttagtattacgtgttcctgccagtctgctgggacttggcagcctgggattcgacggaatataagtgatcatgcctctgaaaaggacgatctggagaaagaatctga

SEQ ID NO: 26864 - DNA, 2168 bp, Zea Mays
atggggacatggcatgttggttcaacagtcaggagacttgattcccaggcagatgcagggttcacttcactgcttcggtgtgtactctgttcttggatttacatgctatgtgttggtgaagagtgtttcattactgcaaatcatgcaggctggagttgtcagttctacagcttcaacatggtttgtcaggtctgccatggggacgcaatgatcgtcaactgctcggcatcctttgctatgctttgtttgtggagctgctgagtggtggtgtttggagaagtcttgaccctgaatatatagctgaatcaaagagtaaggaatcttgtcgagtgggattattggcaagggacaaggtcatgaggacatggatgcagtatgtgcatacatttgatttgagagccctttctctgcttggattgagcacatcctatgcagccatgctgagcggtttagtggggaaggggcacgaggaccccatggccatgtggaacgggagcaacatgaattgagagggccagactagttcggctagacgtagcacagtccgatattgacaaccgaagtccatgtcggaatccctttccgtttgggggtgcaagtgtcgagactgcggaaacttcgctgatatgggcgccatgaacgtgcctgtcattatcagttagttgcctagttgcaatcttgtaggttcatgtaagaaaaaaaacaacgaaaatgtagttcacatgagatgctgataatccaatagaccgccaattgaagaagtgatatgaagtgtcggccacattgttgtgtcgttcagatactctgggcatgaacaattgtcagaacattttcctgagctggggatccaatttataagtttaaatagggcatactagctacccagaaatttcgatatttcactgcccaagcacagaatgaattggtactgacgcaatggacccactttacacatggtctttatgaagcatgcttctttgacaaggttggtcattggtcagtatggcagcaaattgtggtacccaagcactcgcgttgtgtcggtatggtccgacattgacactgctactagtggctccaacaagtggccagcatatgtccatagaattcaaatccaatcaaaatcaggctgctttttcttgcaacattgcatgttctgatctcatgtccttgtcccttgccagcctgagttgaaagctgcacttgagtaacagcatgcttctcttcatcctcacttataaatccatgaggcagccacggtagcaccaacactcaatcaactagctcaacaacacctgacctgatacaaaaggagccctagagttccagagacgaagaaaggagaagaagccaatcagccaccagccatgatgagtgccaagagacttgttcagatgtcaagtagtaggtggcgaagaatggcggccctcgcgaggaagaggctcgcatcgacacctgtgaaagaaactgacgggtcgtcatgcagcacttcgtcggtggctggcaaaggccactgtgccatgtactcggctgatggtcggcggtttgaggtcccgttggtgttcctcggaacggctctcttcggtgagctcctgagcatgtcgcaggaggagttcggcttcgctggtgatgacggcaggatcaccttgccatgtgagtctttggtgatggagtacatgatgtgtttgcttacaagagatgcctctgaagaggtcaaaaggttgtttttgagctccatggcaaggccttgccactatggatctggactggtgcaaaccatgcatcatacccagcgaactgttgttcctagcttctgaagattagcatatatgcgcagtagcaagcagattgttttcaccttttcgtgtttgatgtaaatgtttacataatgtagattgggatggaatggaactaaccatatggttcaaaaacaaatggagcagaaatatgtgtttacgtcagggttcaaaatttcacgaaattcagcaatttcggtagtggcttgaagaaaaaaagtgaaattttgtatcacactagtacatgtgtttttactgtaaatatataattttaggctattgtttattttattcctctagtcaacagatgagtaatcctaaaccgtgttgatcttttgtttaggtctaaattttttagaaaaaagacatact

SEQ ID NO: 26865 - DNA, 2528 bp, Zea Mays
cttggttcttcttgattctcaggctagtgcttggaaatgtttagtttgtggctgtgattgtagtgatggtgtcttggttgctagctcctgtatatataggtgaagaaatggtccatgtcttgagtgcagttgtgctcttctcagactgattgtcaggggacatggccatgagctgggtacgtgcattgctagctgcagatgttgacacttgagattcagatctgatttgctgggccatcacttactccactttgaaggcaaagatagtggactagtggttgggcaatgagatatgtactacagtactagctgctgaattgggctgagacatagtgcaatcatcctgggttctgcttttatggcctagctgctcatatctgtttcagtgtcctgtttgaagtggttcagagataagccgcaccaatccctcaatggggacatggcatgttggttcaacagtcaggagacttgattcccaggcagatgcagggttcacttcactgcttcggctggagttgtcagttctacagcttcaacatggtttgtcaggtctgccatggggacgcaatgatcgtcaactgctcggcatcctttgctatgctttgtttgtggagctgctgagtggtggtgtttggagaagtcttgaccctgaatatatagctgaatcaaagagtaaggaatcttgtcgagtgggattattggcaagggacaaggtcatgaggacatggatgcagtatgtgcatacatttgatttgagagccctttctctgcttggattgagcacatcctatgcagccatgctgagcggtttagtggggaaggggcacgaggaccccatggccatgtggaacgggagcaacatgaattgagagggccagactagttcggctagacgtagcacagtccgatattgacaaccgaagtccatgtcggaatccctttccgtttgggggtgcaagtgtcgagactgcggaaacttcgctgatatgggcgccatgaacgtgcctgtcattatcagttagttgcctagttgcaatcttgtaggttcatgtaagaaaaaaaacaacgaaaatgtagttcacatgagatgctgataatccaatagaccgccaattgaagaagtgatatgaagtgtcggccacattgttgtgtcgttcagatactctgggcatgaacaattgtcagaacattttcctgagctggggatccaatttataagtttaaatagggcatactagctacccagaaatttcgatatttcactgcccaagcacagaatgaattggtactgacgcaatggacccactttacacatggtctttatgaagcatgcttctttgacaaggttggtcattggtcagtatggcagcaaattgtggtacccaagcactcgcgttgtgtcggtatggtccgacattgacactgctactagtggctccaacaagtggccagcatatgtccatagaattcaaatccaatcaaaatcaggctgctttttcttgcaacattgcatgttctgatctcatgtccttgtcccttgccagcctgagttgaaagctgcacttgagtaacagcatgcttctcttcatcctcacttataaatccatgaggcagccacggtagcaccaacactcaatcaactagctcaacaacacctgacctgatacaaaaggagccctagagttccagagacgaagaaaggagaagaagccaatcagccaccagccatgatgagtgccaagagacttgttcagatgtcaagtagtaggtggcgaagaatggcggccctcgcgaggaagaggctcgcatcgacacctgtgaaagaaactgacgggtcgtcatgcagcacttcgtcggtggctggcaaaggccactgtgccatgtactcggctgatggtcggcggtttgaggtcccgttggtgttcctcggaacggctctcttcggtgagctcctgagcatgtcgcaggaggagttcggcttcgctggtgatgacggcaggatcaccttgccatgtgagtctttggtgatggagtacatgatgtgtttgcttacaagagatgcctctgaagaggtcaaaaggttgtttttgagctccatggcaaggccttgccactatggatctggactggtgcaaaccatgcatcatacccagcgaactgttgttcctagcttctgaagattagcatatatgcgcagtagcaagcagattgttttcaccttttcgtgtttgatgtaaatgtttacataatgtagattgggatggaatggaactaaccatatggttcaaaaacaaatggagcagaaatatgtgtttacgtcagggttcaaaatttcacgaaattcagcaatttcggtagtggcttgaagaaaaaaagtgaaattttgtatcacactagtacatgtgtttttactgtaaatatataattttaggctattgtttattttattcctctagtcaacagatgagtaatcctaaaccgtgttgatcttttgtttaggtctaaattttttagaaaaaagacatact

SEQ ID NO: 26866 - DNA, 2099 bp, Zea Mays
gagtgatcctgccattacctgtgaaaccaaactcctccgcagccatcctcaaaagctcactgaagaccactgagcggaggctggagttgtcagttctacagcttcaacatggtttgtcaggtctgccatggggacgcaatgatcgtcaactgctcggcatcctttgctatgctttgtttgtggagctgctgagtggtggtgtttggagaagtcttgaccctgaatatatagctgaatcaaagagtaaggaatcttgtcgagtgggattattggcaagggacaaggtcatgaggacatggatgcagtatgtgcatacatttgatttgagagccctttctctgcttggattgagcacatcctatgcagccatgctgagcggtttagtggggaaggggcacgaggaccccatggccatgtggaacgggagcaacatgaattgagagggccagactagttcggctagacgtagcacagtccgatattgacaaccgaagtccatgtcggaatccctttccgtttgggggtgcaagtgtcgagactgcggaaacttcgctgatatgggcgccatgaacgtgcctgtcattatcagttagttgcctagttgcaatcttgtaggttcatgtaagaaaaaaaacaacgaaaatgtagttcacatgagatgctgataatccaatagaccgccaattgaagaagtgatatgaagtgtcggccacattgttgtgtcgttcagatactctgggcatgaacaattgtcagaacattttcctgagctggggatccaatttataagtttaaatagggcatactagctacccagaaatttcgatatttcactgcccaagcacagaatgaattggtactgacgcaatggacccactttacacatggtctttatgaagcatgcttctttgacaaggttggtcattggtcagtatggcagcaaattgtggtacccaagcactcgcgttgtgtcggtatggtccgacattgacactgctactagtggctccaacaagtggccagcatatgtccatagaattcaaatccaatcaaaatcaggctgctttttcttgcaacattgcatgttctgatctcatgtccttgtcccttgccagcctgagttgaaagctgcacttgagtaacagcatgcttctcttcatcctcacttataaatccatgaggcagccacggtagcaccaacactcaatcaactagctcaacaacacctgacctgatacaaaaggagccctagagttccagagacgaagaaaggagaagaagccaatcagccaccagccatgatgagtgccaagagacttgttcagatgtcaagtagtaggtggcgaagaatggcggccctcgcgaggaagaggctcgcatcgacacctgtgaaagaaactgacgggtcgtcatgcagcacttcgtcggtggctggcaaaggccactgtgccatgtactcggctgatggtcggcggtttgaggtcccgttggtgttcctcggaacggctctcttcggtgagctcctgagcatgtcgcaggaggagttcggcttcgctggtgatgacggcaggatcaccttgccatgtgagtctttggtgatggagtacatgatgtgtttgcttacaagagatgcctctgaagaggtcaaaaggttgtttttgagctccatggcaaggccttgccactatggatctggactggtgcaaaccatgcatcatacccagcgaactgttgttcctagcttctgaagattagcatatatgcgcagtagcaagcagattgttttcaccttttcgtgtttgatgtaaatgtttacataatgtagattgggatggaatggaactaaccatatggttcaaaaacaaatggagcagaaatatgtgtttacgtcagggttcaaaatttcacgaaattcagcaatttcggtagtggcttgaagaaaaaaagtgaaattttgtatcacactagtacatgtgtttttactgtaaatatataattttaggctattgtttattttattcctctagtcaacagatgagtaatcctaaaccgtgttgatcttttgtttaggtctaaattttttagaaaaaagacatact

SEQ ID NO: 26867 - DNA, 2060 bp, Zea Mays
aggacatccacaggagttccgcaaacaccagcgtgccaaggctggagttgtcagttctacagcttcaacatggtttgtcaggtctgccatggggacgcaatgatcgtcaactgctcggcatcctttgctatgctttgtttgtggagctgctgagtggtggtgtttggagaagtcttgaccctgaatatatagctgaatcaaagagtaaggaatcttgtcgagtgggattattggcaagggacaaggtcatgaggacatggatgcagtatgtgcatacatttgatttgagagccctttctctgcttggattgagcacatcctatgcagccatgctgagcggtttagtggggaaggggcacgaggaccccatggccatgtggaacgggagcaacatgaattgagagggccagactagttcggctagacgtagcacagtccgatattgacaaccgaagtccatgtcggaatccctttccgtttgggggtgcaagtgtcgagactgcggaaacttcgctgatatgggcgccatgaacgtgcctgtcattatcagttagttgcctagttgcaatcttgtaggttcatgtaagaaaaaaaacaacgaaaatgtagttcacatgagatgctgataatccaatagaccgccaattgaagaagtgatatgaagtgtcggccacattgttgtgtcgttcagatactctgggcatgaacaattgtcagaacattttcctgagctggggatccaatttataagtttaaatagggcatactagctacccagaaatttcgatatttcactgcccaagcacagaatgaattggtactgacgcaatggacccactttacacatggtctttatgaagcatgcttctttgacaaggttggtcattggtcagtatggcagcaaattgtggtacccaagcactcgcgttgtgtcggtatggtccgacattgacactgctactagtggctccaacaagtggccagcatatgtccatagaattcaaatccaatcaaaatcaggctgctttttcttgcaacattgcatgttctgatctcatgtccttgtcccttgccagcctgagttgaaagctgcacttgagtaacagcatgcttctcttcatcctcacttataaatccatgaggcagccacggtagcaccaacactcaatcaactagctcaacaacacctgacctgatacaaaaggagccctagagttccagagacgaagaaaggagaagaagccaatcagccaccagccatgatgagtgccaagagacttgttcagatgtcaagtagtaggtggcgaagaatggcggccctcgcgaggaagaggctcgcatcgacacctgtgaaagaaactgacgggtcgtcatgcagcacttcgtcggtggctggcaaaggccactgtgccatgtactcggctgatggtcggcggtttgaggtcccgttggtgttcctcggaacggctctcttcggtgagctcctgagcatgtcgcaggaggagttcggcttcgctggtgatgacggcaggatcaccttgccatgtgagtctttggtgatggagtacatgatgtgtttgcttacaagagatgcctctgaagaggtcaaaaggttgtttttgagctccatggcaaggccttgccactatggatctggactggtgcaaaccatgcatcatacccagcgaactgttgttcctagcttctgaagattagcatatatgcgcagtagcaagcagattgttttcaccttttcgtgtttgatgtaaatgtttacataatgtagattgggatggaatggaactaaccatatggttcaaaaacaaatggagcagaaatatgtgtttacgtcagggttcaaaatttcacgaaattcagcaatttcggtagtggcttgaagaaaaaaagtgaaattttgtatcacactagtacatgtgtttttactgtaaatatataattttaggctattgtttattttattcctctagtcaacagatgagtaatcctaaaccgtgttgatcttttgtttaggtctaaattttttagaaaaaagacatact

SEQ ID NO: 26868 - DNA, 3786 bp, Zea Mays
catgagggccaggtttattcagctggcgcggctgtgccatcggatatcagcaaatcagcctgggtttaaagcttaaagattaaacagaacgagcttgggcacaaaagctagcttccagatgccttacaagtaataatcatcggtatctcactgcgcaatcatctcatcgaaaagactgatactgacaaattggacccggttcacatgtggtcctcatggcccatgaggcatatcggcatggcatcacactgtgatatgtaacgaaccagaaactactacaattggctccagcaagtgccaaacactgcatgttccaagctcatggccttgcctcttgcttgtctgagatggtgactgcacttgatctgcatcctcttcgctttgccctgacctataaatcaatcagcatagcaccgagccaccaacacctcatcagcctatcaccagcgacctaaaaagcacagcacctagtagctgaacagcaccatatacaatccgaatctctgaatattcagttgagccaaaaaggcaggaagaaggaggaaccatgatcagttccaagaggcttgttcagatggcgaagaagtggcaggcaacggctgccatggctaggaggcggctcacggcgacgctggcgaaagaggccgacggttcgtgcggcacgtcgatgccggtggccgtcaggggccactgcgtcgtgtactcctccgacgggacgaggttcgaggtcccgctggcgtacctcggcacggcggtgttcggcgagctcctgagcatgtcgcgggaggagttcggatttaccggcgacgatggcggcaggatcacgctgccctgcgatgccgcggtgatggagtacgcgatgtgtttgctcaggcgagacgcctccgaagaggttgtgagggcgttcttgagctccatggtcagaccctgccaccacagcgtcggtggctcggtgccaccgatgggactcgggcgccaaccagccatctgtgtatagctagctatatgattagctccatgatgtacaatattattaggtgtgtatgtatgtagccggatggaatcacaggaaatcgtacagaaggttattcgttttatatcatttctgaagtctgaacacgcctcgttgcatgaacgacatgaatgtactacctccgtcgttcattttcaaattatacagaaggttattcatttttaaattaaaacaggataaataaaaaagaacatatgaagtagtacaataagaggaagccatgaccagaacgttcgcggacgcgcgagatgcggttcaaggacgcaatggcagcggcgacgggctcccgggacggtaggagccgacgtcggcggctgaactcagcaaattcaccggcggcgacggaaggagagggggggcgttgtatttccgtttggcatcttaaaaaattcgatctcccaccgtccaattttttttttttttttgagagagaggagtccaccgtccaatctgaccgtgcgattggattttcttgcggttgcgagttgtgactcagctcgagaaaggcaaagcagttttggggttttggtattgggtcttccccggtaggacccacgtaccagtctgtgggtcacccgtcactgccggcggcggcgccgtggaagcccggcgagcgccgctgagtccgccgtgtcccgctcgtagcttcccggtgactgtggcgtctgttgattgtgatggcagcgtgacggcccctcggcaggcagcttgtcgcctcgcctccaacgaataggctggagttgtcagttctacagcttcaacatggtttgtcaggtctgccatggggacgcaatgatcgtcaactgctcggcatcctttgctatgctttgtttgtggagctgctgagtggtggtgtttggagaagtcttgaccctgaatatatagctgaatcaaagagtaaggaatcttgtcgagtgggattattggcaagggacaaggtcatgaggacatggatgcagtatgtgcatacatttgatttgagagccctttctctgcttggattgagcacatcctatgcagccatgctgagcggtttagtggggaaggggcacgaggaccccatggccatgtggaacgggagcaacatgaattgagagggccagactagttcggctagacgtagcacagtccgatattgacaaccgaagtccatgtcggaatccctttccgtttgggggtgcaagtgtcgagactgcggaaacttcgctgatatgggcgccatgaacgtgcctgtcattatcagttagttgcctagttgcaatcttgtaggttcatgtaagaaaaaaaacaacgaaaatgtagttcacatgagatgctgataatccaatagaccgccaattgaagaagtgatatgaagtgtcggccacattgttgtgtcgttcagatactctgggcatgaacaattgtcagaacattttcctgagctggggatccaatttataagtttaaatagggcatactagctacccagaaatttcgatatttcactgcccaagcacagaatgaattggtactgacgcaatggacccactttacacatggtctttatgaagcatgcttctttgacaaggttggtcattggtcagtatggcagcaaattgtggtacccaagcactcgcgttgtgtcggtatggtccgacattgacactgctactagtggctccaacaagtggccagcatatgtccatagaattcaaatccaatcaaaatcaggctgctttttcttgcaacattgcatgttctgatctcatgtccttgtcccttgccagcctgagttgaaagctgcacttgagtaacagcatgcttctcttcatcctcacttataaatccatgaggcagccacggtagcaccaacactcaatcaactagctcaacaacacctgacctgatacaaaaggagccctagagttccagagacgaagaaaggagaagaagccaatcagccaccagccatgatgagtgccaagagacttgttcagatgtcaagtagtaggtggcgaagaatggcggccctcgcgaggaagaggctcgcatcgacacctgtgaaagaaactgacgggtcgtcatgcagcacttcgtcggtggctggcaaaggccactgtgccatgtactcggctgatggtcggcggtttgaggtcccgttggtgttcctcggaacggctctcttcggtgagctcctgagcatgtcgcaggaggagttcggcttcgctggtgatgacggcaggatcaccttgccatgtgagtctttggtgatggagtacatgatgtgtttgcttacaagagatgcctctgaagaggtcaaaaggttgtttttgagctccatggcaaggccttgccactatggatctggactggtgcaaaccatgcatcatacccagcgaactgttgttcctagcttctgaagattagcatatatgcgcagtagcaagcagattgttttcaccttttcgtgtttgatgtaaatgtttacataatgtagattgggatggaatggaactaaccatatggttcaaaaacaaatggagcagaaatatgtgtttacgtcagggttcaaaatttcacgaaattcagcaatttcggtagtggcttgaagaaaaaaagtgaaattttgtatcacactagtacatgtgtttttactgtaaatatataattttaggctattgtttattttattcctctagtcaacagatgagtaatcctaaaccgtgttgatcttttgtttaggtctaaattttttagaaaaaagacatact

SEQ ID NO: 26869 - DNA, 1525 bp, Zea Mays
cttgcttgtctgagatggtgactgcacttgatctgcatcctcttcgctttgccctgacctataaatcaatcagcatagcaccgagccaccaacacctcatcagcctatcaccagcgacctaaaaagcacagcacctagtagctgaacagcaccatatacaatccgaatctctgaatattcagttgagccaaaaaggcaggaagaaggaggaaccatgatcagttccaagaggcttgttcagatggcgaagaagtggcaggcaacggctgccatggctaggaggcggctcacggcgacgctggcgaaagaggccgacggttcgtgcggcacgtcgatgccggtggccgtcaggggccactgcgtcgtgtactcctccgacgggacgaggttcgaggtcccgctggcgtacctcggcacggcggtgttcggcgagctcctgagcatgtcgcgggaggagttcggatttaccggcgacgatggcggcaggatcacgctgccctgcgatgccgcggtgatggagtacgcgatgtgtttgctcaggcgagacgcctccgaagaggttgtgagggcgttcttgagctccatggtcagaccctgccaccacagcgtcggtggctcggtgccaccgatgggactcgggcgccaaccagccatctgtgtatagctagctatatgattagctccatgatgtacaatattattaggtgtgtatgtatgtagccggatggaatcacaggaaatcgtacagaaggttattcgttttatatcatttctgaagtctgaacacgcctcgttgcatgaacgacatgaatgtactacctccgtcgttcattttcaaattatacagaaggttattcatttttaaattaaaacaggataaataaaaaagaacatatgaagtagtacaataagaggaagccatgaccagaacgttcgcggacgcgcgagatgcggttcaaggacgcaatggcagcggcgacgggctcccgggacggtaggagccgacgtcggcggctgaactcagcaaattcaccggcggcgacggaaggagagggggggcgttgtatttccgtttggcatcttaaaaaattcgatctcccaccgtccaattttttttttttttttgagagagaggagtccaccgtccaatctgaccgtgcgattggattttcttgcggttgcgagttgtgactcagctcgagaaaggcaaagcagttttggggttttggtattgggtcttccccggtaggacccacgtaccagtctgtgggtcacccgtcactgccggcggcggcgccgtggaagcccggcgagcgccgctgagtccgccgtgtcccgctcgtagcttcccggtgactgtggcgtctgttgattgtgatggcagcgtgacggcccctcggcaggcagcttgtcgcctcgcctccaacgaataggagctacaaactgcaaattgctgatgcagcaccaccggtggcgttggatagcttgattgctgacaaggcatcactacagagctcaagaatgc

SEQ ID NO: 26870 - DNA, 1784 bp, Zea Mays
cctcttccatgcagatgcaggccacagtgcttcacttctgttctgctggagatcaagaagcaaggctccatgcacatcttgggctaggaaaccatgggaatccttgggagaattttgtgctaggcatgttgccttcaggttgcagggtgtgggagaacacatcattttcaatggaaagcaagcagcgaaagagattgatagttaggtagcaagcagctcactgttaatcacacgcctgacgcctccgttcttgtcatcaaaaaggctcccgttctcctctcttcctcctgtggattagctaggtgccagcctccaccaggtagctcggttctgctcacctcaactcacccccggaaatggctcgatgctccactgcatctagtggtcctagtggatcctgctgcgctgcgaaacggaaaggagaacaaaaaaaattgcttggccgggcttcgcttggtgttgcccttattttttggcgtcgtcgttacaacaaaggaatccaatcataggtccatacccgcttggcgcttccatattttccatatataaagtcaacttgcaagggtgattctgcagcttcagaaggattccttggaggaactggggacggccgtttttcacatataaacaagaggaactgagacccaaactgtctattcatgctgtggtagattttgggaattttgtagaaaaggcaacagggcctaacctcagtggtgaaaacaggggatcaggggtggtctcttgattagagattctagcatatattggtgtagggccaatcaaaatttgtcctctctactcaaataaaggcaaaccacaaattccgggacaactgtttctgaaaagttctttacttggggagttattccaaggctcttgtgatcaaaggtcaataaactagtaacctaattgtggtttgggtggaggtacatgtgatctggataccaaagtccaaatgaaaggttaatcatatgatggagcaataaatttttattcccaaggctgttccaaatttaggaactgctttaaatattttcaagacgtcacttactatattattcctcccatgtgaacatgtttctgcgccctgatcccctgatcagggacagggaggaacacgataaaatagtgctttggttcattattccgtgacatgtacaggaatcttgacgcctctttgtaatgctacaagtcagaacagtacaggtgtagtagtactgtaatacaagtctgcctttttatattgactttcaacattttttttatttccttccagtattctaacactgttttcaggaaatggtatgtgtatattacacatccaggttagtactttacaggctacagtttagtttgcacctgctgtaattctggtttaatctagcatggaagcagtcttttacggttttacctgagctagtctgttttctagtgacaggacatcgtgtggttgtttaagctgcacttgtttgtggctgcgtgcgtagagagagacggccagacaggtgcacattgcttggctccattggatgaagagtgataaagtgcaaggcaccaagaaataatgctcatctgcgaggagtgccttggcacaatccagaaaatagaacgaatggatggccacttttccctgctcgctttccctttccttatattggttgggtcactgccacacagcccattgcggatacatatatttgctacctgctcattgtttgaccaaaagcctgtgtgttctttagtggcacaccaatatgccatcagcacgctccccctttctt

SEQ ID NO: 26871 - DNA, 1618 bp, Zea Mays
gaatgaatatgaatattcgatattgcttttagtgttcctgcagttctgctacaaagacgatgtgttcctgataagcaccaacgcgatgtgctacaattcaccagatacaatatactatcgacaggcacgaggtattcaagagatcgctaaaaaggattttgagaatcttaggcaagatagtgatgccagtgatccagaaccggaaccagaattggagctggagccagaaccagaagaaccaaagccacagcctcgcaggggcaggcctccaaacaagaacaatgccaaacagaaagttgggaagccaccaacagaacgtgctactgcagatttttctggtgcaacgcttgctactgccgcaaatattggacgccatgcacaggcagatgttgatctgtcacgaagagcaatggataaagcgatgatggatatgctgagagcttcttttgccaatagaaggaatgagcataattggtctggcgagcggaaatttgaaagatttgaagagtgctcaggttataggggtacatggtccgcaaaaatggggaagaggccaattctgatggaagatagtcgccgaagcacatattgtgagactcaaccatccaattcaatatatgagctgccggtatcgtcatcctacaatgggacaaagaagctgctagtaccagttggggttcagttacagcagtcctattcccgcagcttggcacgatttgctgcacaacttggtcctgtgtgctgggagattgcatcaaggcgaattgaacgaagccttgctcctggaacaaagtttggtcgcgggtgggtaggagatggcgaaacaccaaactcttttcagccacccgtactagctgcattttcagaaacaacgacaccgcaagaccgtacagcagcttcaggtgagcagccatgcccatctatgagcagccctcctgccaccgaggcctgtgctggcaacgacagaagccatttggcgggatctcagccagatgctacgccatatgcttctaccagcacaacgcagaggatgagttccgaagcattagcaagccagcaatgtggatcactaccacaaatttcgataaaccgagctgaacgtacccttgagatgatgaagggcagccccaataatcttcacggacacccaggcatgcagcaaactgcgaatggtttcaatgctgttccaggaccaatgatgttcccacatgtggctcaactggtggtgaatcagatgcagacacatacggctgattgataacgttgtgtgtgtgtgccggggggcggggggtgtcgcctttgatccgtcgtgcctcaacctggggctgcaactgtgagcctgttgtgtaattgcttaagtagtcattaggatgatagcgtgcatagatgtgttgggtggatgctgtaacagcggtgaccggtgagttgcgattctgaatgtgtagcagaaaaaccacaggcgaaatgaaacatctgtatagattatcgaggaatttttttagcatgaaaccgtgcgaatcagtttgtctattgtctgtatggtttatatacatcaacctgacggtgttctcggactgcagatgccacaatgtagataagaagtactgcttccgttctt

SEQ ID NO: 26872 - DNA, 1758 bp, Zea Mays
gaatttgctagccagtgcacatttgagtactggtgtgttactgtttaaccaaagctgcacactgtgccatttgtattctcagtgcttggtgaaagctttacgccttattcatgcagtcatgctagaagaatgccacattttgttctggaatgaatatgaatattcgatattgcttttagtgttcctgcagttctgctacaaagacgatgtgttcctgataagcaccaacgcgatgtgctacaattcaccagatacaatatactatcgacaggcacgaggtattcaagagatcgctaaaaaggattttgagaatcttaggcaagatagtgatgccagtgatccagaaccggaaccagaattggagctggagccagaaccagaagaaccaaagccacagcctcgcaggggcaggcctccaaacaagaacaatgccaaacagaaagttgggaagccaccaacagaacgtgctactgcagatttttctggtgcaacgcttgctactgccgcaaatattggacgccatgcacaggcagatgttgatctgtcacgaagagcaatggataaagcgatgatggatatgctgagagcttcttttgccaatagaaggaatgagcataattggtctggcgagcggaaatttgaaagatttgaagagtgctcaggggtacatggtccgcaaaaatggggaagaggccaattctgatggaagatagtcgccgaagcacatattgtgagactcaaccatccaattcaatatatgagctgccggtatcgtcatcctacaatgggacaaagaagctgctagtaccagttggggttcagttacagcagtcctattcccgcagcttggcacgatttgctgcacaacttggtcctgtgtgctgggagattgcatcaaggcgaattgaacgaagccttgctcctggaacaaagtttggtcgcgggtgggtaggagatggcgaaacaccaaactcttttcagccacccgtactagctgcattttcagaaacaacgacaccgcaagaccgtacagcagcttcaggtgagcagccatgcccatctatgagcagccctcctgccaccgaggcctgtgctggcaacgacagaagccatttggcgggatctcagccagatgctacgccatatgcttctaccagcacaacgcagaggatgagttccgaagcattagcaagccagcaatgtggatcactaccacaaatttcgataaaccgagctgaacgtacccttgagatgatgaagggcagccccaataatcttcacggacacccaggcatgcagcaaactgcgaatggtttcaatgctgttccaggaccaatgatgttcccacatgtggctcaactggtggtgaatcagatgcagacacatacggctgattgataacgttgtgtgtgtgtgccggggggcggggggtgtcgcctttgatccgtcgtgcctcaacctggggctgcaactgtgagcctgttgtgtaattgcttaagtagtcattaggatgatagcgtgcatagatgtgttgggtggatgctgtaacagcggtgaccggtgagttgcgattctgaatgtgtagcagaaaaaccacaggcgaaatgaaacatctgtatagattatcgaggaatttttttagcatgaaaccgtgcgaatcagtttgtctattgtctgtatggtttatatacatcaacctgacggtgttctcggactgcagatgccacaatgtagataagaagtactgcttccgttctt

SEQ ID NO: 26873 - DNA, 1751 bp, Zea Mays
gtttttgtcagcttctcgcgccaaattccgctacatttcgcgctcttcttagatctctgtacttgcaggtagaaaagacgaggaaagcgacggatgggcatgaagagccgtcagattccgggcccacaacacctttgccaaacaaaaagttattgctcttcatccttgataggctacagaagaaggatacatatggtgtattttcagagcctgttgatcctgaagagctacctgactatcatgacattgtaaagcatccgatggatttttcgacaatacgtaagaagctcgataagggtgcctattccaacttggagcaatttgaggacgatgtgttcctgataagcaccaacgcgatgtgctacaattcaccagatacaatatactatcgacaggcacgaggtattcaagagatcgctaaaaaggattttgagaatcttaggcaagatagtgatgccagtgatccagaaccggaaccagaattggagctggagccagaaccagaagaaccaaagccacagcctcgcaggggcaggcctccaaacaagaacaatgccaaacagaaagttgggaagccaccaacagaacgtgctactgcagatttttctggtgcaacgcttgctactgccgcaaatattggacgccatgcacaggcagatgttgatctgtcacgaagagcaatggataaagcgatgatggatatgctgagagcttcttttgccaatagaaggaatgagcataattggtctggcgagcggaaatttgaaagatttgaagagtgctcaggttataggggtacatggtccgcaaaaatggggaagaggccaattctgatggaagatagtcgccgaagcacatattgtgagactcaaccatccaattcaatatatgagctgccggtatcgtcatcctacaatgggacaaagtttggtcgcgggtgggtaggagatggcgaaacaccaaactcttttcagccacccgtactagctgcattttcagaaacaacgacaccgcaagaccgtacagcagcttcaggtgagcagccatgcccatctatgagcagccctcctgccaccgaggcctgtgctggcaacgacagaagccatttggcgggatctcagccagatgctacgccatatgcttctaccagcacaacgcagaggatgagttccgaagcattagcaagccagcaatgtggatcactaccacaaatttcgataaaccgagctgaacgtacccttgagatgatgaagggcagccccaataatcttcacggacacccaggcatgcagcaaactgcgaatggtttcaatgctgttccaggaccaatgatgttcccacatgtggctcaactggtggtgaatcagatgcagacacatacggctgattgataacgttgtgtgtgtgtgccggggggcggggggtgtcgcctttgatccgtcgtgcctcaacctggggctgcaactgtgagcctgttgtgtaattgcttaagtagtcattaggatgatagcgtgcatagatgtgttgggtggatgctgtaacagcggtgaccggtgagttgcgattctgaatgtgtagcagaaaaaccacaggcgaaatgaaacatctgtatagattatcgaggaatttttttagcatgaaaccgtgcgaatcagtttgtctattgtctgtatggtttatatacatcaacctgacggtgttctcggactgcagatgccacaatgtagataagaagtactgcttccgttctt

SEQ ID NO: 26874 - DNA, 2308 bp, Zea Mays
cggccggccacgccagtgaagcactgaagctacacacacttcccactggagcacacgctcctcacgtgcccgcacccgaaacgtccaaagaaaaaagagggaggaaacccaccgacccctgctcgctcaacacgcaacgacgcgcctcggcctcgcagaaacaggggccaaaaaggaaaagagaaaagaggaaaagaacgcagggaatgggcaagcagcagcaggcgccaccggcgcggcggtccacggcgatgtcggcgcctccgccaccgaagcgccggaagaagaagggccggccttccctcctcgacctccagaagcggagcctccgcctcgagcagcagctccagcagcagcagcccaaggggcgacgctccaaccgccggagcgccggctccgcggacgaggacgacgacggccccgcctccggctccggccgccgcgagaagaagctgcgcctcgtcatgggcctccacgacggatcacccaagcaggtagaaaagacgaggaaagcgacggatgggcatgaagagccgtcagattccgggcccacaacacctttgccaaacaaaaagttattgctcttcatccttgataggctacagaagaaggatacatatggtgtattttcagagcctgttgatcctgaagagctacctgactatcatgacattgtaaagcatccgatggatttttcgacaatacgtaagaagctcgataagggtgcctattccaacttggagcaatttgaggacgatgtgttcctgataagcaccaacgcgatgtgctacaattcaccagatacaatatactatcgacaggcacgaggtattcaagagatcgctaaaaaggattttgagaatcttaggcaagatagtgatgccagtgatccagaaccggaaccagaattggagctggagccagaaccagaagaaccaaagccacagcctcgcaggggcaggcctccaaacaagaacaatgccaaacagaaagttgggaagccaccaacagaacgtgctactgcagatttttctggtgcaacgcttgctactgccgcaaatattggacgccatgcacaggcagatgttgatctgtcacgaagagcaatggataaagcgatgatggatatgctgagagcttcttttgccaatagaaggaatgagcataattggtctggcgagcggaaatttgaaagatttgaagagtgctcaggggtacatggtccgcaaaaatggggaagaggccaattctgatggaagatagtcgccgaagcacatattgtgagactcaaccatccaattcaatatatgagctgccggtatcgtcatcctacaatgggacaaagaagctgctagtaccagttggggttcagttacagcagtcctattcccgcagcttggcacgatttgctgcacaacttggtcctgtgtgctgggagattgcatcaaggcgaattgaacgaagccttgctcctggaacaaagtttggtcgcgggtgggtaggagatggcgaaacaccaaactcttttcagccacccgtactagctgcattttcagaaacaacgacaccgcaagaccgtacagcagcttcaggtgagcagccatgcccatctatgagcagccctcctgccaccgaggcctgtgctggcaacgacagaagccatttggcgggatctcagccagatgctacgccatatgcttctaccagcacaacgcagaggatgagttccgaagcattagcaagccagcaatgtggatcactaccacaaatttcgataaaccgagctgaacgtacccttgagatgatgaagggcagccccaataatcttcacggacacccaggcatgcagcaaactgcgaatggtttcaatgctgttccaggaccaatgatgttcccacatgtggctcaactggtggtgaatcagatgcagacacatacggctgattgataacgttgtgtgtgtgtgccggggggcggggggtgtcgcctttgatccgtcgtgcctcaacctggggctgcaactgtgagcctgttgtgtaattgcttaagtagtcattaggatgatagcgtgcatagatgtgttgggtggatgctgtaacagcggtgaccggtgagttgcgattctgaatgtgtagcagaaaaaccacaggcgaaatgaaacatctgtatagattatcgaggaatttttttagcatgaaaccgtgcgaatcagtttgtctattgtctgtatggtttatatacatcaacctgacggtgttctcggactgcagatgccacaatgtagataagaagtactgcttccgttctt

SEQ ID NO: 26875 - DNA, 2344 bp, Zea Mays
cggccggccacgccagtgaagcactgaagctacacacacttcccactggagcacacgctcctcacgtgcccgcacccgaaacgtccaaagaaaaaagagggaggaaacccaccgacccctgctcgctcaacacgcaacgacgcgcctcggcctcgcagaaacaggggccaaaaaggaaaagagaaaagaggaaaagaacgcagggaatgggcaagcagcagcaggcgccaccggcgcggcggtccacggcgatgtcggcgcctccgccaccgaagcgccggaagaagaagggccggccttccctcctcgacctccagaagcggagcctccgcctcgagcagcagctccagcagcagcagcccaaggggcgacgctccaaccgccggagcgccggctccgcggacgaggacgacgacggccccgcctccggctccggccgccgcgagaagaagctgcgcctcgtcatgggcctccacgacggatcacccaaggtagaaaagacgaggaaagcgacggatgggcatgaagagccgtcagattccgggcccacaacacctttgccaaacaaaaagttattgctcttcatccttgataggctacagaagaaggatacatatggtgtattttcagagcctgttgatcctgaagagctacctgactatcatgacattgtaaagcatccgatggatttttcgacaatacgtaagaagctcgataagggtgcctattccaacttggagcaatttgaggacgatgtgttcctgataagcaccaacgcgatgtgctacaattcaccagatacaatatactatcgacaggcacgaggtattcaagagatcgctaaaaaggattttgagaatcttaggcaagatagtgatgccagtgatccagaaccggaaccagaattggagctggagccagaaccagaagaaccaaagccacagcctcgcaggggcaggcctccaaacaagaacaatgccaaacagaaagttgggaagccaccaacagaacgtgctactgcagatttttctggtgcaacgcttgctactgccgcaaatattggacgccatgcacaggcagatgttgatctgtcacgaagagcaatggataaagcgatgatggatatgctgagagcttcttttgccaatagaaggaatgagcataattggtctggcgagcggaaatttgaaagatttgaagagtgctcaggttataggggtacatggtccgcaaaaatggggaagaggccaattctgatggaagatagtcgccgaagcacatattgtgagactcaaccatccaattcaatatatgagctgccggtatcgtcatcctacaatgggacaaagaagctgctagtaccagttgagcgtccgatccaaattctatcctataagttggggttcagttacagcagtcctattcccgcagcttggcacgatttgctgcacaacttggtcctgtgtgctgggagattgcatcaaggcgaattgaacgaagccttgctcctggaacaaagtttggtcgcgggtgggtaggagatggcgaaacaccaaactcttttcagccacccgtactagctgcattttcagaaacaacgacaccgcaagaccgtacagcagcttcaggtgagcagccatgcccatctatgagcagccctcctgccaccgaggcctgtgctggcaacgacagaagccatttggcgggatctcagccagatgctacgccatatgcttctaccagcacaacgcagaggatgagttccgaagcattagcaagccagcaatgtggatcactaccacaaatttcgataaaccgagctgaacgtacccttgagatgatgaagggcagccccaataatcttcacggacacccaggcatgcagcaaactgcgaatggtttcaatgctgttccaggaccaatgatgttcccacatgtggctcaactggtggtgaatcagatgcagacacatacggctgattgataacgttgtgtgtgtgtgccggggggcggggggtgtcgcctttgatccgtcgtgcctcaacctggggctgcaactgtgagcctgttgtgtaattgcttaagtagtcattaggatgatagcgtgcatagatgtgttgggtggatgctgtaacagcggtgaccggtgagttgcgattctgaatgtgtagcagaaaaaccacaggcgaaatgaaacatctgtatagattatcgaggaatttttttagcatgaaaccgtgcgaatcagtttgtctattgtctgtatggtttatatacatcaacctgacggtgttctcggactgcagatgccacaatgtagataagaagtactgcttccgttctt

SEQ ID NO: 26876 - DNA, 2443 bp, Zea Mays
cggccggccacgccagtgaagcactgaagctacacacacttcccactggagcacacgctcctcacgtgcccgcacccgaaacgtccaaagaaaaaagagggaggaaacccaccgacccctgctcgctcaacacgcaacgacgcgcctcggcctcgcagaaacaggggccaaaaaggaaaagagaaaagaggaaaagaacgcagggaatgggcaagcagcagcaggcgccaccggcgcggcggtccacggcgatgtcggcgcctccgccaccgaagcgccggaagaagaagggccggccttccctcctcgacctccagaagcggagcctccgcctcgagcagcagctccagcagcagcagcccaaggggcgacgctccaaccgccggagcgccggctccgcggacgaggacgacgacggccccgcctccggctccggccgccgcgagaagaagctgcgcctcgtcatgggcctccacgacggatcacccaagcaggtagaaaagacgaggaaagcgacggatgggcatgaagagccgtcagattccgggcccacaacacctttgccaaacaaaaagttattgctcttcatccttgataggctacagaagaaggatacatatggtgtattttcagagcctgttgatcctgaagaggtttgttgttttagaagtgatgatgcaatatgtttgttttctttgtttcgataattgaaactgctgatttacctgttcatgcccatttatggccagctacctgactatcatgacattgtaaagcatccgatggatttttcgacaatacgtaagaagctcgataagggtgcctattccaacttggagcaatttgaggacgatgtgttcctgataagcaccaacgcgatgtgctacaattcaccagatacaatatactatcgacaggcacgaggtattcaagagatcgctaaaaaggattttgagaatcttaggcaagatagtgatgccagtgatccagaaccggaaccagaattggagctggagccagaaccagaagaaccaaagccacagcctcgcaggggcaggcctccaaacaagaacaatgccaaacagaaagttgggaagccaccaacagaacgtgctactgcagatttttctggtgcaacgcttgctactgccgcaaatattggacgccatgcacaggcagatgttgatctgtcacgaagagcaatggataaagcgatgatggatatgctgagagcttcttttgccaatagaaggaatgagcataattggtctggcgagcggaaatttgaaagatttgaagagtgctcaggttataggggtacatggtccgcaaaaatggggaagaggccaattctgatggaagatagtcgccgaagcacatattgtgagactcaaccatccaattcaatatatgagctgccggtatcgtcatcctacaatgggacaaagaagctgctagtaccagttgagcgtccgatccaaattctatcctataagttggggttcagttacagcagtcctattcccgcagcttggcacgatttgctgcacaacttggtcctgtgtgctgggagattgcatcaaggcgaattgaacgaagccttgctcctggaacaaagtttggtcgcgggtgggtaggagatggcgaaacaccaaactcttttcagccacccgtactagctgcattttcagaaacaacgacaccgcaagaccgtacagcagcttcaggtgagcagccatgcccatctatgagcagccctcctgccaccgaggcctgtgctggcaacgacagaagccatttggcgggatctcagccagatgctacgccatatgcttctaccagcacaacgcagaggatgagttccgaagcattagcaagccagcaatgtggatcactaccacaaatttcgataaaccgagctgaacgtacccttgagatgatgaagggcagccccaataatcttcacggacacccaggcatgcagcaaactgcgaatggtttcaatgctgttccaggaccaatgatgttcccacatgtggctcaactggtggtgaatcagatgcagacacatacggctgattgataacgttgtgtgtgtgtgccggggggcggggggtgtcgcctttgatccgtcgtgcctcaacctggggctgcaactgtgagcctgttgtgtaattgcttaagtagtcattaggatgatagcgtgcatagatgtgttgggtggatgctgtaacagcggtgaccggtgagttgcgattctgaatgtgtagcagaaaaaccacaggcgaaatgaaacatctgtatagattatcgaggaatttttttagcatgaaaccgtgcgaatcagtttgtctattgtctgtatggtttatatacatcaacctgacggtgttctcggactgcagatgccacaatgtagataagaagtactgcttccgttctt

SEQ ID NO: 26877 - DNA, 2626 bp, Zea Mays
atgagatgtgatcaaccctgggctgacctcgtcccttgttttttgagggatgacctcatccaccatttttgaagaatattctttgaccctaactctagacctctaaaccaaacacggatcaaattagaatgatctcatcccatctctctttatccttcatcgtctctccatccaaacaataccttatgctgcaaactaagatcccctagcggtgcacgatcgacgtccatattgtcacgctctgatcgactcttggtacaccagatcagtacactacgcctacgcggtagccgctcacgcaaggcaagacacatcggccggccacgccagtgaagcactgaagctacacacacttcccactggagcacacgctcctcacgtgcccgcacccgaaacgtccaaagaaaaaagagggaggaaacccaccgacccctgctcgctcaacacgcaacgacgcgcctcggcctcgcagaaacaggggccaaaaaggaaaagagaaaagaggaaaagaacgcagggaatgggcaagcagcagcaggcgccaccggcgcggcggtccacggcgatgtcggcgcctccgccaccgaagcgccggaagaagaagggccggccttccctcctcgacctccagaagcggagcctccgcctcgagcagcagctccagcagcagcagcccaaggggcgacgctccaaccgccggagcgccggctccgcggacgaggacgacgacggccccgcctccggctccggccgccgcgagaagaagctgcgcctcgtcatgggcctccacgacggatcacccaaggtagaaaagacgaggaaagcgacggatgggcatgaagagccgtcagattccgggcccacaacacctttgccaaacaaaaagttattgctcttcatccttgataggctacagaagaaggatacatatggtgtattttcagagcctgttgatcctgaagagctacctgactatcatgacattgtaaagcatccgatggatttttcgacaatacgtaagaagctcgataagggtgcctattccaacttggagcaatttgaggacgatgtgttcctgataagcaccaacgcgatgtgctacaattcaccagatacaatatactatcgacaggcacgaggtattcaagagatcgctaaaaaggattttgagaatcttaggcaagatagtgatgccagtgatccagaaccggaaccagaattggagctggagccagaaccagaagaaccaaagccacagcctcgcaggggcaggcctccaaacaagaacaatgccaaacagaaagttgggaagccaccaacagaacgtgctactgcagatttttctggtgcaacgcttgctactgccgcaaatattggacgccatgcacaggcagatgttgatctgtcacgaagagcaatggataaagcgatgatggatatgctgagagcttcttttgccaatagaaggaatgagcataattggtctggcgagcggaaatttgaaagatttgaagagtgctcaggttataggggtacatggtccgcaaaaatggggaagaggccaattctgatggaagatagtcgccgaagcacatattgtgagactcaaccatccaattcaatatatgagctgccggtatcgtcatcctacaatgggacaaagaagctgctagtaccagttggggttcagttacagcagtcctattcccgcagcttggcacgatttgctgcacaacttggtcctgtgtgctgggagattgcatcaaggcgaattgaacgaagccttgctcctggaacaaagtttggtcgcgggtgggtaggagatggcgaaacaccaaactcttttcagccacccgtactagctgcattttcagaaacaacgacaccgcaagaccgtacagcagcttcaggtgagcagccatgcccatctatgagcagccctcctgccaccgaggcctgtgctggcaacgacagaagccatttggcgggatctcagccagatgctacgccatatgcttctaccagcacaacgcagaggatgagttccgaagcattagcaagccagcaatgtggatcactaccacaaatttcgataaaccgagctgaacgtacccttgagatgatgaagggcagccccaataatcttcacggacacccaggcatgcagcaaactgcgaatggtttcaatgctgttccaggaccaatgatgttcccacatgtggctcaactggtggtgaatcagatgcagacacatacggctgattgataacgttgtgtgtgtgtgccggggggcggggggtgtcgcctttgatccgtcgtgcctcaacctggggctgcaactgtgagcctgttgtgtaattgcttaagtagtcattaggatgatagcgtgcatagatgtgttgggtggatgctgtaacagcggtgaccggtgagttgcgattctgaatgtgtagcagaaaaaccacaggcgaaatgaaacatctgtatagattatcgaggaatttttttagcatgaaaccgtgcgaatcagtttgtctattgtctgtatggtttatatacatcaacctgacggtgttctcggactgcagatgccacaatgtagataagaagtactgcttccgttctt

SEQ ID NO: 26878 - DNA, 2861 bp, Zea Mays
aggaatcactctatccaaaatatagtggtgtatcatgggtccatttctcaaatttggtgggatgacatcattccttatattagtactaactaactataaagaatgaagtgatgatggatcaactcataccattctacaaaccaaacaaaaaagtgaagagtgagaagatgatggactagttcattcctcaaaccaaacagcctagtagtgtttggttcggtgtcaacgagggatgagatgtgatcaaccctgggctgacctcgtcccttgttttttgagggatgacctcatccaccatttttgaagaatattctttgaccctaactctagacctctaaaccaaacacggatcaaattagaatgatctcatcccatctctctttatccttcatcgtctctccatccaaacaataccttatgctgcaaactaagatcccctagcggtgcacgatcgacgtccatattgtcacgctctgatcgactcttggtacaccagatcagtacactacgcctacgcggtagccgctcacgcaaggcaagacacatcggccggccacgccagtgaagcactgaagctacacacacttcccactggagcacacgctcctcacgtgcccgcacccgaaacgtccaaagaaaaaagagggaggaaacccaccgacccctgctcgctcaacacgcaacgacgcgcctcggcctcgcagaaacaggggccaaaaaggaaaagagaaaagaggaaaagaacgcagggaatgggcaagcagcagcaggcgccaccggcgcggcggtccacggcgatgtcggcgcctccgccaccgaagcgccggaagaagaagggccggccttccctcctcgacctccagaagcggagcctccgcctcgagcagcagctccagcagcagcagcccaaggggcgacgctccaaccgccggagcgccggctccgcggacgaggacgacgacggccccgcctccggctccggccgccgcgagaagaagctgcgcctcgtcatgggcctccacgacggatcacccaagcaggtagaaaagacgaggaaagcgacggatgggcatgaagagccgtcagattccgggcccacaacacctttgccaaacaaaaagttattgctcttcatccttgataggctacagaagaaggatacatatggtgtattttcagagcctgttgatcctgaagagctacctgactatcatgacattgtaaagcatccgatggatttttcgacaatacgtaagaagctcgataagggtgcctattccaacttggagcaatttgaggacgatgtgttcctgataagcaccaacgcgatgtgctacaattcaccagatacaatatactatcgacaggcacgaggtattcaagagatcgctaaaaaggattttgagaatcttaggcaagatagtgatgccagtgatccagaaccggaaccagaattggagctggagccagaaccagaagaaccaaagccacagcctcgcaggggcaggcctccaaacaagaacaatgccaaacagaaagttgggaagccaccaacagaacgtgctactgcagatttttctggtgcaacgcttgctactgccgcaaatattggacgccatgcacaggcagatgttgatctgtcacgaagagcaatggataaagcgatgatggatatgctgagagcttcttttgccaatagaaggaatgagcataattggtctggcgagcggaaatttgaaagatttgaagagtgctcaggttataggggtacatggtccgcaaaaatggggaagaggccaattctgatggaagatagtcgccgaagcacatattgtgagactcaaccatccaattcaatatatgagctgccggtatcgtcatcctacaatgggacaaagaagctgctagtaccagttggggttcagttacagcagtcctattcccgcagcttggcacgatttgctgcacaacttggtcctgtgtgctgggagattgcatcaaggcgaattgaacgaagccttgctcctggaacaaagtttggtcgcgggtgggtaggagatggcgaaacaccaaactcttttcagccacccgtactagctgcattttcagaaacaacgacaccgcaagaccgtacagcagcttcaggtgagcagccatgcccatctatgagcagccctcctgccaccgaggcctgtgctggcaacgacagaagccatttggcgggatctcagccagatgctacgccatatgcttctaccagcacaacgcagaggatgagttccgaagcattagcaagccagcaatgtggatcactaccacaaatttcgataaaccgagctgaacgtacccttgagatgatgaagggcagccccaataatcttcacggacacccaggcatgcagcaaactgcgaatggtttcaatgctgttccaggaccaatgatgttcccacatgtggctcaactggtggtgaatcagatgcagacacatacggctgattgataacgttgtgtgtgtgtgccggggggcggggggtgtcgcctttgatccgtcgtgcctcaacctggggctgcaactgtgagcctgttgtgtaattgcttaagtagtcattaggatgatagcgtgcatagatgtgttgggtggatgctgtaacagcggtgaccggtgagttgcgattctgaatgtgtagcagaaaaaccacaggcgaaatgaaacatctgtatagattatcgaggaatttttttagcatgaaaccgtgcgaatcagtttgtctattgtctgtatggtttatatacatcaacctgacggtgttctcggactgcagatgccacaatgtagataagaagtactgcttccgttctt

SEQ ID NO: 26879 - DNA, 2967 bp, Zea Mays
catcacttgccggcccagtctcaaagcaggagtatttcatttgtaccttgctggatcggagtgtgccaacagccaagacaaaagcacatggctgcacctgcactgcacctctttgttttttgtaccttactggacgaatgacctgaaccatggagtggtcacgtcccgcctgcatcccagtcacagccgccgccgtcgtcctcctcctcctcctcctgccgcgcttctgctcaccggccggcgacaagttgacccccggggagtcgctgttgcccggtgagaccatcgtgtccgacggcggcgccttcgcgctgggcttcttcgcaccgtccaatgccacgccaggcaggcagtacgtcggcatatggtacaacaacatccccgtgcagacggtggtgtgggtcgccaaccgggacgcgccggtcaccgtcggcgacgcgcgctccggcaactcctcgtcgtcgtcgtcgtctgcgccgtcgcttgccctggctaacggctccgcctccaccgacctcgtcttgtccgacgccggcggcggtcgcgtcgtttggaccacgaacaccacgagctcgggtactggttcgaccgccgtgcttctcaactccggcaatttcgtcctccggtcgccgaacggcaccacgctctggcagagcttcgaccacccgacggacacgttcatcccggacatgaaggtgggcctgcgctaccggacgcacgacggcgcgcgcatcgtgtcgtggagggggcccggcgacccgtcgccgggtaccttctcgtacggcatggacccgcgcacgtcgctgcagatgctgatgtggaacgggacgcgcacctactggcgcagctctgcctggacggggtacatgaccgtcagcaggtaccacgccaccaccggcacggtcatctacgtggcggtggtcgacagcgaggacgagatatacatgaccttccacgtcaacgacggcgccccgcccacgcggtacgtggtcacgggcgccggcaggttccagctcctgagctggaaccgcgacgcgtccgcgtggaccacgctcgagtcctggccgtcgcgctcctgcagcccctacggcagctgcggcgcctacggctactgcgacaacacgctggccgtggcgacgtgcagatgcctcgacggcttcgagccggcgagcccggcggagtggagcggcggcgtgttctcgcgcggctgccgccggcggagccagcagcaggcgctggcgccgtgcggcggcgaggacgacggggacgcgttcttggacatgcccaacatgaaggtgccggacaggttcgtgctcctggggacgaacgtgagctccggcgacgagtgcgccgcggagtgccgccggaactgctcctgcgtggcgtacgcgtacgccaacctgcgccggagcagcgccaagggggacacggcgcggtgtctcgtctggaccgctgacctcgtggacgcgcagatggtcggcgcgctctggggcgtcaccgcagagacgctccacctccgcgttcctgcaggattcactggcagaaagacgaggaacaaaattgtaaaaattgtgctaccggtgttggcaagcatttctttgctctcgtgcattttccttgtttggttttgcaagaccagagcagataagacaagcagcagtgaaagtgacaagaagttagttcccggtagcgtgcagacttcaagcgacctcgcagaacgaaaccctaccgaagacctcgagttcgcttccatacggtctttcgaaaaggagctgccttccatacagttgagcgacatcgtcgcggcgacgaagaacttctcgagggaatgtatggtcgggcgcggaggcttcgggaaagtgtacaaggggacactgttgggtggccgtgaagtcgccgtcaagaggctgagcagggactccgagcaagggacggaggagttcaagaacgaggctaccttgatctccaagctgcagcaccggaacctggtccggcttctcggctgctgcacggagggagccgagaggctgctggtgtacgagtacctggccaacaaaggcctagacgctatcctcttcgacagcgagaggaggtcgctgctggactggccgacgaggctggggataatcaagggggtggctaggggcctcctgtatctccatcaagactcaaggctgacggtgatacacagggacctcaaagcgagcaacgtcctgctggacgccgagatgaggcctaagatagcggacttcggcatggcacagatcttcggcgacaaccagcagaaggcgaacactcggcgagttgttgggacatatggctacatagctcctgaataccaaacggagggcgtcttttctgtcaagtccgacgtctacagcttcggcgtgttggtcctggagattgtaagcggcgtccggataagctccacagataatatcaagggatctccgggccttgtagcctatgcatggaggctatggaacgaagggaacgcaagtgacctgatggactcgtccatctcgcagtcggagagctgtgtgttggacgaagccttgctgtgcgtccacgtcgggctcctgtgcgtccaggacgacccgaaccgcaggccgctcatgtcgtccgtggtgtccatcctggagaacgggagcgtgtctctgcccacgccggacaagccggcatacttggcagagaagatttggaacaggggccttggcctagaaggagacgatgtacacaactccaggaactccatgaccatgactgtcctcaagggacggtagccaacaatgcaacagacccttcaaatgcgtgtttctgggcgtttgtttgtccatctgcaatgatttttgacacgggatacctggcgccttcaacctgtattgattgacacctgatcgtccccgcacgcgcggtccagttgcaacctactcccccacgcggccacgcctcagccgctgctcttac

SEQ ID NO: 26880 - DNA, 2117 bp, Zea Mays
tttctgtcgccttccgtactaccatcacttgccggcccagtctcaaagcaggagtatttcatttgtaccttgctggatcggagtgtgccaacagccaagacaaaagcacatggctgcacctgcactgcacctctttgttttttgtaccttactggacgaatgacctgaaccatggagtggtcacgtcccgcctgcatcccagtcacagccgccgccgtcgtcctcctcctcctcctcctgccgcgcttctgctcaccggccggcgacaagttgacccccggggagtcgctgttgcccggtgagaccatcgtgtccgacggcggcgccttcgcgctgggcttcttcgcaccgtccaatgccacgccaggcaggcagtacgtcggcatatggtacaacaacatccccgtgcagacggtggtgtgggtcgccaaccgggacgcgccggtcaccgtcggcgacgcgcgctccggcaactcctcgtcgtcgtcgtcgtctgcgccgtcgcttgccctggctaacggctccgcctccaccgacctcgtcttgtccgacgccggcggcggtcgcgtcgtttggaccacgaacaccacgagctcgggcagaaagacgaggaacaaaattgtaaaaattgtgctaccggtgttggcaagcatttctttgctctcgtgcattttccttgtttggttttgcaagaccagagataagacaagcagcagtgaaagtgacaagaagttagttcccggtagcgtgcagacttcaagcgacctcgcagaacgaaaccctaccgaagacctcgagttcgcttccatacggtctttcgaaaaggagctgccttccatacagttgagcgacatcgtcgcggcgacgaagaacttctcgagggaatgtatggtcgggcgcggaggcttcgggaaagtgtacaaggtaacattccgcgtgtcgtgtcctgtccttttttccgcgaatctgaactcacgaaccaacacccagttattgctctactactactgttctgaaggggacactgttgggtggccgtgaagtcgccgtcaagaggctgagcagggactccgagcaagggacggaggagttcaagaacgaggctaccttgatctccaagctgcagcaccggaacctggtccggcttctcggctgctgcacggagggagccgagaggctgctggtgtacgagtacctggccaacaaaggcctagacgctatcctcttcgacagcgagaggaggtcgctgctggactggccgacgaggctggggataatcaagggggtggctaggggcctcctgtatctccatcaagactcaaggctgacggtgatacacagggacctcaaagcgagcaacgtcctgctggacgccgagatgaggcctaagatagcggacttcggcatggcacagatcttcggcgacaaccagcagaaggcgaacactcggcgagttgttgggacatatggctacatagctcctgaataccaaacggagggcgtcttttctgtcaagtccgacgtctacagcttcggcgtgttggtcctggagattgtaagcggcgtccggataagctccacagataatatcaagggatctccgggccttgtagcctatgcatggaggctatggaacgaagggaacgcaagtgacctgatggactcgtccatctcgcagtcggagagctgtgtgttggacgaagccttgctgtgcgtccacgtcgggctcctgtgcgtccaggacgacccgaaccgcaggccgctcatgtcgtccgtggtgtccatcctggagaacgggagcgtgtctctgcccacgccggacaagccggcatacttggcagagaagatttggaacaggggccttggcctagaaggagacgatgtacacaactccaggaactccatgaccatgactgtcctcaagggacggtagccaacaatgcaacagacccttcaaatgcgtgtttctgggcgtttgtttgtccatctgcaatgatttttgacacgggatacctggcgccttcaacctgtattgattgacacctgatcgtccccgcacgcgcggtccagttgcaacctactcccccacgcggccacgcctcagccgctgctcttac

SEQ ID NO: 26881 - DNA, 3142 bp, Zea Mays
gttcctgacacacgcggacaagaatagtccgcgcgcgcgccactcgtgtttcgtcacctgccatggtgccaagcgtccgtcgtctgacgccaactgccctagctagcgcgtcaagctccgaccttctctgaagctagtccgagggaaggtctgcaatttctgtcgccttccgtactaccatcacttgccggcccagtctcaaagcaggagtatttcatttgtaccttgctggatcggagtgtgccaacagccaagacaaaagcacatggctgcacctgcactgcacctctttgttttttgtaccttactggacgaatgacctgaaccatggagtggtcacgtcccgcctgcatcccagtcacagccgccgccgtcgtcctcctcctcctcctcctgccgcgcttctgctcaccggccggcgacaagttgacccccggggagtcgctgttgcccggtgagaccatcgtgtccgacggcggcgccttcgcgctgggcttcttcgcaccgtccaatgccacgccaggcaggcagtacgtcggcatatggtacaacaacatccccgtgcagacggtggtgtgggtcgccaaccgggacgcgccggtcaccgtcggcgacgcgcgctccggcaactcctcgtcgtcgtcgtcgtctgcgccgtcgcttgccctggctaacggctccgcctccaccgacctcgtcttgtccgacgccggcggcggtcgcgtcgtttggaccacgaacaccacgagctcgggtactggttcgaccgccgtgcttctcaactccggcaatttcgtcctccggtcgccgaacggcaccacgctctggcagagcttcgaccacccgacggacacgttcatcccggacatgaaggtgggcctgcgctaccggacgcacgacggcgcgcgcatcgtgtcgtggagggggcccggcgacccgtcgccgggtaccttctcgtacggcatggacccgcgcacgtcgctgcagatgctgatgtggaacgggacgcgcacctactggcgcagctctgcctggacggggtacatgaccgtcagcaggtaccacgccaccaccggcacggtcatctacgtggcggtggtcgacagcgaggacgagatatacatgaccttccacgtcaacgacggcgccccgcccacgcggtacgtggtcacgggcgccggcaggttccagctcctgagctggaaccgcgacgcgtccgcgtggaccacgctcgagtcctggccgtcgcgctcctgcagcccctacggcagctgcggcgcctacggctactgcgacaacacgctggccgtggcgacgtgcagatgcctcgacggcttcgagccggcgagcccggcggagtggagcggcggcgtgttctcgcgcggctgccgccggcggagccagcagcaggcgctggcgccgtgcggcggcgaggacgacggggacgcgttcttggacatgcccaacatgaaggtgccggacaggttcgtgctcctggggacgaacgtgagctccggcgacgagtgcgccgcggagtgccgccggaactgctcctgcgtggcgtacgcgtacgccaacctgcgccggagcagcgccaagggggacacggcgcggtgtctcgtctggaccgctgacctcgtggacgcgcagatggtcggcgcgctctggggcgtcaccgcagagacgctccacctccgcgttcctgcaggattcactggcagaaagacgaggaacaaaattgtaaaaattgtgctaccggtgttggcaagcatttctttgctctcgtgcattttccttgtttggttttgcaagaccagagataagacaagcagcagtgaaagtgacaagaagttagttcccggtagcgtgcagacttcaagcgacctcgcagaacgaaaccctaccgaagacctcgagttcgcttccatacggtctttcgaaaaggagctgccttccatacagttgagcgacatcgtcgcggcgacgaagaacttctcgagggaatgtatggtcgggcgcggaggcttcgggaaagtgtacaaggggacactgttgggtggccgtgaagtcgccgtcaagaggctgagcagggactccgagcaagggacggaggagttcaagaacgaggctaccttgatctccaagctgcagcaccggaacctggtccggcttctcggctgctgcacggagggagccgagaggctgctggtgtacgagtacctggccaacaaaggcctagacgctatcctcttcgacagcgagaggaggtcgctgctggactggccgacgaggctggggataatcaagggggtggctaggggcctcctgtatctccatcaagactcaaggctgacggtgatacacagggacctcaaagcgagcaacgtcctgctggacgccgagatgaggcctaagatagcggacttcggcatggcacagatcttcggcgacaaccagcagaaggcgaacactcggcgagttgttgggacatatggctacatagctcctgaataccaaacggagggcgtcttttctgtcaagtccgacgtctacagcttcggcgtgttggtcctggagattgtaagcggcgtccggataagctccacagataatatcaagggatctccgggccttgtagcctatgcatggaggctatggaacgaagggaacgcaagtgacctgatggactcgtccatctcgcagtcggagagctgtgtgttggacgaagccttgctgtgcgtccacgtcgggctcctgtgcgtccaggacgacccgaaccgcaggccgctcatgtcgtccgtggtgtccatcctggagaacgggagcgtgtctctgcccacgccggacaagccggcatacttggcagagaagatttggaacaggggccttggcctagaaggagacgatgtacacaactccaggaactccatgaccatgactgtcctcaagggacggtagccaacaatgcaacagacccttcaaatgcgtgtttctgggcgtttgtttgtccatctgcaatgatttttgacacgggatacctggcgccttcaacctgtattgattgacacctgatcgtccccgcacgcgcggtccagttgcaacctactcccccacgcggccacgcctcagccgctgctcttac

SEQ ID NO: 26882 - DNA, 2491 bp, Zea Mays
catcacttgccggcccagtctcaaagcaggagtatttcatttgtaccttgctggatcggagtgtgccaacagccaagacaaaagcacatggctgcacctgcactgcacctctttgttttttgtaccttactggacgaatgacctgaaccatggagtggtcacgtcccgcctgcatcccagtcacagccgccgccgtcgtcctcctcctcctcctcctgccgcgcttctgctcaccggccggcgacaagttgacccccggggagtcgctgttgcccggtgagaccatcgtgtccgacggcggcgccttcgcgctgggcttcttcgcaccgtccaatgccacgccaggcaggcagtacgtcggcatatggtacaacaacatccccgtgcagacggtggtgtgggtcgccaaccgggacgcgccggtcaccgtcggcgacgcgcgctccggcaactcctcgtcgtcgtcgtcgtctgcgccgtcgcttgccctggctaacggctccgcctccaccgacctcgtcttgtccgacgccggcggcggtcgcgtcgtttggaccacgaacaccacgagctcgggtactggttcgaccgccgtgcttctcaactccggcaatttcgtcctccggtcgccgaacggcaccacgctctggcagagcttcgaccacccgacggacacgttcatcccggacatgaaggtgggcctgcgctaccggacgcacgacggcgcgcgcatcgtgtcgtggagggggcccggcgacccgtcgccgggtaccttctcgtacggcatggacccgcgcacgtcgctgcagatgctgatgtggaacgggacgcgcacctactggcgcagctctgcctggacggggtacatgaccgtcagcaggtaccacgccaccaccggcacggtcatctacgtggcggtggtcgacagcgaggacgagatatacatgaccttccacgtcaacgacggcgccccgcccacgcggtacgtggtcacgggcgccggcaggttccagctcctgagctggaaccgcgacgcgtccgcgtggaccacgctcgagtcctggccgtcgcgctcctgcagcccctacggcagctgcggcgcctacggctactgcgacaacacgctggccgtggcgacgtgcagatgcctcgacggcttcgagccggcgagcccggcggagtggagcggcggcgtgttctcgcgcggctgccgccggcggagccagcagcaggcgctggcgccgtgcggcggcgaggacgacggggacgcgttcttggacatgcccaacatgaaggtgccggacaggttcgtgctcctggggacgaacgtgagctccggcgacgagtgcgccgcggagtgccgccggaactgctcctgcgtggcgtacgcgtacgccaacctgcgccggagcagcgccaagggggacacggcgcggtgtctcgtctggaccgctgacctcgtggacgcgcagatggtcggcgcgctctggggcgtcaccgcagagacgctccacctccgcgttcctgcaggattcactggcagaaagacgaggaacaaaattgtaaaaattgtgctaccggtgttggcaagcatttctttgctctcgtgcattttccttgtttggttttgcaagaccagagataagacaagcagcagtgaaagtgacaagaagttagttcccggtagcgtgcagacttcaagcgacctcgcagaacgaaaccctaccgaagacctcgagttcgcttccatacggtctttcgaaaaggagctgccttccatacagttgagcgacatcgtcgcggcgacgaagaacttctcgagggaatgtatggtcgggcgcggaggcttcgggaaagtgtacaagaggggacactgttgggtggccgtgaagtcgccgtcaagaggctgagcagggactccgagcaagggacggaggagttcaagaacgaggctaccttgatctccaagctgcagcaccggaacctggtccggcttctcggctgctgcacggagggagccgagaggctgctggtgtacgagtacctggccaacaaaggcctagacgctatcctcttcgacagcgagaggaggtcgctgctggactggccgacgaggctggggataatcaagggggtggctaggggcctcctgtatctccatcaagactcaaggctgacggtgatacacagggacctcaaagcgagcaacgtcctgctggacgccgagatgaggcctaagatagcggacttcggcatggcacagatcttcggcgacaaccagcagaaggcgaacactcggcgagttgttgggacatatggctacatagctcctgaataccaaacggagggcgtcttttctgtcaagtccgacgtctacagcttcggcgtgttggtcctggagattgtaagcggcgtccggataagctccacagataatatcaagggatctccgggccttgtagcctattgactggtttgggtctctctctct

SEQ ID NO: 26883 - DNA, 2759 bp, Zea Mays
cccatgtgcctcagaaaaatcatgtgaaattgaataagggcctcctgaaggatcataatgtgcagaacgaaaaagagtatgctcacttcgaaagcactcagcagacgaatgcagtcaaagacaccaacagtgatatgagttccacaagagcaacaagaaattcacactgcttttcttttgttatggagccatccattcagaatgtctgtttctctggaaggatcactaattcatgccgcccggatgacaatgttgccagtattgattacaagttagggtataagcaaatgcattatcctgaaaatggcagttataagtggttagacgatggcccttcccatttaaatgatgatatctcaagtgttaacccaacttgttggaaaaggcaaaggactgaaggtatattccatgagtatgcatattctggtaatcttgtaatgctggaagatgtgccaactgaaggttattttgctcacgaacaagagactgagctgattggtccagaagttgaaataccagaatcttgcttcagggctctcaataagccaaatggaatgacgcccgattttgtgcaaaataaaaccaacttgaaggcacaaacctcaggctgggatggattatatgacaagtttgaaaagttaaatggggattgcttactcgataatggattttatcatgatggtggtagcacttccaagggcacctgtcgagttttgagaaagtccagcaccagtaagaagttggggactgcagctggatgtgttgaagggctagaggctgatgctattaaccagatgaatttccctgatattcatgctctatggaacagtgacttgatagataggtcgtccttcaaggatactttaaatcatttttctcacccatccttgttggctgatacaccttgcagtcatccaaggaccttgcacacccttaacaggacatcagataaatgctttcgttcttggaactatgaaaacattgacagcaatgttagatttagcaatgattcatctattatatttgaaggaactaaaaattttgataactttaacaatgaaatacagtcgcttaattacttcaatgataagtgtggttcaaccgaccagcttggttttgaagaagacctgacaacttggaaatcaaaatttgacatgaggttgtcagtcaatatttctcctgagacagcaggtgataatggttgtcatttgaatgttccttctttgaatattgcaaatgacaacctgtttactcaagatctgttgaatcaacacaactctggactaaatcagagactcaggacttcgaagtgtagtagatttagaagtcattctgctccaccattttatagagggaaactgaaattctctagattaaatgtgccactgagcaaaccaagcacagatagcgataaagatatctgcgtcaataacccggaagacaatgcacctggacctgtggatatcccatgtattagttcaacccagcctattcctgagactgatagcagtgaatttccagacctaaattttagagggaaactgaaattctctagattaaatgtgccactgagcaaaccaagcacagatagcgataaagatatctgcgtcaataacccggaagacaatgcacctggacctgtggatatcccatgtattagttcaacccagcctattcctgagactgatagcagtgaatttccagacctaaattttagctcgctaattcctgaatgtgttgacaagaactgctttgaggaggcaagggttttgttgcagctggacaagaaatttattcccgtcatatctggggaaactatcctccttgtcgatcaggttttatcagaaggacatggagttagttacttggactctgaggaggaattgtctctccctgagactgggtttcaactgttccagaagtatgctgagcagattcagaaatggggctggatcatcagcggcgggagcaattcatctgaatcattcaaaaagaacatgaacattctgaagagacaagtccgtcttgtcactcttgttgctgttccatgtattttcggtgtcaaattgactgggaaagatctcatggagtttatttggcagcttgacgagactgatggatcgtcagatatgcccccagcagttctccgtattctgaacttcaaagcatgcagaggagcgatcatgtttggcgaccccttgctaccatctgagtgctgtctgattattgaagaactgaaagcaacatctctatgcttccagtgtgctcatggtcgcccaaccactgtccccatcttgaacatcgcatccctccacgatgagctggcgaggctccaaatgctgagtggaaggaaggcagagacctggcacggcttggggcaccatgagcccagccttgagcgtgctcacatgcgcctcgaacgactgagaaagctacgccgaggcctgtagccatagtggtttgaatcagataaaagggtgtgtgtttcgtatagtttgtagagaagcgagtgaaatctcagtgtgctctataattgtacatatactagatattcattcatgacaaagaggtaaaacggcgcccatcaccgtcacctgacaggcgagcggggttttccacggcatgttgtaaagtttgtacattctggttgccatgaaaatctatgtaaaattcaattcaaccgtgccaatgtgattagctgaagttgagatgggtgtgatacattcgagcaagtttaagcaggctttatgatgttgcta

SEQ ID NO: 26884 - DNA, 1989 bp, Zea Mays
tcgccggctcgccgccacgaagtatgccaccgctggccgacgcgtgcatggacacgctacgccgcttcgcgcgccatgtcctgttgctcctcccccattttcctgaggccagtgcggcgcctggaagagtagctgccctagttgccaattacttggtccacgcgcaggagcttttcgatgctacgccgcaggaggaagtataccttttgaccgcacgttttgaggaaatgcagaccataaagcgcttgccaaagagtgtccatagttccttgcgctcaggtgttattctgtctgacctgccaagggttattgaggagttgatatataatagcattgatgcaaatgcgagtaagattgacattgcagtaaacatcagagcttgttatgtaaaagtggaagatgatggttgtggtattacacgagatgaactggttctcttgggagaaaaatataatgggagccctgccatcagtgttaaaactgattatgttatttcattatttgtttttctcgttgttcgggagcttttttacaatcaaccagtacggaggaaacaaatgcaatctagtgagaaaagagaactacatcatgtgaagaagtgtgtccttcaaattgcgcttattcatccacagatttcactcagactgcttgataatgacagcgaagatgagctgctatacacagaaatttcttcatcccctttgcctcttatatcaaaaacttttggggatgatatctccagatgtctccatgagataactgcctctgaccaggtctggactctttcaggtcacatatctgggcctgcagatgtgttttgtacgaagagcaggaagaggcagaaggctgatatctaccctgcttttatactaaacttttactgccctagatccacctacgatctacattttgagcctacaaaaaccattgtggaattcaaggattggcgaactgtcttgcttttctttgagcaatctgtcacaaactactggaagaagcatcaactgcaatcaccaaaagcatgcagctgatgaaaggatacgtttagaggagctccgtagcaaggttttatcagaaggacatggagttagttacttggactctgaggaggaattgtctctccctgagactgggtttcaactgttccagaagtatgctgagcagattcagaaatggggctggatcatcagcggcgggagcaattcatctgaatcattcaaaaagaacatgaacattctgaagagacaagtccgtcttgtcactcttgttgctgttccatgtattttcggtgtcaaattgactgggaaagatctcatggagtttatttggcagcttgacgagactgatggatcgtcagatatgcccccagcagttctccgtattctgaacttcaaagcatgcagaggagcgatcatgtttggcgaccccttgctaccatctgagtgctgtctgattattgaagaactgaaagcaacatctctatgcttccagtgtgctcatggtcgcccaaccactgtccccatcttgaacatcgcatccctccacgatgagctggcgaggctccaaatgctgagtggaaggaaggcagagacctggcacggcttggggcaccatgagcccagccttgagcgtgctcacatgcgcctcgaacgactgagaaagctacgccgaggcctgtagccatagtggtttgaatcagataaaagggtgtgtgtttcgtatagtttgtagagaagcgagtgaaatctcagtgtgctctataattgtacatatactagatattcattcatgacaaagaggtaaaacggcgcccatcaccgtcacctgacaggcgagcggggttttccacggcatgttgtaaagtttgtacattctggttgccatgaaaatctatgtaaaattcaattcaaccgtgccaatgtgattagctgaagttgagatgggtgtgatacattcgagcaagtttaagcaggctttatgatgttgcta

SEQ ID NO: 26885 - DNA, 1537 bp, Zea Mays
ctcgaggcggatcgggagcgaggctggcgaggattgtgggcgcgcgcgatgatgtcgggtcgaggcagatcaggacacacgctaggagtcgcgggcgggggcgggatcagggtaggaagacgacgcgagcgggggcgggattacaggaaggaagatggcgtggcgcgaggctggagcgggggcacgatggctgggtatatgtcaagagggccccaaaatggttctgtgtatgtctgcaatctacctcctggaactgacgagaatatgttggctgaatattttggcaccatagggttgctaaagaaggacaaaaggaatgggcgcccaaaaatttggatctatagggacaaagtttccaatgaaccaaagggtgatgctacagtcacttatgaggatccacatgctgcttcagctgctgtggaatggttcaataacaaggatttccacgggagcactattcagtgaacaagatgaagtggataacggagcaggcagaggtagagggcgtggtgatggtcccggcaaggcttggcagcaagatggggactggatgtgtccaaatacaagttgtggcaatgtaaattttgccttccgtggtgtttgtaatcgctgtggagctgcacgccctgccggtgctggtggaactggtggtggaggtggcggtaggggtagaggccgtggtaactctgatgcaagaggaagcagtcgtgcgggtgctggtgctgctactggtggtggtccacctggattatttggcccaaatgattggccatgtccaatgtgcggcaacatcaactgggctaagcgtaccaaatgtaatatatgtaacacctccaagcctggtaccaatgaaggtgaaactggctcaaaggaggtgcagtgccactttggcccattgccaattgttgtttgcattgccatttttcttcattttaggggtggccgtggtggtgggtacaaagagctcgatgaagaagaactagaggaagttaaaaaacgccggaaagaggctgaggaggatgatggagagatctatgatgaatttggcaacctgaaaaagaaatttcgctctaaagctctgcatactggaagtgcgcagacacttcctgggtctggacgtgctggatgggaagttgagcatcgtggttctagtgaaagggaaggcagggagaggagcagggatcgtggtagggacgactatgatgaaaaggaaaccaggagcatagatagaggtgatcatggaagggaccagcgccggagccaagaccgcgaaagggaaaaggggagggagagaagagaccatgagtatgagagaagtagggagcgtgaccggcgccacaggtggtatgaaaattttgcttggaccaggcttgcactccagccgtccgatttcctatgctgccatatccaggccagggcagcaaccaaacaggccttaaggaaataaggagttaggctttaggtcttacgttgcttcctctataatctatagcactatataattcattaatttaaacttttgtaaaactcaccaaac

SEQ ID NO: 26886 - DNA, 1900 bp, Zea Mays
ctgctgctgctgttgtaggtcggcacggaggaagctgagctcgacccaatgccatgttactggccaggaagtgatcgacagggaagggatcgcttgattgaaggaagatggctgggtatatgtcaagagggccccaaaatggttctgtgtatgtctgcaatctacctcctggaactgacgagaatatgttggctgaatattttggcaccatagggttgctaaagaaggacaaaaggaatgggcgcccaaaaatttggatctatagggacaaagtttccaatgaaccaaagggtgatgctacagtcacttatgaggatccacatgctgcttcagctgctgtggaatggttcaataacaaggatttccacgggagcactattcaggttcacatagctgagtcaaaaagcaaagatgctttcgataaccccacaaatttgaacaccattgctggtgtcagtgaacaagatgaagtggataacggagcaggcagaggtagagggcgtggtgatggtcccggcaaggcttggcagcaagatggggactggatgtgtccaaatacaagttgtggcaatgtaaattttgccttccgtggtgtttgtaatcgctgtggagctgcacgccctgccggtgctggtggaactggtggtggaggtggcggtaggggtagaggccgtggtaactctgatgcaagaggaagcagtcgtgcgggtgctggtgctgctactggtggtggtccacctggattatttggcccaaatgattggccatgtccaatgtgcggcaacatcaactgggctaagcgtaccaaatgtaatatatgtaacacctccaagcctggtaccaatgaaggtggtgtgaggcaagtacaatggcactatttgcatgtggttggtttgaaacatattatttaagccgataatataaattgtactctagcaggtaaacatattgtaaattataataccaattcaggaatatcaaacatactgtaaattataatggcaattcttgtaaaaagaatgccattcctcatttgtgtggtaaagaattaataagggttgttcgttaatagctaaacatcatgcttttacacatgatgcactcgcagccaggatgatttttgccgcacagcaacagtaggatgctccttagaaaactgcagcttaattgcagtgatattgtgcctttcatgtgatcttttttttggcttttgggctcagaaactggctcaaaggaggtgcagtgccactttggcccattgccaattgttgtttgcattgccatttttcttcattttaggggtggccgtggtggtgggtacaaagagctcgatgaagaagaactagaggaagttaaaaaacgccggaaagaggctgaggaggatgatggagagatctatgatgaatttggcaacctgaaaaagaaatttcgctctaaagctctgcatactggaagtgcgcagacacttcctgggtctggacgtgctggatgggaagttgagcatcgtggttctagtgaaagggaaggcagggagaggagcagggatcgtggtagggacgactatgatgaaaaggaaaccaggagcatagatagaggtgatcatggaagggaccagcgccggagccaagaccgcgaaagggaaaaggggagggagagaagagaccatgagtatgagagaagtagggagcgtgaccggcgccacaggtggtatgaaaattttgcttggaccaggcttgcactccagccgtccgatttcctatgctgccatatccaggccagggcagcaaccaaacaggccttaaggaaataaggagttaggctttaggtcttacgttgcttcctctataatctatagcactatataattcattaatttaaacttttgtaaaactcaccaaac

SEQ ID NO: 26887 - DNA, 2018 bp, Zea Mays
atttgatccctctgtcgcggtacctgcgtctgcgaggctgttttgacattctagctgttgatggctgggtatatgtcaagagggccccaaaatggttctgtgtatgtctgcaatctacctcctggaactgacgagaatatgttggctgaatattttggcaccatagggttgctaaaggtatgggtcttaccagaaggacaaaaggaatgggcgcccaaaaatttggatctatagggacaaagtttccaatgaaccaaagggtgatgctacagtcacttatgaggatccacatgctgcttcagctgctgtggaatggttcaataacaaggatttccacgggagcactattcaggttcacatagctgagtcaaaaagcaaagatgctttcgataaccccacaaatttgaacaccattgctggtgtcagtgaacaagatgaagtggataacggagcaggcagaggtagagggcgtggtgatggtcccggcaaggcttggcagcaagatggggactggatgtgtccaaatacaagttgtggcaatgtaaattttgccttccgtggtgtttgtaatcgctgtggagctgcacgccctgccggtgctggtggaactggtggtggaggtggcggtaggggtagaggccgtggtaactctgatgcaagaggaagcagtcgtgcgggtgctggtgctgctactggtggtggtccacctggattatttggcccaaatgattggccatgtccaatgtgcggcaacatcaactgggctaagcgtaccaaatgtaatatatgtaacacctccaagcctggtaccaatgaaggtggtgtgaggcaagtacaatggcactatttgcatgtggttggtttgaaacatattatttaagccgataatataaattgtactctagcaggtaaacatattgtaaattataataccaattcaggaatatcaaacatactgtaaattataatggcaattcttgtaaaaagaatgccattcctcatttgtgtggtaaagaattaataagggttgttcgttaatagctaaacatcatgcttttacacatgatgcactcgcagccaggatgatttttgccgcacagcaacagtaggatgctccttagaaaactgcagcttaattgcagtgatattgtgcctttcatgtgatcttttttttggcttttgggctcagaaactggctcaaaggaggtgcagtgccactttggcccattgccaattgttgtgagtggttagttgtgaaccatgctgtgcatgttgtgtgaaacataatgtaaacaacgggcacactgggtgtttatatgatatgtccattaagtgagcaaccatgcatttaactatatgtaacaaaaggtgtttattcaaatatcaaggtttgcattgccatttttcttcattttaggggtggccgtggtggtgggtacaaagagctcgatgaagaagaactagaggaagttaaaaaacgccggaaagaggctgaggaggatgatggagagatctatgatgaatttggcaacctgaaaaagaaatttcgctctaaagctctgcatactggaagtgcgcagacacttcctgggtctggacgtgctggatgggaagttgagcatcgtggttctagtgaaagggaaggcagggagaggagcagggatcgtggtagggacgactatgatgaaaaggaaaccaggagcatagatagaggtgatcatggaagggaccagcgccggagccaagaccgcgaaagggaaaaggggagggagagaagagaccatgagtatgagagaagtagggagcgtgaccggcgccacaggtggtatgaaaattttgcttggaccaggcttgcactccagccgtccgatttcctatgctgccatatccaggccagggcagcaaccaaacaggccttaaggaaataaggagttaggctttaggtcttacgttgcttcctctataatctatagcactatataattcattaatttaaacttttgtaaaactcaccaaac

SEQ ID NO: 26888 - DNA, 1715 bp, Zea Mays
cgaatccgcattcgataaacctgccgtgtcccgttcaccccgcgttcgcttcatccgggcgtgggctaccgccgcagccgccgccctacgtccggtgaccaggctttcattgagctttgccgacgacgaccacgcaccagatttcttgggagctgacacctgccattcctttcttatatggtcttaagacccggggcctgctgctgctgttgtaggtcggcacggaggaagctgagctcgacccaatgccatgttactggccaggaagtgatcgacagggaagggatcgcttgattgaaggaagatggctgggtatatgtcaagagggccccaaaatggttctgtgtatgtctgcaatctacctcctggaactgacgagaatatgttggctgaatattttggcaccatagggttgctaaagaaggacaaaaggaatgggcgcccaaaaatttggatctatagggacaaagtttccaatgaaccaaagggtgatgctacagtcacttatgaggatccacatgctgcttcagctgctgtggaatggttcaataacaaggatttccacgggagcactattcaggttcacatagctgagtcaaaaagcaaagatgctttcgataaccccacaaatttgaacaccattgctggtgtcagtgaacaagatgaagtggataacggagcaggcagaggtagagggcgtggtgatggtcccggcaaggcttggcagcaagatggggactggatgtgtccaaatacaaggtctgttatgattggtgagcgacttctctatcacttcagttcactagttgactagtatggtcttcacagtgctatcattctttctgattatctgagatgatttcttctctcagttgtggcaatgtaaattttgccttccgtggtgtttgtaatcgctgtggagctgcacgccctgccggtgctggtggaactggtggtggaggtggcggtaggggtagaggccgtggtaactctgatgcaagaggaagcagtcgtgcgggtgctggtgctgctactggtggtggtccacctggattatttggcccaaatgattggccatgtccaatgtgcggcaacatcaactgggctaagcgtaccaaatgtaatatatgtaacacctccaagcctggtaccaatgaaggtgaaactggctcaaaggaggtgcagtgccactttggcccattgccaattgttgtttgcattgccatttttcttcattttaggggtggccgtggtggtgggtacaaagagctcgatgaagaagaactagaggaagttaaaaaacgccggaaagaggctgaggaggttctagtgaaagggaaggcagggagaggagcagggatcgtggtagggacgactatgatgaaaaggaaaccaggagcatagatagaggtgatcatggaagggaccagcgccggagccaagaccgcgaaagggaaaaggggagggagagaagagaccatgagtatgagagaagtagggagcgtgaccggcgccacaggtggtatgaaaattttgcttggaccaggcttgcactccagccgtccgatttcctatgctgccatatccaggccagggcagcaaccaaacaggccttaaggaaataaggagttaggctttaggtcttacgttgcttcctctataatctatagcactatataattcattaatttaaacttttgtaaaactcaccaaac

SEQ ID NO: 26889 - DNA, 1788 bp, Zea Mays
ctcactttcccaaggaagtcaccgaatccgcattcgataaacctgccgtgtcccgttcaccccgcgttcgcttcatccgggcgtgggctaccgccgcagccgccgccctacgtccggtgaccaggctttcattgagctttgccgacgacgaccacgcaccagatggctgggtatatgtcaagagggccccaaaatggttctgtgtatgtctgcaatctacctcctggaactgacgagaatatgttggctgaatattttggcaccatagggttgctaaagaaggacaaaaggaatgggcgcccaaaaatttggatctatagggacaaagtttccaatgaaccaaagggtgatgctacagtcacttatgaggatccacatgctgcttcagctgctgtggaatggttcaataacaaggatttccacgggagcactattcaggttcacatagctgagtcaaaaagcaaagatgctttcgataaccccacaaatttgaacaccattgctggtgtcagtgaacaagatgaagtggataacggagcaggcagaggtagagggcgtggtgatggtcccggcaaggcttggcagcaagatggggactggatgtgtccaaatacaagttgtggcaatgtaaattttgccttccgtggtgtttgtaatcgctgtggagctgcacgccctgccggtgctggtggaactggtggtggaggtggcggtaggggtagaggccgtggtaactctgatgcaagaggaagcagtcgtgcgggtgctggtgctgctactggtggtggtccacctggattatttggcccaaatgattggccatgtccaatgtgcggcaacatcaactgggctaagcgtaccaaatgtaatatatgtaacacctccaagcctggtaccaatgaaggtgaaactggctcaaaggaggtgcagtgccactttggcccattgccaattgttgtttgcattgccatttttcttcattttaggggtggccgtggtggtgggtacaaagagctcgatgaagaagaactagaggaagttaaaaaacgccggaaagaggctgaggaggatgatggagagatctatgatgaatttggcaacctgaaaaagaaatttcgctctaaagctctgcatactggaagtgcgcagacacttcctgggtctggacgtgctggatgggaagttgagcatcgtggtatttgtctgacacattggatttgaactccatgatttagactgttttgggatttatcgtctagtttctgcctttttggtgattgccatttgaacatctgttgcatttggggaataaaggagagaggggggggggggggggtctgttatgaatttactttggcattgctgcacatgacctggtgttaattcactgctgtaggttctagtgaaagggaaggcagggagaggagcagggatcgtggtagggacgactatgatgaaaaggaaaccaggagcatagatagaggtgatcatggaagggaccagcgccggagccaagaccgcgaaagggaaaaggggagggagagaagagaccatgagtatgagagaagtagggagcgtgaccggcgccacaggtggtatgaaaattttgcttggaccaggcttgcactccagccgtccgatttcctatgctgccatatccaggccagggcagcaaccaaacaggccttaaggaaataaggagttaggctttaggtcttacgttgcttcctctataatctatagcactatataattcattaatttaaacttttgtaaaactcaccaaac

SEQ ID NO: 26890 - DNA, 1515 bp, Zea Mays
ctcactttcccaaggaagtcaccgaatccgcattcgataaacctgccgtgtcccgttcaccccgcgttcgcttcatccgggcgtgggctaccgccgcagccgccgccctacgtccggtgaccaggctttcattgagctttgccgacgacgaccacgcaccagatggctgggtatatgtcaagagggccccaaaatggttctgtgtatgtctgcaatctacctcctggaactgacgagaatatgttggctgaatattttggcaccatagggttgctaaagaaggacaaaaggaatgggcgcccaaaaatttggatctatagggacaaagtttccaatgaaccaaagggtgatgctacagtcacttatgaggatccacatgctgcttcagctgctgtggaatggttcaataacaaggatttccacgggagcactattcaggttcacatagctgagtcaaaaagcaaagatgctttcgataaccccacaaatttgaacaccattgctggtgtcagtgaacaagatgaagtggataacggagcaggcagaggtagagggcgtggtgatggtcccggcaaggcttggcagcaagatggggactggatgtgtccaaatacaagttgtggcaatgtaaattttgccttccgtggtgtttgtaatcgctgtggagctgcacgccctgccggtgctggtggaactggtggtggaggtggcggtaggggtagaggccgtggtaactctgatgcaagaggaagcagtcgtgcgggtgctggtgctgctactggtggtggtccacctggattatttggcccaaatgattggccatgtccaatgtgcggcaacatcaactgggctaagcgtaccaaatgtaatatatgtaacacctccaagcctggtaccaatgaaggtggtgtgaggggtggccgtggtggtgggtacaaagagctcgatgaagaagaactagaggaagttaaaaaacgccggaaagaggctgaggaggatgatggagagatctatgatgaatttggcaacctgaaaaagaaatttcgctctaaagctctgcatactggaagtgcgcagacacttcctgggtctggacgtgctggatgggaagttgagcatcgtggttctagtgaaagggaaggcagggagaggagcagggatcgtggtagggacgactatgatgaaaaggaaaccaggagcatagatagaggtgatcatggaagggaccagcgccggagccaagaccgcgaaagggaaaaggggagggagagaagagaccatgagtatgagagaagtagggagcgtgaccggcgccacaggtggtatgaaaattttgcttggaccaggcttgcactccagccgtccgatttcctatgctgccatatccaggccagggcagcaaccaaacaggccttaaggaaataaggagttaggctttaggtcttacgttgcttcctctataatctatagcactatataattcattaatttaaacttttgtaaaactcaccaaac

SEQ ID NO: 26891 - DNA, 1665 bp, Zea Mays
gtttttgcacaggttatatcggtcgaatcgaacggtccatgatcaagtctagcagggagaaactcactttcccaaggaagtcaccgaatccgcattcgataaacctgccgtgtcccgttcaccccgcgttcgcttcatccgggcgtgggctaccgccgcagccgccgccctacgtccggtgaccaggctttcattgagctttgccgacgacgaccacgcaccagatggctgggtatatgtcaagagggccccaaaatggttctgtgtatgtctgcaatctacctcctggaactgacgagaatatgttggctgaatattttggcaccatagggttgctaaaggtatgggtcttaccagaaggacaaaaggaatgggcgcccaaaaatttggatctatagggacaaagtttccaatgaaccaaagggtgatgctacagtcacttatgaggatccacatgctgcttcagctgctgtggaatggttcaataacaaggatttccacgggagcactattcaggttcacatagctgagtcaaaaagcaaagatgctttcgataaccccacaaatttgaacaccattgctggtgtcagtgaacaagatgaagtggataacggagcaggcagaggtagagggcgtggtgatggtcccggcaaggcttggcagcaagatggggactggatgtgtccaaatacaagttgtggcaatgtaaattttgccttccgtggtgtttgtaatcgctgtggagctgcacgccctgccggtgctggtggaactggtggtggaggtggcggtaggggtagaggccgtggtaactctgatgcaagaggaagcagtcgtgcgggtgctggtgctgctactggtggtggtccacctggattatttggcccaaatgattggccatgtccaatgtgcggcaacatcaactgggctaagcgtaccaaatgtaatatatgtaacacctccaagcctggtaccaatgaaggtgaaactggctcaaaggaggtgcagtgccactttggcccattgccaattgttgtttgcattgccatttttcttcattttaggggtggccgtggtggtgggtacaaagagctcgatgaagaagaactagaggaagttaaaaaacgccggaaagaggctgaggaggatgatggagagatctatgatgaatttggcaacctgaaaaagaaatttcgctctaaagctctgcatactggaagtgcgcagacacttcctgggtctggacgtgctggatgggaagttgagcatcgtggttctagtgaaagggaaggcagggagaggagcagggatcgtggtagggacgactatgatgaaaaggaaaccaggagcatagatagaggtgatcatggaagggaccagcgccggagccaagaccgcgaaagggaaaaggggagggagagaagagaccatgagtatgagagaagtagggagcgtgaccggcgccacaggtggtatgaaaattttgcttggaccaggcttgcactccagccgtccgatttcctatgctgccatatccaggccagggcagcaaccaaacaggccttaaggaaataaggagttaggctttaggtcttacgttgcttcctctataatctatagcactatataattcattaatttaaacttttgtaaaactcaccaaac

SEQ ID NO: 26892 - DNA, 1596 bp, Zea Mays
atgatgtcgggtcgaggcagatcaggacacacgctaggagtcgcgggcgggggcgggatcagggtaggaagacgacgcgagcgggggcgggattacaggaaggaagatggcgtggcgcgaggctggagcgggggcacgatggctgggtatatgtcaagagggccccaaaatggttctgtgtatgtctgcaatctacctcctggaactgacgagaatatgttggctgaatattttggcaccatagggttgctaaagaaggacaaaaggaatgggcgcccaaaaatttggatctatagggacaaagtttccaatgaaccaaagggtgatgctacagtcacttatgaggatccacatgctgcttcagctgctgtggaatggttcaataacaaggatttccacgggagcactattcaggttcacatagctgagtcaaaaagcaaagatgctttcgataaccccacaaatttgaacaccattgctggtgtcagtgaacaagatgaagtggataacggagcaggcagaggtagagggcgtggtgatggtcccggcaaggcttggcagcaagatggggactggatgtgtccaaatacaagttgtggcaatgtaaattttgccttccgtggtgtttgtaatcgctgtggagctgcacgccctgccggtgctggtggaactggtggtggaggtggcggtaggggtagaggccgtggtaactctgatgcaagaggaagcagtcgtgcgggtgctggtgctgctactggtggtggtccacctggattatttggcccaaatgattggccatgtccaatgtgcggcaacatcaactgggctaagcgtaccaaatgtaatatatgtaacacctccaagcctggtaccaatgaaggtgaaactggctcaaaggaggtgcagtgccactttggcccattgccaattgttgtttgcattgccatttttcttcattttaggggtggccgtggtggtgggtacaaagagctcgatgaagaagaactagaggaagttaaaaaacgccggaaagaggctgaggaggatgatggagagatctatgatgaatttggcaacctgaaaaagaaatttcgctctaaagctctgcatactggaagtgcgcagacacttcctgggtctggacgtgctggatgggaagttgagcatcgtggttctagtgaaagggaaggcagggagaggagcagggatcgtggtagggacgactatgatgaaaaggaaaccaggagcatagatagaggtgatcatggaagggaccagcgccggagccaagaccgcgaaagggaaaaggggagggagagaagagaccatgagtatgagagaagtagggagcgtgaccggcgccacaggtgaagagagaaatgacagggctttctgttcttacatcgcatttgccactttttgtagccatggaacccgtggtcttgtgttagtatctgggggcgtgcattgattctcagaatctgatttttgctttgaatgtttcgctgcattggcactttattcagatatgccgttccttctgttactacttttatgtttgtgaaacacgtatgacactcgtggatccaatgtcat

SEQ ID NO: 26893 - DNA, 1515 bp, Zea Mays
atgatgtcgggtcgaggcagatcaggacacacgctaggagtcgcgggcgggggcgggatcagggtaggaagacgacgcgagcgggggcgggattacaggaaggaagatggcgtggcgcgaggctggagcgggggcacgatggctgggtatatgtcaagagggccccaaaatggttctgtgtatgtctgcaatctacctcctggaactgacgagaatatgttggctgaatattttggcaccatagggttgctaaagaaggacaaaaggaatgggcgcccaaaaatttggatctatagggacaaagtttccaatgaaccaaagggtgatgctacagtcacttatgaggatccacatgctgcttcagctgctgtggaatggttcaataacaaggatttccacgggagcactattcagtgaacaagatgaagtggataacggagcaggcagaggtagagggcgtggtgatggtcccggcaaggcttggcagcaagatggggactggatgtgtccaaatacaagttgtggcaatgtaaattttgccttccgtggtgtttgtaatcgctgtggagctgcacgccctgccggtgctggtggaactggtggtggaggtggcggtaggggtagaggccgtggtaactctgatgcaagaggaagcagtcgtgcgggtgctggtgctgctactggtggtggtccacctggattatttggcccaaatgattggccatgtccaatgtgcggcaacatcaactgggctaagcgtaccaaatgtaatatatgtaacacctccaagcctggtaccaatgaaggtgaaactggctcaaaggaggtgcagtgccactttggcccattgccaattgttgtttgcattgccatttttcttcattttaggggtggccgtggtggtgggtacaaagagctcgatgaagaagaactagaggaagttaaaaaacgccggaaagaggctgaggaggatgatggagagatctatgatgaatttggcaacctgaaaaagaaatttcgctctaaagctctgcatactggaagtgcgcagacacttcctgggtctggacgtgctggatgggaagttgagcatcgtgtgaaagggaaggcagggagaggagcagggatcgtggtagggacgactatgatgaaaaggaaaccaggagcatagatagaggtgatcatggaagggaccagcgccggagccaagaccgcgaaagggaaaaggggagggagagaagagaccatgagtatgagagaagtagggagcgtgaccggcgccacaggtgaagagagaaatgacagggctttctgttcttacatcgcatttgccactttttgtagccatggaacccgtggtcttgtgttagtatctgggggcgtgcattgattctcagaatctgatttttgctttgaatgtttcgctgcattggcactttattcagatatgccgttccttctgttactacttttatgtttgtgaaacacgtatgacactcgtggatccaatgtcat

SEQ ID NO: 26894 - DNA, 1614 bp, Zea Mays
cgaatccgcattcgataaacctgccgtgtcccgttcaccccgcgttcgcttcatccgggcgtgggctaccgccgcagccgccgccctacgtccggtgaccaggctttcattgagctttgccgacgacgaccacgcaccagatggctgggtatatgtcaagagggccccaaaatggttctgtgtatgtctgcaatctacctcctggaactgacgagaatatgttggctgaatattttggcaccatagggttgctaaaggtatgggtcttaccagaaggacaaaaggaatgggcgcccaaaaatttggatctatagggacaaagtttccaatgaaccaaagggtgatgctacagtcacttatgaggatccacatgctgcttcagctgctgtggaatggttcaataacaaggatttccacgggagcactattcaggttcacatagctgagtcaaaaagcaaagatgctttcgataaccccacaaatttgaacaccattgctggtgtcagtgaacaagatgaagtggataacggagcaggcagaggtagagggcgtggtgatggtcccggcaaggcttggcagcaagatggggactggatgtgtccaaatacaagttgtggcaatgtaaattttgccttccgtggtgtttgtaatcgctgtggagctgcacgccctgccggtgctggtggaactggtggtggaggtggcggtaggggtagaggccgtggtaactctgatgcaagaggaagcagtcgtgcgggtgctggtgctgctactggtggtggtccacctggattatttggcccaaatgattggccatgtccaatgtgcggcaacatcaactgggctaagcgtaccaaatgtaatatatgtaacacctccaagcctggtaccaatgaaggtgaaactggctcaaaggaggtgcagtgccactttggcccattgccaattgttgtttgcattgccatttttcttcattttaggggtggccgtggtggtgggtacaaagagctcgatgaagaagaactagaggaagttaaaaaacgccggaaagaggctgaggaggatgatggagagatctatgatgaatttggcaacctgaaaaagaaatttcgctctaaagctctgcatactggaagtgcgcagacacttcctgggtctggacgtgctggatgggaagttgagcatcgtggttctagtgaaagggaaggcagggagaggagcagggatcgtggtagggacgactatgatgaaaaggaaaccaggagcatagatagaggtgatcatggaagggaccagcgccggagccaagaccgcgaaagggaaaaggggagggagagaagagaccatgagtatgagagaagtagggagcgtgaccggcgccacaggtgaagagagaaatgacagggctttctgttcttacatcgcatttgccactttttgtagccatggaacccgtggtcttgtgttagtatctgggggcgtgcattgattctcagaatctgatttttgctttgaatgtttcgctgcattggcactttattcagatatgccgttccttctgttactacttttatgtttgtgaaacacgtatgacactcgtggatccaatgtcat

SEQ ID NO: 26895 - DNA, 1569 bp, Zea Mays
atggcgtcgctgttcggcaacggcggctacatctactcctcggggtcggagggggaggacgaggacgagggcacggaggggtaccggaaaggcgggtaccacgccgctcgccccggggatcgcttcgccggtgggcggttcgtcgcgcagcggaagatcggctggggcaacttctccaccgtctggctagcctacgacaccctccacagcagatttgtcgccctgaagatccagaagagcgcaagggattacgcgcacgcggctctccacgaaatcgagctactgtcggctgtggccaaaggagacccgacgaattcaaagtgcgtgcttcggttgttggaccatttcaagcacgctggccccaacgggcagcacgtttgcctggtcaccgagttcctcggtgatagcctgctccggctgatacggtacaatcggaacaagggcattgggctgagcagagtgaaggaaatctgccgatcagtcatggtcggccttgattacctgcacagcgagctcggcatcatccacacggatttgaaaccagagaacgttcttctggaatcaacaattaacccggccaaggacccagtgcgctctgggttcacaccgatcctcgaccggcctgtggggaaccagtacggtggcacagtgatcagtttcagtgagaagatgctcaagatgagagcaaggcgtgcagtggctaagatttcgcagagacgggtttcccttggtggggttggggcagaactggagaaagagaggtgcctggatgggatcagtttgaagtgtaagattgtcgattttgggaatgcctgctgggccgatcagcagcacgctggtgaaatacagacaaggcagtacagagctcctgaggttatcattggttctgggtactcatattccgctgacatctggtcgtttgcttgcattgcctttgagcttgccaccggtgacttgttgtttgctcccatgaatcgccagggatgcagcgaagatgaggaccacttggctttgatgatggaaactcttgggaagatgcctcggaagattgctagctcaggaactcgttccaaggattactttgatcggtatggagatttgaaaagggtcaggagactgaagttctggcccctagaccgtgtgctcgtagaaagatatccacggactttgatttgatgtaaccaaggctgagaatcaggagccactttttaggcgcagcctgatgagaacgggacatgagattcagctcggatgtagcaagcgtttcgctggtgtgtttgggggtgcagactgcagagctaatgtgatgttaacctgcatgtgtgttagtagggccaaaatattgatgtattattattttttggtaatgtgatctggccaacaaccttttcctttagctgagaagatgaactgctacagcactgcagtgtagtggttcagctagttatccaatggattgtgtgctgtaacctgtaacatttgtttgaaattgaccttatggatatcggaaaccaaccacttggtggtgcaaatgggacaaaaccaggggcggtaataggctctaaattt

SEQ ID NO: 26896 - DNA, 2040 bp, Zea Mays
cctgcccgaccgaatgagcgcgtgcaaattgctaaaggcaccccacgtttataaagcggaggcccagcctgtcttctgcccgcacgaattcgaatccgccggaggcggaggagacagcagccgggtgattgggttgggtacgcctctcgtctcggccgatggcgtcgctgttcggcaacggcggctacatctactcctcggggtcggagggggaggacgaggacgagggcacggaggggtaccggaaaggcgggtaccacgccgctcgccccggggatcgcttcgccggtgggcggttcgtcgcgcagcggaagatcggctggggcaacttctccaccgtctggctagcctacgacaccctccacagcagatttgtcgccctgaagatccagaagagcgcaagggattacgcgcacgcggctctccacgaaatcgagctactgtcggctgtggccaaaggagacccgacgaattcaaagtgcgtgcttcggttgttggaccatttcaagcacgctggccccaacgggcagcacgtttgcctggtcaccgagttcctcggtgatagcctgctccggctgatacggtacaatcggaacaagggcattgggctgagcagagtgaaggaaatctgccgatcagtcatggtcggccttgattacctgcacagcgagctcggcatcatccacacggatttgaaaccagagaacgttcttctggaatcaacaattaacccggccaaggacccagtgcgctctgggttcacaccgatcctcgaccggcctgtggggaaccagtacggtggcacagtgatcagtttcagtgagaagatgctcaagatgagagcaaggcgtgcagtggctaagatttcgcagagacgggtttcccttggtggggttggggcagaactggagaaagagaggtgcctggatgggatcagtttgaagtgtaagattgtcgattttgggaatgcctgctgggccgatcagcagcacgctggtgaaatacagacaaggcagtacagagctcctgaggttatcattggttctgggtactcatattccgctgacatctggtcgtttgcttgcattgcctttgagcttgccaccggtgacttgttgtttgctcccatgaatcgccagggatgcagcgaagatgagacagcacgatatttggtgtattcatccactaaactttcaaacactcccttgcaattattcggacatttaaaaattgcactgacacaaatatatatatcaggaccacttggctttgatgatggaaactcttgggaagatgcctcggaagattgctagctcaggaactcgttccaaggattactttgatcggtatggagatttgaaaagggtcaggagactgaagttctggcccctagaccgtgtgctcgtagaaaggtacagtttcagcgaacccgacgccaaagggttcgctgactttcttcggccaatgttagatttcgctccggaggacaggccatctgccgcgcagtgcttgaaacactcttggcttaattgatccaacgcgacacgaaagtctgaccaatagatgtttacatacatcctacgtgcaaattcgctgccgaagactctttgtgactgtgattgcagatatccacggactttgatttgatgtaaccaaggctgagaatcaggagccactttttaggcgcagcctgatgagaacgggacatgagattcagctcggatgtagcaagcgtttcgctggtgtgtttgggggtgcagactgcagagctaatgtgatgttaacctgcatgtgtgttagtagggccaaaatattgatgtattattattttttggtaatgtgatctggccaacaaccttttcctttagctgagaagatgaactgctacagcactgcagtgtagtggttcagctagttatccaatggattgtgtgctgtaacctgtaacatttgtttgaaattgaccttatggatatcggaaaccaaccacttggtggtgcaaatgggacaaaaccaggggcggtaataggctctaaattt

SEQ ID NO: 26897 - DNA, 2131 bp, Zea Mays
ctccggtctgcagcctgcccgaccgaatgagcgcgtgcaaattgctaaaggcaccccacgtttataaagcggaggcccagcctgtcttctgcccgcacgaattcgaatccgccggaggcggaggagacagcagccgggtgattgggttgggtacgcctctcgtctcggccgatggcgtcgctgttcggcaacggcggctacatctactcctcggggtcggagggggaggacgaggacgagggcacggaggggtaccggaaaggcgggtaccacgccgctcgccccggggatcgcttcgccggtgggcggttcgtcgcgcagcggaagatcggctggggcaacttctccaccgtctggctagcctacgacaccctccacagcagatttgtcgccctgaagatccagaagagcgcaagggattacgcgcacgcggctctccacgaaatcgagctactgtcggctgtggccaaaggagacccgacgaattcaaagtgcgtgcttcggttgttggaccatttcaagcacgctggccccaacgggcagcacgtttgcctggtcaccgagttcctcggtgatagcctgctccggctgatacggtacaatcggaacaagggcattgggctgagcagagtgaaggaaatctgccgatcagtcatggtcggccttgattacctgcacagcgagctcggcatcatccacacggatttgaaaccagagaacgttcttctggaatcaacaattaacccggccaaggacccagtgcgctctgggttcacaccgatcctcgaccggcctgtggggaaccagtacggtggcacagtgatcagtttcagtgagaagatgctcaagatgagagcaaggcgtgcagtggctaagatttcgcagagacgggtttcccttggtggggttggggcagaactggagaaagagaggtgcctggatgggatcagtttgaagtgtaagattgtcgattttgggaatgcctgctgggccgatcagcagcacgctggtgaaatacagacaaggcagtacagagctcctgaggttatcattggttctgggtactcatattccgctgacatctggtcgtttgcttgcattgcctttgagcttgccaccggtgacttgttgtttgctcccatgaatcgccagggatgcagcgaagatgagtgacattttctttctagaaaagcaagatcaagctatatgattatggttgccggaagtaataatgccttgcaaaaattgaagtaccagtggactgacaaacaattagttgcatgtacaacttttctgttctgttacccggtcgaatgctctgttactgagaatatgatgccatgcctatgaccacttggctttgatgatggaaactcttgggaagatgcctcggaagattgctagctcaggaactcgttccaaggattactttgatcggtatggagatttgaaaagggtcaggagactgaagttctggcccctagaccgtgtgctcgtagaaaggtacagtttcagcgaacccgacgccaaagggttcgctgactttcttcggccaatgttagatttcgctccggaggacaggccatctgccgcgcagtgcttgaaacactcttggcttaattgatccaacgcgacacgaaagtctgaccaatagatgtttacatacatcctacgtgcaaattcgctgccgaagactctttgtgactgtgattgcagatatccacggactttgatttgatgtaaccaaggctgagaatcaggagccactttttaggcgcagcctgatgagaacgggacatgagattcagctcggatgtagcaagcgtttcgctggtgtgtttgggggtgcagactgcagagctaatgtgatgttaacctgcatgtgtgttagtagggccaaaatattgatgtattattattttttggtaatgtgatctggccaacaaccttttcctttagctgagaagatgaactgctacagcactgcagtgtagtggttcagctagttatccaatggattgtgtgctgtaacctgtaacatttgtttgaaattgaccttatggatatcggaaaccaaccacttggtggtgcaaatgggacaaaaccaggggcggtaataggctctaaattt

SEQ ID NO: 26898 - DNA, 2010 bp, Zea Mays
ggcctcaccccttcccacggaggcccccgagtcgccattgcttgccctcgctcggctcgatccccactctaccgtgccagccaccaaccccgcccgcgcctccgctactaaagccgaggcctcacccaccaggccaccgccatgctcctccccttcctcagatcccacccgctcctccaccacgccgctcgcctgtcctccccgcgcactcgcctgatcctccgccgcgacttgctcccgctcgcgcgctcccggcctatccgcatggcggcccattccggctccggctccggcgccagctcccctgccccagcgccgcctgctgccgtggtgcaaaagtcaaagatcaaattttgccctgcttgtggaagtccaacgaaattggccatacctgatggtgatgagaagatgagggctgtttgttcttcttgtggaggagttcactacgaaaacccaaaaatggttgttggttgccttgtggagcacgataataaggttctcctttgcagaagaaagattgaaccggcttatggtctttggacacttcctgctggttatttagaggtgggggagtctgctgctgaaggagcctctagagaaacattagaagaagcatgtgcagatgtagagataatctcaccttttgctcagttggatattccactgattggtcaaatgcagtagagttacattattttccgagcaagactgaagacccccaatttttcacctggagcagagtcgctggaatgtgcactttttgctctcgatgatataccattcgattctctagcattttcttcaatcgttgtcaccttgaggatgtatactgaagatgtgaggtctggaaacatcaaatatcactattgcattataaacaaaaggtaaatcgtccctttttgtagtaactgatcattgttgtcgttcgtaactctgattgcttttacaaagtaagtttatgaatcttgctctagtttccttgtctcactgcaaattttctgcagcactcacctatatgacaatcttgcagcatgttcaagtttacgaatactactctagtttcctatatggtctataacttgttttgtgcaacttgatttacagattaggagccagcccgtcagaccttcggagtttcgatattgataaccatatagctgtgtgaggttttaaaggttctaaaacccttggcgattgaggggaatggttttggcatacaacaggcacacggccacacaacaaaaacatcgccatcagatagaccagtgttgaatgctgaatccccatgggagccttttttggcgcctctctgcggattggaacagatttagagggtggaacagatttagagggtgtttgatttttatggactaatttttagtttctctattttattctattttagactctaaattgacaaatacggaaactaaaataggattttagtttctgtatttggtaatttagtattcagtaatttagagactaaaatgaaataaaatgaagaaactaaaaattagtacttagaagccaaacactcccttaaagtaggtgctggaactgtaaatggttcgtatcctaaagcctggtttagcccttttaggagattctgcgtttggatgggagttgggaggactgagaattgtatcatagtgcagcaaatcttggttgtaggattgagctatcctgcatgccatacttgtggcgcttcttcagcgaccgcatgctgtgatctggttacaattgaattatgtgagctcttttttaaccatttatttcagttgtaaagcttgtgttgcattatttttttatcataactgagtgctgaatacaccttcaggcttgctcgttcgtggttatttgcaccctcaaaacaggtttcgattgtaaatatagatgtaaacctcgtgttgccaatataaaatttattcatggtaaattaggaaagcactcccaacaaaagaacatgcaatttagggggtgtttggttagagggactaaagattagtc

SEQ ID NO: 26899 - DNA, 1758 bp, Zea Mays
ggcctcaccccttcccacggaggcccccgagtcgccattgcttgccctcgctcggctcgatccccactctaccgtgccagccaccaaccccgcccgcgcctccgctactaaagccgaggcctcacccaccaggccaccgccatgctcctccccttcctcagatcccacccgctcctccaccacgccgctcgcctgtcctccccgcgcactcgcctgatcctccgccgcgacttgctcccgctcgcgcgctcccggcctatccgcatggcggcccattccggctccggctccggcgccagctcccctgccccagcgccgcctgctgccgtggtgcaaaagtcaaagatcaaattttgccctgcttgtggaagtccaacgaaattggccatacctgatggtgatgagaagatgagggctgtttgttcttcttgtggaggagttcactacgaaaacccaaaaatggttgttggttgccttgtggagcacgataataaggttctcctttgcagaagaaagattgaaccggcttatggtctttgaggtgggggagtctgctgctgaaggagcctctagagaaacattagaagaagcatgtgcagatgtagagataatctcaccttttgctcagttggatattccactgattggtcaaagttacattattttccgagcaagactgaagacccccaatttttcacctggagcagagtcgctggaatgtgcactttttgctctcgatgatataccattcgattctctagcattttcttcaatcgttgtcaccttgaggatgtatactgaagatgtgaggtctggaaacatcaaatatcactattgcattataaacaaaagattaggagccagcccgtcagaccttcggagtttcgatattgataaccatatagctgtgtgaggttttaaaggttctaaaacccttggcgattgaggggaatggttttggcatacaacaggcacacggccacacaacaaaaacatcgccatcagatagaccagtgttgaatgctgaatccccatgggagccttttttggcgcctctctgcggattggaacagatttagagggtggaacagatttagagggtgtttgatttttatggactaatttttagtttctctattttattctattttagactctaaattgacaaatacggaaactaaaataggattttagtttctgtatttggtaatttagtattcagtaatttagagactaaaatgaaataaaatgaagaaactaaaaattagtacttagaagccaaacactcccttaaagtaggtgctggaactgtaaatggttcgtatcctaaagcctggtttagcccttttaggagattctgcgtttggatgggagttgggaggactgagaattgtatcatagtgcagcaaatcttggttgtaggattgagctatcctgcatgccatacttgtggcgcttcttcagcgaccgcatgctgtgatctggttacaattgaattatgtgagctcttttttaaccatttatttcagttgtaaagcttgtgttgcattatttttttatcataactgagtgctgaatacaccttcaggcttgctcgttcgtggttatttgcaccctcaaaacaggtttcgattgtaaatatagatgtaaacctcgtgttgccaatataaaatttattcatggtaaattaggaaagcactcccaacaaaagaacatgcaatttagggggtgtttggttagagggactaaagattagtc

SEQ ID NO: 26900 - DNA, 1946 bp, Zea Mays
ggcctcaccccttcccacggaggcccccgagtcgccattgcttgccctcgctcggctcgatccccactctaccgtgccagccaccaaccccgcccgcgcctccgctactaaagccgaggcctcacccaccaggccaccgccatgctcctccccttcctcagatcccacccgctcctccaccacgccgctcgcctgtcctccccgcgcactcgcctgatcctccgccgcgacttgctcccgctcgcgcgctcccggcctatccgcatggcggcccattccggctccggctccggcgccagctcccctgccccagcgccgcctgctgccgtggtgcaaaagtcaaagatcaaattttgccctgcttgtggaagtccaacgaaattggccatacctgatggtgatgagaagatgagggctgtttgttcttcttgtggaggagttcactacgaaaacccaaaaatggttgttggttgccttgtggagcacgataataaggttctcctttgcagaagaaagattgaaccggcttatggtctttggacacttcctgctggttatttagaggtgggggagtctgctgctgaaggagcctctagagaaacattagaagaagcatgtgcagatgtagagataatctcaccttttgctcagttggatattccactgattggtcaaagtcgctggaatgtgcactttttgctctcgatgatataccattcgattctctagcattttcttcaatcgttgtcaccttgaggatgtatactgaagatgtgaggtctggaaacatcaaatatcactattgcattataaacaaaaggtaaatcgtccctttttgtagtaactgatcattgttgtcgttcgtaactctgattgcttttacaaagtaagtttatgaatcttgctctagtttccttgtctcactgcaaattttctgcagcactcacctatatgacaatcttgcagcatgttcaagtttacgaatactactctagtttcctatatggtctataacttgttttgtgcaacttgatttacagattaggagccagcccgtcagaccttcggagtttcgatattgataaccatatagctgtgtgaggttttaaaggttctaaaacccttggcgattgaggggaatggttttggcatacaacaggcacacggccacacaacaaaaacatcgccatcagatagaccagtgttgaatgctgaatccccatgggagccttttttggcgcctctctgcggattggaacagatttagagggtggaacagatttagagggtgtttgatttttatggactaatttttagtttctctattttattctattttagactctaaattgacaaatacggaaactaaaataggattttagtttctgtatttggtaatttagtattcagtaatttagagactaaaatgaaataaaatgaagaaactaaaaattagtacttagaagccaaacactcccttaaagtaggtgctggaactgtaaatggttcgtatcctaaagcctggtttagcccttttaggagattctgcgtttggatgggagttgggaggactgagaattgtatcatagtgcagcaaatcttggttgtaggattgagctatcctgcatgccatacttgtggcgcttcttcagcgaccgcatgctgtgatctggttacaattgaattatgtgagctcttttttaaccatttatttcagttgtaaagcttgtgttgcattatttttttatcataactgagtgctgaatacaccttcaggcttgctcgttcgtggttatttgcaccctcaaaacaggtttcgattgtaaatatagatgtaaacctcgtgttgccaatataaaatttattcatggtaaattaggaaagcactcccaacaaaagaacatgcaatttagggggtgtttggttagagggactaaagattagtc

SEQ ID NO: 26901 - DNA, 2077 bp, Zea Mays
ccgacctcaggcctcaccccttcccacggaggcccccgagtcgccattgcttgccctcgctcggctcgatccccactctaccgtgccagccaccaaccccgcccgcgcctccgctactaaagccgaggcctcacccaccaggccaccgccatgctcctccccttcctcagatcccacccgctcctccaccacgccgctcgcctgtcctccccgcgcactcgcctgatcctccgccgcgacttgctcccgctcgcgcgctcccggcctatccgcatggcggcccattccggctccggctccggcgccagctcccctgccccagcgccgcctgctgccgtggtgcaaaagtcaaagatcaaattttgccctgcttgtggaagtccaacgaaattggccatacctgatggtgatgagaagatgagggctgtttgttcttcttgtggaggagttcactacgaaaacccaaaaatggttgttggttgccttgtggagcacgataataaggttctcctttgcagaagaaagattgaaccggcttatggtctttgaggtgggggagtctgctgctgaaggagcctctagagaaacattagaagaagcatgtgcagatgtagagataatctcaccttttgctcagttggatattccactgattggtcaagtgagtgaaaatttggcatagtcacaaagttataggttattttgtccactactaagttgattatctttgtattacaatgagatgcagtagagttacattattttccgagcaagactgaagacccccaatttttcacctggagcagagtcgctggaatgtgcactttttgctctcgatgatataccattcgattctctagcattttcttcaatcgttgtcaccttgaggatgtatactgaagatgtgaggtctggaaacatcaaatatcactattgcattataaacaaaaggtaaatcgtccctttttgtagtaactgatcattgttgtcgttcgtaactctgattgcttttacaaagtaagtttatgaatcttgctctagtttccttgtctcactgcaaattttctgcagcactcacctatatgacaatcttgcagcatgttcaagtttacgaatactactctagtttcctatatggtctataacttgttttgtgcaacttgatttacagattaggagccagcccgtcagaccttcggagtttcgatattgataaccatatagctgtgtgaggttttaaaggttctaaaacccttggcgattgaggggaatggttttggcatacaacaggcacacggccacacaacaaaaacatcgccatcagatagaccagtgttgaatgctgaatccccatgggagccttttttggcgcctctctgcggattggaacagatttagagggtggaacagatttagagggtgtttgatttttatggactaatttttagtttctctattttattctattttagactctaaattgacaaatacggaaactaaaataggattttagtttctgtatttggtaatttagtattcagtaatttagagactaaaatgaaataaaatgaagaaactaaaaattagtacttagaagccaaacactcccttaaagtaggtgctggaactgtaaatggttcgtatcctaaagcctggtttagcccttttaggagattctgcgtttggatgggagttgggaggactgagaattgtatcatagtgcagcaaatcttggttgtaggattgagctatcctgcatgccatacttgtggcgcttcttcagcgaccgcatgctgtgatctggttacaattgaattatgtgagctcttttttaaccatttatttcagttgtaaagcttgtgttgcattatttttttatcataactgagtgctgaatacaccttcaggcttgctcgttcgtggttatttgcaccctcaaaacaggtttcgattgtaaatatagatgtaaacctcgtgttgccaatataaaatttattcatggtaaattaggaaagcactcccaacaaaagaacatgcaatttagggggtgtttggttagagggactaaagattagtc

SEQ ID NO: 26902 - DNA, 2014 bp, Zea Mays
gccgacctcaggcctcaccccttcccacggaggcccccgagtcgccattgcttgccctcgctcggctcgatccccactctaccgtgccagccaccaaccccgcccgcgcctccgctactaaagccgaggcctcacccaccaggccaccgccatgctcctccccttcctcagatcccacccgctcctccaccacgccgctcgcctgtcctccccgcgcactcgcctgatcctccgccgcgacttgctcccgctcgcgcgctcccggcctatccgcatggcggcccattccggctccggctccggcgccagctcccctgccccagcgccgcctgctgccgtggtgcaaaagtcaaagatcaaattttgccctgcttgtggaagtccaacgaaattggccatacctgatggtgatgagaagatgagggctgtttgttcttcttgtggaggagttcactacgaaaacccaaaaatggttgttggttgccttgtggagcacgataataaggttctcctttgcagaagaaagattgaaccggcttatggtctttggacacttcctgctggttatttagaggtgggggagtctgctgctgaaggagcctctagagaaacattagaagaagcatgtgcagatgtagagataatctcaccttttgctcagttggatattccactgattggtcaatagagttacattattttccgagcaagactgaagacccccaatttttcacctggagcagagtcgctggaatgtgcactttttgctctcgatgatataccattcgattctctagcattttcttcaatcgttgtcaccttgaggatgtatactgaagatgtgaggtctggaaacatcaaatatcactattgcattataaacaaaaggtaaatcgtccctttttgtagtaactgatcattgttgtcgttcgtaactctgattgcttttacaaagtaagtttatgaatcttgctctagtttccttgtctcactgcaaattttctgcagcactcacctatatgacaatcttgcagcatgttcaagtttacgaatactactctagtttcctatatggtctataacttgttttgtgcaacttgatttacagattaggagccagcccgtcagaccttcggagtttcgatattgataaccatatagctgtgtgaggttttaaaggttctaaaacccttggcgattgaggggaatggttttggcatacaacaggcacacggccacacaacaaaaacatcgccatcagatagaccagtgttgaatgctgaatccccatgggagccttttttggcgcctctctgcggattggaacagatttagagggtggaacagatttagagggtgtttgatttttatggactaatttttagtttctctattttattctattttagactctaaattgacaaatacggaaactaaaataggattttagtttctgtatttggtaatttagtattcagtaatttagagactaaaatgaaataaaatgaagaaactaaaaattagtacttagaagccaaacactcccttaaagtaggtgctggaactgtaaatggttcgtatcctaaagcctggtttagcccttttaggagattctgcgtttggatgggagttgggaggactgagaattgtatcatagtgcagcaaatcttggttgtaggattgagctatcctgcatgccatacttgtggcgcttcttcagcgaccgcatgctgtgatctggttacaattgaattatgtgagctcttttttaaccatttatttcagttgtaaagcttgtgttgcattatttttttatcataactgagtgctgaatacaccttcaggcttgctcgttcgtggttatttgcaccctcaaaacaggtttcgattgtaaatatagatgtaaacctcgtgttgccaatataaaatttattcatggtaaattaggaaagcactcccaacaaaagaacatgcaatttagggggtgtttggttagagggactaaagattagtc

SEQ ID NO: 26903 - DNA, 1739 bp, Zea Mays
gcggccgacctcaggcctcaccccttcccacggaggcccccgagtcgccattgcttgccctcgctcggctcgatccccactctaccgtgccagccaccaaccccgcccgcgcctccgctactaaagccgaggcctcacccaccaggccaccgccatgctcctccccttcctcagatcccacccgctcctccaccacgccgctcgcctgtcctccccgcgcactcgcctgatcctccgccgcgacttgctcccgctcgcgcgctcccggcctatccgcatggcggcccattccggctccggctccggcgccagctcccctgccccagcgccgcctgctgccgtggtgcaaaagtcaaagatcaaattttgccctgcttgtggaagtccaacgaaattggccatacctgatggtgatgagaagatgagggctgtttgttcttcttgtggaggagttcactacgaaaacccaaaaatggttgttggttgccttgtggagcacgataataaggttctcctttgcagaagaaagattgaaccggcttatggtctttggacacttcctgctggttatttagaggtgggggagtctgctgctgaaggagcctctagagaaacattagaagaagcatgtgcagatgtagagataatctcaccttttgctcagttggatattccactgattggtcaaagtcgctggaatgtgcactttttgctctcgatgatataccattcgattctctagcattttcttcaatcgttgtcaccttgaggatgtatactgaagatgtgaggtctggaaacatcaaatatcactattgcattataaacaaaagattaggagccagcccgtcagaccttcggagtttcgatattgataaccatatagctgtgtgaggttttaaaggttctaaaacccttggcgattgaggggaatggttttggcatacaacaggcacacggccacacaacaaaaacatcgccatcagatagaccagtgttgaatgctgaatccccatgggagccttttttggcgcctctctgcggattggaacagatttagagggtggaacagatttagagggtgtttgatttttatggactaatttttagtttctctattttattctattttagactctaaattgacaaatacggaaactaaaataggattttagtttctgtatttggtaatttagtattcagtaatttagagactaaaatgaaataaaatgaagaaactaaaaattagtacttagaagccaaacactcccttaaagtaggtgctggaactgtaaatggttcgtatcctaaagcctggtttagcccttttaggagattctgcgtttggatgggagttgggaggactgagaattgtatcatagtgcagcaaatcttggttgtaggattgagctatcctgcatgccatacttgtggcgcttcttcagcgaccgcatgctgtgatctggttacaattgaattatgtgagctcttttttaaccatttatttcagttgtaaagcttgtgttgcattatttttttatcataactgagtgctgaatacaccttcaggcttgctcgttcgtggttatttgcaccctcaaaacaggtttcgattgtaaatatagatgtaaacctcgtgttgccaatataaaatttattcatggtaaattaggaaagcactcccaacaaaagaacatgcaatttagggggtgtttggttagagggactaaagattagtc

SEQ ID NO: 26904 - DNA, 2024 bp, Zea Mays
aacgtgttaggcggccgacctcaggcctcaccccttcccacggaggcccccgagtcgccattgcttgccctcgctcggctcgatccccactctaccgtgccagccaccaaccccgcccgcgcctccgctactaaagccgaggcctcacccaccaggccaccgccatgctcctccccttcctcagatcccacccgctcctccaccacgccgctcgcctgtcctccccgcgcactcgcctgatcctccgccgcgacttgctcccgctcgcgcgctcccggcctatccgcatggcggcccattccggctccggctccggcgccagctcccctgccccagcgccgcctgctgccgtggtgcaaaagtcaaagatcaaattttgccctgcttgtggaagtccaacgaaattggccatacctgatggtgatgagaagatgagggctgtttgttcttcttgtggaggagttcactacgaaaacccaaaaatggttgttggttgccttgtggagcacgataataaggttctcctttgcagaagaaagattgaaccggcttatggtctttggacacttcctgctggttatttagaggtgggggagtctgctgctgaaggagcctctagagaaacattagaagaagcatgtgcagatgtagagataatctcaccttttgctcagttggatattccactgattggtcaaagttacattattttccgagcaagactgaagacccccaatttttcacctggagcagagtcgctggaatgtgcactttttgctctcgatgatataccattcgattctctagcattttcttcaatcgttgtcaccttgaggatgtatactgaagatgtgaggtctggaaacatcaaatatcactattgcattataaacaaaaggtaaatcgtccctttttgtagtaactgatcattgttgtcgttcgtaactctgattgcttttacaaagtaagtttatgaatcttgctctagtttccttgtctcactgcaaattttctgcagcactcacctatatgacaatcttgcagcatgttcaagtttacgaatactactctagtttcctatatggtctataacttgttttgtgcaacttgatttacagattaggagccagcccgtcagaccttcggagtttcgatattgataaccatatagctgtgtgaggttttaaaggttctaaaacccttggcgattgaggggaatggttttggcatacaacaggcacacggccacacaacaaaaacatcgccatcagatagaccagtgttgaatgctgaatccccatgggagccttttttggcgcctctctgcggattggaacagatttagagggtggaacagatttagagggtgtttgatttttatggactaatttttagtttctctattttattctattttagactctaaattgacaaatacggaaactaaaataggattttagtttctgtatttggtaatttagtattcagtaatttagagactaaaatgaaataaaatgaagaaactaaaaattagtacttagaagccaaacactcccttaaagtaggtgctggaactgtaaatggttcgtatcctaaagcctggtttagcccttttaggagattctgcgtttggatgggagttgggaggactgagaattgtatcatagtgcagcaaatcttggttgtaggattgagctatcctgcatgccatacttgtggcgcttcttcagcgaccgcatgctgtgatctggttacaattgaattatgtgagctcttttttaaccatttatttcagttgtaaagcttgtgttgcattatttttttatcataactgagtgctgaatacaccttcaggcttgctcgttcgtggttatttgcaccctcaaaacaggtttcgattgtaaatatagatgtaaacctcgtgttgccaatataaaatttattcatggtaaattaggaaagcactcccaacaaaagaacatgcaatttagggggtgtttggttagagggactaaagattagtc

SEQ ID NO: 26905 - DNA, 1412 bp, Zea Mays
aagtgagacaaggccacaagggggatggggcggcacgcgccccccggccccgccccgcgctacgtggtccatttccagtccagtctccaacaacgccggagcgcaggcgaggcgagcacgccgatcgattccgattcgcatacgcccgcccgccgcgaatggacgatgcggagtccgcctcgagggcggggaggaggcgggcggccgccgccgcggggatgaggttgttctcgccggagtactacgcgctgtgcgccggcggcgggatgctcgcggcgggcgccacccacctcgccatcaccccgctcgatgtgctcaaggtcaatatgcaggtgaatcccatgaagtataacagtatattttcaggactaaatgttcttgtgaaagaagagggaccttcgtcactttggagaggctggggagggaaattttttggctatggtgttcagggtggctgcagtgcctctgctcaaatcatagctgatgttggcctgtgtccgtttgaatcggtgaaagtccgtgttcagactcagcccatgttcgctaaaggtttggttgatggctttccaagggtgtatgcaactgaaggcctatctggcttttacagggggcttttacctctttggggacggaaccttccattttctatgcttatgttttcgactttttgagcataccgtggacttcctatatcagaaagttattcaaaagaaaaaggaggactgctcaacgatccagcaacttggtgctacttgtctggctggttatatatctggtgccgtcggtactgttgtttcgaatcctgcagacaatatcgtctcatccctgtataacaaaaaggctgaaaatatcatacatgctgtgaaaagtattggatttcgcaatttgctcacaagaagcctgcccatccgaatcgctcttgtcggacccgtcataaccatgcaatggttcttctacgatacaatcaagatattaactggattgccaacgactggaggacttccgcgcgaactagaagaggctaacatataatctgaccagtttgagataggcttctcgacgcactttttggtatcgtatggacaagtatttgtctatggttctgacttactaggggaagagtatagttggtagttttcagggaagagccaattgacctgaatacatcatgcgtaaggtttctgctgctggatatggaagactgcctcgtgtcgtatgtttttccacgtcttaaacaaccttgagcttcagcacccctccaggtacagcattgtggccaggtggtgctttagtaagtgtgtttcgtaagattttgatgtatgagaaaaatgcacttgtgatgtatacacgcgaccttgaaagtaaataatccctctgaaggaccgagatttgaagtgaaattctgtgctatg

SEQ ID NO: 26906 - DNA, 2187 bp, Zea Mays
aagtgagacaaggccacaagggggatggggcggcacgcgccccccggccccgccccgcgctacgtggtccatttccagtccagtctccaacaacgccggagcgcaggcgaggcgagcacgccgatcgattccgattcgcatacgcccgcccgccgcgaatggacgatgcggagtccgcctcgagggcggggaggaggcgggcggccgccgccgcggggatgaggttgttctcgccggagtactacgcgctgtgcgccggcggcgggatgctcgcggcgggcgccacccacctcgccatcaccccgctcgatgtgctcaaggtcaatatgcaggtgaatcccatgaagtataacagtatattttcaggactaaatgttcttgtgaaagaagagggaccttcgtcactttggagaggctggggagggaaattttttggctatggtgttcagggtggctgcaggtttggcctctatgagtatttcaagaagaggtactctgacgtgcttgtagacagtaacaagagcaccatatacttccttagcagtgcctctgctcaaatcatagctgatgttggcctgtgtccgtttgaatcggtgaaagtccgtgttcagactcagcccatgttcgctaaaggtttggttgatggctttccaagggtgtatgcaactgaaggcctatctgggtaagctatcatgaataagatatatattgtttatcccaatttgatgcattccgcgtgtgcttgaaaatacaagccttcatctaccatcctgagaaaagtatatttcttgttctattgcagcttttacagggggcttttacctctttggggacggaaccttccatgtaattgaacttcccgctattctgtacttattacattccacaaaatgctgtttgatcatataaagtaatgtatatgatggttatatgacttgatgttacattatgtccgattactgttggatattagcatttactttatttctttccaaagttgttccatatatgtctgtaagaatgaatatgagcttatttgccttaactgattttcagactgagttacatttcttaccctgtcccctggctattaagtttgagaaccaatcacttctatgttggtatctctattgccaattctgttttttgaagatcatgatatttctgctcagtgaagagtgaactagactataaagtgttagaattagcatcagcgacctgtccctacttcaaacatattaaaaagttccctctgtgcaatgtttgcatattttctagtttttctctactgtgtcagttcattaatgcatcttctgctttcaacatgttcacattcttatcttttggatgccttttatcttaatttcttttagggaataatatctctcttatttaccatcattcctgcttcttgtagtttctatgcttatgttttcgactttttgagcataccgtggacttcctatatcagaaagttattcaaaagaaaaaggaggactgctcaacgatccagcaacttggtgctacttgtctggctggttatatatctggtgccgtcggtactgttgtttcgaatcctgcagacaatatcgtctcatccctgtataacaaaaaggctgaaaatatcatacatgctgtgaaaagtattggatttcgcaatttgctcacaagaagcctgcccatccgaatcgctcttgtcggacccgtcataaccatgcaatggttcttctacgatacaatcaagatattaactggattgccaacgactggaggacttccgcgcgaactagaagaggctaacatataatctgaccagtttgagataggcttctcgacgcactttttggtatcgtatggacaagtatttgtctatggttctgacttactaggggaagagtatagttggtagttttcagggaagagccaattgacctgaatacatcatgcgtaaggtttctgctgctggatatggaagactgcctcgtgtcgtatgtttttccacgtcttaaacaaccttgagcttcagcacccctccaggtacagcattgtggccaggtggtgctttagtaagtgtgtttcgtaagattttgatgtatgagaaaaatgcacttgtgatgtatacacgcgaccttgaaagtaaataatccctctgaaggaccgagatttgaagtgaaattctgtgctatg

SEQ ID NO: 26907 - DNA, 1386 bp, Zea Mays
aagtgagacaaggccacaagggggatggggcggcacgcgccccccggccccgccccgcgctacgtggtccatttccagtccagtctccaacaacgccggagcgcaggcgaggcgagcacgccgatcgattccgattcgcatacgcccgcccgccgcgaatggacgatgcggagtccgcctcgagggcggggaggaggcgggcggccgccgccgcggggatgaggttgttctcgccggagtactacgcgctgtgcgccggcggcgggatgctcgcggcgggcgccacccacctcgccatcaccccgctcgatgtgctcaaggtcaatatgcaggtgaatcccatgaagtataacagtatattttcaggactaaatgttcttgtgaaagaagagggaccttcgtcactttggagaggctggggagggaaattttttggctatggtgttcagggtggctgcaggtttggcctctatgagtatttcaagaagagtccgtgttcagactcagcccatgttcgctaaaggtttggttgatggctttccaagggtgtatgcaactgaaggcctatctggcttttacagggggcttttacctctttggggacggaaccttccattttctatgcttatgttttcgactttttgagcataccgtggacttcctatatcagaaagttattcaaaagaaaaaggaggactgctcaacgatccagcaacttggtgctacttgtctggctggttatatatctggtgccgtcggtactgttgtttcgaatcctgcagacaatatcgtctcatccctgtataacaaaaaggctgaaaatatcatacatgctgtgaaaagtattggatttcgcaatttgctcacaagaagcctgcccatccgaatcgctcttgtcggacccgtcataaccatgcaatggttcttctacgatacaatcaagatattaactggattgccaacgactggaggacttccgcgcgaactagaagaggctaacatataatctgaccagtttgagataggcttctcgacgcactttttggtatcgtatggacaagtatttgtctatggttctgacttactaggggaagagtatagttggtagttttcagggaagagccaattgacctgaatacatcatgcgtaaggtttctgctgctggatatggaagactgcctcgtgtcgtatgtttttccacgtcttaaacaaccttgagcttcagcacccctccaggtacagcattgtggccaggtggtgctttagtaagtgtgtttcgtaagattttgatgtatgagaaaaatgcacttgtgatgtatacacgcgaccttgaaagtaaataatccctctgaaggaccgagatttgaagtgaaattctgtgctatg

SEQ ID NO: 26908 - DNA, 1450 bp, Zea Mays
gaaaaacgaagtgagacaaggccacaagggggatggggcggcacgcgccccccggccccgccccgcgctacgtggtccatttccagtccagtctccaacaacgccggagcgcaggcgaggcgagcacgccgatcgattccgattcgcatacgcccgcccgccgcgaatggacgatgcggagtccgcctcgagggcggggaggaggcgggcggccgccgccgcggggatgaggttgttctcgccggagtactacgcgctgtgcgccggcggcgggatgctcgcggcgggcgccacccacctcgccatcaccccgctcgatgtgctcaaggtcaatatgcaggtgaatcccatgaagtataacagtatattttcaggactaaatgttcttgtgaaagaagagggaccttcgtcactttggagaggctggggagggaaattttttggctatggtgttcagggtggctgcaggtttggcctctatgagtatttcaagaagaggtactctgacgtgcttgtagacagtaacaagagcaccatatacttccttagcagtgcctctgctcaaatcatagctgatgttggcctgtgtccgtttgaatcggtgaaagtccgtgttcagactcagcccatgttcgctaaaggtttggttgatggctttccaagggtgtatgcaactgaaggcctatctggcttttacagggggcttttacctctttggggacggaaccttccataaagttattcaaaagaaaaaggaggactgctcaacgatccagcaacttggtgctacttgtctggctggttatatatctggtgccgtcggtactgttgtttcgaatcctgcagacaatatcgtctcatccctgtataacaaaaaggctgaaaatatcatacatgctgtgaaaagtattggatttcgcaatttgctcacaagaagcctgcccatccgaatcgctcttgtcggacccgtcataaccatgcaatggttcttctacgatacaatcaagatattaactggattgccaacgactggaggacttccgcgcgaactagaagaggctaacatataatctgaccagtttgagataggcttctcgacgcactttttggtatcgtatggacaagtatttgtctatggttctgacttactaggggaagagtatagttggtagttttcagggaagagccaattgacctgaatacatcatgcgtaaggtttctgctgctggatatggaagactgcctcgtgtcgtatgtttttccacgtcttaaacaaccttgagcttcagcacccctccaggtacagcattgtggccaggtggtgctttagtaagtgtgtttcgtaagattttgatgtatgagaaaaatgcacttgtgatgtatacacgcgaccttgaaagtaaataatccctctgaaggaccgagatttgaagtgaaattctgtgctatg

SEQ ID NO: 26909 - DNA, 3168 bp, Zea Mays
catctctcctccccctctcatcagacatcagagcccttcttcctccgcctccccttcacccccatctcgccatacgcttatcgcccatcccctgatcaccagccgccgccgccaccgcctcgatcccgtccgatccaatccggttttttccttgataatgcgcgtggcaaccttgtcagttcaatccgtccgtgaagaacttatccttattttcgtttgcatcgcatcgcttctgcgtttgggggaaaaagggccgcgtccttgatgtctactatcgcgaccccgccgccgccatcggcggcgcaagagaaggccgccagccggaataagcgaaagtaccgtgccgagacaccatccacggagttgggcccattcgggctggagtacccactgacgacggactgcgtgggattcgagtttatgtcgcccgagaaggttgccatggcagccgcggtagccgccgctgagggtgtcagccttgacctcctccagaactcgtgcgaaaactgcaaggatctccaccctactgcggaggacttgttggagtgccagcgatatgtgaattggggtgacccaaatgagatgcagctggaggagatccttctcaagagtctggacaccacctttgacaatagtgtgagtctgatcaccacaatgggctactctgaggcggccgcacgtgctgctattatgcggacagctgcgcaatacgactggagggagagccttgctgggtttggagaggcggcggttgaggttctcaagacggaaggggacatgttgccaagggagggtgcctctgttgaagacatgaggaagattgaggaggctgtgcttggcagtatggttacgttggtaactgaggctcagccattcaacaccccaggcgatgtaatgtattgcttgcttatgtcggatatgaatgtggcaaatgcatgtgccatggactataacagtttctccctcccagctgtgtctgctcaagttattgcccaaccagtcgcgggaaactacgaacccggttcaggttcaaatttgtcagtttctattaccaacccgcagactggcgttactttccgtggaaaacttaccccagtgccacctggctcgtatggtgctataaaagctgattcatcaacggcacaagcaagcccgaatgtatcaaataccgaaccctcggtatcggacaagactcagtgtgtcatcccgaatattgagccaaaaaaacaccatgttcctatatgtgatcattcagaggaccaaccatttgttgctgctgcgacacaatctgtgaaaaatgacaagtcgtccccaagcaagagggggggctctaagagggactcctttcatcggcagaagttgacgaactatgataaaagttcccgagcattgggttccaaaggctctcttaggtctggcaagcaaagctcttcagccagtgcagtattggagaggaagtgcaggtcattttccgattctactactagcaacttgaagggctcatcaagagttgctaaagggtttgctgcaagcatatctggatcagaagtatcagttgacctttcctttactggtaccctttccccttctccatcatttgatgccaaggtagttagtaactcaaactcagcacctgctgctagcacagatctttcattggcattgtcctcaagtgatagtttaacaccatctttgagtcatgattccaatactgaggtagtggactctagtagcaaaattaatttttcatatgatgaagaacagaaggtctggatcccacaagataaaaaggatgaaattgtcttgattcttgtccagaggcagaaagaactgcaagcacatacacgtgactggacagactgggctcaacagaaagtgatgcaggtcgcacaccgacttgcaaaggagaaggatgaacttcagtcactcaggaaagagaaggaagaggcagaccgtctgcaagaagagaggcatcatttggaagagagtactcggaaaaagcttctagagatggagtctgcaatttctagggcaaatgctcagttggagaaggcagaagcttctgctcgcagacgtgaggttgagaatgcacaacttacgttacagatggaagctgcaaagcgacatgcagcagagtcagcaacaaacatttcagagcttgtaaagaaggatgagaacagtcgcaaaaggtctcagcgttggcaatctgacagagccctgttacaagaggatcttgcagcacaaaagagcaggttatctcgggtccaagaacaccttcagcatgctaaagagctaaaggatcaagtgcaggtgtgtgccagggagagagcagtagagaagagaagttgggaaaggagcggaggagatatggtggaacagaggaacaatcaccctgggtggccaggacggccaaaggcaagatggaaacaagaggaagctggaaagattgaggtaattgcccttgtaacctcaaagaagaaagagagggagcaaattgagacctccatgaggtcagaagagaatttactgcatcttaaagcagcgaatgacacagaaagatacaagagtgagatccgtgctcttgagcagcgtattgcacagatgaaggtttctttggactcttcaaaggttgctgcccccaagtggggtgctgacaataaaacatatgcattgcatctttctgaagggagaaagaacagcagtgcccaaattttgtccaacatagcagtaccccaagatcccagttttgatgatatacagcgtgaccgggagtgcgtcatgtgcttgagtgaggagatgtccgtggtgttcctcccttgcgcccaccaggtggtctgtgccaaatgcagcgacctccatgagaagcaagggatgaaggaatgcccttcatgccggacccccatccagcgcagggtgcgcgcccgccccgcagtgtggtgcaggagaacggacgagctcgttgacggccccaacgcgtcccacatctcggcgctggcgctggaccggtgggagtcgcggctggaggacatcttcgccggccgcccgtacgacatgctcgacgccgtgaagggtcatatctagaagcagcagcatacagtaggaaggaaggaaggaaggaaggagtagcacctagcgacgcacatctgaatcccgaggcagatgtttgtg

SEQ ID NO: 26910 - DNA, 3091 bp, Zea Mays
catctctcctccccctctcatcagacatcagagcccttcttcctccgcctccccttcacccccatctcgccatacgcttatcgcccatcccctgatcaccagccgccgccgccaccgcctcgatcccgtccgatccaatccggttttttccttgataatgcgcgtggcaaccttgtcagttcaatccgtccgtgaagaacttatccttattttcgtttgcatcgcatcgcttctgcgtttgggggaaaaagggccgcgtccttgatgtctactatcgcgaccccgccgccgccatcggcggcgcaagagaaggccgccagccggaataagcgaaagtaccgtgccgagacaccatccacggagttgggcccattcgggctggagtacccactgacgacggactgcgtgggattcgagtttatgtcgcccgagaaggttgccatggcagccgcggtagccgccgctgagggtgtcagccttgacctcctccagaactcgtgcgaaaactgcaaggatctccaccctactgcggaggacttgttggagtgccagcgatatgtgaattggggtgacccaaatgagatgcagctggaggagatccttctcaagagtctggacaccacctttgacaatagtgtgagtctgatcaccacaatgggctactctgaggcggccgcacgtgctgctattatgcggacagctgcgcaatacgactggagggagagccttgctgggtttggagaggcggcggttgaggttctcaagacggaaggggacatgttgccaagggagggtgcctctgttgaagacatgaggaagattgaggaggctgtgcttggcagtatggttacgttggtaactgaggctcagccattcaacaccccaggcgatgtaatgtattgcttgcttatgtcggatatgaatgtggcaaatgcatgtgccatggactataacagtttctccctcccagctgtgtctgctcaagttattgcccaaccagtcgcgggaaactacgaacccggttcaggttcaaatttgtcagtttctattaccaacccgcagactggcgttactttccgtggaaaacttaccccagtgccacctggctcgtatggtgctataaaagctgattcatcaacggcacaagcaagcccgaatgtatcaaataccgaaccctcggtatcggacaagactcagtgtgtcatcccgaatattgagccaaaaaaacaccatgttcctatatgtgatcattcagaggaccaaccatttgttgctgctgcgacacaatctgtgaaaaatgacaagtcgtccccaagcaagagggggggctctaagagggactcctttcatcggcagaagttgacgaactatgataaaagttcccgagcattgggttccaaaggctctcttaggtctggcaagcaaagctcttcagccagtgcagtattggagaggaagtgcaggtcattttccgattctactactagcaacttgaagggctcatcaagagttgctaaagggtttgctgcaagcatatctggatcagaagtatcagttgacctttcctttactggtaccctttccccttctccatcatttgatgccaaggtagttagtaactcaaactcagcacctgctgctagcacagatctttcattggcattgtcctcaagtgatagtttaacaccatctttgagtcatgattccaatactgaggtagtggactctagtagcaaaattaatttttcatatgatgaagaacagaaggtctggatcccacaagataaaaaggatgaaattgtcttgattcttgtccagaggcagaaagaactgcaagcacatacacgtgactggacagactgggctcaacagaaagtgatgcaggtcgcacaccgacttgcaaaggagaaggatgaacttcagtcactcaggaaagagaaggaagaggcagaccgtctgcaagaagagaggcatcatttggaagagagtactcggaaaaagcttctagagatggagtctgcaatttctagggcaaatgctcagttggagaaggcagaagcttctgctcgcagacgtgaggttgagaatgcacaacttacgttacagatggaagctgcaaagcgacatgcagcagagtcagcaacaaacatttcagagcttgtaaagaaggatgagaacagtcgcaaaaggtctcagcgttggcaatctgacagagccctgttacaagaggatcttgcagcacaaaagagcaggttatctcgggtccaagaacaccttcagcatgctaaagagctaaaggatcaagtgcaggtactaacagttctatttttacctcattgcaagatggaaacaagaggaagctggaaagattgaggtaattgcccttgtaacctcaaagaagaaagagagggagcaaattgagacctccatgaggtcagaagagaatttactgcatcttaaagcagcgaatgacacagaaagatacaagagtgagatccgtgctcttgagcagcgtattgcacagatgaaggtttctttggactcttcaaaggttgctgcccccaagtggggtgctgacaataaaacatatgcattgcatctttctgaagggagaaagaacagcagtgcccaaattttgtccaacatagcagtaccccaagatcccagttttgatgatatacagcgtgaccgggagtgcgtcatgtgcttgagtgaggagatgtccgtggtgttcctcccttgcgcccaccaggtggtctgtgccaaatgcagcgacctccatgagaagcaagggatgaaggaatgcccttcatgccggacccccatccagcgcagggtgcgcgcccgccccgcagtgtggtgcaggagaacggacgagctcgttgacggccccaacgcgtcccacatctcggcgctggcgctggaccggtgggagtcgcggctggaggacatcttcgccggccgcccgtacgacatgctcgacgccgtgaagggtcatatctagaagcagcagcatacagtaggaaggaaggaaggaaggaaggagtagcacctagcgacgcacatctgaatcccgaggcagatgtttgtg

SEQ ID NO: 26911 - DNA, 3189 bp, Zea Mays
attttaccgaacccagcccagtttctcccaggtctggctggtggtggcgattggcgagtgactcgtgtgactcggcgaggcctacatagcgaggcacgcctcctgcagtcctcctcctcgtctagtcatctctcctccccctctcatcagacatcagagcccttcttcctccgcctccccttcacccccatctcgccatacgcttatcgcccatcccctgatcaccagccgccgccgccaccgcctcgatcccgtccgatccaatccggttttttccttgataatgcgcgtggcaaccttgtcagttcaatccgtccgtgaagaacttatccttattttcgtttgcatcgcatcgcttctgcgtttgggggaaaaagggccgcgtccttgatgtctactatcgcgaccccgccgccgccatcggcggcgcaagagaaggccgccagccggaataagcgaaagtaccgtgccgagacaccatccacggagttgggcccattcgggctggagtacccactgacgacggactgcgtgggattcgagtttatgtcgcccgagaaggttgccatggcagccgcggtagccgccgctgagggtgtcagccttgacctcctccagaactcgtgcgaaaactgcaaggatctccaccctactgcggaggacttgttggagtgccagcgatatgtgaattggggtgacccaaatgagatgcagctggaggagatccttctcaagagtctggacaccacctttgacaatagtgtgagtctgatcaccacaatgggctactctgaggcggccgcacgtgctgctattatgcggacagctgcgcaatacgactggagggagagccttgctgggtttggagaggcggcggttgaggttctcaagacggaaggggacatgttgccaagggagggtgcctctgttgaagacatgaggaagattgaggaggctgtgcttggcagtatggttacgttggtaactgaggctcagccattcaacaccccaggcgatgtaatgtattgcttgcttatgtcggatatgaatgtggcaaatgcatgtgccatggactataacagtttctccctcccagctgtgtctgctcaagttattgcccaaccagtcgcgggaaactacgaacccggttcaggttcaaatttgtcagtttctattaccaacccgcagactggcgttactttccgtggaaaacttaccccagtgccacctggctcgtatggtgctataaaagctgattcatcaacggcacaagcaagcccgaatgtatcaaataccgaaccctcggtatcggacaagactcagtgtgtcatcccgaatattgagccaaaaaaacaccatgttcctatatgtgatcattcagaggaccaaccatttgttgctgctgcgacacaatctgtgaaaaatgacaagtcgtccccaagcaagagggggggctctaagagggactcctttcatcggcagaagttgacgaactatgataaaagttcccgagcattgggttccaaaggctctcttaggtctggcaagcaaagctcttcagccagtgcagtattggagaggaagtgcaggtcattttccgattctactactagcaacttgaagggctcatcaagagttgctaaagggtttgctgcaagcatatctggatcagaagtatcagttgacctttcctttactggtaccctttccccttctccatcatttgatgccaaggtagttagtaactcaaactcagcacctgctgctagcacagatctttcattggcattgtcctcaagtgatagtttaacaccatctttgagtcatgattccaatactgaggtagtggactctagtagcaaaattaatttttcatatgatgaagaacagaaggtctggatcccacaagataaaaaggatgaaattgtcttgattcttgtccagaggcagaaagaactgcaagcacatacacgtgactggacagactgggctcaacagaaagtgatgcaggtcgcacaccgacttgcaaaggagaaggatgaacttcagtcactcaggaaagagaaggaagaggcagaccgtctgcaagaagagaggcatcatttggaagagagtactcggaaaaagcttctagagatggagtctgcaatttctagggcaaatgctcagttggagaaggcagaagcttctgctcgcagacgtgaggttgagaatgcacaacttacgttacagatggaagctgcaaagcgacatgcagcagagtcagcaacaaacatttcagagcttgtaaagaaggatgagaacagtcgcaaaaggtctcagcgttggcaatctgacagagccctgttacaagaggatcttgcagcacaaaagagcaggttatctcgggtccaagaacaccttcagcatgctaaagagctaaaggatcaagtgcaggcaagatggaaacaagaggaagctggaaagattgaggtaattgcccttgtaacctcaaagaagaaagagagggagcaaattgagacctccatgaggtcagaagagaatttactgcatcttaaagcagcgaatgacacagaaagatacaagagtgagatccgtgctcttgagcagcgtattgcacagatgaaggtttctttggactcttcaaaggttgctgcccccaagtggggtgctgacaataaaacatatgcattgcatctttctgaagggagaaagaacagcagtgcccaaattttgtccaacatagcagtaccccaagatcccagttttgatgatatacagcgtgaccgggagtgcgtcatgtgcttgagtgaggagatgtccgtggtgttcctcccttgcgcccaccaggtggtctgtgccaaatgcagcgacctccatgagaagcaagggatgaaggaatgcccttcatgccggacccccatccagcgcagggtgcgcgcccgccccgcagtgtggtgcaggagaacggacgagctcgttgacggccccaacgcgtcccacatctcggcgctggcgctggaccggtgggagtcgcggctggaggacatcttcgccggccgcccgtacgacatgctcgacgccgtgaagggtcatatctagaagcagcagcatacagtaggaaggaaggaaggaaggaaggagtagcacctagcgacgcacatctgaatcccgaggcagatgtttgtg

SEQ ID NO: 26912 - DNA, 3061 bp, Zea Mays
catctctcctccccctctcatcagacatcagagcccttcttcctccgcctccccttcacccccatctcgccatacgcttatcgcccatcccctgatcaccagccgccgccgccaccgcctcgatcccgtccgatccaatccggttttttccttgataatgcgcgtggcaaccttgtcagttcaatccgtccgtgaagaacttatccttattttcgtttgcatcgcatcgcttctgcgtttgggggaaaaagggccgcgtccttgatgtctactatcgcgaccccgccgccgccatcggcggcgcaagagaaggccgccagccggaataagcgaaagtaccgtgccgagacaccatccacggagttgggcccattcgggctggagtacccactgacgacggactgcgtgggattcgagtttatgtcgcccgagaaggttgccatggcagccgcggtagccgccgctgagggtgtcagccttgacctcctccagaactcgtgcgaaaactgcaaggatctccaccctactgcggaggacttgttggagtgccagcgatatgtgaattggggtgacccaaatgagatgcagctggaggagatccttctcaagagtctggacaccacctttgacaatagtgtgagtctgatcaccacaatgggctactctgaggcggccgcacgtgctgctattatgcggacagctgcgcaatacgactggagggagagccttgctgggtttggagaggcggcggttgaggttctcaagacggaaggggacatgttgccaagggagggtgcctctgttgaagacatgaggaagattgaggaggctgtgcttggcagtatggttacgttggtaactgaggctcagccattcaacaccccaggcgatgtaatgtattgcttgcttatgtcggatatgaatgtggcaaatgcatgtgccatggactataacagtttctccctcccagctgtgtctgctcaagttattgcccaaccagtcgcgggaaactacgaacccggttcaggttcaaatttgtcagtttctattaccaacccgcagactggcgttactttccgtggaaaacttaccccagtgccacctggctcgtatggtgctataaaagctgattcatcaacggcacaagcaagcccgaatgtatcaaataccgaaccctcggtatcggacaagactcagtgtgtcatcccgaatattgagccaaaaaaacaccatgttcctatatgtgatcattcagaggaccaaccatttgttgctgctgcgacacaatctgtgaaaaatgacaagtcgtccccaagcaagagggggggctctaagagggactcctttcatcggcagaagttgacgaactatgataaaagttcccgagcattgggttccaaaggctctcttaggtctggcaagcaaagctcttcagccagtgcagtattggagaggaagtgcaggtcattttccgattctactactagcaacttgaagggctcatcaagagttgctaaagggtttgctgcaagcatatctggatcagaagtatcagttgacctttcctttactggtaccctttccccttctccatcatttgatgccaaggtagttagtaactcaaactcagcacctgctgctagcacagatctttcattggcattgtcctcaagtgatagtttaacaccatctttgagtcatgattccaatactgaggtagtggactctagtagcaaaattaatttttcatatgatgaagaacagaaggtctggatcccacaagataaaaaggatgaaattgtcttgattcttgtccagaggcagaaagaactgcaagcacatacacgtgactggacagactgggctcaacagaaagtgatgcaggtcgcacaccgacttgcaaaggagaaggatgaacttcagtcactcaggaaagagaaggaagaggcagaccgtctgcaagaagagaggcatcatttggaagagagtactcggaaaaagcttctagagatggagtctgcaatttctagggcaaatgctcagttggagaaggcagaagcttctgctcgcagacgtgaggttgagaatgcacaacttacgttacagatggaagctgcaaagcgacatgcagcagagtcagcaacaaacatttcagagcttgtaaagaaggatgagaacagtcgcaaaaggtctcagcgttggcaatctgacagagccctgttacaagaggatcttgcagcacaaaagagcaggttatctcgggtccaagaacaccttcagcatgctaaagagctaaaggatcaagtgcaggcaagatggaaacaagaggaagctggaaagattgaggtaattgcccttgtaacctcaaagaagaaagagagggagcaaattgagacctccatgaggtcagaagagaatttactgcatcttaaagcagcgaatgacacagaaagatacaagagtgagatccgtgctcttgagcagcgtattgcacagatgaaggtttctttggactcttcaaaggttgctgcccccaagtggggtgctgacaataaaacatatgcattgcatctttctgaagggagaaagaacagcagtgcccaaattttgtccaacatagcagtaccccaagatcccagttttgatgatatacagcgtgaccgggagtgcgtcatgtgcttgagtgaggagatgtccgtggtgttcctcccttgcgcccaccaggtggtctgtgccaaatgcagcgacctccatgagaagcaagggatgaaggaatgcccttcatgccggacccccatccagcgcagggtgcgcgcccgccccgcaggttgctagatttcacatataccatttggattttatcctgttttttttgttttaccttgattgctcagcttgagttgatggaagattggagagaataatgggggggatgtgagtggtgaaacttggacaataatacatcgttaaacatcaaacaagccccagcggacagtgggtactggttgggtttgttatatggatataccggccgcttctgaatgctttggttttgttgcac

SEQ ID NO: 26913 - DNA, 2402 bp, Zea Mays
catctctcctccccctctcatcagacatcagagcccttcttcctccgcctccccttcacccccatctcgccatacgcttatcgcccatcccctgatcaccagccgccgccgccaccgcctcgatcccgtccgatccaatccggttttttccttgataatgcgcgtggcaaccttgtcagttcaatccgtccgtgaagaacttatccttattttcgtttgcatcgcatcgcttctgcgtttgggggaaaaagggccgcgtccttgatgtctactatcgcgaccccgccgccgccatcggcggcgcaagagaaggccgccagccggaataagcgaaagtaccgtgccgagacaccatccacggagttgggcccattcgggctggagtacccactgacgacggactgcgtgggattcgagtttatgtcgcccgagaaggttgccatggcagccgcggtagccgccgctgagggtgtcagccttgacctcctccagaactcgtgcgaaaactgcaaggatctccaccctactgcggaggacttgttggagtgccagcgatatgtgaattggggtgacccaaatgagatgcagctggaggagatccttctcaagagtctggacaccacctttgacaatagtgtgagtctgatcaccacaatgggctactctgaggcggccgcacgtgctgctattatgcggacagctgcgcaatacgactggagggagagccttgctgggtttggagaggcggcggttgaggttctcaagacggaaggggacatgttgccaagggagggtgcctctgttgaagacatgaggaagattgaggaggctgtgcttggcagtatggttacgttggtaactgaggctcagccattcaacaccccaggcgatgtaatgtattgcttgcttatgtcggatatgaatgtggcaaatgcatgtgccatggactataacagtttctccctcccagctgtgtctgctcaagttattgcccaaccagtcgcgggaaactacgaacccggttcaggttcaaatttgtcagtttctattaccaacccgcagactggcgttactttccgtggaaaacttaccccagtgccacctggctcgtatggtgctataaaagctgattcatcaacggcacaagcaagcccgaatgtatcaaataccgaaccctcggtatcggacaagactcagtgtgtcatcccgaatattgagccaaaaaaacaccatgttcctatatgtgatcattcagaggaccaaccatttgttgctgctgcgacacaatctgtgaaaaatgacaagtcgtccccaagcaagagggggggctctaagagggactcctttcatcggcagaagttgacgaactatgataaaagttcccgagcattgggttccaaaggctctcttaggtctggcaagcaaagctcttcagccagtgcagtattggagaggaagtgcaggtcattttccgattctactactagcaacttgaagggctcatcaagagttgctaaagggtttgctgcaagcatatctggatcagaagtatcagttgacctttcctttactggtaccctttccccttctccatcatttgatgccaaggtagttagtaactcaaactcagcacctgctgctagcacagatctttcattggcattgtcctcaagtgatagtttaacaccatctttgagtcatgattccaatactgaggtagtggactctagtagcaaaattaatttttcatatgatgaagaacagaaggtctggatcccacaagataaaaaggatgaaattgtcttgattcttgtccagaggcagaaagaactgcaagcacatacacgtgactggacagactgggctcaacagaaagtgatgcaggtcgcacaccgacttgcaaaggagaaggatgaacttcagtcactcaggaaagagaaggaagaggcagaccgtctgcaagaagagaggcatcatttggaagagagtactcggaaaaagcttctagagatggagtctgcaatttctagggcaaatgctcagttggagaaggcagaagcttctgctcgcagacgtgaggttgagaatgcacaacttacgttacagatggaagctgcaaagcgacatgcagcagagtcagcaacaaacatttcagagcttgtaaagaaggatgagaacagtcgcaaaaggtctcagcgttggcaatctgacagagccctgttacaagaggatcttgcagcacaaaagagcaggttatctcgggtccaagaacaccttcagcatgctaaagagctaaaggatcaagtgcagatgttgggatggaaattacgtagacacaagaatcacttgatacttctttagattagcaagtcaagacactgaataatagtacagaagctggc

SEQ ID NO: 26914 - DNA, 2348 bp, Zea Mays
catctctcctccccctctcatcagacatcagagcccttcttcctccgcctccccttcacccccatctcgccatacgcttatcgcccatcccctgatcaccagccgccgccgccaccgcctcgatcccgtccgatccaatccggttttttccttgataatgcgcgtggcaaccttgtcagttcaatccgtccgtgaagaacttatccttattttcgtttgcatcgcatcgcttctgcgtttgggggaaaaagggccgcgtccttgatgtctactatcgcgaccccgccgccgccatcggcggcgcaagagaaggccgccagccggaataagcgaaagtaccgtgccgagacaccatccacggagttgggcccattcgggctggagtacccactgacgacggactgcgtgggattcgagtttatgtcgcccgagaaggttgccatggcagccgcggtagccgccgctgagggtgtcagccttgacctcctccagaactcgtgcgaaaactgcaaggatctccaccctactgcggaggacttgttggagtgccagcgatatgtgaattggggtgacccaaatgagatgcagctggaggagatccttctcaagagtctggacaccacctttgacaatagtgtgagtctgatcaccacaatgggctactctgaggcggccgcacgtgctgctattatgcggacagctgcgcaatacgactggagggagagccttgctgggtttggagaggcggcggttgaggttctcaagacggaaggggacatgttgccaagggagggtgcctctgttgaagacatgaggaagattgaggaggctgtgcttggcagtatggttacgttggtaactgaggctcagccattcaacaccccaggcgatgtaatgtattgcttgcttatgtcggatatgaatgtggcaaatgcatgtgccatggactataacagtttctccctcccagctgtgtctgctcaagttattgcccaaccagtcgcgggaaactacgaacccggttcaggttcaaatttgtcagtttctattaccaacccgcagactggcgttactttccgtggaaaacttaccccagtgccacctggctcgtatggtgctataaaagctgattcatcaacggcacaagcaagcccgaatgtatcaaataccgaaccctcggtatcggacaagactcagtgtgtcatcccgaatattgagccaaaaaaacaccatgttcctatatgtgatcattcagaggaccaaccatttgttgctgctgcgacacaatctgtgaaaaatgacaagtcgtccccaagcaagagggggggctctaagagggactcctttcatcggcagaagttgacgaactatgataaaagttcccgagcattgggttccaaaggctctcttaggtctggcaagcaaagctcttcagccagtgcagtattggagaggaagtgcaggtcattttccgattctactactagcaacttgaagggctcatcaagagttgctaaagggtttgctgcaagcatatctggatcagaagtatcagttgacctttcctttactggtaccctttccccttctccatcatttgatgccaaggtagttagtaactcaaactcagcacctgctgctagcacagatctttcattggcattgtcctcaagtgatagtttaacaccatctttgagtcatgattccaatactgaggtagtggactctagtagcaaaattaatttttcatatgatgaagaacagaaggtctggatcccacaagataaaaaggatgaaattgtcttgattcttgtccagaggcagaaagaactgcaagcacatacacgtgactggacagactgggctcaacagaaagtgatgcaggtcgcacaccgacttgcaaaggagaaggatgaacttcagtcactcaggaaagagaaggaagaggcagaccgtctgcaagaagagaggcatcatttggaagagagtactcggaaaaagcttctagagatggagtctgcaatttctagggcaaatgctcagttggagaaggcagaagcttctgctcgcagacgtgaggttgagaatgcacaacttacgttacagatggaagctgcaaagcgacatgcagcagagtcagcaacaaacatttcagagcttgtaaagaaggatgagaacagtcgcaaaaggtctcagcgttggcaatctgacagagccctgttacaagaggatcttgcagcacaaaagagcaggttatctcgggtccaagaacaccttcagcatgctaaagagctaaaggatcaagtgcaggccattgtctccattccatagcacctttatggtttctc

SEQ ID NO: 26915 - DNA, 2505 bp, Zea Mays
agtgactcgtgtgactcggcgaggcctacatagcgaggcacgcctcctgcagtcctcctcctcgtctagtcatctctcctccccctctcatcagacatcagagcccttcttcctccgcctccccttcacccccatctcgccatacgcttatcgcccatcccctgatcaccagccgccgccgccaccgcctcgatcccgtccgatccaatccggttttttccttgataatgcgcgtggcaaccttgtcagttcaatccgtccgtgaagaacttatccttattttcgtttgcatcgcatcgcttctgcgtttgggggaaaaagggccgcgtccttgatgtctactatcgcgaccccgccgccgccatcggcggcgcaagagaaggccgccagccggaataagcgaaagtaccgtgccgagacaccatccacggagttgggcccattcgggctggagtacccactgacgacggactgcgtgggattcgagtttatgtcgcccgagaaggttgccatggcagccgcggtagccgccgctgagggtgtcagccttgacctcctccagaactcgtgcgaaaactgcaaggatctccaccctactgcggaggacttgttggagtgccagcgatatgtgaattggggtgacccaaatgagatgcagctggaggagatccttctcaagagtctggacaccacctttgacaatagtgtgagtctgatcaccacaatgggctactctgaggcggccgcacgtgctgctattatgcggacagctgcgcaatacgactggagggagagccttgctgggtttggagaggcggcggttgaggttctcaagacggaaggggacatgttgccaagggagggtgcctctgttgaagacatgaggaagattgaggaggctgtgcttggcagtatggttacgttggtaactgaggctcagccattcaacaccccaggcgatgtaatgtattgcttgcttatgtcggatatgaatgtggcaaatgcatgtgccatggactataacagtttctccctcccagctgtgtctgctcaagttattgcccaaccagtcgcgggaaactacgaacccggttcaggttcaaatttgtcagtttctattaccaacccgcagactggcgttactttccgtggaaaacttaccccagtgccacctggctcgtatggtgctataaaagctgattcatcaacggcacaagcaagcccgaatgtatcaaataccgaaccctcggtatcggacaagactcagtgtgtcatcccgaatattgagccaaaaaaacaccatgttcctatatgtgatcattcagaggaccaaccatttgttgctgctgcgacacaatctgtgaaaaatgacaagtcgtccccaagcaagagggggggctctaagagggactcctttcatcggcagaagttgacgaactatgataaaagttcccgagcattgggttccaaaggctctcttaggtctggcaagcaaagctcttcagccagtgcagtattggagaggaagtgcaggtcattttccgattctactactagcaacttgaagggctcatcaagagttgctaaagggtttgctgcaagcatatctggatcagaagtatcagttgacctttcctttactggtaccctttccccttctccatcatttgatgccaaggtagttagtaactcaaactcagcacctgctgctagcacagatctttcattggcattgtcctcaagtgatagtttaacaccatctttgagtcatgattccaatactgaggtagtggactctagtagcaaaattaatttttcatatgatgaagaacagaaggtctggatcccacaagataaaaaggatgaaattgtcttgattcttgtccagaggcagaaagaactgcaagcacatacacgtgactggacagactgggctcaacagaaagtgatgcaggtcgcacaccgacttgcaaaggagaaggatgaacttcagtcactcaggaaagagaaggaagaggcagaccgtctgcaagaagagaggcatcatttggaagagagtactcggaaaaagcttctagagatggagtctgcaatttctagggcaaatgctcagttggagaaggcagaagcttctgctcgcagacgtgaggttgagaatgcacaacttacgttacagatggaagctgcaaagcgacatgcagcagagtcagcaacaaacatttcagagcttgtaaagaaggatgagaacagtcgcaaaaggtctcagcgttggcaatctgacagagccctgttacaagaggatcttgcagcacaaaagagcaggttatctcgggtccaagaacaccttcagcatgctaaagagctaaaggatcaagtgcagagccttcaaaattcccgggctggttctgtctcaagccacctaactaacccaggtagaggagtaagctgcaaacttttgcatgtagaagtttctggaagaagtttggagctttatatggcatttgc

SEQ ID NO: 26916 - DNA, 2372 bp, Zea Mays
catctctcctccccctctcatcagacatcagagcccttcttcctccgcctccccttcacccccatctcgccatacgcttatcgcccatcccctgatcaccagccgccgccgccaccgcctcgatcccgtccgatccaatccggttttttccttgataatgcgcgtggcaaccttgtcagttcaatccgtccgtgaagaacttatccttattttcgtttgcatcgcatcgcttctgcgtttgggggaaaaagggccgcgtccttgatgtctactatcgcgaccccgccgccgccatcggcggcgcaagagaaggccgccagccggaataagcgaaagtaccgtgccgagacaccatccacggagttgggcccattcgggctggagtacccactgacgacggactgcgtgggattcgagtttatgtcgcccgagaaggttgccatggcagccgcggtagccgccgctgagggtgtcagccttgacctcctccagaactcgtgcgaaaactgcaaggatctccaccctactgcggaggacttgttggagtgccagcgatatgtgaattggggtgacccaaatgagatgcagctggaggagatccttctcaagagtctggacaccacctttgacaatagtgtgagtctgatcaccacaatgggctactctgaggcggccgcacgtgctgctattatgcggacagctgcgcaatacgactggagggagagccttgctgggtttggagaggcggcggttgaggttctcaagacggaaggggacatgttgccaagggagggtgcctctgttgaagacatgaggaagattgaggaggctgtgcttggcagtatggttacgttggtaactgaggctcagccattcaacaccccaggcgatgtaatgtattgcttgcttatgtcggatatgaatgtggcaaatgcatgtgccatggactataacagtttctccctcccagctgtgtctgctcaagttattgcccaaccagtcgcgggaaactacgaacccggttcaggttcaaatttgtcagtttctattaccaacccgcagactggcgttactttccgtggaaaacttaccccagtgccacctggctcgtatggtgctataaaagctgattcatcaacggcacaagcaagcccgaatgtatcaaataccgaaccctcggtatcggacaagactcagtgtgtcatcccgaatattgagccaaaaaaacaccatgttcctatatgtgatcattcagaggaccaaccatttgttgctgctgcgacacaatctgtgaaaaatgacaagtcgtccccaagcaagagggggggctctaagagggactcctttcatcggcagaagttgacgaactatgataaaagttcccgagcattgggttccaaaggctctcttaggtctggcaagcaaagctcttcagccagtgcagtattggagaggaagtgcaggtcattttccgattctactactagcaacttgaagggctcatcaagagttgctaaagggtttgctgcaagcatatctggatcagaagtatcagttgacctttcctttactggtaccctttccccttctccatcatttgatgccaaggtagttagtaactcaaactcagcacctgctgctagcacagatctttcattggcattgtcctcaagtgatagtttaacaccatctttgagtcatgattccaatactgaggtagtggactctagtagcaaaattaatttttcatatgatgaagaacagaaggtctggatcccacaagataaaaaggatgaaattgtcttgattcttgtccagaggcagaaagaactgcaagcacatacacgtgactggacagactgggctcaacagaaagtgatgcaggtcgcacaccgacttgcaaaggagaaggatgaacttcagtcactcaggaaagagaaggaagaggcagaccgtctgcaagaagagaggcatcatttggaagagagtactcggaaaaagcttctagagatggagtctgcaatttctagggcaaatgctcagttggagaaggcagaagcttctgctcgcagacgtgaggttgagaatgcacaacttacgttacagatggaagctgcaaagcgacatgcagcagagtcagcaacaaacatttcagagcttgtaaagaaggatgagaacagtcgcaaaaggtctcagcgttggcaatctgacagagccctgttacaagaggatcttgcagcacaaaagagcaggttatctcgggtccaagaacaccttcagcatgctaaagagctaaaggatcaagtgcagttcatggaaatttctttactgttattgtatttgactctattaggctgcgtgctgaatagaat

SEQ ID NO: 26917 - DNA, 2250 bp, Zea Mays
gctccttttgctagcccatagaaaaggtccataaataaatgcacacgtacatccatacgccaccccagctcctctttgtccttcagatcagatctctcagaagagtagagtgcctgccagtgccatgtcgctgccagtcacacagcccattgcatgagcagaagggcaaggaagcttgggagggtgtaagctgaggatcggtgacgtgcaaatgcggccacggggaacctctctgcaacaaagctccgcatctgctctcggcgacggcgatgcggcgctaccgaagaagaagaggaaccggccaggcaatccgaaacctgatgcggaggtgatcgcgctgtcgcctcgaacgctgctggcgacgaaccggttcgtgtgcgaggtgtgcagcaagggcttccagcgggaccagaacctgcagctgcacctgcggggccacaacatgccgtggaagctgaagcagaaggaccccaaggacgcgcgccggcgggtgtacctgtgcccggagccgacgtgcgtgcaccacagcccgtcccgggcgctgggcgacctcacggggatcaagaagcactactgccgcaagcacggcgagaagaagttcaggtgcgacaggtgcagcaagcgctacgccgtcgagtccgactggaaggcgcacggcaagacctgcggcgcccgcgagtatcgctgccactgcaacgccctcttctccaggaaagacaacttcatcacccaccgcgctacctgcgacgcagcagttcgtgggaccgcccagaagccaccgctggtcgccggcctctacgtcggctcaggcagcgatgataggctcgggctctccgacgccgccgcccagatgcatggcttcgcagatcaaggccagtcctcttcagcagcagaagcctcacagtttgaccatgtcatgccatcgtactcgggctcctccatgttccgttctcaggcgtcagacttctcgttgtctttcttcctcggcggcggcactcctcttatcgaacaagacctgtccgacaacggtggtgatctctccgaaggcagccagggccctctgctccatggcaaggcgcccttgcatggcgtgatgacgcatctccccgagcagcagtatcagccaaacagcggcaacgccaacgttaacctcctggacattgggttcttctctggcaacagtggtggcacgtctggcagccagggccctctgctccacggcaaggagcccttccatagccatgacctgacgcaacttcccgagcagcagcaccagccaggcagcagcaacgcccgcgtcaacctccctaaccttggggtcttctctggcaacagcggtggatggcccggaagcagccatcaggacgcgcgccttgtcatccaagaccaactcaacggcggcagcagcagcaacaccgagcatggtaacgggatggcgtccatcggaagccacttcggcggaggcttcgtcccttccctgcacaactcatctccgtcggccgggctctcagcgacggcgctcctgatgaaggcggctcagatgggctcgacgacgtcgagcaccacccacaaccccaacggccccagcgcgctgctccgcgcagccggcttcgcaggcactgccagcgtccgggagactagtagcagggcagcggaagaagagaagtctcacgaggcatatttccatgatctcatcatgaactcactgccattaacgggaggaggcaccggcggcctctcagggttggcgggcgtggacgacggcaatgtgagcacaagggacttccttggcgtcggcagggacgacgcgacggcaccgcagggcctccacggcatgggcgccccgaatccgacccagatgaaatggtacatgtgatggatcaggtcggaaacgcgaaaagaggaagacaacaagaagatgcaagctaagaagggagtcaataaacagaacagaagatcgtgcactagctagtgagtggcgatcagagagatcgagaaaacttaatctagttttgtttcgtggattagttcacttttctcatatgccgcccgccatgattgatatggctaatagtaacagggctgcaagcaatgcagctgctgaacttgttcattgcttttatttcggtacaattttgtggtgtttttcaagtgttcactgttttgggttggagagatggtggtggtctctgcagatgtcgagttcattatgtagaggccggaccagaccagaatttaagcacaatgttt

SEQ ID NO: 26918 - DNA, 581 bp, Zea Mays
cttggattcaatctaatttaatgcagtctaccgaattttatcattgtggctgatgtacttcgggaagcaatctaaagggcaaggaattcaacttgacaatgcactggcacattatgccaaagactggcaaaatgtttgcagataagatagtcatgacaggctatcagcttcctgagcagtacagatagtcatatagatcatgaacagtagcagaggcctgcaagaagtgatagttgcatagctgatgctgaactttttgttctaatctagttggaacatgtaatcttataagcttgtacttaagctgaaccaggcaaaactaagttgcaaatttgagatatttattgctcaacttttaagaataggtctcggttaatggtgagaagacttttcactgagccaaaggtcttgggtttcgaactttcgatgcagtctctgagcaaaatgcagggataagacttgtcttggttcttcctcgaaccatactcatgtgggagccctcagtaatgggtctgtttatttattgctcaactttgctttgcctacaaatcttgattctaaacttgaaggtatgcgttgca

SEQ ID NO: 26919 - DNA, 728 bp, Zea Mays
gtcaggtcagcatgacgctgaacatttcggctgacctttcatctcttttcacgtggaacacaaaacaggtatttgtttttgtggcagcagagtatgagactcgacaaaatgctttaaatcaagtttccctttgggatggcattatacctgcaaaggagcatgccaagtttttgatccatacaacaaataagtacagatttattgaccagggaagcaatctaaagggcaaggaattcaacttgacaatgcactggcacattatgccaaagactggcaaaatgtttgcagataagatagtcatgacaggctatcagcttcctgagcagtacagatagtcatatagatcatgaacagtagcagaggcctgcaagaagtgatagttgcatagctgatgctgaactttttgttctaatctagttggaacatgtaatcttataagcttgtacttaagctgaaccaggcaaaactaagttgcaaatttgagatatttattgctcaacttttaagaataggtctcggttaatggtgagaagacttttcactgagccaaaggtcttgggtttcgaactttcgatgcagtctctgagcaaaatgcagggataagacttgtcttggttcttcctcgaaccatactcatgtgggagccctcagtaatgggtctgtttatttattgctcaactttgctttgcctacaaatcttgattctaaacttgaaggtatgcgttgca

SEQ ID NO: 26920 - DNA, 1211 bp, Zea Mays
gggggatctgcactgcacgggctaacttctctctcttccggaagcacttcccgaaaaaaggaagacagagaaggaaacggcagtgaagtcgccggcgccgccgcgacaggaggaaggagggagtagcagcggcaggggaggtccggcgatctcggctgctgtggcgcggtaagggaggaagcggagccgcgacaggatgcactcgtttgggcaccgcgccaacgcggtggcaacgtttgcggtcaccatactggccgcgatgtgcttcgccgcctccttctccgacaattttaacaccctgacacccaccgcatccgtcaagatcttgaatataaactggttccagaaggaggccaacggcaatgacgaggtcagcatgacgctgaacatttcggctgacctttcatctcttttcacgtggaacacaaaacaggtatttgtttttgtggcagcagagtatgagactcgacaaaatgctttaaatcaagtttccctttgggatggcattatacctgcaaaggagcatgccaagtttttgatccatacaacaaataagtacagatttattgaccaggttgagccttactggtgtaatggacatccattattttggttgataccaatatcctttatttgtgctaggataggtttataatggtctatattctgttcattgattcgatcatcaatgtggaagcaatctaaagggcaaggaattcaacttgacaatgcactggcacattatgccaaagactggcaaaatgtttgcagataagatagtcatgacaggctatcagcttcctgagcagtacagatagtcatatagatcatgaacagtagcagaggcctgcaagaagtgatagttgcatagctgatgctgaactttttgttctaatctagttggaacatgtaatcttataagcttgtacttaagctgaaccaggcaaaactaagttgcaaatttgagatatttattgctcaacttttaagaataggtctcggttaatggtgagaagacttttcactgagccaaaggtcttgggtttcgaactttcgatgcagtctctgagcaaaatgcagggataagacttgtcttggttcttcctcgaaccatactcatgtgggagccctcagtaatgggtctgtttatttattgctcaactttgctttgcctacaaatcttgattctaaacttgaaggtatgcgttgca

SEQ ID NO: 26921 - DNA, 1823 bp, Zea Mays
ggctcggcctcgttcctcgcgcgtactgccgcttgccggctaccagaaaaatggccgcggcggcggcggcggctaggcgtgccgctggccttctccctctcctcctatcctcgcggtccggtgctcgcatacccctccaccgggctgtatcccagatccctccgccttgctcctatcgcctactctcgcagcaagccaagcccttctccgcctctgcctctgcctctgcctcagcctccgcgtcgaatggcgcgaccgcggaaagaacccgtgagctgcatctgtacaacacgaagtcgcggaagaaggagcagtttcggccgcgcgatccaggcggggaggtcggcatgtacgtctgcggcatcactccctacgacgacagtcacatcggccatgcccgcgcatacgtagcctttgacgtcgtctacagataatcgcaagagcaaatcagctgggggaagatccttttaacttaagtaaaaggttctctgatgacttcttgttagacatggccaatcttcaatgtttaccaccatctgtggagccccgtgtttcagatcatattgatgagattataaatatgattaaacaggccgcaaaagatggggagccatggtgggatagcccatggggcccaggaaggccaggatggcacatagaatgcagtgccatgagtgcacattatttgggtcattcttttgacatacatggtggtggggaggatctcatctttccacaccatgagaatgagattgctcagagccgtgcggcatgttgtgacagtaccataaattactggatacacaatggttttgtcaatgtaaatagccaaaaaatgtctaaatcgcttggtaattttgtcaccatacgaaaggttatagagatgtaccatccgctggctttgagaatgttcttacttggcacacactacaggtccccaattaactacacaatagaacaactcaatgtcacatcagacagattgtactacacatatcagaccttgcttgattgtgaagagatttgtcagcagcaacaaagcaacactggaaattcattgcctgctaataccttaaattacatccaaaaacttcatgaggaatttgagacctcaatgtcagatgatcttcacacttcagtggcattggctgctatttctgagccattgaaagttatgaatgatctgttgcacactcgtaagggaaagaagcaggacaaaaggctggaatctctttctgccttagaagagaaaataagagtagttctctctgttctaggattgctaccttcaagttatcatgaggctttgcaacagctgcgggataaggcactgagacgagcttccatcaccgaggagcttgtggtgcagaagattgaagagaggactgcagcaaggaaggcaaagcagtatgaaaaatccgacgagatccggaaagaactggctgccataggaattgccctcatggatggccccgacggaaccacttggagaccatctttgccaattttagaggaagcggtggttgcgaaaacatgatctgtgcaagggattccaatacgacccatggacaccagttctagtcggtaatcatggatttgctatatgtgacgaacttgttcgtttgactttcattcataccggcttgtaatgcttctataatgttttttcataattctctgctcccattagatctatagtagttactagctgaatgcacgtgtgttgtaatgaaaatatataatatgagtatactatgataacttatatacaaaatgtatgttataccgttatgagaaaatgtttcataatcaatttatgattc

SEQ ID NO: 26922 - DNA, 1887 bp, Zea Mays
ggctcggcctcgttcctcgcgcgtactgccgcttgccggctaccagaaaaatggccgcggcggcggcggcggctaggcgtgccgctggccttctccctctcctcctatcctcgcggtccggtgctcgcatacccctccaccgggctgtatcccagatccctccgccttgctcctatcgcctactctcgcagcaagccaagcccttctccgcctctgcctctgcctctgcctcagcctccgcgtcgaatggcgcgaccgcggaaagaacccgtgagctgcatctgtacaacacgaagtcgcggaagaaggagcagtttcggccgcgcgatccaggcggggaggtcggcatgtacgtctgcggcatcactccctacgacgacagtcacatcggccatgcccgcgcatacgtagcctttgacgtcgtctacaggtacttgcgctatttggactatgaagttcgctatgttcggaacttcaccgacattgatgacaagataatcgcaagagcaaatcagctgggggaagatccttttaacttaagtaaaaggttctctgatgacttcttgttagacatggccaatcttcaatgtttaccaccatctgtggagccccgtgtttcagatcatattgatgagattataaatatgattaaacaggccgcaaaagatggggagccatggtgggatagcccatggggcccaggaaggccaggatggcacatagaatgcagtgccatgagtgcacattatttgggtcattcttttgacatacatggtggtggggaggatctcatctttccacaccatgagaatgagattgctcagagccgtgcggcatgttgtgacagtaccataaattactggatacacaatggttttgtcaatgtaaatagccaaaaaatgtctaaatcgcttggtaattttgtcaccatacgaaaggttatagagatgtaccatccgctggctttgagaatgttcttacttggcacacactacaggtccccaattaactacacaatagaacaactcaatgtcacatcagacagattgtactacacatatcagaccttgcttgattgtgaagagatttgtcagcagcaacaaagcaacactggaaattcattgcctgctaataccttaaattacatccaaaaacttcatgaggaatttgagacctcaatgtcagatgatcttcacacttcagtggcattggctgctatttctgagccattgaaagttatgaatgatctgttgcacactcgtaagggaaagaagcaggacaaaaggctggaatctctttctgccttagaagagaaaataagagtagttctctctgttctaggattgctaccttcaagttatcatgaggctttgcaacagctgcgggataaggcactgagacgagcttccatcaccgaggagcttgtggtgcagaagattgaagagaggactgcagcaaggaaggcaaagcagtatgaaaaatccgacgagatccggaaagaactggctgccataggaattgccctcatggatggccccgacggaaccacttggagaccatctttgccaattttagaggaagcggtggttgcgaaaacatgatctgtgcaagggattccaatacgacccatggacaccagttctagtcggtaatcatggatttgctatatgtgacgaacttgttcgtttgactttcattcataccggcttgtaatgcttctataatgttttttcataattctctgctcccattagatctatagtagttactagctgaatgcacgtgtgttgtaatgaaaatatataatatgagtatactatgataacttatatacaaaatgtatgttataccgttatgagaaaatgtttcataatcaatttatgattc

SEQ ID NO: 26923 - DNA, 1977 bp, Zea Mays
ggctcggcctcgttcctcgcgcgtactgccgcttgccggctaccagaaaaatggccgcggcggcggcggcggctaggcgtgccgctggccttctccctctcctcctatcctcgcggtccggtgctcgcatacccctccaccgggctgtatcccagatccctccgccttgctcctatcgcctactctcgcagcaagccaagcccttctccgcctctgcctctgcctctgcctcagcctccgcgtcgaatggcgcgaccgcggaaagaacccgtgagctgcatctgtacaacacgaagtcgcggaagaaggagcagtttcggccgcgcgatccaggcggggaggtcggcatgtacttgcgctatttggactatgaagttcgctatgttcggaacttcaccgacattgatgacaagataatcgcaagagcaaatcagctgggggaagatccttttaacttaagtaaaaggttctctgatgacttcttgttagacatggccaatcttcaatgtttaccaccatctgtggagccccgtgtttcagatcatattgatgagattataaatatgattaaacagatccttgataatagttgcgcatatgtagtgggtggggatgtttatttctctgtagacagttttcctgactacggagaattatctggtcgaaaattagatgataatagagctggtgaaagggtttctgttgatgagaggaagagaaatccagctgattttgctctatggaaggccgcaaaagatggggagccatggtgggatagcccatggggcccaggaaggccaggatggcacatagaatgcagtgccatgagtgcacattatttgggtcattcttttgacatacatggtggtggggaggatctcatctttccacaccatgagaatgagattgctcagagccgtgcggcatgttgtgacagtaccataaattactggatacacaatggttttgtcaatgtaaatagccaaaaaatgtctaaatcgcttggtaattttgtcaccatacgaaaggttatagagatgtaccatccgctggctttgagaatgttcttacttggcacacactacaggtccccaattaactacacaatagaacaactcaatgtcacatcagacagattgtactacacatatcagaccttgcttgattgtgaagagatttgtcagcagcaacaaagcaacactggaaattcattgcctgctaataccttaaattacatccaaaaacttcatgaggaatttgagacctcaatgtcagatgatcttcacacttcagtggcattggctgctatttctgagccattgaaagttatgaatgatctgttgcacactcgtaagggaaagaagcaggacaaaaggctggaatctctttctgccttagaagagaaaataagagtagttctctctgttctaggattgctaccttcaagttatcatgaggctttgcaacagctgcgggataaggcactgagacgagcttccatcaccgaggagcttgtggtgcagaagattgaagagaggactgcagcaaggaaggcaaagcagtatgaaaaatccgacgagatccggaaagaactggctgccataggaattgccctcatggatggccccgacggaaccacttggagaccatctttgccaattttagaggaagcggtggttgcgaaaacatgatctgtgcaagggattccaatacgacccatggacaccagttctagtcggtaatcatggatttgctatatgtgacgaacttgttcgtttgactttcattcataccggcttgtaatgcttctataatgttttttcataattctctgctcccattagatctatagtagttactagctgaatgcacgtgtgttgtaatgaaaatatataatatgagtatactatgataacttatatacaaaatgtatgttataccgttatgagaaaatgtttcataatcaatttatgattc

SEQ ID NO: 26924 - DNA, 2030 bp, Zea Mays
ggctcggcctcgttcctcgcgcgtactgccgcttgccggctaccagaaaaatggccgcggcggcggcggcggctaggcgtgccgctggccttctccctctcctcctatcctcgcggtccggtgctcgcatacccctccaccgggctgtatcccagatccctccgccttgctcctatcgcctactctcgcagcaagccaagcccttctccgcctctgcctctgcctctgcctcagcctccgcgtcgaatggcgcgaccgcggaaagaacccgtgagctgcatctgtacaacacgaagtcgcggaagaaggagcagtttcggccgcgcgatccaggcggggaggtcggcatgtacgtctgcggcatcactccctacgacgacagtcacatcggccatgcccgcgcatacgtagcctttgacgtcgtctacaggtacttgcgctatttggactatgaagttcgctatgttcggaacttcaccgacattgatgacaagataatcgcaagagcaaatcagctgggggaagatccttttaacttaagtaaaaggttctctgatgacttcttgttagacatggccaatcttcaatgtttaccaccatctgtggagccccgtgtttcagatcatattgatgagattataaatatgattaaacagtgggtggggatgtttatttctctgtagacagttttcctgactacggagaattatctggtcgaaaattagatgataatagagctggtgaaagggtttctgttgatgagaggaagagaaatccagctgattttgctctatggaaggccgcaaaagatggggagccatggtgggatagcccatggggcccaggaaggccaggatggcacatagaatgcagtgccatgagtgcacattatttgggtcattcttttgacatacatggtggtggggaggatctcatctttccacaccatgagaatgagattgctcagagccgtgcggcatgttgtgacagtaccataaattactggatacacaatggttttgtcaatgtaaatagccaaaaaatgtctaaatcgcttggtaattttgtcaccatacgaaaggttatagagatgtaccatccgctggctttgagaatgttcttacttggcacacactacaggtccccaattaactacacaatagaacaactcaatgtcacatcagacagattgtactacacatatcagaccttgcttgattgtgaagagatttgtcagcagcaacaaagcaacactggaaattcattgcctgctaataccttaaattacatccaaaaacttcatgaggaatttgagacctcaatgtcagatgatcttcacacttcagtggcattggctgctatttctgagccattgaaagttatgaatgatctgttgcacactcgtaagggaaagaagcaggacaaaaggctggaatctctttctgccttagaagagaaaataagagtagttctctctgttctaggattgctaccttcaagttatcatgaggctttgcaacagctgcgggataaggcactgagacgagcttccatcaccgaggagcttgtggtgcagaagattgaagagaggactgcagcaaggaaggcaaagcagtatgaaaaatccgacgagatccggaaagaactggctgccataggaattgccctcatggatggccccgacggaaccacttggagaccatctttgccaattttagaggaagcggtggttgcgaaaacatgatctgtgcaagggattccaatacgacccatggacaccagttctagtcggtaatcatggatttgctatatgtgacgaacttgttcgtttgactttcattcataccggcttgtaatgcttctataatgttttttcataattctctgctcccattagatctatagtagttactagctgaatgcacgtgtgttgtaatgaaaatatataatatgagtatactatgataacttatatacaaaatgtatgttataccgttatgagaaaatgtttcataatcaatttatgattc

SEQ ID NO: 26925 - DNA, 4190 bp, Zea Mays
atctatcatagtgagtttgaggacattggaccgcaccctgcagaggccaagcgtcgaacacatggcgtgcaccttcctccgccgcgcgttctccctcaccgccgccggcacccacgcgaccccccgagttgccgccgccttcgcttccacttcctcctcatcctccgtcgtcgtgcctctgcgctccccactagaccaccgtcttctccgccacctccgctccgagatcacctacctcgcggagcgccgccctccccacgtgccgccgagtagcttcaagtcgttcgccgtggaggaccgcccgggggagcagtgggtgcgcctccgcgccagcgcgggagggggaggcgaggaggtgaaggtcgaggccaccatgttcgacggcgctgcggagcctgtcccggacgacgcgcccctcttccgccgcgtggagtcgctcgagcgcgggccccgcctccacctcagcctcatcgtcgaggtcgcccggggcgaccgcgtcctcggcttcgtctgctccgcctggcccgacgacctcgccgtccgccacgtgctcacgctcgcagctggcggtggcagcagtggtggtcgtcgtggtgggcgcgatttcgagaaactggggggcgaggagagggaagcggtgacgaagttcttgaaggagagggaggtggacgccgagctcgccggattcttgcacgactacatggcaaacaaggagaagatggagctgctccggtggttgaagactgtcgaatcattccttaacaagtaggataagatcgcacacagaagacaccgctgatgttactgcctagtttgggaacgggtacgctccaacaacaactggtgacgatctcctgcagtctctgtgatcatccgcatctacccctctgctgacaattgtgtgctgaagatgtttgtttttaatcagcttagatagctcagcgcacagcgctcttggaaactggtgatctgaatatcctactggtactttcatttctttgtgataagattgttctcaacggtgtatcttttaagatacaccccattgggtttttttcccttttgcaatataccaaatctcattttggatttccaaccagttgctatgtgcgtgcttagagtaaaaatctgctcttctgaactctgacggttcaatgtcgaaggaggagctgtaacggttggattaagcggggcgacggctcacatttcagaagccttcacatgatggcattgacacacctcaatccaacagtcgtgccactgccaagctccatcgcgccacgcgtgatgtacgtgattatgatctcactgactagcgggcccgcgtacagattcaaccctcccctcccctcaacggctagttccacctccgcatccgttgggacaaaagggggaaaaaccagagggaacttcaccagccaccaaagtaccacacctctcctctctcaagaaccaccgcactctctctagcaggcctctgttttgtactgtaagcaggcctctgtagagtttgcaaaatgaaatttgaaatagaaaataaatactgtatattatattgtttgtaaagtgaagtttgaaacaggagcgaaaaggtagatagtcactcagcttctcgagagatcgccaaagacgcggcgccggcagcaagttctgcggcgatggggcacaagtacacgccgacgtactactcgggcctgcaggacaccatcgcgtcgctctgcaagtccatcctgccctccttccgcgtgggccggcggctcacctccgaccaggccgcggcgcggcgccacgccgagcagctcaagtggcagcaggagtccttccaccgcatcctccaccttgccgcgctccaccgcgagggcatcgtcccggcccacgacgtcgccgccttccgcggcaccatgctcgcggcgctcgtcgcgccgccgccgcagcaccccgagcagcccgcggtgctccgggacaagctcctcttcctccaggagctactctacgccaagtgcgtctccgcggcggagtacaacgcgtccaaggcgcccctcgtgcggcggctcgccgcgttcggcggcggcgtcgtcgagtgccccgatgccgaggcctcggccgaggagtggtcggagatcgacctccgtgacccgcctcctcccgccggcgcggcgtcctccgacaaaccgaagcacaaggccttcatcacgccgtgggagagcagatccaggaaggatcaggacgcgaaccgcagcgcatcaaggccgccgctggccccggtggatcataacaacgccaacaacgcgtcggtcctcatgcccgagtattctccgtcggaagcggtgccctgcaggaaggcggagaaggggaggaggaggcatctggcggggatgttccacagtggcggcaatggcaccgagaacaaggagcctgcgggggaggaagggggggtcgacgagaaagcgacggtgaaatgtaagaagaaaagctcgtggggattcgatggcatcaagaagtggaagaaagctggcgcctgtaataacaatggcgaggcggcagccaccggtgagcagccgcagcgtactcctccgcgctcatcgtacagcgagtgccaattggaggcgagccccatggctgcatctggcccggatgccaagagggccaagacgaggctgcactccagcacggatgatgactgcttctgagctgctgcgtgataaggaattactgaagtgaaggtcctggtggaaaacacaaagaaagaactctgttattggtcatttttttttatatattctgtttcccaaagatggatggctcttggatttgcaggaatcagcagatcgaggccatctcaacaaagcttcaggtggacaagtctgacctcaagcccttcttgccaaagtagatcactggatcatccatcattcagattaggcgcatgatttctcataaacgagatagtgacactttttatgcttttgttactggtataatggtattgttgtacttaggttcaattgttacattggaccaggagttgctgtttatggcgtcatttgtatgattggagcctacttcccattgattccttgaatgcacatcagcttttctctcccccagtgagcatttgcccgacaagaaacttcagtgtcacatgaacagctgataactcatttgacttcacaaaagataaacaggcagttctagatgcaagttcctacatatacagcaggcatgaatcgcaattgtaatttgtaaatatataagatatacatatagatatataagttatatatagacatgttacgcccaccggaaactaattgaggtaccgcctgcagtatcttgatctacaaaagcaaaggatcctctggccttcatcttcccggttgaagtggtaatcgtacgtaatttcctcccctgggtttatgtgccgttctgcaaagaacattacctggatgaacatagaaataacaaagtcaaattttagtccacagctggaacttgtgggaatcatgtagcttaacatatacactccctccggcctccttccaaattgtagctcactttggatttgtcaaacttctctaacttaatctacaaattcatataaaatctctactgaaatatactgtgtgaagaatataatgaaacaaatttgatgttctagatgttagttattaggttcttttacaaaactagtagaaattaaacaagattgacttaggacaaaaccaaggtgaattactccctccgactcaaaccaaaacaacctctagagttatcctaagtattttaagtttgaccatatgtatagaaaagaatttatttattttaggacggagggagtaccattttttagtcagaggtaggagatatttaggctaacgaggctgacacaaggcattacgactaaaatttacgatccagaatattaattttataagaaaacaaacatatatataggcaaaatgattaccttcttctcattcctgactgagattattttcgcaacgcagtttggctgattcaaccaagaatgaacgaattgaatgaatataaaaccgtacattagaataataagcacactagaatctcaaaagaagtctcatccctcttgttccaaggggtatctaaagaatgttcaaggcttcaagcacaagttattacctggcatgaatgattgacgaatcttgcaatcc

SEQ ID NO: 26926 - DNA, 4026 bp, Zea Mays
ccgaaacaaaatcgtcacatctatcatagtgagtttgaggacattggaccgcaccctgcagaggccaagcgtcgaacacatggcgtgcaccttcctccgccgcgcgttctccctcaccgccgccggcacccacgcgaccccccgagttgccgccgccttcgcttccacttcctcctcatcctccgtcgtcgtgcctctgcgctccccactagaccaccgtcttctccgccacctccgctccgagatcacctacctcgcggagcgccgccctccccacgtggtaaggcggtattccttccctccgccttccccgctgcgcctcacgttctcagcaaaaccctcatggtttcctcctcttcgtgcagccgccgagtagcttcaagtcgttcgccgtggaggaccgcccgggggagcagtgggtgcgcctccgcgccagcgcgggagggggaggcgaggaggtgaaggtcgaggccaccatgttcgacggcgctgcggagcctgtcccggacgacgcgcccctcttccgccgcgtggagtcgctcgagcgcgggccccgcctccacctcagcctcatcgtcgaggtcgcccggggcgaccgcgtcctcggcttcgtctgctccgcctggcccgacgacctcgccgtccgccacgtgctcacgctcgcagctggcggtggcagcagtggtggtcgtcgtggtgggcgcgatttcgagaaactggggggcgaggagagggaagcggtgacgaagttcttgaaggagagggaggtggacgccgagctcgccggattcttgcacgactacatggcaaacaaggagaagatggagctgctccggtggttgaagactgtcgaatcattccttaacaagtaggataagatcgcacacagaagacaccgctgatgttactgcctagtttgggaacgggtacgctccaacaacaactggtgacgatctcctgcagtctctgtgatcatccgcatctacccctctgctgacaattgtgtgctgaagatgtttgtttttaatcagcttagatagctcagcgcacagcgctcttggaaactggtgatctgaatatcctactggtactttcatttctttgtgataagattgttctcaacggtgtatcttttaagatacaccccattgggtttttttcccttttgcaatataccaaatctcattttggatttccaaccagttgctatgtgcgtgcttagagtaaaaatctgctcttctgaactctgacggttcaatgtcgaaggaggagctgtaacggttggattaagcggggcgacggctcacatttcagaagccttcacatgatggcattgacacacctcaatccaacagtcgtgccactgccaagctccatcgcgccacgcgtgatgtacgtgattatgatctcactgactagcgggcccgcgtacagattcaaccctcccctcccctcaacggctagttccacctccgcatccgttgggacaaaagggggaaaaaccagagggaacttcaccagccaccaaagagcgaaaaggtagatagtcactcagcttctcgagagatcgccaaagacgcggcgccggcagcaagttctgcggcgatggggcacaagtacacgccgacgtactactcgggcctgcaggacaccatcgcgtcgctctgcaagtccatcctgccctccttccgcgtgggccggcggctcacctccgaccaggccgcggcgcggcgccacgccgagcagctcaagtggcagcaggagtccttccaccgcatcctccaccttgccgcgctccaccgcgagggcatcgtcccggcccacgacgtcgccgccttccgcggcaccatgctcgcggcgctcgtcgcgccgccgccgcagcaccccgagcagcccgcggtgctccgggacaagctcctcttcctccaggagctactctacgccaagtgcgtctccgcggcggagtacaacgcgtccaaggcgcccctcgtgcggcggctcgccgcgttcggcggcggcgtcgtcgagtgccccgatgccgaggcctcggccgaggagtggtcggagatcgacctccgtgacccgcctcctcccgccggcgcggcgtcctccgacaaaccgaagcacaaggccttcatcacgccgtgggagagcagatccaggaaggatcaggacgcgaaccgcagcgcatcaaggccgccgctggccccggtggatcataacaacgccaacaacgcgtcggtcctcatgcccgagtattctccgtcggaagcggtgccctgcaggaaggcggagaaggggaggaggaggcatctggcggggatgttccacagtggcggcaatggcaccgagaacaaggagcctgcgggggaggaagggggggtcgacgagaaagcgacggtgaaatgtaagaagaaaagctcgtggggattcgatggcatcaagaagtggaagaaagctggcgcctgtaataacaatggcgaggcggcagccaccggtgagcagccgcagcgtactcctccgcgctcatcgtacagcgagtgccaattggaggcgagccccatggctgcatctggcccggatgccaagagggccaagacgaggctgcactccagcacggatgatgactgcttctgagctgctgcgtgataaggaatcagcagatcgaggccatctcaacaaagcttcaggtggacaagtctgacctcaagcccttcttgccaaagtagatcactggatcatccatcattcagattaggcgcatgatttctcataaacgagatagtgacactttttatgcttttgttactggtataatggtattgttgtacttaggttcaattgttacattggaccaggagttgctgtttatggcgtcatttgtatgattggagcctacttcccattgattccttgaatgcacatcagcttttctctcccccagtgagcatttgcccgacaagaaacttcagtgtcacatgaacagctgataactcatttgacttcacaaaagataaacaggcagttctagatgcaagttcctacatatacagcaggcatgaatcgcaattgtaatttgtaaatatataagatatacatatagatatataagttatatatagacatgttacgcccaccggaaactaattgaggtaccgcctgcagtatcttgatctacaaaagcaaaggatcctctggccttcatcttcccggttgaagtggtaatcgtacgtaatttcctcccctgggtttatgtgccgttctgcaaagaacattacctggatgaacatagaaataacaaagtcaaattttagtccacagctggaacttgtgggaatcatgtagcttaacatatacactccctccggcctccttccaaattgtagctcactttggatttgtcaaacttctctaacttaatctacaaattcatataaaatctctactgaaatatactgtgtgaagaatataatgaaacaaatttgatgttctagatgttagttattaggttcttttacaaaactagtagaaattaaacaagattgacttaggacaaaaccaaggtgaattactccctccgactcaaaccaaaacaacctctagagttatcctaagtattttaagtttgaccatatgtatagaaaagaatttatttattttaggacggagggagtaccattttttagtcagaggtaggagatatttaggctaacgaggctgacacaaggcattacgactaaaatttacgatccagaatattaattttataagaaaacaaacatatatataggcaaaatgattaccttcttctcattcctgactgagattattttcgcaacgcagtttggctgattcaaccaagaatgaacgaattgaatgaatataaaaccgtacattagaataataagcacactagaatctcaaaagaagtctcatccctcttgttccaaggggtatctaaagaatgttcaaggcttcaagcacaagttattacctggcatgaatgattgacgaatcttgcaatcc

SEQ ID NO: 26927 - DNA, 4019 bp, Zea Mays
ccgaaacaaaatcgtcacatctatcatagtgagtttgaggacattggaccgcaccctgcagaggccaagcgtcgaacacatggcgtgcaccttcctccgccgcgcgttctccctcaccgccgccggcacccacgcgaccccccgagttgccgccgccttcgcttccacttcctcctcatcctccgtcgtcgtgcctctgcgctccccactagaccaccgtcttctccgccacctccgctccgagatcacctacctcgcggagcgccgccctccccacgtgccgccgagtagcttcaagtcgttcgccgtggaggaccgcccgggggagcagtgggtgcgcctccgcgccagcgcgggagggggaggcgaggaggtgaaggtcgaggccaccatgttcgacggcgctgcggagcctgtcccggacgacgcgcccctcttccgccgcgtggagtcgctcgagcgcgggccccgcctccacctcagcctcatcgtcgaggtcgcccggggcgaccgcgtcctcggcttcgtctgctccgcctggcccgacgacctcgccgtccgccacgtgctcacgctcgcagctggcggtggcagcagtggtggtcgtcgtggtgggcgcgatttcgagaaactggggggcgaggagagggaagcggtgacgaagttcttgaaggagagggaggtggacgccgagctcgccggattcttgcacgactacatggcaaacaaggagaagatggagctgctccggtggttgaagactgtcgaatcattccttaacaagtaggataagatcgcacacagaagacaccgctgatgttactgcctagtttgggaacgggtacgctccaacaacaactggtgacgatctcctgcagtctctgtgatcatccgcatctacccctctgctgacaattgtgtgctgaagatgtttgtttttaatcagcttagatagctcagcgcacagcgctcttggaaactggtgatctgaatatcctactggtactttcatttctttgtgataagattgttctcaacggtgtatcttttaagatacaccccattgggtttttttcccttttgcaatataccaaatctcattttggatttccaaccagttgctatgtgcgtgcttagagtaaaaatctgctcttctgaactctgacggttcaatgtcgaaggaggagctgtaacggttggattaagcggggcgacggctcacatttcagaagccttcacatgatggcattgacacacctcaatccaacagtcgtgccactgccaagctccatcgcgccacgcgtgatgtacgtgattatgatctcactgactagcgggcccgcgtacagattcaaccctcccctcccctcaacggctagttccacctccgcatccgttgggacaaaagggggaaaaaccagagggaacttcaccagccaccaaagtaccacacctctcctctctcaagaaccaccgcactctctctagcaggcctctgttttgtacttgaagtttgaaacaggagcgaaaaggtagatagtcactcagcttctcgagagatcgccaaagacgcggcgccggcagcaagttctgcggcgatggggcacaagtacacgccgacgtactactcgggcctgcaggacaccatcgcgtcgctctgcaagtccatcctgccctccttccgcgtgggccggcggctcacctccgaccaggccgcggcgcggcgccacgccgagcagctcaagtggcagcaggagtccttccaccgcatcctccaccttgccgcgctccaccgcgagggcatcgtcccggcccacgacgtcgccgccttccgcggcaccatgctcgcggcgctcgtcgcgccgccgccgcagcaccccgagcagcccgcggtgctccgggacaagctcctcttcctccaggagctactctacgccaagtgcgtctccgcggcggagtacaacgcgtccaaggcgcccctcgtgcggcggctcgccgcgttcggcggcggcgtcgtcgagtgccccgatgccgaggcctcggccgaggagtggtcggagatcgacctccgtgacccgcctcctcccgccggcgcggcgtcctccgacaaaccgaagcacaaggccttcatcacgccgtgggagagcagatccaggaaggatcaggacgcgaaccgcagcgcatcaaggccgccgctggccccggtggatcataacaacgccaacaacgcgtcggtcctcatgcccgagtattctccgtcggaagcggtgccctgcaggaaggcggagaaggggaggaggaggcatctggcggggatgttccacagtggcggcaatggcaccgagaacaaggagcctgcgggggaggaagggggggtcgacgagaaagcgacggtgaaatgtaagaagaaaagctcgtggggattcgatggcatcaagaagtggaagaaagctggcgcctgtaataacaatggcgaggcggcagccaccggtgagcagccgcagcgtactcctccgcgctcatcgtacagcgagtgccaattggaggcgagccccatggctgcatctggcccggatgccaagagggccaagacgaggctgcactccagcacggatgatgactgcttctgagctgctgcgtgataaggaatcagcagatcgaggccatctcaacaaagcttcaggtggacaagtctgacctcaagcccttcttgccaaagtagatcactggatcatccatcattcagattaggcgcatgatttctcataaacgagatagtgacactttttatgcttttgttactggtataatggtattgttgtacttaggttcaattgttacattggaccaggagttgctgtttatggcgtcatttgtatgattggagcctacttcccattgattccttgaatgcacatcagcttttctctcccccagtgagcatttgcccgacaagaaacttcagtgtcacatgaacagctgataactcatttgacttcacaaaagataaacaggcagttctagatgcaagttcctacatatacagcaggcatgaatcgcaattgtaatttgtaaatatataagatatacatatagatatataagttatatatagacatgttacgcccaccggaaactaattgaggtaccgcctgcagtatcttgatctacaaaagcaaaggatcctctggccttcatcttcccggttgaagtggtaatcgtacgtaatttcctcccctgggtttatgtgccgttctgcaaagaacattacctggatgaacatagaaataacaaagtcaaattttagtccacagctggaacttgtgggaatcatgtagcttaacatatacactccctccggcctccttccaaattgtagctcactttggatttgtcaaacttctctaacttaatctacaaattcatataaaatctctactgaaatatactgtgtgaagaatataatgaaacaaatttgatgttctagatgttagttattaggttcttttacaaaactagtagaaattaaacaagattgacttaggacaaaaccaaggtgaattactccctccgactcaaaccaaaacaacctctagagttatcctaagtattttaagtttgaccatatgtatagaaaagaatttatttattttaggacggagggagtaccattttttagtcagaggtaggagatatttaggctaacgaggctgacacaaggcattacgactaaaatttacgatccagaatattaattttataagaaaacaaacatatatataggcaaaatgattaccttcttctcattcctgactgagattattttcgcaacgcagtttggctgattcaaccaagaatgaacgaattgaatgaatataaaaccgtacattagaataataagcacactagaatctcaaaagaagtctcatccctcttgttccaaggggtatctaaagaatgttcaaggcttcaagcacaagttattacctggcatgaatgattgacgaatcttgcaatcc

SEQ ID NO: 26928 - DNA, 4130 bp, Zea Mays
gaaccctttttactcaagctagagattttacgattatgatctaaatacccgtaattatggtaaccggcaacgagctaaaagttagacgacttcagtagcttctggtgggcagaggttaaaaaaaagccgaaacaaaatcgtcacatctatcatagtgagtttgaggacattggaccgcaccctgcagaggccaagcgtcgaacacatggcgtgcaccttcctccgccgcgcgttctccctcaccgccgccggcacccacgcgaccccccgagttgccgccgccttcgcttccacttcctcctcatcctccgtcgtcgtgcctctgcgctccccactagaccaccgtcttctccgccacctccgctccgagatcacctacctcgcggagcgccgccctccccacgtgccgccgagtagcttcaagtcgttcgccgtggaggaccgcccgggggagcagtgggtgcgcctccgcgccagcgcgggagggggaggcgaggaggtgaaggtcgaggccaccatgttcgacggcgctgcggagcctgtcccggacgacgcgcccctcttccgccgcgtggagtcgctcgagcgcgggccccgcctccacctcagcctcatcgtcgaggtcgcccggggcgaccgcgtcctcggcttcgtctgctccgcctggcccgacgacctcgccgtccgccacgtgctcacgctcgcagctggcggtggcagcagtggtggtcgtcgtggtgggcgcgatttcgagaaactggggggcgaggagagggaagcggtgacgaagttcttgaaggagagggaggtggacgccgagctcgccggattcttgcacgactacatggcaaacaaggagaagatggagctgctccggtggttgaagactgtcgaatcattccttaacaagtaggataagatcgcacacagaagacaccgctgatgttactgcctagtttgggaacgggtacgctccaacaacaactggtgacgatctcctgcagtctctgtgatcatccgcatctacccctctgctgacaattgtgtgctgaagatgtttgtttttaatcagcttagatagctcagcgcacagcgctcttggaaactggtgatctgaatatcctactggtactttcatttctttgtgataagattgttctcaacggtgtatcttttaagatacaccccattgggtttttttcccttttgcaatataccaaatctcattttggatttccaaccagttgctatgtgcgtgcttagagtaaaaatctgctcttctgaactctgacggttcaatgtcgaaggaggagctgtaacggttggattaagcggggcgacggctcacatttcagaagccttcacatgatggcattgacacacctcaatccaacagtcgtgccactgccaagctccatcgcgccacgcgtgatgtacgtgattatgatctcactgactagcgggcccgcgtacagattcaaccctcccctcccctcaacggctagttccacctccgcatccgttgggacaaaagggggaaaaaccagagggaacttcaccagccaccaaagtaccacacctctcctctctcaagaaccaccgcactctctctagcaggcctctgttttgtactgagcgaaaaggtagatagtcactcagcttctcgagagatcgccaaagacgcggcgccggcagcaagttctgcggcgatggggcacaagtacacgccgacgtactactcgggcctgcaggacaccatcgcgtcgctctgcaagtccatcctgccctccttccgcgtgggccggcggctcacctccgaccaggccgcggcgcggcgccacgccgagcagctcaagtggcagcaggagtccttccaccgcatcctccaccttgccgcgctccaccgcgagggcatcgtcccggcccacgacgtcgccgccttccgcggcaccatgctcgcggcgctcgtcgcgccgccgccgcagcaccccgagcagcccgcggtgctccgggacaagctcctcttcctccaggagctactctacgccaagtgcgtctccgcggcggagtacaacgcgtccaaggcgcccctcgtgcggcggctcgccgcgttcggcggcggcgtcgtcgagtgccccgatgccgaggcctcggccgaggagtggtcggagatcgacctccgtgacccgcctcctcccgccggcgcggcgtcctccgacaaaccgaagcacaaggccttcatcacgccgtgggagagcagatccaggaaggatcaggacgcgaaccgcagcgcatcaaggccgccgctggccccggtggatcataacaacgccaacaacgcgtcggtcctcatgcccgagtattctccgtcggaagcggtgccctgcaggaaggcggagaaggggaggaggaggcatctggcggggatgttccacagtggcggcaatggcaccgagaacaaggagcctgcgggggaggaagggggggtcgacgagaaagcgacggtgaaatgtaagaagaaaagctcgtggggattcgatggcatcaagaagtggaagaaagctggcgcctgtaataacaatggcgaggcggcagccaccggtgagcagccgcagcgtactcctccgcgctcatcgtacagcgagtgccaattggaggcgagccccatggctgcatctggcccggatgccaagagggccaagacgaggctgcactccagcacggatgatgactgcttctgagctgctgcgtgataaggaatcagcagatcgaggccatctcaacaaagcttcaggtggacaagtctgacctcaagcccttcttgccaaagtagatcactggatcatccatcattcagattaggcgcatgatttctcataaacgagatagtgacactttttatgcttttgttactggtataatggtattgttgtacttaggttcaattgttacattggaccaggagttgctgtttatggcgtcatttgtatgattggagcctacttcccattgattccttgaatgcacatcagcttttctctcccccagtgagcatttgcccgacaagaaacttcagtgtcacatgaacagctgataactcatttgacttcacaaaagataaacaggcagttctagatgcaagttcctacatatacagcaggcatgaatcgcaattgtaatttgtaaatatataagatatacatatagatatataagttatatatagacatgttacgcccaccggaaactaattgaggtaccgcctgcagtatcttgatctacaaaagcaaaggatcctctggccttcatcttcccggttgaagtggtaatcgtacgtaatttcctcccctgggtttatgtgccgttctgcaaagaacattacctggatgaacatagaaataacaaagtcaaattttagtccacagctggaacttgtgggaatcatgtagcttaacatatacactccctccggcctccttccaaattgtagctcactttggatttgtcaaacttctctaacttaatctacaaattcatataaaatctctactgaaatatactgtgtgaagaatataatgaaacaaatttgatgttctagatgttagttattaggttcttttacaaaactagtagaaattaaacaagattgacttaggacaaaaccaaggtgaattactccctccgactcaaaccaaaacaacctctagagttatcctaagtattttaagtttgaccatatgtatagaaaagaatttatttattttaggacggagggagtaccattttttagtcagaggtaggagatatttaggctaacgaggctgacacaaggcattacgactaaaatttacgatccagaatattaattttataagaaaacaaacatatatataggcaaaatgattaccttcttctcattcctgactgagattattttcgcaacgcagtttggctgattcaaccaagaatgaacgaattgaatgaatataaaaccgtacattagaataataagcacactagaatctcaaaagaagtctcatccctcttgttccaaggggtatctaaagaatgttcaaggcttcaagcacaagttattacctggcatgaatgattgacgaatcttgcaatcc

SEQ ID NO: 26929 - DNA, 264 bp, Zea Mays
ctcaactacaggttctacatgagaggcagaactgcctgcgtcgtaggattgtgggactcccagctggtggagtggagcttccgagtgtccactccaattctccaacgccagggtgttgcagacttgcaggcagtggaacatggacaaggaaggcgacggccaccaccaccacgccatccgagtcccatccccagtacagtttcgcgcgtacctggctcccgaaaccagggctccgctctgagtgatttgggaattcaacttgat

SEQ ID NO: 26930 - DNA, 380 bp, Zea Mays
gtgcaaacaccccgtgcacaaccaattccccatcgagacatcggtccgtccgtacgaatccctgcgctcaacgccgcaccgaacctgactcaggcactcaccgctatgggcggcgaccatggcggtgggcacgccggcggtgacttccgccagaaggtatggagcatgacgggcggaccctactgccgcccggtccactggcgccgtaacaccgccatcgccatgttcggcgtcttcctcatctgcattcccatagccatgaagtccgccgagctcgaggatggatcccattatccccgatgatgaggcaagacacattgaaccaatagaagaagttgttgcacctgatgatgatgagaggcagtatcctgagtttgttg

SEQ ID NO: 26931 - DNA, 571 bp, Zea Mays
ggcaaatgcagctgcagtcgccgccatcactgccgagcaagctggacacagactgagaccaaagacttgatagtgagaaataatagtgaaaggcagaaaaatcttagtaaattgagaagcatttctgggataatgatggccggaatgttgctagtaagtggcccgttcgtatattaccggaaacggcgtacaaatcttatgcagggagctgcaagaatcccgacaagtgatcctaggttctagtatggggggacatggggtaataacggatcgcatacttgtgttgatctggtctatctttcttgtgattttgactcttgtcattgtactattatatttcacacatgtaattctggaagaggcgaagtgcttttttagttctcacaggagtaggaaccacagtggttagtctcatcgacctggtttacttgggtcaaatcacttgtgttacatattcaaatttatggttttgttacccccaaaaagttgctctaacagaggaacaactttgttcatgttgataatttatgcgaccaatgcgatcatttttctgaaagctgcaatgtttgag

SEQ ID NO: 26932 - DNA, 901 bp, Zea Mays
aacgggttgacagctggcaggcttgccgcctctggccattctcaatgtgtgtgaggtaacagacgggtcactggaattagtgtagtccactgtagttattaattttttccagtaaaaaagctcaaatacaggtgtaaaattattagatttacaactcattcaggatcacgagaaacgaggagcgaggtgagcttgatttcggccggcaaataaatgtggtccactgagaacgatgaaaagtatagctgcagcgaaactggctatcgcctgcccttgaaatgtgtacaggcacaaaatgctacaaaagaaggaaacatgagcaagcagaggaagatattggatgatgcatccacatcaggtggcacaaaatccgcatcaggtggtccaaagcattatattacttacagaagttgtgtgccgttggttggagaggagaatttatctgttcttggttttgagataatgatggccggaatgttgctagtaagtggcccgttcgtatattaccggaaacggcgtacaaatcttatgcagggagctgcaagaatcccgacaagtgatcctaggttctagtatggggggacatggggtaataacggatcgcatacttgtgttgatctggtctatctttcttgtgattttgactcttgtcattgtactattatatttcacacatgtaattctggaagaggcgaagtgcttttttagttctcacaggagtaggaaccacagtggttagtctcatcgacctggtttacttgggtcaaatcacttgtgttacatattcaaatttatggttttgttacccccaaaaagttgctctaacagaggaacaactttgttcatgttgataatttatgcgaccaatgcgatcatttttctgaaagctgcaatgtttgag

SEQ ID NO: 26933 - DNA, 774 bp, Zea Mays
aggagagcggcttgagaacaagaacgcagaacgtagcgaggaggtctgtcgtcgccggcggctgaaggcgccaccgtcgaagaacagcccacctctaggagaacgatgaaaagtatagctgcagcgaaactggctatcgcctgcccttgaaatgtgtacaggcacaaaatgctacaaaagaaggaaacatgagcaagcagaggaagatattggatgatgcatccacatcaggtggcacaaaatccgcatcaggtggtccaaagcattatattacttacagaagttgtgtgccgttggttggagaggagaatttatctgttcttggttttgagataatgatggccggaatgttgctagtaagtggcccgttcgtatattaccggaaacggcgtacaaatcttatgcagggagctgcaagaatcccgacaagtgatcctaggttctagtatggggggacatggggtaataacggatcgcatacttgtgttgatctggtctatctttcttgtgattttgactcttgtcattgtactattatatttcacacatgtaattctggaagaggcgaagtgcttttttagttctcacaggagtaggaaccacagtggttagtctcatcgacctggtttacttgggtcaaatcacttgtgttacatattcaaatttatggttttgttacccccaaaaagttgctctaacagaggaacaactttgttcatgttgataatttatgcgaccaatgcgatcatttttctgaaagctgcaatgtttgag

SEQ ID NO: 26934 - DNA, 975 bp, Zea Mays
tttaaaaatactacagttttatctaaaccacagtattgaaaacaatgttttagaaggaccaaccaaacacatataggcctaaaatactgtagtatcctacaataccgcattattgcatcgaaactatgaaataaccatgctaccaaattgttatggctgcggcgtggtggtaggcgaggggtatgcaggggagagtggaggaggagagcggcttgagaacaagaacgcagaacgtagcgaggaggtctgtcgtcgccggcggctgaaggcgccaccgtcgaagaacagcccacctctaggagaacgatgaaaagtatagctgcagcgaaactggctatcgcctgcccttgaaatgtgtacaggcacaaaatgctacaaaagaaggaaacatgagcaagcagaggaagatattggatgatgcatccacatcaggtggcacaaaatccgcatcaggtggtccaaagcattatattacttacagaagttgtgtgccgttggttggagaggagaatttatctgttcttggttttgagataatgatggccggaatgttgctagtaagtggcccgttcgtatattaccggaaacggcgtacaaatcttatgcagggagctgcaagaatcccgacaagtgatcctaggttctagtatggggggacatggggtaataacggatcgcatacttgtgttgatctggtctatctttcttgtgattttgactcttgtcattgtactattatatttcacacatgtaattctggaagaggcgaagtgcttttttagttctcacaggagtaggaaccacagtggttagtctcatcgacctggtttacttgggtcaaatcacttgtgttacatattcaaatttatggttttgttacccccaaaaagttgctctaacagaggaacaactttgttcatgttgataatttatgcgaccaatgcgatcatttttctgaaagctgcaatgtttgag

SEQ ID NO: 26935 - DNA, 834 bp, Zea Mays
ctagggggcctctggtgcatgcagccatgcagggtgctctgaggactggcacatgctgttcaggcttgtgacttggcggcaggcaacaggcgggcctctggcgtagccaacggggcagggggaggggggcgcgcgggcggcacagacggaggaaaactttgaacgatgaaaagtatagctgcagcgaaactggctatcgcctgcccttgaaatgtgtacaggcacaaaatgctacaaaagaaggaaacatgagcaagcagaggaagatattggatgatgcatccacatcaggtggcacaaaatccgcatcaggtggtccaaagcattatattacttacagaagttgtgtgccgttggttggagaggagaatttatctgttcttggttttgagataatgatggccggaatgttgctagtaagtggcccgttcgtatattaccggaaacggcgtacaaatcttatgcagggagctgcaagaatcccgacaagtgatcctaggttctagtatggggggacatggggtaataacggatcgcatacttgtgttgatctggtctatctttcttgtgattttgactcttgtcattgtactattatatttcacacatgtaattctggaagaggcgaagtgcttttttagttctcacaggagtaggaaccacagtggttagtctcatcgacctggtttacttgggtcaaatcacttgtgttacatattcaaatttatggttttgttacccccaaaaagttgctctaacagaggaacaactttgttcatgttgataatttatgcgaccaatgcgatcatttttctgaaagctgcaatgtttgag

SEQ ID NO: 26936 - DNA, 1706 bp, Zea Mays
caacaaccaaaaaaagcccgcacgagacgagagacgagacccagacgtctcgccctcggcttcttcctcccctccctgaccgctgccgcgacctctcggcgaaaccctaacctaccttagaccccgccgccgccgccgcccaagggagagagagacttgcacatcaaagggcgtccgatggggaagaagaagaagcgcgtcgataaggtcttctgctactactgcgaccgcgagttcgacgacgagaagatcctcgtccagcaccagaaggccaagcacttcaagtgccacgtatgccacaagaagctctccaccgcctctggcatggccatacacgtcctccaggtccacaaggagtccgtgaccaaggttcctaatgcaaagcctgatagggagtcaacggagatagagatatttggaatgcagggaattcctgcgcatgtattggctgctcattatggagaagaggaagacccttcaacaaaggtacccaaagtagaagtgcctcaggtaaggcctgttattatgcctaattcgctaggcatggcatttcctccgcgaccagcttatggtgtggcacctccaatctataatcctgcactcaatcctttgatggcccggcctccaatttggcctgctgcaccagcgcaagcttggtatccgcaacaagcagcatatccacaacaatcagctgtttcagttcctcccatagtcgctggcctcccaccacaacagccactattcccaattcagaatgtgcctactcctatgacatcagcagctgctaatgtacttcaaacatcgtttcctatggcccctccaggagtaccttcacctgttgcccctcatgtttcccagcctttgtttcctgttaacacttcagctgtcaatggagctgtaaattccccatttttagcatctgttgcacctggaaccattccagcaagctctccagcagcagtcggtgttgcaggaattggatatggaaccaataaccaaggcactagagatccagcagttggatcttcacctgcagtatccaataataaggcgtctggtgcccaaccagctacgaatgaggtatatctggtgtgggatgatgaagcaatgtcaatggaggaaagaaggttgtcgttgccaaagtatcaggtgcatgatgaaactagccagcaaaactaggtggctgaggttctgccaatacggtagcatttattgtagcttaagtttggtcgagaatgtgacaagagtcttgctccagatgaactctgttgacgcagcaattgatcgaagaatatcagaaagtcggctggcaggacgcatggccctatgaagaatctgggctttgctcggtagattatcccccttgcatttcaccgaaggactctgcctgcgcttgtatctcgctgtgcagcagtcggccctcttcatttagttagcgaatggagttgctgcagttaagaggaatgtgttgtttctgacttgtttgagtgtcgagcctttgttcttctatgtttccagcatcgacaagaaaatgaattagcagcacttaggagttattttggtccaactgtcgcctcattgggaatatattgatgaacacctcaatttctgcccgattgtaacctggtcatgtgctattgccaattgaacctaatgctgtgcattggctggaaagcaacttaaaaatgttacggattttaatattt

SEQ ID NO: 26937 - DNA, 1391 bp, Zea Mays
caacaaccaaaaaaagcccgcacgagacgagagacgagacccagacgtctcgccctcggcttcttcctcccctccctgaccgctgccgcgacctctcggcgaaaccctaacctaccttagaccccgccgccgccgccgcccaagggagagagagacttgcacatcaaagggcgtccgatggggaagaagaagaagcgcgtcgataaggtcttctgctactactgcgaccgcgagttcgacgacgagaagatcctcgtccagcaccagaaggccaagcacttcaagtgccacgtatgccacaagaagctctccaccgcctctggcatggccatacacgtcctccaggtccacaaggagtccgtgaccaaggttcctaatgcaaagcctgatagggagtcaacggagatagagatatttggaatgcagggaattcctgcgcatgtattggctgctcattatggagaagaggaagacccttcaacaaaggtacccaaagtagaagtgcctcaggtaaggcctgttattatgcctaattcgctaggcatggcatttcctccgcgaccagcttatggtgtggcacctccaatctataatcctgcactcaatcctttgatggcccggcctccaatttggcctgctgcaccagcgcaagcttgctgtcaatggagctgtaaattccccatttttagcatctgttgcacctggaaccattccagcaagctctccagcagcagtcggtgttgcaggaattggatatggaaccaataaccaaggcactagagatccagcagttggatcttcacctgcagtatccaataataaggcgtctggtgcccaaccagctacgaatgaggtatatctggtgtgggatgatgaagcaatgtcaatggaggaaagaaggttgtcgttgccaaagtatcaggtgcatgatgaaactagccagatgaactctgttgacgcagcaattgatcgaagaatatcagaaagtcggctggcaggacgcatggccctatgaagaatctgggctttgctcggtagattatcccccttgcatttcaccgaaggactctgcctgcgcttgtatctcgctgtgcagcagtcggccctcttcatttagttagcgaatggagttgctgcagttaagaggaatgtgttgtttctgacttgtttgagtgtcgagcctttgttcttctatgtttccagcatcgacaagaaaatgaattagcagcacttaggagttattttggtccaactgtcgcctcattgggaatatattgatgaacacctcaatttctgcccgattgtaacctggtcatgtgctattgccaattgaacctaatgctgtgcattggctggaaagcaacttaaaaatgttacggattttaatattt

SEQ ID NO: 26938 - DNA, 2108 bp, Zea Mays
caacaaccaaaaaaagcccgcacgagacgagagacgagacccagacgtctcgccctcggcttcttcctcccctccctgaccgctgccgcgacctctcggcgaaaccctaacctaccttagaccccgccgccgccgccgcccaagggagagagagacttgcacatcaaagggcgtccgatggggaagaagaagaagcgcgtcgataaggtcttctgctactactgcgaccgcgagttcgacgacgagaagatcctcgtccagcaccagaaggccaagcacttcaagtgccacgtatgccacaagaagctctccaccgcctctggcatggccatacacgtcctccaggtccacaaggagtccgtgaccaaggttcctaatgcaaagcctgatagggagtcaacggagatagagatatttggaatgcagggaattcctgcgcatgtattggctgctcattatggagaagaggaagacccttcaacaaaggtacccaaagtagaagtgcctcaggtaaggcctgttattatgcctaattcgctaggcatggcatttcctccgcgaccagcttatggtgtggcacctccaatctataatcctgcactcaatcctttgatggcccggcctccaatttggcctgctgcaccagcgcaagcttggtatccgcaacaagcagcatatccacaacaatcagctgtttcagttcctcccatagtcgctggcctcccaccacaacagccactattcccaattcagaatgtgcctactcctatgacatcagcagctgctaatgtacttcaaacatcgtttcctatggcccctccaggagtaccttcacctgttgcccctcatgtttcccagcctttgtttcctgttaacacttcagctgtcaatggagctgtaaattccccatttttagcatctgttgcacctggaaccattccagcaagctctccagcagcagtcggtgttgcaggaattggatatggaaccaataaccaaggcactagagatccagcagttggatcttcacctgcagtatccaataataaggcgtctggtgcccaaccagctacgaatgaggtatatctggtgtgggatgatgaagcaatgtcaatggaggaaagaaggttgtcgttgccaaagtatcaggtgcatgatgaaactagccaggattcaagggcatgcaattcttgaacgttttagtggaatatgaaagtctcatctggtcatacaatatgtgagtctgagatgattcatattttatgccactttttacattttcaaatgtctctgttgtgttgattggtcacctatatcctgctgattttgcacacatcaggagttccaagtaggtatttacaccattcttcctactagtaagttttctataatctgacaaatttcgtggtgcctatgctaatggcttgagggttatcgaccaagccctggacagctggcaaatatcaaaactaggtggctgaggttctgccaatacggtagcatttattgtagcttaagtttggtcgagaatgtgacaagagtcttgctccaggtcagctttcatttggccagtgagcctgagatgctgctcgactcattgttttggaggcagcaaccatatctaacaccaagttttttatttcacaatttgtatgagcagatgaactctgttgacgcagcaattgatcgaagaatatcagaaagtcggctggcaggacgcatggccctatgaagaatctgggctttgctcggtagattatcccccttgcatttcaccgaaggactctgcctgcgcttgtatctcgctgtgcagcagtcggccctcttcatttagttagcgaatggagttgctgcagttaagaggaatgtgttgtttctgacttgtttgagtgtcgagcctttgttcttctatgtttccagcatcgacaagaaaatgaattagcagcacttaggagttattttggtccaactgtcgcctcattgggaatatattgatgaacacctcaatttctgcccgattgtaacctggtcatgtgctattgccaattgaacctaatgctgtgcattggctggaaagcaacttaaaaatgttacggattttaatattt

SEQ ID NO: 26939 - DNA, 3488 bp, Zea Mays
gaagccccccgtcccccaacaaccaaaaaaagcccgcacgagacgagagacgagacccagacgtctcgccctcggcttcttcctcccctccctgaccgctgccgcgacctctcggcgaaaccctaacctaccttagaccccgccgccgccgccgcccaagggagagagagacttgcacatcaaagggcgtccgatggggaagaagaagaagcgcgtcgataaggtcttctgctactactgcgaccgcgagttcgacgacgagaagatcctcgtccagcaccagaaggccaagcacttcaagtgccacgtatgccacaagaagctctccaccgcctctggcatggccatacacgtcctccaggtccacaaggagtccgtgaccaaggttcctaatgcaaagcctgatagggagtcaacggagatagagatatttggaatgcagggaattcctgcgcatgtattggctgctcattatggagaagaggaagacccttcaacaaaggtacccaaagtagaagtgcctcaggtaaggcctgttattatgcctaattcgctaggcatggcatttcctccgcgaccagcttatggtgtggcacctccaatctataatcctgcactcaatcctttgatggcccggcctccaatttggcctgctgcaccagcgcaagcttggtatccgcaacaagcagcatatccacaacaatcagctgtttcagttcctcccatagtcgctggcctcccaccacaacagccactattcccaattcagaatgtgcctactcctatgacatcagcagctgctaatgtacttcaaacatcgtttcctatggcccctccaggagtaccttcacctgttgcccctcatgtttcccagcctttgtttcctgttaacacttcagctgtcaatggagctgtaaattccccatttttagcatctgttgcacctggaaccattccagcaagctctccagcagcagtcggtgttgcaggaattggatatggaaccaataaccaaggcactagagatccagcagttggatcttcacctgcagtatccaataataaggcgtctggtgcccaaccagctacgaatgaggtatatctggtgtgggatgatgaagcaatgtcaatggaggaaagaaggttgtcgttgccaaagtatcaggtgcatgatgaaactagccaggtaagttgtgtttcttatgatactattattgtagtttctcaaacaaaaggtttatcgctcaatctgcagttcagcaatgagcaatagcgatatgttattttgacgcttccgagttctacccaattcttgcctaaagtgtatacatgctagttgtatcttctttggtgtgcactcatataggaagttcattgtaggggtagtagggtgatttttaatgttaggctgttgcagtattcaaaggcatttctgttatcctgaagatgggctttgagcggtgaccttcattgtttgttttaagcccaacttgcttgggacaaaagattttgtgttaaagtggtggtggtggctcacctcagttgcatttactgatgttgtgaaccatgtattctacattatgtacttgcacataaggagtgactagtcggttgcccgtgcgttgcgacagcttacaataatacccacgtaaactatccataaaaaattcaagatttttaatgattgtctccgctctctgtataatatttttttgatttggctaactgatgttattgtttactccatgcaatatgtcttggtacaacacgaccaatgaagtgagcgattagaaaatagttcacaacgactgactgaatgaacaaagattataaaatgacataattccatcatacagagaccaaataagacaaaatttgtgagctcaagtttctaaaataagtcccatgaagtcaaacttataaaaaagatagatcaaaatatggagtgattgctaaagtcaggcatcaataaaaaccggatgcactccatataaattatgctacttcgtagcaattactaatgtttaaaaccaacaaataacatttcattttgttgttagtatgacaaatcattgttactccatccaattcggcaacctcaaacaccatttagtccattgcgccaatgtggtctcagaaacgatctaatgtttgcaagagccaagaacgtcgtgccgtgcttgggctgtagcctcagcccgtagtgctggcccggcccgacacgattatttttttattttacaaaaaaacatatatacctatatacaatttatattcaatattaaaaacatcttagcatgatgttctactggttagacagcttcacccagtgtctttcgtccttcttccatcaggacatgggttcgaaccccacgcgtgcgtctagcctgtgccggtcgccgtttggccatctatatagacgtgcagcagattaatttgaaatagctgaggggttattttaaaaagatgacgcatgatgaccgttgaaattggtgctttaagtatagtatagaattcttggaaggttttgctattctacttatttgtgatacataaacttgcccattttttcttggtatctactatgaacttaactgatgcatttgataatataatgatttcttttgagcctgttcattagatgtaaattaacacagtatccatttacaaccaattcttttgcatttttacaattgaccttttcattttcatataaaatattggcatattcacaatatactgaattgtgaacttgtcaaggattcaagggcatgcaattcttgaacgttttagtggaatatgaaagtctcatctggtcatacaatatgagttccaagtaggtatttacaccattcttcctactagtaagttttctataatctgacaaatttcgtggtgcctatgctaatggcttgagggttatcgaccaagccctggacagctggcaaatatcaaaactaggtggctgaggttctgccaatacggtagcatttattgtagcttaagtttggtcgagaatgtgacaagagtcttgctccagatgaactctgttgacgcagcaattgatcgaagaatatcagaaagtcggctggcaggacgcatggccctatgaagaatctgggctttgctcggtagattatcccccttgcatttcaccgaaggactctgcctgcgcttgtatctcgctgtgcagcagtcggccctcttcatttagttagcgaatggagttgctgcagttaagaggaatgtgttgtttctgacttgtttgagtgtcgagcctttgttcttctatgtttccagcatcgacaagaaaatgaattagcagcacttaggagttattttggtccaactgtcgcctcattgggaatatattgatgaacacctcaatttctgcccgattgtaacctggtcatgtgctattgccaattgaacctaatgctgtgcattggctggaaagcaacttaaaaatgttacggattttaatattt

SEQ ID NO: 26940 - DNA, 1577 bp, Zea Mays
gttgaagctaacattaagttttccgttgggtattaattagatgaaggcacatttctataattaaaatggcttgcaatgattctttggtgctatttgatggctgttttcactgatcctggtgctgtacctgaaaactggagacatgatgctgaagatagcgggaacccttcattttcctcttcagatgagcaagaaagtgctcctagatattgttctcgctgtcaaaatggcaaacctccccgatgtcatcattgttctgtttgtaacagatgtgtgcttaaaatggaccatcactgcatttgggtagttaattgtgttggagcaaggaactacaagtattttctcctttttctggtacaactgaaacatttaatgcggcttctgtgttcttgcttattctacacatttgtatcactgaaacatgtactagtgtaattagaacaaaggaaacatgattgtatttttatttaccttttatttctatgtggtgatgttctctgcttgcctgttcagataccttacttcttgctatttatttctcttgaagctgattttcctatgctatataggtgtatacatttattgagactgtgctggataccttggtactacttccaaacttcattgaattttttcaagatgaacataggcgttcaagctctcctggggatattgctattctatttcttgcttttgttctcaatttagcatttgcgctgagcctcctctgtttcattggcatgcacgcgtctcttgttacacgtaacacgacttctatagaggtgattctgtgacattagttctttttttttgcgctattcataaatgaacaaatgccttgataacacatcaaccttcatctacctaattgcctgttaatctggaaaccaccatgcacgagattcaaaatgcagtattcatcaaatgtaattgtatagcgcacaaaaagccttcacaaactgtccggtcattgtaattcagattttggttgttttttttcctcttgcctcgcagtcaataatttcagcactacatcccagtagattaataccttgtttccttgatggcattccgaaaacattacaatctttatgattgctttggatgattggatcaatcttgttccaggtctacgaacggaagaagtcggtttcatggaaatacgacctaggatggaaacgaaacttggagcaggtctttggtaccaaaaagttgctctggtttgttcccttatactccacagaggatctgcacaacatccccgcgcttcgaggcatggagttccctactcgctccgacgcaatcgtctaattgcatgtgatgcctagcagagtgttctatgccatagggtttgtctcacgtttacactataggatttctatacggagatctgttaattcttttctgtacagaaatgcacacgcagttctttcgtgtaccagctgtaaggaccagacatgtatttacacaattctgttaattctttggttggtttatattttagacaaattattttcctcccgtgcagcaactccagaagaaagtgatcaactgctaacacgccttgaccctcgttt

SEQ ID NO: 26941 - DNA, 1692 bp, Zea Mays
atcaagaaactgtcactcgccgctgggtccgcctagtcagcgacgcaccaagcccagcaagcaacagtccaacagccaacaaccagccagcgcgcgccgccaccgacacgcaccgtccggtccgccgctgcgttgcctttgccccctcctcgaggctagccccgcctcgcgggaggagatggactgctgccggcacgtgaacccgttccgcgcctgctcggggctgcgcgggctgggctacctcatggtggcgctcgtcgccgccatcgtcgccgtgtcctactacgccgtcgtcgtctacgcatggggccccatgctcctcgccgggggagcagccgcggcaggtgctgccgccgtgatcgccgccttccacatactcggatcttgtttcttctgcagcttgcaatgattctttggtgctatttgatggctgttttcactgatcctggtgctgtacctgaaaactggagacatgatgctgaagatagcgggaacccttcattttcctcttcagatgagcaagaaagtgctcctagatattgttctcgctgtcaaaatggcaaacctccccgatgtcatcattgttctgtttgtaacagatgtgtgcttaaaatggaccatcactgcatttgggtagttaattgtgttggagcaaggaactacaagtattttctcctttttctggtgtatacatttattgagactgtgctggataccttggtactacttccaaacttcattgaattttttcaagatgaacataggcgttcaagctctcctggggatattgctattctatttcttgcttttgttctcaatttagcatttgcgctgagcctcctctgtttcattggcatgcacgcgtctcttgttacacgtaacacgacttctatagaggtgattctgtgacattagttctttttttttgcgctattcataaatgaacaaatgccttgataacacatcaaccttcatctacctaattgcctgttaatctggaaaccaccatgcacgagattcaaaatgcagtattcatcaaatgtaattgtatagcgcacaaaaagccttcacaaactgtccggtcattgtaattcagattttggttgttttttttcctcttgcctcgcagtcaataatttcagcactacatcccagtagattaataccttgtttccttgatggcattccgaaaacattacaatctttatgattgctttggatgattggatcaatcttgttccaggtctacgaacggaagaagtcggtttcatggaaatacgacctaggatggaaacgaaacttggagcaggtctttggtaccaaaaagttgctctggtttgttcccttatactccacagaggatctgcacaacatccccgcgcttcgaggcatggagttccctactcgctccgacgcaatcgtctaattgcatgtgatgcctagcagagtgttctatgccatagggtttgtctcacgtttacactataggatttctatacggagatctgttaattcttttctgtacagaaatgcacacgcagttctttcgtgtaccagctgtaaggaccagacatgtatttacacaattctgttaattctttggttggtttatattttagacaaattattttcctcccgtgcagcaactccagaagaaagtgatcaactgctaacacgccttgaccctcgttt

SEQ ID NO: 26942 - DNA, 1541 bp, Zea Mays
atcaagaaactgtcactcgccgctgggtccgcctagtcagcgacgcaccaagcccagcaagcaacagtccaacagccaacaaccagccagcgcgcgccgccaccgacacgcaccgtccggtccgccgctgcgttgcctttgccccctcctcgaggctagccccgcctcgcgggaggagatggactgctgccggcacgtgaacccgttccgcgcctgctcggggctgcgcgggctgggctacctcatggtggcgctcgtcgccgccatcgtcgccgtgtcctactacgccgtcgtcgtctacgcatggggccccatgctcctcgccgggggagcagccgcggcaggtgctgccgccgtgatcgccgccttccacatactccttgcaatgattctttggtgctatttgatggctgttttcactgatcctggtgctgtacctgaaaactggagacatgatgctgaagatagcgggaacccttcattttcctcttcagatgagcaagaaagtgctcctagatattgttctcgctgtcaaaatggcaaacctccccgatgtcatcattgttctgtttgtaacagatgtgtgcttaaaatggaccatcactgcatttgggtagttaattgtgttggagcaaggaactacaagtattttctcctttttctggtacaactgaaacatttaatgcggcttctgtgttcttgcttattctacacatttgtatcactgaaacatgtactagtgtaattagaacaaaggaaacatgattgtatttttatttaccttttatttctatgtggtgatgttctctgcttgcctgttcagataccttacttcttgctatttatttctcttgaagctgattttcctatgctatataggtgtatacatttattgagactgtgctggataccttggtactacttccaaacttcattgaattttttcaagatgaacataggcgttcaagctctcctggggatattgctattctatttcttgcttttgttctcaatttagcatttgcgctgagcctcctctgtttcattggcatgcacgcgtctcttgttacacgtaacacgacttctatagaggtctacgaacggaagaagtcggtttcatggaaatacgacctaggatggaaacgaaacttggagcaggtctttggtaccaaaaagttgctctggtttgttcccttatactccacagaggatctgcacaacatccccgcgcttcgaggcatggagttccctactcgctccgacgcaatcgtctaattgcatgtgatgcctagcagagtgttctatgccatagggtttgtctcacgtttacactataggatttctatacggagatctgttaattcttttctgtacagaaatgcacacgcagttctttcgtgtaccagctgtaaggaccagacatgtatttacacaattctgttaattctttggttggtttatattttagacaaattattttcctcccgtgcagcaactccagaagaaagtgatcaactgctaacacgccttgaccctcgttt

SEQ ID NO: 26943 - DNA, 2088 bp, Zea Mays
aaaccttttttcccctctgcacgctactctctcctttctcactaccccgcccgtcaaagcgagagcgccgtatcaccggtctatccatcccttcaccgctgcctcgacccgcgccgaaagatacctttcccccccttcctctcgcgccgccgttttggtgcgaccatggcggcggagggggaggccaagaacccgtccggcggtggcgaagggggtaacccccagcaccagcaggcagtgcaggctgcgccggcggagccgccaacggcacagggggaagcggtgcaggaggctggagcgcaggcgacgggacaagagccggagggggagaaggcgaatcgagatggggagggaagcgcgggggagaaggacgacggcgcgtgcagagatctggttctggttgaggatccggaggtgctcgccgtcgaggacccggaggaaggtacaacgcccgttcttgcagtctctctctctctccggccttggctctagtagtagttgcccctgttggtgcttgtgtctcagctgtcagatgcatggatacactgacgttttttttccttctgaacataacaggtgctcataaacagaaaaaaaataaagaaaataactttgcgggcagatggggagtttatttttttgtttcctgcttcgggttctattaataactttgtactcttgctgagaatacatatacatgcaaaggatcagagattgggtccagttattccttttgtactaatctgttagctcttatagttactcaaagggttgaaggcttcagaaaagcatggtttgttttattctataagtccattattacgatcatttgacttgtactcgtgcaataaacagaaggccctttcttcctttcacctctttgttgttatgctacttttccctgatacagtgaacacgaaattgaatcttatttgaagttatatgtgtgcaatcctttttgttctgccttattttttgtgctgtctgcgttgaactaagtactcatgcatgcatgtatgaattgaggatttatgtttatttggcctgaagttcttggctgggcgcctctgagattttttttctctcccctggttacagctgcagcaaccgcagcactccaggaagaaatgaaagcgctcgtggcatccgtccctgacggtgctggggcagcattcacagccatgcagcttcaggagctagagcagcagtcccgggtttatcagtacatggctgcccgagtacctgtgcctactcacctcgtcttccccgtatggaagagtgtaaccggtgcatcctctgaaggcgcccagaagtaccctactttgttgggcttagcaacactctgcttggacttcgggaagaaccctgaaccagaaccagggaggtgccggcgaacggatggcaaaaaatggcgatgttggagaaacactattccaaacgagaagtactgcgaacgccacatgcatcgcggtcgcaagcgtcctgtacaggtcgttgaggaagccgagcctgactctgcttcaggctcaaaatctgctcccagcaaggccaccgaaggcgccaagaaggttgacgacaagagcccaggtagcaagaagcttgccgtggcggcggcagctgcagctgctgtgcagtctacgtaattgatgcagcattttagtagtcgcaggaagagcatggcggcgctggcaactagcgccttcttttcattgcatgtgatctttagctataacctcatttagcacactcccagtggtgtccgtgggaggaggaagccgcaagaacttcccccgtagggtgtcgactgaaaaaattcacttgtagctgtatagtttgatctctagctttgtcgtgcctccggccttcaggtaggcgatgcggcatgatgttataaatcctctcccagaactgacaatatcgcattgtaacccaagaagccggtgcaagaacctgtgaaactgcattgatgcgcaattatgtgattcatcagttgtataacaaagtggaagatgcataattttatgcctcgtggaggctgtgactatgttattctgatagtaatgagtacgccagagattggatgtcgag

SEQ ID NO: 26944 - DNA, 1800 bp, Zea Mays
cgcagatcaaccctgactctgcccgatttcttctctcgttgatgctgaaggtcatttcttacatgttgcagagtgtggaaaaaccttgcaatgaaatggaaaaatgttttgaaggaaatggcaccgctgaggtccacaggcagattctttcaacgccatccttcagctatctgcttactgattttcctacttgtgttgtacaagtacttcttcggctggttcaccctcatcgtcaccacatcacctatcttcctaatcgctggcatctttcttggaatcgtcctggtgtacggtgaaccgaacaaccctgaaaaagatcatgtctacaaaaaaaatgataatactcggagtttgaatatccatgatagcagcaaatctattaggggtgtacctcttcctagaattccgtctggtgaagagagagcgccgaagcacaaaaacagtgttaagaaaattaggaagcagtctcgtggtgtagcctcttcttctgaaccaggatcaagtgaatcaggtggttcagatactgatattgctccaatgctccatgcatttcatcatcttaggtcgggcagcaattcgtcaaattcctctcaagatggtgactctgacagtagcaccgaagatacaacagagaatcaacagggcaacgacggcaggatatcccgcgaggggaaacaacatgttaaagttgttgcatggactgctgatgaccagaagaacataataaaaatcgggtgcttggagattgagcgtaaccaaaggttggagaccctaattgctaggcgtcgggcaaggaaatacgcagacaggaacttggcagagtttggcagcactgattccttacccactattgaagagctatcaaagttcaatgttcaaattcctgctgtttttgctcctaggaaaaatccttttgatcttccttacaatgaagataacttcccagattctgctccatctgcagtgttggaaacgagatacccatttgatctaccaagtgagcaagcaaacgagagcagctcttatggagccaactcaagccatgatgaacctattcccgtagcatgtcatttacagagtgcactgttgaggaggcatgagagcttcactgaaggagcaccattccttagtgactttttgcaagatacacagccttcccgattcagaccatacttcatgacggaaaaaatggctaacgaggaaatgacagatccagttcttgaaggagaaactagtgaaaagagcaactctaaggccagctctgctcaagactcggatagtacttcttcagttgctgaccaagaaagccagaaggatgttctagaggattgctcaaaccaaggacaacaatcttctttcagtcaaacagaggaacatgcacatatagctcggcatgcaagggaggtttctctttcccttgacatggaaccacctgtcttaattagtgattcctctgatgatgacatatcactgtctggtgaacatataaatgattgggaggaagcacaacagagtgaaaattttagtttgtcccagaatacatggcaagaggatcctaatgtcatgcaacaccatcaagaaatagatatcacaagcaatggattgaatcaaatgtcaccacattcgaatgatcttgagttgacgtcgtcatcaactgaaactactgatgatccttttgaagtgaatgacattgaaccaccagctaaggaagtggtggtcgttgatgatacccacgttgtggatcctgtatatgattcaattcatcatcggtacaagcagctcctatatgggggcgtccag

SEQ ID NO: 26945 - DNA, 2488 bp, Zea Mays
gccgtcctagcgtctgcctttcgacgctgctgccgtggagcgcagatcaaccctgactctgcccgatttcttctctcgttgatgctgaaggtcatttcttacatgttgcagagtgtggaaaaaccttgcaatgaaatggaaaaatgttttgaaggaaatggcaccgctgaggtccacaggcagattctttcaacgccatccttcagctatctgcttactgattttcctacttgtgttgtacaagtacttcttcggctggttcaccctcatcgtcaccacatcacctatcttcctaatcgctggcatctttcttggaatcgtcctggtgtacggtgaaccgaacaaccctgaaaaagatcatgtctacaaaaaaaatgataatactcggagtttgaatatccatgatagcagcaaatctattaggggtgtacctcttcctagaattccgtctggtgaagagagagcgccgaagcacaaaaacagtgttaagaaaattaggaagcagtctcgtggtgtagcctcttcttctgaaccaggatcaagtgaatcaggtggttcagatactgatattgctccaatgctccatgcatttcatcatcttaggtcgggcagcaattcgtcaaattcctctcaagatggtgactctgacagtagcaccgaagatacaacagagaatcaacagggcaacgacggcaggatatcccgcgaggggaaacaacatgttaaagttgttgcatggactgctgatgaccagaagaacataataaaaatcgggtgcttggagattgagcgtaaccaaaggttggagaccctaattgctaggcgtcgggcaaggaaatacgcagacaggaacttggcagagtttggcagcactgattccttacccactattgaagagctatcaaagttcaatgttcaaattcctgctgtttttgctcctaggaaaaatccttttgatcttccttacaatgaagataacttcccagattctgctccatctgcagtgttggaaacgagatacccatttgatctaccaagtgagcaagcaaacgagagcagctcttatggagccaactcaagccatgatgaacctattcccgtagcatgtcatttacagagtgcactgttgaggaggcatgagagcttcactgaaggagcaccattccttagtgactttttgcaagatacacagccttcccgattcagaccatacttcatgacggaaaaaatggctaacgaggaaatgacagatccagttcttgaaggagaaactagtgaaaagagcaactctaaggccagctctgctcaagactcggatagtacttcttcagttgctgaccaagaaagccagaaggatgttctagaggattgctcaaaccaaggacaacaatcttctttcagtcaaacagaggaacatgcacatatagctcggcatgcaagggaggtttctctttcccttgacatggaaccacctgtcttaattagtgattcctctgatgatgacatatcactgtctggtgaacatataaatgattgggaggaagcacaacagagtgaaaattttagtttgtcccagaatacatggcaagaggatcctaatgtcatgcaacaccatcaagaaatagatatcacaagcaatggattgaatcaaatgtcaccacattcgaatgatcttgagttgacgtcgtcatcaactgaaactactgatgatccttttgaagtgaatgacattgaaccaccagctaaggaagtggtggtcgttgatgatacccacgttgtggatcctgtatatgattcaagtccttcgggaagcgagaggcctgcacctactggtttagtaattgacggacctgtcctaaaagatgcaaccatcgaagaagggggttcatcatcaagaatggaggtttcttccagtgaggtagctggacctagtttgagttctgtggagcaaagcgaatccccagagaaagaagcctctgagataagagagcagtccatggttggccatgtcgaagcacatggaggttctgtcagccatgctgatccttcagtatctgatataagttctcagccgagtactgaaagttcaacaaatggtgattctggcagtggtgtaacaccatccttcacaaacgcagttctttagtttcttcataaaaaaaatgacagcggcaccgatcgagcatcatcaggttggtcgtcttcagcagtacttcgagctaggcgacttttgtgtggggcgagttcattgctgaggaaaccactgggagggtatatgtttgttgcaggaaatttcttagtgcttcaaagggactaggcaacattagcattattagcactgcactgtaaaaatggctagatatggttgttgcttaatttggccagcactctcgtttgtgaataccttgtggatccgacagtcaattttgtgccgtaaattaattgttaatttgctgcttcgagtaccttagtctatggattgcctttg

SEQ ID NO: 26946 - DNA, 2526 bp, Zea Mays
taggcgtcctcgccgtcctagcgtctgcctttcgacgctgctgccgtggagcgcagatcaaccctgactctgcccgatttcttctctcgttgatgctgaaggtcatttcttacatgttgcagagtgtggaaaaaccttgcaatgaaatggaaaaatgttttgaaggaaatggcaccgctgaggtccacaggcagattctttcaacgccatccttcagctatctgcttactgattttcctacttgtgttgtacaagtacttcttcggctggttcaccctcatcgtcaccacatcacctatcttcctaatcgctggcatctttcttggaatcgtcctggtgtacggtgaaccgaacaaccctgaaaaagatcatgtctacaaaaaaaatgataatactcggagtttgaatatccatgatagcagcaaatctattaggggtgtacctcttcctagaattccgtctggtgaagagagagcgccgaagcacaaaaacagtgttaagaaaattaggaagcagtctcgtggtgtagcctcttcttctgaaccaggatcaagtgaatcaggtggttcagatactgatattgctccaatgctccatgcatttcatcatcttaggtcgggcagcaattcgtcaaattcctctcaagatggtgactctgacagtagcaccgaagatacaacagagaatcaacagggcaacgacggcaggatatcccgcgaggggaaacaacatgttaaagttgttgcatggactgctgatgaccagaagaacataataaaaatcgggtgcttggagattgagcgtaaccaaaggttggagaccctaattgctaggcgtcgggcaaggaaatacgcagacaggaacttggcagagtttggcagcactgattccttacccactattgaagagctatcaaagttcaatgttcaaattcctgctgtttttgctcctaggaaaaatccttttgatcttccttacaatgaagataacttcccagattctgctccatctgcagtgttggaaacgagatacccatttgatctaccaagtgagcaagcaaacgagagcagctcttatggagccaactcaagccatgatgaacctattcccgtagcatgtcatttacagagtgcactgttgaggaggcatgagagcttcactgaaggagcaccattccttagtgactttttgcaagatacacagccttcccgattcagaccatacttcatgacggaaaaaatggctaacgaggaaatgacagatccagttcttgaaggagaaactagtgaaaagagcaactctaaggccagctctgctcaagactcggatagtacttcttcagttgctgaccaagaaagccagaaggatgttctagaggattgctcaaaccaaggacaacaatcttctttcagtcaaacagaggaacatgcacatatagctcggcatgcaagggaggtttctctttcccttgacatggaaccacctgtcttaattagtgattcctctgatgatgacatatcactgtctggtgaacatataaatgattgggaggaagcacaacagagtgaaaattttagtttgtcccagaatacatggcaagaggatcctaatgtcatgcaacaccatcaagaaatagatatcacaagcaatggattgaatcaaatgtcaccacattcgaatgatcttgagttgacgtcgtcatcaactgaaactactgatgatccttttgaagtgaatgacattgaaccaccagctaaggaagtggtggtcgttgatgatacccacgttgtggatcctgtatatgattcaagtccttcgggaagcgagaggcctgcacctactggtttagtaattgacggacctgtcctaaaagatggtcatgcttgtactcttgttgttgaagcaaccatcgaagaagggggttcatcatcaagaatggaggtttcttccagtgaggtagctggacctagtttgagttctgtggagcaaagcgaatccccagagaaagaagcctctgagataagagagcagtccatggttggccatgtcgaagcacatggaggttctgtcagccatgctgatccttcagtatctgatataagttctcagccgagtactgaaagttcaacaaatggtgattctggcagtggtgtaacaccatccttcacaaacgcagttctttagtttcttcataaaaaaaatgacagcggcaccgatcgagcatcatcaggttggtcgtcttcagcagtacttcgagctaggcgacttttgtgtggggcgagttcattgctgaggaaaccactgggagggtatatgtttgttgcaggaaatttcttagtgcttcaaagggactaggcaacattagcattattagcactgcactgtaaaaatggctagatatggttgttgcttaatttggccagcactctcgtttgtgaataccttgtggatccgacagtcaattttgtgccgtaaattaattgttaatttgctgcttcgagtaccttagtctatggattgcctttg

SEQ ID NO: 26947 - DNA, 2498 bp, Zea Mays
cgtaggcgtcctcgccgtcctagcgtctgcctttcgacgctgctgccgtggagcgcagatcaaccctgactctgcccgatttcttctctcgttgagtgtggaaaaaccttgcaatgaaatggaaaaatgttttgaaggaaatggcaccgctgaggtccacaggcagattctttcaacgccatccttcagctatctgcttactgattttcctacttgtgttgtacaagtacttcttcggctggttcaccctcatcgtcaccacatcacctatcttcctaatcgctggcatctttcttggaatcgtcctggtgtacggtgaaccgaacaaccctgaaaaagatcatgtctacaaaaaaaatgataatactcggagtttgaatatccatgatagcagcaaatctattaggggtgtacctcttcctagaattccgtctggtgaagagagagcgccgaagcacaaaaacagtgttaagaaaattaggaagcagtctcgtggtgtagcctcttcttctgaaccaggatcaagtgaatcaggtggttcagatactgatattgctccaatgctccatgcatttcatcatcttaggtcgggcagcaattcgtcaaattcctctcaagatggtgactctgacagtagcaccgaagatacaacagagaatcaacagggcaacgacggcaggatatcccgcgaggggaaacaacatgttaaagttgttgcatggactgctgatgaccagaagaacataataaaaatcgggtgcttggagattgagcgtaaccaaaggttggagaccctaattgctaggcgtcgggcaaggaaatacgcagacaggaacttggcagagtttggcagcactgattccttacccactattgaagagctatcaaagttcaatgttcaaattcctgctgtttttgctcctaggaaaaatccttttgatcttccttacaatgaagataacttcccagattctgctccatctgcagtgttggaaacgagatacccatttgatctaccaagtgagcaagcaaacgagagcagctcttatggagccaactcaagccatgatgaacctattcccgtagcatgtcatttacagagtgcactgttgaggaggcatgagagcttcactgaaggagcaccattccttagtgactttttgcaagatacacagccttcccgattcagaccatacttcatgacggaaaaaatggctaacgaggaaatgacagatccagttcttgaaggagaaactagtgaaaagagcaactctaaggccagctctgctcaagactcggatagtacttcttcagttgctgaccaagaaagccagaaggatgttctagaggattgctcaaaccaaggacaacaatcttctttcagtcaaacagaggaacatgcacatatagctcggcatgcaagggaggtttctctttcccttgacatggaaccacctgtcttaattagtgattcctctgatgatgacatatcactgtctggtgaacatataaatgattgggaggaagcacaacagagtgaaaattttagtttgtcccagaatacatggcaagaggatcctaatgtcatgcaacaccatcaagaaatagatatcacaagcaatggattgaatcaaatgtcaccacattcgaatgatcttgagttgacgtcgtcatcaactgaaactactgatgatccttttgaagtgaatgacattgaaccaccagctaaggaagtggtggtcgttgatgatacccacgttgtggatcctgtatatgattcaagtccttcgggaagcgagaggcctgcacctactggtttagtaattgacggacctgtcctaaaagatggtcatgcttgtactcttgttgttgaagcaaccatcgaagaagggggttcatcatcaagaatggaggtttcttccagtgaggtagctggacctagtttgagttctgtggagcaaagcgaatccccagagaaagaagcctctgagataagagagcagtccatggttggccatgtcgaagcacatggaggttctgtcagccatgctgatccttcagtatctgatataagttctcagccgagtactgaaagttcaacaaatggtgattctggcagtggtgtaacaccatccttcacaaacgcagttctttagtttcttcataaaaaaaatgacagcggcaccgatcgagcatcatcaggttggtcgtcttcagcagtacttcgagctaggcgacttttgtgtggggcgagttcattgctgaggaaaccactgggagggtatatgtttgttgcaggaaatttcttagtgcttcaaagggactaggcaacattagcattattagcactgcactgtaaaaatggctagatatggttgttgcttaatttggccagcactctcgtttgtgaataccttgtggatccgacagtcaattttgtgccgtaaattaattgttaatttgctgcttcgagtaccttagtctatggattgcctttg

SEQ ID NO: 26948 - DNA, 2508 bp, Zea Mays
cgaaggaatgtccgtcattatacggggacttcttccacaataaagaccagaatgttctgttgcttccggtgaagatgctgaaggtcatttcttacatgttgcagagtgtggaaaaaccttgcaatgaaatggaaaaatgttttgaaggaaatggcaccgctgaggtccacaggcagattctttcaacgccatccttcagctatctgcttactgattttcctacttgtgttgtacaagtacttcttcggctggttcaccctcatcgtcaccacatcacctatcttcctaatcgctggcatctttcttggaatcgtcctggtgtacggtgaaccgaacaaccctgaaaaagatcatgtctacaaaaaaaatgataatactcggagtttgaatatccatgatagcagcaaatctattaggggtgtacctcttcctagaattccgtctggtgaagagagagcgccgaagcacaaaaacagtgttaagaaaattaggaagcagtctcgtggtgtagcctcttcttctgaaccaggatcaagtgaatcaggtggttcagatactgatattgctccaatgctccatgcatttcatcatcttaggtcgggcagcaattcgtcaaattcctctcaagatggtgactctgacagtagcaccgaagatacaacagagaatcaacagggcaacgacggcaggatatcccgcgaggggaaacaacatgttaaagttgttgcatggactgctgatgaccagaagaacataataaaaatcgggtgcttggagattgagcgtaaccaaaggttggagaccctaattgctaggcgtcgggcaaggaaatacgcagacaggaacttggcagagtttggcagcactgattccttacccactattgaagagctatcaaagttcaatgttcaaattcctgctgtttttgctcctaggaaaaatccttttgatcttccttacaatgaagataacttcccagattctgctccatctgcagtgttggaaacgagatacccatttgatctaccaagtgagcaagcaaacgagagcagctcttatggagccaactcaagccatgatgaacctattcccgtagcatgtcatttacagagtgcactgttgaggaggcatgagagcttcactgaaggagcaccattccttagtgactttttgcaagatacacagccttcccgattcagaccatacttcatgacggaaaaaatggctaacgaggaaatgacagatccagttcttgaaggagaaactagtgaaaagagcaactctaaggccagctctgctcaagactcggatagtacttcttcagttgctgaccaagaaagccagaaggatgttctagaggattgctcaaaccaaggacaacaatcttctttcagtcaaacagaggaacatgcacatatagctcggcatgcaagggaggtttctctttcccttgacatggaaccacctgtcttaattagtgattcctctgatgatgacatatcactgtctggtgaacatataaatgattgggaggaagcacaacagagtgaaaattttagtttgtcccagaatacatggcaagaggatcctaatgtcatgcaacaccatcaagaaatagatatcacaagcaatggattgaatcaaatgtcaccacattcgaatgatcttgagttgacgtcgtcatcaactgaaactactgatgatccttttgaagtgaatgacattgaaccaccagctaaggaagtggtggtcgttgatgatacccacgttgtggatcctgtatatgattcaagtccttcgggaagcgagaggcctgcacctactggtttagtaattgacggacctgtcctaaaagatggtcatgcttgtactcttgttgttgaagcaaccatcgaagaagggggttcatcatcaagaatggaggtttcttccagtgaggtagctggacctagtttgagttctgtggagcaaagcgaatccccagagaaagaagcctctgagataagagagcagtccatggttggccatgtcgaagcacatggaggttctgtcagccatgctgatccttcagtatctgatataagttctcagccgagtactgaaagttcaacaaatggtgattctggcagtggtgtaacaccatccttcacaaacgcagttctttagtttcttcataaaaaaaatgacagcggcaccgatcgagcatcatcaggttggtcgtcttcagcagtacttcgagctaggcgacttttgtgtggggcgagttcattgctgaggaaaccactgggagggtatatgtttgttgcaggaaatttcttagtgcttcaaagggactaggcaacattagcattattagcactgcactgtaaaaatggctagatatggttgttgcttaatttggccagcactctcgtttgtgaataccttgtggatccgacagtcaattttgtgccgtaaattaattgttaatttgctgcttcgagtaccttagtctatggattgcctttg

SEQ ID NO: 26949 - DNA, 3080 bp, Zea Mays
gggatctcatgaagaaattggtgcatctcaaatgaacaacggcccagaagacatgttgccaaagggtggaatgcgattttactctgagcaagatgcatacgccttttacaaagcttatgctggaaagattggtattagcattcgaaggaatgtccgtcattatacggggacttcttccacaataaagaccagaatgttctgttgcttccggtgaaggtataaaatgtccactactcttactacaatgactcatcttattaccacctaattaaaatgtttcacactacaaaagatcagactcaacagacaagaacaaagacttttagcagatctgagacacgatgcatgtgtcaagcatctatgaagataaaaaccttttttttttgttgcagtagactacacgaacaaatgtaagacttataactgttagcaatgtcaacagagctaaagctatggatacctctaaaactgagatctcgatgacaaccaaaaaaatataatttcagttaaaggattaaggaaaaaaatcaacaacaaaaagagttatggctaccttcaaaatccagatttacccacgccagactccacggctccagaggcgcgaaggacggaggtcgcagatggcgttgcagcgacgtatttgacgatgctgaaggtcatttcttacatgttgcagagtgtggaaaaaccttgcaatgaaatggaaaaatgttttgaaggaaatggcaccgctgaggtccacaggcagattctttcaacgccatccttcagctatctgcttactgattttcctacttgtgttgtacaagtacttcttcggctggttcaccctcatcgtcaccacatcacctatcttcctaatcgctggcatctttcttggaatcgtcctggtgtacggtgaaccgaacaaccctgaaaaagatcatgtctacaaaaaaaatgataatactcggagtttgaatatccatgatagcagcaaatctattaggggtgtacctcttcctagaattccgtctggtgaagagagagcgccgaagcacaaaaacagtgttaagaaaattaggaagcagtctcgtggtgtagcctcttcttctgaaccaggatcaagtgaatcaggtggttcagatactgatattgctccaatgctccatgcatttcatcatcttaggtcgggcagcaattcgtcaaattcctctcaagatggtgactctgacagtagcaccgaagatacaacagagaatcaacagggcaacgacggcaggatatcccgcgaggggaaacaacatgttaaagttgttgcatggactgctgatgaccagaagaacataataaaaatcgggtgcttggagattgagcgtaaccaaaggttggagaccctaattgctaggcgtcgggcaaggaaatacgcagacaggaacttggcagagtttggcagcactgattccttacccactattgaagagctatcaaagttcaatgttcaaattcctgctgtttttgctcctaggaaaaatccttttgatcttccttacaatgaagataacttcccagattctgctccatctgcagtgttggaaacgagatacccatttgatctaccaagtgagcaagcaaacgagagcagctcttatggagccaactcaagccatgatgaacctattcccgtagcatgtcatttacagagtgcactgttgaggaggcatgagagcttcactgaaggagcaccattccttagtgactttttgcaagatacacagccttcccgattcagaccatacttcatgacggaaaaaatggctaacgaggaaatgacagatccagttcttgaaggagaaactagtgaaaagagcaactctaaggccagctctgctcaagactcggatagtacttcttcagttgctgaccaagaaagccagaaggatgttctagaggattgctcaaaccaaggacaacaatcttctttcagtcaaacagaggaacatgcacatatagctcggcatgcaagggaggtttctctttcccttgacatggaaccacctgtcttaattagtgattcctctgatgatgacatatcactgtctggtgaacatataaatgattgggaggaagcacaacagagtgaaaattttagtttgtcccagaatacatggcaagaggatcctaatgtcatgcaacaccatcaagaaatagatatcacaagcaatggattgaatcaaatgtcaccacattcgaatgatcttgagttgacgtcgtcatcaactgaaactactgatgatccttttgaagtgaatgacattgaaccaccagctaaggaagtggtggtcgttgatgatacccacgttgtggatcctgtatatgattcaagtccttcgggaagcgagaggcctgcacctactggtttagtaattgacggacctgtcctaaaagatggtcatgcttgtactcttgttgttgaagcaaccatcgaagaagggggttcatcatcaagaatggaggtttcttccagtgaggtagctggacctagtttgagttctgtggagcaaagcgaatccccagagaaagaagcctctgagataagagagcagtccatggttggccatgtcgaagcacatggaggttctgtcagccatgctgatccttcagtatctgatataagttctcagccgagtactgaaagttcaacaaatggtgattctggcagtggtgtaacaccatccttcacaaacgcagttctttagtttcttcataaaaaaaatgacagcggcaccgatcgagcatcatcaggttggtcgtcttcagcagtacttcgagctaggcgacttttgtgtggggcgagttcattgctgaggaaaccactgggagggtatatgtttgttgcaggaaatttcttagtgcttcaaagggactaggcaacattagcattattagcactgcactgtaaaaatggctagatatggttgttgcttaatttggccagcactctcgtttgtgaataccttgtggatccgacagtcaattttgtgccgtaaattaattgttaatttgctgcttcgagtaccttagtctatggattgcctttg

SEQ ID NO: 26950 - DNA, 2728 bp, Zea Mays
atggcgggatctcatgaagaaattggtgcatctcaaatgaacaacggcccagaagacatgttgccaaagggtggaatgcgattttactctgagcaagatgcatacgccttttacaaagcttatgctggaaagattgtagactacacgaacaaatttaaaggattaaggaaaaaaatcaacaacaaaaagagttatggctaccttcaaaatccagatttacccacgccagactccacggctccagaggcgcgaaggacggaggtcgcagatggcgttgcagcgacgtatttgacgatgctgaaggtcatttcttacatgttgcagagtgtggaaaaaccttgcaatgaaatggaaaaatgttttgaaggaaatggcaccgctgaggtccacaggcagattctttcaacgccatccttcagctatctgcttactgattttcctacttgtgttgtacaagtacttcttcggctggttcaccctcatcgtcaccacatcacctatcttcctaatcgctggcatctttcttggaatcgtcctggtgtacggtgaaccgaacaaccctgaaaaagatcatgtctacaaaaaaaatgataatactcggagtttgaatatccatgatagcagcaaatctattaggggtgtacctcttcctagaattccgtctggtgaagagagagcgccgaagcacaaaaacagtgttaagaaaattaggaagcagtctcgtggtgtagcctcttcttctgaaccaggatcaagtgaatcaggtggttcagatactgatattgctccaatgctccatgcatttcatcatcttaggtcgggcagcaattcgtcaaattcctctcaagatggtgactctgacagtagcaccgaagatacaacagagaatcaacagggcaacgacggcaggatatcccgcgaggggaaacaacatgttaaagttgttgcatggactgctgatgaccagaagaacataataaaaatcgggtgcttggagattgagcgtaaccaaaggttggagaccctaattgctaggcgtcgggcaaggaaatacgcagacaggaacttggcagagtttggcagcactgattccttacccactattgaagagctatcaaagttcaatgttcaaattcctgctgtttttgctcctaggaaaaatccttttgatcttccttacaatgaagataacttcccagattctgctccatctgcagtgttggaaacgagatacccatttgatctaccaagtgagcaagcaaacgagagcagctcttatggagccaactcaagccatgatgaacctattcccgtagcatgtcatttacagagtgcactgttgaggaggcatgagagcttcactgaaggagcaccattccttagtgactttttgcaagatacacagccttcccgattcagaccatacttcatgacggaaaaaatggctaacgaggaaatgacagatccagttcttgaaggagaaactagtgaaaagagcaactctaaggccagctctgctcaagactcggatagtacttcttcagttgctgaccaagaaagccagaaggatgttctagaggattgctcaaaccaaggacaacaatcttctttcagtcaaacagaggaacatgcacatatagctcggcatgcaagggaggtttctctttcccttgacatggaaccacctgtcttaattagtgattcctctgatgatgacatatcactgtctggtgaacatataaatgattgggaggaagcacaacagagtgaaaattttagtttgtcccagaatacatggcaagaggatcctaatgtcatgcaacaccatcaagaaatagatatcacaagcaatggattgaatcaaatgtcaccacattcgaatgatcttgagttgacgtcgtcatcaactgaaactactgatgatccttttgaagtgaatgacattgaaccaccagctaaggaagtggtggtcgttgatgatacccacgttgtggatcctgtatatgattcaagtccttcgggaagcgagaggcctgcacctactggtttagtaattgacggacctgtcctaaaagatggtcatgcttgtactcttgttgttgaagcaaccatcgaagaagggggttcatcatcaagaatggaggtttcttccagtgaggtagctggacctagtttgagttctgtggagcaaagcgaatccccagagaaagaagcctctgagataagagagcagtccatggttggccatgtcgaagcacatggaggttctgtcagccatgctgatccttcagtatctgatataagttctcagccgagtactgaaagttcaacaaatggtgattctggcagtggtgtaacaccatccttcacaaacgcagttctttagtttcttcataaaaaaaatgacagcggcaccgatcgagcatcatcaggttggtcgtcttcagcagtacttcgagctaggcgacttttgtgtggggcgagttcattgctgaggaaaccactgggagggtatatgtttgttgcaggaaatttcttagtgcttcaaagggactaggcaacattagcattattagcactgcactgtaaaaatggctagatatggttgttgcttaatttggccagcactctcgtttgtgaataccttgtggatccgacagtcaattttgtgccgtaaattaattgttaatttgctgcttcgagtaccttagtctatggattgcctttg

SEQ ID NO: 26951 - DNA, 2946 bp, Zea Mays
gttgattggcgatgggacgatggaatcgaaactgtcgtcgtgggtgatcgttcaatacatccaaaataggaggagcgacgtgggaaagcgccccgcgtcctcctctccatttcgctctgtcgtccagggacagggaggcagggaagggatgctgctctccgtccctccctcccccgccacctgagcccgcccccccaaaaaaaagttttaaccaaccaaacccaccaccacctgcctgcgcgattcccatcccaccccaattaacccggaagaagagctcgcaacgcccccggtgggatcgccggacacctacgcgggcctcgccttgaaatccctgttggaaaccgaggaggatcatgtcgcgggtggcgtcgttgtcgccgtccttatcgggcgacgaggtggaggtggaggaggaagacgacgagggcgtcgacgggtaccgcaagggcggctaccacgccgtacgccccggggaccagttcgccgccggccgctacgtcgctcagcggaagctcggatggggcaacttctccaccgtctggctcgccttcgacgtccaatcacagagatacgtggccctgaagatccaaaagagtgcgcctgagtttgcgcaagctgctcttcatgaaatcgagttcctatcagagatcaccaagagggacccgttgaactgcaaatgcaccattcagctgatagatcacttcaagcacacggggccgaacgggcagcatatctgcctcgtctttgagttactgggagatagcttgcttaagctggtacagtacaaccggtacaaaggcatcgggttcgatagggtgaggcaaatatgcaagtcgattttggtaggtcttgattacttgcacaatgagcttggcatcatccattcagatttgaagcttgagaacattctccttgtctccacaattgatccctccaaggaccccattcgctctgggcttaaacctaaccttgagaggcctgaggggtaccctaacggtgaggctggtcttaacgcgattgagaataagctaaagatgagagcaaggagggtgcttgcaaagcttgctgagaaaagaaaatcagctgtggaatcttcacgctcagaaaggagcttggatggaattgatctgacatgcaagattgtggactttgggaatgcttgctgggctgacaagcaatttacagattttattcagacaaggcagtatcgggcgccagagatcattctaggtgcaggatactcgttttctgttgacatgtggtccttcgcatgtattgcttttgagctcgcaacaggagaaatactatttacacccaaggaaggccatggatacagtgaagatgaggatcacttggctttaatgatggaactacttggcaagatgccgaagaagattgcaaccatgggaacacgatcaaaggaatattttgaccgccatggagatctgaagcggatacgaaggctgaaattgtcatccattgaacgtgttctcgttgacaaatacaaaatttctgaatctgatgcccgggaattcgccaattttctttgccctttactcgactttgcaccagagaagaggccaacagctttagattgcctaaagcatccatggcttaaacatgacgaggataaaacatgtgggtctcttaacaataatgatgccaagagcattgatctggtccaaagcacagggagtatcaccaccgttgactgtacaaatattgatttgacgagcaaaaaaggcagctccactggaacttgtgataagactgttgatgcaaaatacaacacaagaagcattaccagcaatgctaccatgaacacttatgtacaacccacttctggaagttttgccaacagacttgcgaaaaatgttgatgtaaatccgaacattggatccatcagtaatagagatgccaagagttctgatatgaaggcccacatgggaagcaacaccatcagtgacgccaaaagctctattgtaaagctagatacaggtaacatcactgatagaaatgccaaacctgtcgatataaaacccaactctgacaacatctccagcagagatgacaagagcagtaatgtggatactaccacttcctgtgttgtaaagaaagacgtgaagcacagcattagaagtgttgttaattcttatatcaagaactttgatgcaaaatgcaacactgcaagcactgctaacagtgatgctagtaactcatcagaaataaaacccagcactagaatttttaccagtactgataatgccaagtgtatggacataaaaccgatcagcgaaagtgctaagagcaatgacaccagtgctaagagcaatgacaccatcaatgctaatgtgaaatccaacactggaattgttgcaaacactgatgccaagagcactgatgaacagactaacactggaagtgttgacagcagcggtgattacagcgctgactcaaaacaaaacattggccgggttgctgcaagcatacagaggttggagagcagcatgagtaaagtgcaaatcgggaaatacagggacaaccttcctcaagattgaggatctggcaggtaccagctggcgttattgtatatctctctattcccgctaactgtacaaaactttgtatttgcacacagaatgtacacggagtggtagagaatatcgctgttccttttatggtggatgcactggaaagggaagaattgtactctgaccagccacagcatctcttttgatcatgtccatattctgctgtcagtgaaaaaagagatttcattatgtcatttaacacggatcaccaattatgtgagcaggggtgtctgacattttttgtttggtttatggtttgagatttgcatgtaaaaagtgggacatgtgttgtataaaactattctttgatgttcatttcatggtgaacgatcatatagatggaaacttttca

SEQ ID NO: 26952 - DNA, 1118 bp, Zea Mays
caaaatcggggagcatctgtttacttcttaatgagatgccgagacgcaaggctgtgcagcgccgggggagtgcgggtggtgctgaccgacttccacaggagcaaccgtacggacttcctgctcgccgggccggcgttcgcgggcctggccaagcccgggatggcccagcagttgaacaggcgagacgccctctccgtagagtacaaaaggattccctgcgagtacaaggagaagaacctgtcgatccgggtggaagaagcgggcgacaggagccggggcaagctggtggtgaagctgctgtaccagggcgggcagaccgacgtactggcggtggaggtggcccccgtggggtcgtcgtcggagtggcggttcatgacaagggcgtacgggccggtgtggagcacggaccgggcccccgccggcccgctgcagttccgcgcggtcgtcacgggcggctacgacggcaagtgggtgtgggccgagcaggaggtgctgccggccgactggcgccccggccaggtctacgacaccggcgtccgcatcgtcgacgtcgcccgggacgcatcccgcggctgcaccgccgccgccatggacgactggaagtgaagtgaggatatggctgggtagattaaaaatacgtatgaatacatactaacacgtcgccacatcggtgctgcgacactctggtaagaagaggacagcatgcaatggctccaagaacagcatcccccccaagcgcgtccggctgtccagaggagaggaggaagaagattggagtagctagcagctagggtgtaattgtgtatgcaggatcttctatcaaggtcgatccgattagatgcaggcaaaaaaaaagagctgggatccagtcgacagttctaatgggtcatggcgtcatgccatcctggctgtaccacaaactcgactaaaagcaaaaggaaaaaattaacaaaaaatcacgctatcattcaactaccatgcacggatccataaaattaccccaaaaaaaaaccaatcacaaaatcaaaacaagttttctagatctcatcgtactttccgtggtagaggtatatggccgcctgctcgctatctgttctgttccctgctccaacatccag

SEQ ID NO: 26953 - DNA, 1484 bp, Zea Mays
caactatccctaatcgccagttcgccaccagcctccgcctctcccctcccactcggccactcccagtgccagccgccgtgcgctcgctcgcgcgcgctctctttctgggacgaccagtgggatatctccaccgccgccttacgccaggtgcggaccttcgccgatctcttcgccagcgaagagcgtccatcagggtttacatggaccggcccctggatgtgttacattgtaatcgataaaagtgtagctagtaaaaatggtggcccttgcaaatgaagaggccttggcccatgatgaagatatcatggatgatgttgattctgatgttgaagaatcggactcagaagacgattcaggtgaagaagctcaggataagccttcagacaaagctatatacaacaaggaggccatccttgaaaaacttgaagatattgcctggcccaagtatgtggactggatacacaagctcaccattgagcatgatcagggggaaaaggttgatgtgaatgatgatcttgctcgtgaacttgcgttttacacccaagctttggatggcacaaggcaggcctttgagaagctgcagtcgatgaaggtcaggttcctcaggccaacagattactatgctgagatggtgaagactgatgcgcacatgcacaagatcaaggggaggctgctgtcagagaagaagaggatcgaggaggctgaggaacggaggaaggctagagattccaggaagaaagcaaaggaggttcaggctgagaagaagaaggagagggctaagcagaagaaggagcagattgagtcagtcaagaagtggaggaagcagaggcaacaagggggattcaccaagggaaatgatgatgcaccagaccttaattttgaaggagaagaaggatttaaacaatctaagaaaaggagacctggtgtttctcctggtgacaggtctggtggtcttgctaagcgaggtaaagaaggaaagaacaggagggcaaaggattccatgtttgggcacggtggtcgtaaagggctgaagaagcaaaacaccgctgagaccactaatgatttcagaagctttaaccaggggggtcagtctcaaaacaagaagagaaagaggttttgaacttttgatggatatattaagaatttgggtgagtctcaaaaccagaagaggaagaagttttgaacttttgtgttattactattcccccctgcggcattattttgttatggtgtgtgccagaaggaaaaatagtctagggaagcagtccaaacataagacttaatgttttgctttatctggtaatggtcttcttttatcacggaatgcggattatggccctcttcggtttgagggactaaagattagtccctctattttagtctcatttagtctctaaattaccaaatggtgggactaaaacatggactgaactgatttagtctctagtccctcaatgagtggctaaaagagattaaactatatt

SEQ ID NO: 26954 - DNA, 685 bp, Zea Mays
ttatatattgtggaatggctccaacggttttggctggaaaaatagatcctgctctttttgaagtcctttatgcttcacagcatgctatcttcttttttgctagagttccacagatatggaagaattttacgaataaagggaccggcgagctaagcttccttacctgtttcatgaactttgctggttccatcgtaagagtttttaccagcatccaggagaagactcccttaagtgtgatcatgggctccgcaatcggcatcgtcatgaatggtacgctcttgggtcagatagtactgtaccagaagcccgctccaaagaaacagaagaaagaagattaagcaacatggagaagctgcagaaagttcttcctggttgtttaggattctgttccaacactcgctccacatctgaacaaatggcaccagtataggaagttgttggcaacttgttacgagaaaagaacatagtcggactattgctatataacaacatttctgtgctgttgtttttagcacttagcagtgtaccatgacttgaatagttcatataactgcctttagatattgactgcaagctgctgctgatgcgttttcccttctgctgtgccgttccatattttagtttgagttaaatgcatgaggatttatactgcaccataaaataaatttagagaaccaaaagcaca

SEQ ID NO: 26955 - DNA, 1513 bp, Zea Mays
actgtcttgacgcggcgtggtagaagagcgtagaaattgaggaagccgctggaattctttgtttgtttgtgggatgctggtggattcgcgcgatccttgctgctgcttgagtgtagagcacgaactcttgcagttacttcctctctcaagagcttcccctgctaaacaaaactctagcttctcggtcctgacctcaaggctggctggctggacgttgatcagcgaatatgatctcagcactccccgtgctctgctatggggtcacagctagtgcgttgcaatcccaatcgatccaccaaataacatcctctacaagtcctgcaccagctttcttcaaactatcaagggacccctcatccttgacagtttgtagcccacaaatacaggcaataagaatccaatcactgcggggcaaccaaaatttgaaggccattgagatgagtgaagggaatagatggggctcagggatgaagctggatgtcatgggcatgacaattggatgcttcatatcgtgtccactgcatacgaacaacctgctgcctttcatctctaagatcctcgggtattccatcattgctgcttccactgttggcaagctccctcagatactgaaaattttgaagcatggaagtgttagaggactaagtgtggcatcctttgaacttgaggttgtcggctacacaattgctttggcatattgtattcataaaggacttcccttttcagcttatggggagctagcttttctgttaatccaagcaattattttggttgcaatcatttactattactcaccaccaatgggaaccaaaacatggatgaaagctttattatattgtggaatggctccaacggttttggctggaaaaatagatcctgctctttttgaagtcctttatgcttcacagcatgctatcttcttttttgctagagttccacagatatggaagaattttacgaataaagggaccggcgagctaagcttccttacctgtttcatgaactttgctggttccatcgtaagagtttttaccagcatccaggagaagactcccttaagtgtgatcatgggctccgcaatcggcatcgtcatgaatggtacgctcttgggtcagatagtactgtaccagaagcccgctccaaagaaacagaagaaagaagattaagcaacatggagaagctgcagaaagttcttcctggttgtttaggattctgttccaacactcgctccacatctgaacaaatggcaccagtataggaagttgttggcaacttgttacgagaaaagaacatagtcggactattgctatataacaacatttctgtgctgttgtttttagcacttagcagtgtaccatgacttgaatagttcatataactgcctttagatattgactgcaagctgctgctgatgcgttttcccttctgctgtgccgttccatattttagtttgagttaaatgcatgaggatttatactgcaccataaaataaatttagagaaccaaaagcaca

SEQ ID NO: 26956 - DNA, 1131 bp, Zea Mays
ttgccagctagacgtccagcccgtcacaaaaggcccatctcactgaagagatacgctggtcggcttgtgggcgcgtggcttgtgggccgtgggcttcttcgctgttcgtcgtctcgtcaccactcaccattgccgacgcaagctgcgactgaacctccgtggcgacggaggagacggccatggtggcagcgatggagctcgagatcctaggcatgaatttcggatactgaaaattttgaagcatggaagtgttagaggactaagtgtggcatcctttgaacttgaggttgtcggctacacaattgctttggcatattgtattcataaaggacttcccttttcagcttatggggagctagcttttctgttaatccaagcaattattttggttgcaatcatttactattactcaccaccaatgggaaccaaaacatggatgaaagctttattatattgtggaatggctccaacggttttggctggaaaaatagatcctgctctttttgaagtcctttatgcttcacagcatgctatcttcttttttgctagagttccacagatatggaagaattttacgaataaagggaccggcgagctaagcttccttacctgtttcatgaactttgctggttccatcgtaagagtttttaccagcatccaggagaagactcccttaagtgtgatcatgggctccgcaatcggcatcgtcatgaatggtacgctcttgggtcagatagtactgtaccagaagcccgctccaaagaaacagaagaaagaagattaagcaacatggagaagctgcagaaagttcttcctggttgtttaggattctgttccaacactcgctccacatctgaacaaatggcaccagtataggaagttgttggcaacttgttacgagaaaagaacatagtcggactattgctatataacaacatttctgtgctgttgtttttagcacttagcagtgtaccatgacttgaatagttcatataactgcctttagatattgactgcaagctgctgctgatgcgttttcccttctgctgtgccgttccatattttagtttgagttaaatgcatgaggatttatactgcaccataaaataaatttagagaaccaaaagcaca

SEQ ID NO: 26957 - DNA, 1248 bp, Zea Mays
ttgccagctagacgtccagcccgtcacaaaaggcccatctcactgaagagatacgctggtcggcttgtgggcgcgtggcttgtgggccgtgggcttcttcgctgttcgtcgtctcgtcaccactcaccattgccgacgcaagctgcgactgaacctccgtggcgacggaggagacggccatggtggcagcgatggagctcgagatcctaggcatgaatttcgggtgcgtcctcgcggctctgtccgacgccaagatccccgacaagggctgcctgctcccgctcatctctaagctgctcggctacgccatcgtcgccgcatccaccaccgtgaagcttccccagatactgaaaattttgaagcatggaagtgttagaggactaagtgtggcatcctttgaacttgaggttgtcggctacacaattgctttggcatattgtattcataaaggacttcccttttcagcttatggggagctagcttttctgttaatccaagcaattattttggttgcaatcatttactattactcaccaccaatgggaaccaaaacatggatgaaagctttattatattgtggaatggctccaacggttttggctggaaaaatagatcctgctctttttgaagtcctttatgcttcacagcatgctatcttcttttttgctagagttccacagatatggaagaattttacgaataaagggaccggcgagctaagcttccttacctgtttcatgaactttgctggttccatcgagtttttaccagcatccaggagaagactcccttaagtgtgatcatgggctccgcaatcggcatcgtcatgaatggtacgctcttgggtcagatagtactgtaccagaagcccgctccaaagaaacagaagaaagaagattaagcaacatggagaagctgcagaaagttcttcctggttgtttaggattctgttccaacactcgctccacatctgaacaaatggcaccagtataggaagttgttggcaacttgttacgagaaaagaacatagtcggactattgctatataacaacatttctgtgctgttgtttttagcacttagcagtgtaccatgacttgaatagttcatataactgcctttagatattgactgcaagctgctgctgatgcgttttcccttctgctgtgccgttccatattttagtttgagttaaatgcatgaggatttatactgcaccataaaataaatttagagaaccaaaagcaca

SEQ ID NO: 26958 - DNA, 1609 bp, Zea Mays
caaaaccctagcctctctcacgccatacctcctctctcgctgatccccgcgcacagccaccacgccatcaacccaggctccctcgccccacacctgccgcattgagccagccccgcgggccagtagcgcgttgagctccaatagatacggtgacactgtttgagtcgctggtcgccgcactgctaactgagatgtgtgggaggattgtcgaggagatttgcaagtttgattagaagtgagtagattcttctcccgcagccgtcgccgctgtcccacgcatcccacaactgccaccaactgccacacatcgcctagacccacacgcctcccttgcaatctcccacagcctctgctccatctccaccttcgcgcccacctgctagccctagcgtcgcctactccctgccttcgctcctcctcgatctaggcggcgcggacgtggggaaggacgaccccgtggacgtgttgtggcggtggaggagccatagccaacccgggatcatgcgcagacctgagcgttcaacgacggtggggacaagccgctgcaggtggcgcctgccatctacgacgaggccatgtttctttaatagctccattgtcatgggctactacaagaaccacgtcaagacaagcctaaggatgtgacgaggtgttgttgttatggattcacaactttctttatgactcgaagatctttgggaatcattcaaggaatggagtgcttatgggcccggtgttccactggtgctgaatggcagtgactctgtgatccaactatttgcaaacacatcgagacccacttcaagaaataagatgattgaaacgtcgtgcagcagcaaggcatcaattgaggcaaacaaagccacaacaaggattttggtgaagacgctgatggagggatccgataatgcatgcaaagccagtcgtagctagggaaatccggttgctggcaaagactgagaagcaaaatcggatgttccttgctgagttgggcgcgataccattgctatgcaggctgctgctgtcatccgattggatggcgtaggagaacacagtgtctgctttgctcaatctatcaatctttgagccgaacaaagacagattatggaacaagatgattactccattttatcgtcagtgtgttgaagaatgatttagcaacagaggccaaggagaatgctacaaatatgctattcagtttatctatagtccatgattataagaaaaaaataatgaatgagccaggggctgtggaggagcttgcgtctatgatgaccaaagggacacccagggacaaaaagacacagtcatggtattgttcaacctctcaacacacccgaaaagcttaggttggatgcttgagtcatctgcggttctagctttgattgagtcactgaggaatgacaccgagttggacgaagtagcataatttagatagagcacatccagtttttattgatgcctgactttagcaaccactccatattttgatctatttttttataagtttgagttcatatgacttattttagaacttgagctcacaaactttctcttatttggtcttgtatggtggaattatgtcattatataatctctgttcgtttag

SEQ ID NO: 26959 - DNA, 1212 bp, Zea Mays
ctcaaccgcacgcaaaaccctagcctctctcacgccatacctcctctctcgctgatccccgcgcacagccaccacgccatcaacccaggctccctcgccccacacctgccgcattgagccagccccgcgggccagtagcgcgttgagctccaatagatacggtgacactgtttgagtcgctggtcgccgcactgctaactgagatgtgtgggaggattgtcgaggagatttgcaagtttgattagaagtgagtagattcttctcccgcagccgtcgccgctgtcccacgcatcccacaactgccaccaactgccacacatcgcctagacccacacgcctcccttgcaatctcccacagcctctgctccatctccaccttcgcgcccacctgctagccctagcgtcgcctactccctgccttcgctcctcctcgatctaggcggcgcggacgtggggaaggacgaccccgtggacgtgttgtggcggtggaggagccatagccaacccgggatcatgcgcagacctgagcgttcaacgacggtggggacaagccgctgcaggtggcgcctgccatctacgacgaggccatgtttctttaatagctccattgtcatgggctactacaagaaccacgtcaagacaagcctaaggatgtgacgaggtgttgttgttatggattcacaactttctttatgactcgaagatctttgggaatcattcaaggaatggagtgcttatgggcccggtgttccactggtgctgaatggcagtgactctgtgatccaactatttgcaaacacatcgagacccacttcaagaaataagtgcgtcctattctttgtcacaaataatcatggtgtcaagaaagtttccattgcacttaaccttaagaaggccaacctttgtaccaaaatgggttccatttgtttgtttttgttatgcttcggttagtttgacctttgatattttcatatatcaacaaataactaagtttaatactgttggtatggtcctccatgcttttcaaaaaaaaatacatgtatgccaatctgaataaaagaaagaaagaatgcttgaatgcatctatctctctaccattattgatttgctaattttcatgttcaactgtgtttacaataaatcattttagatattaagacaacaaaaccaatgcatactcggactgccacaaaagagttagctattacccaa

SEQ ID NO: 26960 - DNA, 819 bp, Zea Mays
ctcctctctcgctgatccccgcgcacagccaccacgccatcaacccaggctccctcgccccacacctgccgcattgagccagccccgcgggccagtagcgcgttgagctccaatagatacggtgacactgtttgagtcgctggtcgccgcactgctaactgagatgtgtgggaggattgtcgaggagatttgcaagtttgattagaagtgagtagattcttctcccgcagccgtcgccgctgtcccacgcatcccacaactgccaccaactgccacacatcgcctagacccacacgcctcccttgcaatctcccacagcctctgctccatctccaccttcgcgcccacctgctagccctagcgtcgcctactccctgccttcgctcctcctcgatctaggcggcgcggacgtggggaaggacgaccccgtggacgtgttgtggcggtggaggagccatagccaacccgggatcatgcgcagacctgagcgttcaacgacggtggggacaagccgctgcaggtggcgcctgccatctacgacgaggccatgtttctttaatagctccattgtcatgggctactacaagaaccacgtcaaggtagagtatcccgcttgttgctttatgttgtcgctgcatgtagtctaggtgttcgatgaaatgtcaatccaagtttgctattgttttgcgattgattgatatgtgctagcatctgctgtatggtggtgagttacgaggccattgagttccgtcagtcgaggaaggttatagtcaaagttttgtgattgactgctatgtgctagcttctgttggatctgat

SEQ ID NO: 26961 - DNA, 1309 bp, Zea Mays
ccgctcatccccgcctccgccagctttcccgtggccgtgacgccacccccctctcttctctttcccctcgcattaatggccgctccctcgctatcccctttgtcgtctcgtctcatctcgcccccttccggcttaaccctcaagatttctccctcgctgctcctccttcccgcttgggcgggcgcggcaccttccggttccggtttccggggcctcgggcctcggcctcatatatatatacacgcgcgcggccgtcccctctctataccccctagcatgctcggctcgctccccggattgatcgagctcgctcgttgcagagatggacccggtgcctcccccctcctcttctcgccgggccgccgctgctcccggcccctgctgccgctttgacgcgctgcggcgggcgtgcgccgggaacgccgccgccgccgcgcgggccgccgggtgggcgatcggcgcgctgctcacctgcatcttcgccgtcgtgggctcactcgtcggaatcttcattggtgccttcatggggatgtctaccgaaagcggcatgttccgcggggctggtgttggagcagtttctggagcagtcttctccatagaggctgttgagtcctgcatcgagatttggaggtccagccattcaggaaaatacagcattctctttgtgctggacatcatctcgagcctcttcagcggaagaattgtgtgggagaaagtcagtccagcgctacagcgtgcagtgcaaagccagtacaggaggcatgtcaagggatttgattgataggatcccaaagacgaggttcagtgctgctagcaactgtgatcaggaaactgatagcagctgctgcccagtctgcctccaggatttcggagcacggcaattcgtgagggccctgcctcagtgccaacacatattccacgtgcggtgcatcgacagttggctcctccggcacgcgtcctgcccgctatgccgggccggtgttcacatagaccatatacatatgtaaatgaactcgcagggtggcacctggtgtattttcgtagcgaatacccgtgctcctgttggatatcacaagtatagctgtatacatagggtttttttgctctctctttttgtcacttcttgagacttgcttgtgtggggctatgctttcagctgcacgtttttgtcgaagcatgatgccttgatatgtacatctggaaaatggaccgactaacaagctccctgaattctggcactgtgcttcaaaatctgtgtctgttaactgctgatgctgacatgctaatgcaatggtttgctactgggcaa

SEQ ID NO: 26962 - DNA, 592 bp, Zea Mays
ggtctgcatttctgcaagaaagcggcaccagtgttgactatgcccataggcttattgggaaggagattgaagaagtcgacactgatgaacattatcagccaaaggccgccgccaccgccataggcatctcaatatcatgctaaagcaggagccttcagcccgtatcctccttgtcatgcacatgaaagaccttaaccacatgcatgcctgatgactttctgtagctagctcgaaaaggtccatacatctcatcgagagtctggtcgaccgtcgatgccttatgtgttgcgtggaagacatttgtgacgcttggttcaggagctgttgcagcgtttgtgtatataatattctcaggtttttggctgtcagcatgtgcgggcatatatatatattctgctgctggcgtggctgtggtaacaggcagtctattctttgctattgctacctgggccttgtgaatgaattcaattcaatataaaatcagcgcacgtgcttctgatcgttttctctttggtaaatatgtctatgtagcccgcgaaccttgtcttcgtgtgaatggatggtgctctttgacgcttgggaacatgtctgg

SEQ ID NO: 26963 - DNA, 1297 bp, Zea Mays
ggtttgcctgtatactggcatgctgcagcacctgcagccctgaccggcgacgattgggcggccgtcgctgcctccttactccaggtgtccagctcttcttcgtgccatttgccggccgtgagcaccaccagacgggatgagcaacccgggggcaccggacaccgtcactgagtcggcggagctggtcctgccgttgttgccgccgcaggacctcgcggccgcggcatcggcctgccgcgccctccgcgcggctgtgactgctgtcaccgcgcgccgcgccggcgacgccgcacgtggcctagagccgctccccatcccgttccgcaactacgtcgattccaagccctatgcctacttcctgtatacccccttctccctcacccggctggctcccggcgcctccgcccccagcgcccagccgtggggtgccgcctggacccggccgccccgccccacctggccccgccccaacctcgacggcttaccatcagccgtgtacgggtgcgcgtgcgcggcggcggaatgcggtggtacccagtgcgcgtgcgccgatgtggaggccgatgcagcgggctcgggcttggaggccgggatggggagcctcacggagtgcggtgatgtctgcgcgtgtgcgccgtcatgtgggaaccggcggactcagcgcggcgttgctgtgcggctgtgcgtcgtgcgccacctgcacaaggggtgggggctgcacgctgcggaggccctcagctgcgggcagtttgtgtgcgagtacgccggagattgaagaagtcgacactgatgaacattatcagccaaaggccgccgccaccgccataggcatctcaatatcatgctaaagcaggagccttcagcccgtatcctccttgtcatgcacatgaaagaccttaaccacatgcatgcctgatgactttctgtagctagctcgaaaaggtccatacatctcatcgagagtctggtcgaccgtcgatgccttatgtgttgcgtggaagacatttgtgacgcttggttcaggagctgttgcagcgtttgtgtatataatattctcaggtttttggctgtcagcatgtgcgggcatatatatatattctgctgctggcgtggctgtggtaacaggcagtctattctttgctattgctacctgggccttgtgaatgaattcaattcaatataaaatcagcgcacgtgcttctgatcgttttctctttggtaaatatgtctatgtagcccgcgaaccttgtcttcgtgtgaatggatggtgctctttgacgcttgggaacatgtctgg

SEQ ID NO: 26964 - DNA, 1001 bp, Zea Mays
ataaaatgctgtagaagttttatatttaatataatttctgattaattcggtgaaaaagctaaaaataaactacgttaaacatgtagtgacaaaattaaaatcttctccgctcctcgagcccgaggtataaatgaccctatacctggtttgcctgtatactggcatgctgcagcacctgcagccctgaccggcgacgattgggcggccgtcgctgcctccttactccaggtgtccagctcttcttcgtgccatttgccggccgtgagcaccaccagaagagagagctcccagatagagctgttccccttcagtgtagcaaatggcgaggataaaacccaagcaattgttaatccaaagcaagacgaagaaggccccatctcgaatcagctactctactatcatcacatggaacttgattgtcatattggttcttctatctctttatgctacctacaaccattggcatcaaaggagattgaagaagtcgacactgatgaacattatcagccaaaggccgccgccaccgccataggcatctcaatatcatgctaaagcaggagccttcagcccgtatcctccttgtcatgcacatgaaagaccttaaccacatgcatgcctgatgactttctgtagctagctcgaaaaggtccatacatctcatcgagagtctggtcgaccgtcgatgccttatgtgttgcgtggaagacatttgtgacgcttggttcaggagctgttgcagcgtttgtgtatataatattctcaggtttttggctgtcagcatgtgcgggcatatatatatattctgctgctggcgtggctgtggtaacaggcagtctattctttgctattgctacctgggccttgtgaatgaattcaattcaatataaaatcagcgcacgtgcttctgatcgttttctctttggtaaatatgtctatgtagcccgcgaaccttgtcttcgtgtgaatggatggtgctctttgacgcttgggaacatgtctgg

SEQ ID NO: 26965 - DNA, 805 bp, Zea Mays
ataaaatgctgtagaagttttatatttaatataatttctgattaattcggtgaaaaagctaaaaataaactacgttaaacatgtagtgacaaaattaaaatcttctccgctcctcgagcccgaggtataaatgaccctatacctggtttgcctgtatactggcatgctgcagcacctgcagccctgaccggcgacgattgggcggccgtcgctgcctccttactccaggtgtccagctcttcttcgtgccatttgccggccgtgagcaccaccaggagattgaagaagtcgacactgatgaacattatcagccaaaggccgccgccaccgccataggcatctcaatatcatgctaaagcaggagccttcagcccgtatcctccttgtcatgcacatgaaagaccttaaccacatgcatgcctgatgactttctgtagctagctcgaaaaggtccatacatctcatcgagagtctggtcgaccgtcgatgccttatgtgttgcgtggaagacatttgtgacgcttggttcaggagctgttgcagcgtttgtgtatataatattctcaggtttttggctgtcagcatgtgcgggcatatatatatattctgctgctggcgtggctgtggtaacaggcagtctattctttgctattgctacctgggccttgtgaatgaattcaattcaatataaaatcagcgcacgtgcttctgatcgttttctctttggtaaatatgtctatgtagcccgcgaaccttgtcttcgtgtgaatggatggtgctctttgacgcttgggaacatgtctgg

SEQ ID NO: 26966 - DNA, 3759 bp, Zea Mays
ttttttgattttttttatttattattattaatttgccgaatgtagcactcgacaaaagttttgccgagtataaaatggctttgacactaggcaaagaacacgattacggtagtgcttgacgaaatgaccgatagggaaaaaaatagaataggagatagagcacactatgtatgaaaaaatgtaataggaaatagagaacacgagcactaatctattagttcaccatcagtaacaattctcatgtcggtagagcacactatttattattcacttcaaagccggctgcggcgctgcgctgccgctcattctcctctctttctggctaattataaacgtccaacacggcaccaccgagcagcgaccgcacccaacaagaaccaccaccacaccagatatccatgtgctcgccctccctcttccttctggggcgatataggttattgcgcgttttgcagcaccccctccctggttttgctctgcatcagtttccttggattggatcgatcggacctctcatcagctgttaggtggccacttgtcctatcagcagaaccacagccaaagccagatagatagtcctcatcttcgtcttcggcctcctcaccccttgaggaaaccatcatcggggagaaaccaccaagagcaagagcaagagcagaagctcaacttcttcctccctcagcgtttctcaagaacaataaggtgttgaagtaactacaagatccggtggcgggccacggcacgatgagcaatcttaagcttggtgttgaagttaccagcgctcatgatctcctcccgaaagagcaggacacggccaatccttttgttgaggtcgacttcgacggccagaagttccggacagccgtcaaagacagggacctcaaccctgtctggaacgagcagttctacttcaacatatctgatccatcccgcctcccagagctacaccttgaggcctacgtataccatgcagaccgtgccagtaattccaagtcctgcctgggcaaggttcgcatatcgggcacatccttcgtcagccagcctgatgctatgcccctgcactacccgctggagaagcgcacgatcttatcacgtgcgcgcggtgagcttgggcttagagtcttcctcacagatgatccatcagtacgagtgtctgctgctccagctcagcaggagttcgatatgctaagcacgcctaccactgcgcaggagcagcaggcagcagccaactccatctcaaatcctttccaagagaccagagcaaacccagtgaggcagttccagcacttaccaagagaacagcagcgtcctgcacagccacagccatactacgctgaaggttcatacggagaccagcagcagcaacagagaagcttttctgcggttgcgaacaaagctgcagcccctcagcctcaggttcaggtgtcaaggatgtatgctccaggtccacagcagcctgtagacttccagctcaaggaaacaagcccaacgcttggcggcggccgtgtcattggcggccgggtgtaccctggccagaaggctggggcgtacgaccttgtcgagaagatgcagtacctcttcgtgcgcgtggtcaaggcacgcgacctgcccaacatggacatcactggaagccttgacccttacgtggaggtgcaccttggaaactacaagatgaagacaaagcactttgagaagaaccagaggcctgagtgggacgaggttttcgcgttccccaaggaagtcatgcagtcgacgatgcttcaagtcgttgtgaaggacaaggatgtccttcgggacgactatgtcggccgagtgagcattgatctgaatgaggtccctctcagggtccctccggacagcccactggcaccggagtggtaccgtctgatgggcaaggacggcgtgagggacagaggggagctgatgcttgcagtctggtacggtactcaggcagatgaatgcttcccaagcgccatccatgcaggatcgacaccggttgattcccatcttcacagctacatccgcgggaaggtgtaccccgcgccaagaatgtggtatgtgagagtcaatgtgattgagggacaggacatatacccaatggagaaccgcatacctgatgtgctggtaaaagtgaggctgggccatcaactgctgaggacaaggcaggttcgctcgccgaccagaaacttcatgtggaacgaggagctgatgttcgtggcagcagagccgtttgaggacgacttgctcatatcagtagtagaccgtgtggcacaagacaaagacgaggtgattggtgaggctatcataccgctcgcgaggcttccaaggcgggctgatcacaaaccggtactcccagcatggttcgatctaagaaggccagggatcatcgacgtgaaccagctgaaggaagacaaattctatgcgaaggtaagccttcgtgtctgccttgaaggtggttaccatgtgcttgatgagtccacacagtactgcagcgatctccgtccgacgatgaagcagctgtggaagccaccaatcggcatgcttgaagtcggcatcttaagtgcgaacggtctcaatccaacgaagaccagaaacagccgtgggtcgtgtgatgcgtactgtgttgccaagtatggttccaaatgggtccggacgcgcacgatagttgacagcttgagccctcggttcaacgagcagtacacatgggaggtctttgatcatggaactgtgctcacaattggtctatttgacaactgtcacataagtggagatgataacaaggacggttcctcaggccacatggataaacccatcgggaaagtgaggattcggctttcgacacttgacacggcgcgtgtgtacacgcactcatatccattgctcttcctcagcccatcaggagttaaaaagatgggtgagctccaccttgccatccggttcacagtcacatcccttatcaatgtgctcttcacatactctaggcctctcttgcccaagatgcactacgcacagcctctgtcaatagttcagcaggaaatgctccgccaccaagctgtgctgcttgttgcgcagcgcctgggacgcatggagccaccagtccgcagggaagttgttgagtttatgtcagatgctcgctctcacctgtggagcatgcgacggagcaaagctaacttcttccgccttatgcaagtcttctcagggttcattgctgcagggaaatggtttgctgatgtttgtcagtggaaaaacccggtcaccacagtgctggtccatgtgctctttatcatgcttgtgctctatccagaccttatcctgccaacaattttcctctacatgttcttgatagggctgtggaattaccggttccggccacgcttcccaccacacatgaacacaagaatatcttacgctgatgttgcacttccagatgagcttgatgaggaatttgacacattcccaacctcaaagagcccagatctcatccggatgaggtacgataggttacgacacgttgctgggaggatacagactgttgttggggacattgccactcagggagaaagattacagtcactgctcagctggagggacccaagggcaacagctatgttcctgatattttgcctgattactgcgattatactgtatgtgacaccattccaagtggttgcactctgccttgggttcttcgggatgaggcatcctcggtttcgccacaaggtgccatcagcaccagcaaacttcttcaggaggctactg

SEQ ID NO: 26967 - DNA, 1356 bp, Zea Mays
gttttttcactgcattcaccataatactgaattaaagatgtgaatgggggcactagctacattaggttgggttcaacagtggtcgaagccgctcgatgacatggcggcgcgggcgggcggtatcgatcggcccggccccaatgttgatcggtggagctgcagatcagtcggatcggtcataccgatcgtgttggaacctaaccggacgatactgacccacatgctggagacccggttgataccaaactagatcagtcgatatcgactgcttggtaccatgtggcggtttccgattatttcgtgtcattttttggatttcaaaaaaataaaaaaaattgaaataaattcctggaatctgttctattaaatagagggggagagtttgagttcattcacaccccttactctctaaattgctcttacctattgcactccttactctcgtttcaccccactaaattattgtcgccatgtctcctcgagctcgaacgttgagatgaccaaagatgaggtactcaatatgctacatcaaattatgatggatgttgcgataaacttgccctctgggtcttcaacgaggaggcgaaagacaacatcagagctacatcgaccggggtcgtgaagtcgcccacgaccggttgatgcaagactacttcaactactcgtgcatctactttcatcgaagaggtgctggtctggatgctagctggattccaccgtggtcaagccctgtgatggaccatccgagttcctccagtgcagtgagggtcctctcttgttccttccacttcctcgatttccggcactgcatctgcttctggattgcggctccgtggtagtgcaggcataagcaacgggagtctttcggaggtactcactatggtagatagagtgcgggaagttctacctcatatccctgatgagctaatcttagaggatttgatgaggacaaacaacataaacgcgactgtgaataatcttctgctgatgcaatagtagatacgtcaatacaacatataagtgtgacgtttactggctataaaagcttataagaaaagtatgtgtatagctaagggcgagcctgggtgtaacacgtctttggttctgtaataaaagcccttttttctttatttttgtctgcagaggtctgtatagcaaccaatattatcggaataaaatttgttttgctactatgtagtaatgtagcctgcgtccggacgacaagtgcttcccggaattacgtacgcttgctcaccatgtccatatagactgttctagaccggttcattagttgatcattggttgtaagttttgttcctaattaaaactacattagtggtagcaatatcatttttt

SEQ ID NO: 26968 - DNA, 2191 bp, Zea Mays
aatttggtccccgcttcccttccccctgttcctcgcgttcctgtcaaggctcagcctcgccatcgctcgcggcatcgccgcttgccctccccttccccaagcgaataaagtgccggaagcgcgcgcgtcaagcgaagccctcgcccccgcgctccgctcaggatcgggagccaccccctagggttagggctcggttttgcatcgttccggcgtcgaccgatgcgcggcgcatggcggcggtgaactgcctctacgtcgcggctgcctctacggcggccagcgccgccgcgctgcagtggtgggcatcctcgctcttcgacggcgacgctggcgcgggcgaggatggagcctggctcggagccgtgctgcggtcaaaggtcaccgtcgcgctcctggcgaatctggcggtccacgtgttcctcgtcatcatcctcgcgctcaagactctattttttgttcagctaacttctatagagaccagaaaagtgttggagcacatcattaactatgtaatttacaagggaacttttctcccactggttgtgcctcctacttctcagcaaattatcctttggtcaacttggttggtcattctttgttcgctgaagatgtttcaatcattggccagagaacgtctagagaagctcaatgcttctccctcagtgactccttcaaaatattttcgtgtgtactctgcattgcttctggttttatcagctgatctactttggtaatattccctggatgtggctctgtgcagggttttgcagcttctgtaattccaagttgttttggctcctgttctttgagccacttagtattgcctttgatacactgcagtctattatggtgcatgggtttcagttatttgacatctggcagcagcatctaatggaaagtggtgcagacttccttgatttacagaaatcttataagcaagcagcaggatctttttctgaatggaggggcaagcttactaggaactttggttttgccattgatttgataagcttgttgatgtcacttggtcattactcgatgatattttggcttcgtggtatggcgtttcatctggttgatgcagttctcttattgaactcgcgtgctcttatagtttcctttttgaagaggattaaagctcacatcaagttacggaaggcacttagttcactcgatggagcacttccagatgctacgtatgatgaaatttgtgcatatgatgatgagtgtgccatctgcaggggaccaatgggtcgagctaaaaagttgtcatgcaaccatctatttcatctagcttgtttgcggtcatggttggatcaaggactaatggaaggttactcctgtccaacttgtcggagaccgctcttattgtcatctgaagggcaaagaaggtctacaactgcggaggtagcaaatgttcagcgaattgcggaacaacttactatggggatgaatcagcagagagttcctggtaatgaacatcctgttgaacagcagaacccttcagatgctgtttggagaggtgctggtctggatgctagctggattccaccgtggtcaagccctgtgatggaccatccgagttcctccagtgcagtgagggtcctctcttgttccttccacttcctcgatttccggcactgcatctgcttctggattgcggctccgtggtagtgcaggcataagcaacgggagtctttcggaggtactcactatggtagatagagtgcgggaagttctacctcatatccctgatgagctaatcttagaggatttgatgaggacaaacaacataaacgcgactgtgaataatcttctgctgatgcaatagtagatacgtcaatacaacatataagtgtgacgtttactggctataaaagcttataagaaaagtatgtgtatagctaagggcgagcctgggtgtaacacgtctttggttctgtaataaaagcccttttttctttatttttgtctgcagaggtctgtatagcaaccaatattatcggaataaaatttgttttgctactatgtagtaatgtagcctgcgtccggacgacaagtgcttcccggaattacgtacgcttgctcaccatgtccatatagactgttctagaccggttcattagttgatcattggttgtaagttttgttcctaattaaaactacattagtggtagcaatatcatttttt

SEQ ID NO: 26969 - DNA, 2180 bp, Zea Mays
ccctcgccgtcgctgctgcaataatttggtccccgcttcccttccccctgttcctcgcgttcctgtcaaggctcagcctcgccatcgctcgcggcatcgccgcttgccctccccttccccaagcgaataaagtgccggaagcgcgcgcgtcaagcgaagccctcgcccccgcgctccgctcaggatcgggagccaccccctagggttagggctcggttttgcatcgttccggcgtcgaccgatgcgcggcgcatggcggcggtgaactgcctctacgtcgcggctgcctctacggcggccagcgccgccgcgctgcagtggtgggcatcctcgctcttcgacggcgacgctggcgcgggcgaggatggagcctggctcggagccgtgctgcggtcaaaggtcaccgtcgcgctcctggcgaatctggcggtccacgtgttcctcgtcatcatcctcgcgctcaagactctattttttgttcagctaacttctatagagaccagaaaagtgttggagcacatcattaactatgtaatttacaagggaacttttctcccactggttgtgcctcctacttctcagcaaattatcctttggtcaacttggttggtcattctttgttcgctgaagagaacgtctagagaagctcaatgcttctccctcagtgactccttcaaaatattttcgtgtgtactctgcattgcttctggttttatcagctgatctactttggatgtggctctgtgcagggttttgcagcttctgtaattccaagttgttttggctcctgttctttgagccacttagtattgcctttgatacactgcagtctattatggtgcatgggtttcagttatttgacatctggcagcagcatctaatggaaagtggtgcagacttccttgatttacagaaatcttataagcaagcagcaggatctttttctgaatggaggggcaagcttactaggaactttggttttgccattgatttgataagcttgttgatgtcacttggtcattactcgatgatattttggcttcgtggtatggcgtttcatctggttgatgcagttctcttattgaactcgcgtgctcttatagtttcctttttgaagaggattaaagctcacatcaagttacggaaggcacttagttcactcgatggagcacttccagatgctacgtatgatgaaatttgtgcatatgatgatgagtgtgccatctgcaggggaccaatgggtcgagctaaaaagttgtcatgcaaccatctatttcatctagcttgtttgcggtcatggttggatcaaggactaatggaaggttactcctgtccaacttgtcggagaccgctcttattgtcatctgaagggcaaagaaggtctacaactgcggaggtagcaaatgttcagcgaattgcggaacaacttactatggggatgaatcagcagagagttcctggtaatgaacatcctgttgaacagcagaacccttcagatgctgtttggagaggtgctggtctggatgctagctggattccaccgtggtcaagccctgtgatggaccatccgagttcctccagtgcagtgagggtcctctcttgttccttccacttcctcgatttccggcactgcatctgcttctggattgcggctccgtggtagtgcaggcataagcaacgggagtctttcggaggtactcactatggtagatagagtgcgggaagttctacctcatatccctgatgagctaatcttagaggatttgatgaggacaaacaacataaacgcgactgtgaataatcttctgctgatgcaatagtagatacgtcaatacaacatataagtgtgacgtttactggctataaaagcttataagaaaagtatgtgtatagctaagggcgagcctgggtgtaacacgtctttggttctgtaataaaagcccttttttctttatttttgtctgcagaggtctgtatagcaaccaatattatcggaataaaatttgttttgctactatgtagtaatgtagcctgcgtccggacgacaagtgcttcccggaattacgtacgcttgctcaccatgtccatatagactgttctagaccggttcattagttgatcattggttgtaagttttgttcctaattaaaactacattagtggtagcaatatcatttttt

SEQ ID NO: 26970 - DNA, 2083 bp, Zea Mays
atgccccctcgccgtcgctgctgcaataatttggtccccgcttcccttccccctgttcctcgcgttcctgtcaaggctcagcctcgccatcgctcgcggcatcgccgcttgccctccccttccccaagcgaataaagtgccggaagcgcgcgcgtcaagcgaagccctcgcccccgcgctccgctcaggatcgggagccaccccctagggttagggctcggttttgcatcgttccggcgtcgaccgatgcgcggcgcatggcggcggtgaactgcctctacgtcgcggctgcctctacggcggccagcgccgccgcgctgcagtggtgggcatcctcgctcttcgacggcgacgctggcgcgggcgaggatggagcctggctcggagccgtgctgcggtcaaaggtcaccgtcgcgctcctggcgaatctggcggtccacgtgttcctcgtcatcatcctcgcgctcaagactctattttttgttcagctaacttctatagagaccagaaaagtgttggagcacatcattaactatgtaatttacaagggaacttttctcccactggttgtgcctcctacttctcagcaaattatcctttggtcaacttggttggtcattctttgttcgctgaaggatgtggctctgtgcagggttttgcagcttctgtaattccaagttgttttggctcctgttctttgagccacttagtattgcctttgatacactgcagtctattatggtgcatgggtttcagttatttgacatctggcagcagcatctaatggaaagtggtgcagacttccttgatttacagaaatcttataagcaagcagcaggatctttttctgaatggaggggcaagcttactaggaactttggttttgccattgatttgataagcttgttgatgtcacttggtcattactcgatgatattttggcttcgtggtatggcgtttcatctggttgatgcagttctcttattgaactcgcgtgctcttatagtttcctttttgaagaggattaaagctcacatcaagttacggaaggcacttagttcactcgatggagcacttccagatgctacgtatgatgaaatttgtgcatatgatgatgagtgtgccatctgcaggggaccaatgggtcgagctaaaaagttgtcatgcaaccatctatttcatctagcttgtttgcggtcatggttggatcaaggactaatggaaggttactcctgtccaacttgtcggagaccgctcttattgtcatctgaagggcaaagaaggtctacaactgcggaggtagcaaatgttcagcgaattgcggaacaacttactatggggatgaatcagcagagagttcctggtaatgaacatcctgttgaacagcagaacccttcagatgctgtttggagaggtgctggtctggatgctagctggattccaccgtggtcaagccctgtgatggaccatccgagttcctccagtgcagtgagggtcctctcttgttccttccacttcctcgatttccggcactgcatctgcttctggattgcggctccgtggtagtgcaggcataagcaacgggagtctttcggaggtactcactatggtagatagagtgcgggaagttctacctcatatccctgatgagctaatcttagaggatttgatgaggacaaacaacataaacgcgactgtgaataatcttctgctgatgcaatagtagatacgtcaatacaacatataagtgtgacgtttactggctataaaagcttataagaaaagtatgtgtatagctaagggcgagcctgggtgtaacacgtctttggttctgtaataaaagcccttttttctttatttttgtctgcagaggtctgtatagcaaccaatattatcggaataaaatttgttttgctactatgtagtaatgtagcctgcgtccggacgacaagtgcttcccggaattacgtacgcttgctcaccatgtccatatagactgttctagaccggttcattagttgatcattggttgtaagttttgttcctaattaaaactacattagtggtagcaatatcatttttt

SEQ ID NO: 26971 - DNA, 1389 bp, Zea Mays
gaagaaacgggcatcaagagaattccttaggaccgtagcccatctccgtcctcggacaaacacttttggtgcagttgcaagagtgagaaatactctggcatacgcaactcataaattctttcaagacaatggatttgtttgggtttcgagcccaattattacggcctcagattgtgaaggagctggggagcagttttacgtgactactttggatttcttctgcaaaccagcatttctgacagtgtctggacagcttaatggtgaaacatatgcttcagctctatctgatggctgaaaattcaaacacttcaagacatctggctgaattttggatgattgaacctgagcttgcctttgcggatctgaacgatgacatggcttgtgcaactgcatatctccagtatgtagtaaagtatattctggagaactgcaaagaggatatggatttcttcaatacttggattgaaaaaggcatcatagatcggttaaatgatgtagtagagaagaacttcgttcacctgtcttacactgatgctgttgagctacttcttgggtccaagaaggaattcgagttcccggtaaagtggggtttggatcttcaaagcgagcatgagcgatatatcacagaagttgcctttggtgggcgccctgtaataattagagattacccaaaggagatcaaagctttctatatgagagaaaatgatgatgggaagacagttgctgcaatggatctgttggttcctcgggttggtgaacttattggaggaagccagagggaagagcgtcttgattaccttgaagcccggttggacgagcaaaatctgaataaggagagctactggtggtatttggacctacgacgatatggatcagttccacacgctggtttcggtctcggatttgagcggcttgtacagtttgctactggaatggacaacatcagagacaccatcccatttcctcgagttcctggctctgccgagttttagcgccctgaaagtgttgtcgtatacgtatactttagaaacattctttcctaggatgtaatgtgagaaaggcatacgttgtactgtactactgtttcatcattgtacagagttaagctgagacttgtgattaatcggaggcaagcagtgctgtggcaagctttgtcgtttgttgtaattgtcgtcaaagaatgtcactggtggatgatgcaattttttcacgggtaagactgagaccaacacgaagacttgcatcagacaacgcaaacgcaaaatgagttgcgcagagtactgtgcgtggtgggagcatgcaaagggcgcaggacgatctaaaaatagaatcctctcttctctacgcataactatatagtcattttattggctataagaacgttcaacg

SEQ ID NO: 26972 - DNA, 1427 bp, Zea Mays
ccacatcttttcctatacagaagaaacgggcatcaagagaattccttaggaccgtagcccatctccgtcctcggacaaacacttttggtgcagttgcaagagtgagaaatactctggcatacgcaactcataaattctttcaagacaatggatttgtttgggtttcgagcccaattattacggcctcagattgtgaaggagctggggagcagttttacgtgactactttggatttcttctgcaaaccagcatttctgacagtgtctggacagcttaatggtgaaacatatgcttcagctctatctgatatttacacatttggtccaacgtttagggctgaaaattcaaacacttcaagacatctggctgaattttggatgattgaacctgagcttgcctttgcggatctgaacgatgacatggcttgtgcaactgcatatctccagtaaagtatattctggagaactgcaaagaggatatggatttcttcaatacttggattgaaaaaggcatcatagatcggttaaatgatgtagtagagaagaacttcgttcacctgtcttacactgatgctgttgagctacttcttgggtccaagaaggaattcgagttcccggtaaagtggggtttggatcttcaaagcgagcatgagcgatatatcacagaagttgcctttggtgggcgccctgtaataattagagattacccaaaggagatcaaagctttctatatgagagaaaatgatgatgggaagacagttgctgcaatggatctgttggttcctcgggttggtgaacttattggaggaagccagagggaagagcgtcttgattaccttgaagcccggttggacgagcaaaatctgaataaggagagctactggtggtatttggacctacgacgatatggatcagttccacacgctggtttcggtctcggatttgagcggcttgtacagtttgctactggaatggacaacatcagagacaccatcccatttcctcgagttcctggctctgccgagttttagcgccctgaaagtgttgtcgtatacgtatactttagaaacattctttcctaggatgtaatgtgagaaaggcatacgttgtactgtactactgtttcatcattgtacagagttaagctgagacttgtgattaatcggaggcaagcagtgctgtggcaagctttgtcgtttgttgtaattgtcgtcaaagaatgtcactggtggatgatgcaattttttcacgggtaagactgagaccaacacgaagacttgcatcagacaacgcaaacgcaaaatgagttgcgcagagtactgtgcgtggtgggagcatgcaaagggcgcaggacgatctaaaaatagaatcctctcttctctacgcataactatatagtcattttattggctataagaacgttcaacg

SEQ ID NO: 26973 - DNA, 1541 bp, Zea Mays
aagtggagttgaaggtttcaaagatcaccgtgattggtaagagtgaccccacatcttttcctatacagaagaaacgggcatcaagagaattccttaggaccgtagcccatctccgtcctcggacaaacacttttggtgcagttgcaagagtgagaaatactctggcatacgcaactcataaattctttcaagacaatggatttgtttgggtttcgagcccaattattacggcctcagattgtgaaggagctggggagcagttttacgtgactactttgctttcaaacagcgctgatggtggttctctactcaaagatattcctgctaccaaggatggaagggttgattggtcacagcatttctgacagtgtctggacagcttaatggtgaaacatatgcttcagctctatctgatatttacacatttggtccaacgtttagggctgaaaattcaaacacttcaagacatctggctgaattttggatgattgaacctgagcttgcctttgcggatctgaacgatgacatggcttgtgcaactgcatatctccagtatgtagtaaagtatattctggagaactgcaaagaggatatggatttcttcaatacttggattgaaaaaggcatcatagatcggttaaatgatgtagtagagaagaacttcgttcacctgtcttacactgatgctgttgagctacttcttgggtccaagaaggaattcgagttcccggtaaagtggggtttggatcttcaaagcgagcatgagcgatatatcacagaagttgcctttggtgggcgccctgtaataattagagattacccaaaggagatcaaagctttctatatgagagaaaatgatgatgggaagacagttgctgcaatggatctgttggttcctcgggttggtgaacttattggaggaagccagagggaagagcgtcttgattaccttgaagcccggttggacgagcaaaatctgaataaggagagctactggtggtatttggacctacgacgatatggatcagttccacacgctggtttcggtctcggatttgagcggcttgtacagtttgctactggaatggacaacatcagagacaccatcccatttcctcgagttcctggctctgccgagttttagcgccctgaaagtgttgtcgtatacgtatactttagaaacattctttcctaggatgtaatgtgagaaaggcatacgttgtactgtactactgtttcatcattgtacagagttaagctgagacttgtgattaatcggaggcaagcagtgctgtggcaagctttgtcgtttgttgtaattgtcgtcaaagaatgtcactggtggatgatgcaattttttcacgggtaagactgagaccaacacgaagacttgcatcagacaacgcaaacgcaaaatgagttgcgcagagtactgtgcgtggtgggagcatgcaaagggcgcaggacgatctaaaaatagaatcctctcttctctacgcataactatatagtcattttattggctataagaacgttcaacg

SEQ ID NO: 26974 - DNA, 1570 bp, Zea Mays
cacacttcaaaagtttgtggaccaggatgacacaaggcgacaagttgaaggaccaaaaatactctgtcactactggagcatctgtactagttgagggagttgttgcaagcagccaaggcgattggtaagagtgaccccacatcttttcctatacagaagaaacgggcatcaagagaattccttaggaccgtagcccatctccgtcctcggacaaacacttttggtgcagttgcaagagtgagaaatactctggcatacgcaactcataaattctttcaagacaatggatttgtttgggtttcgagcccaattattacggcctcagattgtgaaggagctggggagcagttttacgtgactactttggatttcttctgcaaaccagcatttctgacagtgtctggacagcttaatggtgaaacatatgcttcagctctatctgatatttacacatttggtccaacgtttagggctgaaaattcaaacacttcaagacatctggctgaattttggatgattgaacctgagcttgcctttgcggatctgaacgatgacatggcttgtgcaactgcatatctccagtatgtagtaaagtatattctggagaactgcaaagaggatatggatttcttcaatacttggattgaaaaaggcatcatagatcggttaaatgatgtagtagagaagaacttcgttcacctgtcttacactgatgctgttgagctacttcttgggtccaagaaggaattcgagttcccggtaaagtggggtttggatcttcaaagcgagcatgagcgatatatcacagaagttgcctttggtgggcgccctgtaataattagagattacccaaaggagatcaaagctttctatatgagagaaaatgatgatgggaagacagttgctgcaatggatctgttggttcctcgggttggtgaacttattggaggaagccagagggaagagcgtcttgattaccttgaagcccggttggacgagcaaaatctgaataaggagagctactggtggtatttggacctacgacgatatggatcagttccacacgctggtttcggtctcggatttgagcggcttgtacagtttgctactggaatggacaacatcagagacaccatcccatttcctcgagttcctggctctgccgagttttagcgccctgaaagtgttgtcgtatacgtatactttagaaacattctttcctaggatgtaatgtgagaaaggcatacgttgtactgtactactgtttcatcattgtacagagttaagctgagacttgtgattaatcggaggcaagcagtgctgtggcaagctttgtcgtttgttgtaattgtcgtcaaagaatgtcactggtggatgatgcaattttttcacgggtaagactgagaccaacacgaagacttgcatcagacaacgcaaacgcaaaatgagttgcgcagagtactgtgcgtggtgggagcatgcaaagggcgcaggacgatctaaaaatagaatcctctcttctctacgcataactatatagtcattttattggctataagaacgttcaacg

SEQ ID NO: 26975 - DNA, 2190 bp, Zea Mays
ctaactttgaatcttcaaaccaaacacatatcaaattaaaatgattctatctcatccctcttcatccatcctcgtccctgcatccaaacaccctataagcttacagccccacaccgccggccaccgccaccgcctcgctgccgatggcggccgccgccgccgcccggatcctccgcctggccccgcgccggattcaggttcccaagacctccccgctcgccgcactctcgttcccactccctcgaacggcgccgatcgccgctgcctcgggaaggcggcagcgcttctgcgccgtggcgcaggcccccgcccccgcagccgcggcgacaggggcggcgggagaggccgtgggggagttcaggaagcggctgcgggtggcggacgtgaagggcggggaggacgagggcgccgcgtgggtgggcaaggagctcgccgtgcgcgggtgggtgcgcacctgccgcgcccagaggaccataaccttcgtcgaggtcaatgatggctcttgcttatccaatatgcaatgtgtattgactcctgaaacagaaggctatgaccagatagactctgtcactactggagcatctgtactagttgagggagttgttgcaagcagccaaggcggtaagcaaaaagtggagttgaaggtttcaaagatcaccgtgattggtaagagtgaccccacatcttttcctatacagaagaaacgggcatcaagagaattccttaggaccgtagcccatctccgtcctcggacaaacacttttggtgcagttgcaagagtgagaaatactctggcatacgcaactcataaattctttcaagacaatggatttgtttgggtttcgagcccaattattacggcctcagattgtgaaggagctggggagcagttttacgtgactactttgctttcaaacagcgctgatggtggttctctactcaaagatattcctgctaccaaggatggaagggttgattggtcacaggatttcttctgcaaaccagcatttctgacagtgtctggacagcttaatggtgaaacatatgcttcagctctatctgatatttacacatttggtccaacgtttagggctgaaaattcaaacacttcaagacatctggctgaattttggatgattgaacctgagcttgcctttgcggatctgaacgatgacatggcttgtgcaactgcatatctccagtatgtagtaaagtatattctggagaactgcaaagaggatatggatttcttcaatacttggattgaaaaaggcatcatagatcggttaaatgatgtagtagagaagaacttcgttcacctgtcttacactgatgctgttgagctacttcttgggtccaagaaggaattcgagttcccggtaaagtggggtttggatcttcaaagcgagcatgagcgatatatcacagaagttgcctttggtgggcgccctgtaataattagagattacccaaaggagatcaaagctttctatatgagagaaaatgatgatgggaagacagttgctgcaatggatctgttggttcctcgggttggtgaacttattggaggaagccagagggaagagcgtcttgattaccttgaagcccggttggacgagcaaaatctgaataaggagagctactggtggtatttggacctacgacgatatggatcagttccacacgctggtttcggtctcggatttgagcggcttgtacagtttgctactggaatggacaacatcagagacaccatcccatttcctcgagttcctggctctgccgagttttagcgccctgaaagtgttgtcgtatacgtatactttagaaacattctttcctaggatgtaatgtgagaaaggcatacgttgtactgtactactgtttcatcattgtacagagttaagctgagacttgtgattaatcggaggcaagcagtgctgtggcaagctttgtcgtttgttgtaattgtcgtcaaagaatgtcactggtggatgatgcaattttttcacgggtaagactgagaccaacacgaagacttgcatcagacaacgcaaacgcaaaatgagttgcgcagagtactgtgcgtggtgggagcatgcaaagggcgcaggacgatctaaaaatagaatcctctcttctctacgcataactatatagtcattttattggctataagaacgttcaacg

SEQ ID NO: 26976 - DNA, 2257 bp, Zea Mays
ctaactttgaatcttcaaaccaaacacatatcaaattaaaatgattctatctcatccctcttcatccatcctcgtccctgcatccaaacaccctataagcttacagccccacaccgccggccaccgccaccgcctcgctgccgatggcggccgccgccgccgcccggatcctccgcctggccccgcgccggattcaggttcccaagacctccccgctcgccgcactctcgttcccactccctcgaacggcgccgatcgccgctgcctcgggaaggcggcagcgcttctgcgccgtggcgcaggcccccgcccccgcagccgcggcgacaggggcggcgggagaggccgtgggggagttcaggaagcggctgcgggtggcggacgtgaagggcggggaggacgagggcgccgcgtgggtgggcaaggagctcgccgtgcgcgggtgggtgcgcacctgccgcgcccagaggaccataaccttcgtcgaggtcaatgatggctcttgcttatccaatatgcaatgtgtattgactcctgaaacagaaggctatgaccagactctgtcactactggagcatctgtactagttgagggagttgttgcaagcagccaaggcggtaagcaaaaagtggagttgaaggtttcaaagatcaccgtgattggtaagagtgaccccacatcttttcctatacagaagaaacgggcatcaagagaattccttaggaccgtagcccatctccgtcctcggacaaacacttttggtgcagttgcaagagtgagaaatactctggcatacgcaactcataaattctttcaagacaatggatttgtttgggtttcgagcccaattattacggcctcagattgtgaaggagctggggagcagttttacgtgactactttggtatctgatgtatggaagccatagaagtatcaatgtatcatcatcaggttgcaagcaggagaattgtaaatctttcaaacagcgctgatggtggttctctactcaaagatattcctgctaccaaggatggaagggttgattggtcacaggatttcttctgcaaaccagcatttctgacagtgtctggacagcttaatggtgaaacatatgcttcagctctatctgatatttacacatttggtccaacgtttagggctgaaaattcaaacacttcaagacatctggctgaattttggatgattgaacctgagcttgcctttgcggatctgaacgatgacatggcttgtgcaactgcatatctccagtatgtagtaaagtatattctggagaactgcaaagaggatatggatttcttcaatacttggattgaaaaaggcatcatagatcggttaaatgatgtagtagagaagaacttcgttcacctgtcttacactgatgctgttgagctacttcttgggtccaagaaggaattcgagttcccggtaaagtggggtttggatcttcaaagcgagcatgagcgatatatcacagaagttgcctttggtgggcgccctgtaataattagagattacccaaaggagatcaaagctttctatatgagagaaaatgatgatgggaagacagttgctgcaatggatctgttggttcctcgggttggtgaacttattggaggaagccagagggaagagcgtcttgattaccttgaagcccggttggacgagcaaaatctgaataaggagagctactggtggtatttggacctacgacgatatggatcagttccacacgctggtttcggtctcggatttgagcggcttgtacagtttgctactggaatggacaacatcagagacaccatcccatttcctcgagttcctggctctgccgagttttagcgccctgaaagtgttgtcgtatacgtatactttagaaacattctttcctaggatgtaatgtgagaaaggcatacgttgtactgtactactgtttcatcattgtacagagttaagctgagacttgtgattaatcggaggcaagcagtgctgtggcaagctttgtcgtttgttgtaattgtcgtcaaagaatgtcactggtggatgatgcaattttttcacgggtaagactgagaccaacacgaagacttgcatcagacaacgcaaacgcaaaatgagttgcgcagagtactgtgcgtggtgggagcatgcaaagggcgcaggacgatctaaaaatagaatcctctcttctctacgcataactatatagtcattttattggctataagaacgttcaacg

SEQ ID NO: 26977 - DNA, 599 bp, Zea Mays
cctgcatccaaacaccctataagcttacagccccacaccgccggccaccgccaccgcctcgctgccgatggcggccgccgccgccgcccggatcctccgcctggccccgcgccggattcaggttcccaagacctccccgctcgccgcactctcgttcccactccctcgaacggcgccgatcgccgctgcctcgggaaggcggcagcgcttctgcgccgtggcgcaggcccccgcccccgcagccgcggcgacaggggcggcgggagaggccgtgggggagttcaggaagcggctgcgggtggcggacgtgaagggcggggaggacgagggcgccgcgtgggtgggcaaggagctcgccgtgcgcgggtgggtgcgcacctgccgcgcccagaggaccataaccttcgtcgaggaaccaggctattaataggactagcgcccgcgtgcaagaaattatgaaattaaagagaataggaagtattatactataatgaaaagaattgaaaactaaacatgtttgagcaggactgcaagtgaagtggcacaaataaaagctccatttccaagatatctcatgttggtaactaaatccaaactgt

SEQ ID NO: 26978 - DNA, 3229 bp, Zea Mays
aatcgagttaaaccttcccccgcaaatgcggagagggtgcttcaaatctgcgacatagtaacttaatgagacagctctcgctacatgcgtgacaaacaatagctgaactcagtagaaaatggaagctgctatgtacttcattcacattaaagttcactttggttttgtcctaagtcaacttttctaactttgaccaaatttttagaaaaaaaatatgttaggttctacaagctcaaataaatgcattatcaattcaaaacatagttcatgtagaatttaatgaaactaatttgaggttgtatttgtcagtgcatttttcatataaacatggtataaattagagaaatttaggatagagccaaagtgaactagagtacataggaaatctgtgtactcgctagttatgagaagatataaataaatcacactttgccaacctcatatcaatttgacaaggatcaactgttgcagactactctactaataatccgcaaacagactactgcctagtgcctatcgatgaatagtctggcctatgaaagaaacagtacgtgtaaattgcttcttcaaatagtcctataaatcaggtgccataaagaagcaaactgcaattggtaaacaagaacaaacttaaaccatacctcagtctaaattccgtacaaacattgttagacagttagtgtgtgtcacagctgtaatgggcttaggcatagcccatatactattctacctattaatatagacaccctctgtcgcagccatggttcttaaggcggtaaggcgagataaggcgctggaccaccgcttagacacctaggcgacgcctaaggcgagcaaggcgacgccttatcaacctgagaatcagcaaaacagccccatggaggaggaagaaaaagaaaaaaagaaaaagaaaaaaaggagaaggaaggggtaggaggcccagcccaccagccagcccatatagtccttcctctggcaaccctaggttgcctctctcccccaccattcagcggctgctgcccccgattgagccaccgccgcctcagattcgccgtcgccgcctcagattcgccgccgccgctgacgatttggacgttgccgccaacgattcggatttcgctgccctggatttggcctccgattcagcctctgccgctcctgattcggcgctgccaccccgaaacggcgctgcccctttcccttcccctttgtcctatgccctcttgctgattcttacctaggcgacgcctttaaaacaagggtcgcagccgcgtgcctccacggcgcaagcgcaccaccttctgtcggtggcggcacttcccctagccgttgtgattccctccgcgcggctgacgccggaggtggcagtggcaagtgttagagttactatgtattgtgtaatggccttagtcccaacatcactgttattaatatatcactcaacccatttagggttagggttttcattcaaatatggtattatctagcaaggtttagactcctccccactcccagccgccactgtaacatgcggctacagtaactcaccgacgctgccccccgccgccgccctctcatcccctcctgtcagcccgccgcgtcgcccctgggcaagccgtgctgctccccccccccccccgtcggccctgctccttgtctgcgcgccgccgccatggccggccaagatcctcctccccatgcgcgcccatgggggctgcacggcatcgtcctcgccaacgccggaaccccgactccgctgccagcgcgcccccatcggtgaccgcacccctgcagcggtcgcgttccctgtggccaacgagcgtcgtcgccgcaggtcaccaccccatctctggcgtcctctccggcgaccccaaccgcgtcgacttcatcaccggtgctcttggcatccctcctggcacgctcacctccaatagcgacgcgtacgcggctcctcccgcgttcctcgctgccctctacgtggctgcactgcgggccaccacacccacgacctacgacgccgcagcgcgtcgcgccgaactcctagctccgcacttcccatacctgagtgcgggtcatgacactcccgccctgcctagggtcgcgcgggggttcgacattccgcctcccgtctacaaccacccgtcggttctcaccactactcagcatcctcgtgctcccgacatcactgtcgccctcgccgctacccattagcgcgcaggctgccgcccacacctgagcaggaacgagcagtcgtcgatgccctcaagcgctagctcgtccgctcgctggtgcccagggcgatgtctcctactttgtgcacgccgtcgatgatgatgcccccgacacgtcgatcatcgtcagtctccatgctcaggcgacgagatttcccagtattcgagctctggtctcgacgaccacgtcctcacgcggtggtgtcgacgcacgcctggtcccggatggacagcgttgtcctgacctagatccttggcaccctcacggtcgagatgcatgacgacgtccgcgaggagggcgggaccgctcgccaggcctgggttgctatcgaggccaagttcctcggcaaccgccaggtccggattctccacctggacaccgctttccgcggcaatctaaatatcatagaagttaaactttttgtgatagttgtggtatgttagatataaggatactaccattctccattcatgtatttccagaatacctttgtaactccatgaacagtttgtacaacaaggcacaataaacaacattgatatcttgatatcaagtgcgaaagggtctctagctgagttggttaggtggtctgagtagcactcctcaggacctgagttcaaattccagtgggagcaaattttaggttgaggttaagaaaaggtcactcgtttcactggttgtgtgcacacgagatggactgacctatgggggtgaatccttgtgtaggagctgggagggctcaaagcatgagtaaatatctagcctatagggggcggaccctcatgctacacaggggagaggcagttttcgtgacccttctcgatcgaggctccgattgagcttcttaatacgatacccgggggcagtctttccctaccgtccgaggaatcttgatatcatgtagaatagatccaggctatcctcatttggcaattacatatttaaacacataccgtactcgagttgttctcaacattgtccccgttaccaatccgtg

SEQ ID NO: 26979 - DNA, 522 bp, Zea Mays
tctcggtcaacaaaaacttaacggtatatttgcttattttattgatacattgacatgaaactgaaattatataaaacacaagttttttatgacaatgaatgattttgccatacattttttttttgtccctcatgaattcttgtcctgctcggctccacactacctcccgctctcttgtgtggtctaggccgccttctgtgctcctcctcctctcatgctactgtatcgattaatgtattggcagaaaacaatgccaacatttgctgttcaaacctacagtttgtatgtatcgaccactctaatctcctactttggtgttccatatattccagtaaatcttttcgtaaaagctatgtggctgaggtcataataatcacttgttctaaacattcacatgctgtcttgcttcgtgatcatctatatgaataggggataagatgttacatggcatgtgcgataacgatagatgtgcgtttgaggacctaagatagtatcacattgacggaggaatatatacattgg

SEQ ID NO: 26980 - DNA, 1120 bp, Zea Mays
ctttcttgtacacttgaactttgagagagagtccccgaaatatatccaatattgaagactctttgcttggtgcgcttaagcttattatgctaataggtttggtgatcatttcatttggtccaagttattcatatacccttctaaaattactctatggggaaagacacagtgatggagaggctccagttattcttcgttactattgtttatatatcatcagtttagcaatgaatggcacatctgaagcctttcttcatgctgttgcaaatgaaaaccagcttaagcagtcaaatgatatgttgcttctgttctcggtgatttacatcattctaaatgttgttcttattaaatcttctggagctgttgggttaattgctgctaatgccattaatatgttgcttcgaatatcatattctgcagtatttataaaagactatttcaagggctcattctctttccggcgctgtgtgcctgcgggctggggcattttactcatttctggtctgaccactgttttctctgagagggttttcttgaacaaaacgaggttcaagcagactgttcccattcacatagcgattggcatcatgtgcttgagcatcgcgttacttgagatataccgtggcgaaaagcagttcttgatgcaaataatcagaactttgaagcataatgacaaaagccagtgatttgaagacacagcgcatttcatagcgtattctctctggaacgcctgatgaaagagagctggtagtatagtgggtgggtaatttggtgtgtatgcaggagatcgggagttaacagaagaggggggattaatcggtcagatagataaatcggttgcgtatgggaattgctggatttcttgttgacccaatatttatattacaggtttattgagctagtgattcaataatttataattaaatgaagaagtttaggttccttttgttaagaacagcttggccgaatagagccagatgcccagatggatccccaagtgaccaagcacaacgacctggaaccatctgacgccggtcgccggcacattgtgccaatcagctgctataaagttacctagcgcgcagctgcggccgatgtggcgtcgctggatcatgtggac

SEQ ID NO: 26981 - DNA, 2262 bp, Zea Mays
ccagagcatccaatctagatccaacggtttcatatggaaggggttaaaagtaaaataggtactatgttttaggtggaaggggttaaatataaaataacagtcatcattagatttagatcggatgtaccagatcgcttgattgcatgcttgcaccaggataagtgattgcataggatatttcccccttagtgacaatgcctatgtacgaagagtcaaaggttctcaggaatgaacggtccggatcgcgttttaaggggcgagggccgagtccaagctgacacgcgccgctgcccgatctcccggtgtttgtttttgctgcatccgccggactctcgccgccgcgctcgacttcctgccgccgcctgggccgactcctccgtccgcgcgaaacaccggccggccgaggcgcaactcagtaagccggcgcgatggatgatgcggcacttctctccggagcaggggtggctgccgccgcgccgccccatgcggcggctgccggagccgccgtgatgggcgtcttcaagtacaacttcgttcctctcgaggattatccctttcgtatttaacatctggttcgtgcgccagctcggggcggacgatggcgctgtgtcggcatttgcactgcagcttcctctatttatgaactgcatcttatttttaagccgggaggggtttcgacgtgcatgtttgcgtaatgattcccagagtgatgtgttgacttctgaagcgatactaatggtcgcttggatggtaattccagtgtccatcttaattacttctgttggcagcatacttgtgttgagtttaaagagagtgaagctatctgacccctatgcgaaagctgtattgatcatcggatttgcttgtattctggaattactggcggaaccattatacattatttcccagaaaaagaaatactataatataagagtgtacgttgaaccgacagctacactcttccgttgtttaacaactttcatcctcataaaaggacatattaaagtgaacaagctggttctagtttctctgtcccaggttgtctatggggcctgcattctctttggatattggtcatattttcttatgtatactgatactaaaccttcagatctttttccgttaaggccaggctttcaggaagttgatactccaagaaggcgagaaatttgtccttgtgttatttgatactccatacaaccaggccgcatatggtattgtggataaactagggagtctggttgttaggatagttttcttgccatttgaagagagttcatatgccacttttgcccgattggcaggagagagtccccgaaatatatccaatattgaagactctttgcttggtgcgcttaagcttattatgctaataggcacatctgaagcctttcttcatgctgttgcaaatgaaaaccagcttaagcagtcaaatgatatgttgcttctgttctcggtgatttacatcattctaaatgttgttcttattaaatcttctggagctgttgggttaattgctgctaatgccattaatatgttgcttcgaatatcatattctgcagtatttataaaagactatttcaagggctcattctctttccggcgctgtgtgcctgcgggctggggcattttactcatttctggtctgaccactgttttctctgagagggttttcttgaacaaaacgaggttcaagcagactgttcccattcacatagcgattggcatcatgtgcttgagcatcgcgttacttgagatataccgtggcgaaaagcagttcttgatgcaaataatcagaactttgaagcataatgacaaaagccagtgatttgaagacacagcgcatttcatagcgtattctctctggaacgcctgatgaaagagagctggtagtatagtgggtgggtaatttggtgtgtatgcaggagatcgggagttaacagaagaggggggattaatcggtcagatagataaatcggttgcgtatgggaattgctggatttcttgttgacccaatatttatattacaggtttattgagctagtgattcaataatttataattaaatgaagaagtttaggttccttttgttaagaacagcttggccgaatagagccagatgcccagatggatccccaagtgaccaagcacaacgacctggaaccatctgacgccggtcgccggcacattgtgccaatcagctgctataaagttacctagcgcgcagctgcggccgatgtggcgtcgctggatcatgtggac

SEQ ID NO: 26982 - DNA, 2346 bp, Zea Mays
ccagagcatccaatctagatccaacggtttcatatggaaggggttaaaagtaaaataggtactatgttttaggtggaaggggttaaatataaaataacagtcatcattagatttagatcggatgtaccagatcgcttgattgcatgcttgcaccaggataagtgattgcataggatatttcccccttagtgacaatgcctatgtacgaagagtcaaaggttctcaggaatgaacggtccggatcgcgttttaaggggcgagggccgagtccaagctgacacgcgccgctgcccgatctcccggtgtttgtttttgctgcatccgccggactctcgccgccgcgctcgacttcctgccgccgcctgggccgactcctccgtccgcgcgaaacaccggccggccgaggcgcaactcagtaagccggcgcgatggatgatgcggcacttctctccggagcaggggtggctgccgccgcgccgccccatgcggcggctgccggagccgccgtgatgggcgtcttcaagtacaacttcgcggcgcagttcctctcgaggattatccctttcgtatttaacatctggttcgtgcgccagctcggggcggacgatggcgctgtgtcggcatttgcactgcagcttcctctatttatgaactgcatcttatttttaagccgggaggggtttcgacgtgcatgtttgcgtaatgattcccagagtgatgtgttgacttctgaagcgatactaatggtcgcttggatggtaattccagtgtccatcttaattacttctgttggcagcatacttgtgttgagtttaaagagagtgaagctatctgacccctatgcgaaagctgtattgatcatcggatttgcttgtattctggaattactggcggaaccattatacattatttcccagaaaaagaaatactataatataagagtgtacgttgaaccgacagctacactcttccgttgtttaacaactttcatcctcataaaaggacatattaaagtgaacaagctggttctagtttctctgtcccaggttgtctatggggcctgcattctctttggatattggtcatattttcttatgtatactgatactaaaccttcagatctttttccgttaaggccaggctttcaggaagttgatactccaagaaggcgagaaatttgtccttgtgttatttgatactccatacaaccaggccgcatatggtattgtggataaactagggagtctggttgttaggatagttttcttgccatttgaagagagttcatatgccacttttgcccgattggcaggagagagtccccgaaatatatccaatattgaagactctttgcttggtgcgcttaagcttattatgctaataggcacatctgaagcctttcttcatgctgttgcaaatgaaaaccagcttaagcagtcaaatgatatgttgcttctgttctcggtgatttacatcattctaaatgttgttcttattaaatcttctggagctgttgggttaattgctgctaatgccattagtatccttcgattctaatttttcttgaatgcatttttccccgcataacttgatttgtgccttgactatctgtaaagatatgttgcttcgaatatcatattctgcagtatttataaaagactatttcaagggctcattctctttccggcgctgtgtgcctgcgggctggggcattttactcatttctggtctgaccactgttttctctgagagggttttcttgaacaaaacgaggttcaagcagactgttcccattcacatagcgattggcatcatgtgcttgagcatcgcgttacttgagatataccgtggcgaaaagcagttcttgatgcaaataatcagaactttgaagcataatgacaaaagccagtgatttgaagacacagcgcatttcatagcgtattctctctggaacgcctgatgaaagagagctggtagtatagtgggtgggtaatttggtgtgtatgcaggagatcgggagttaacagaagaggggggattaatcggtcagatagataaatcggttgcgtatgggaattgctggatttcttgttgacccaatatttatattacaggtttattgagctagtgattcaataatttataattaaatgaagaagtttaggttccttttgttaagaacagcttggccgaatagagccagatgcccagatggatccccaagtgaccaagcacaacgacctggaaccatctgacgccggtcgccggcacattgtgccaatcagctgctataaagttacctagcgcgcagctgcggccgatgtggcgtcgctggatcatgtggac

SEQ ID NO: 26983 - DNA, 2449 bp, Zea Mays
gtgcaatcactcattttggtgcaagcgtgcaatcaaactatccagagcatccaatctagatccaacggtttcatatggaaggggttaaaagtaaaataggtactatgttttaggtggaaggggttaaatataaaataacagtcatcattagatttagatcggatgtaccagatcgcttgattgcatgcttgcaccaggataagtgattgcataggatatttcccccttagtgacaatgcctatgtacgaagagtcaaaggttctcaggaatgaacggtccggatcgcgttttaaggggcgagggccgagtccaagctgacacgcgccgctgcccgatctcccggtgtttgtttttgctgcatccgccggactctcgccgccgcgctcgacttcctgccgccgcctgggccgactcctccgtccgcgcgaaacaccggccggccgaggcgcaactcagtaagccggcgcgatggatgatgcggcacttctctccggagcaggggtggctgccgccgcgccgccccatgcggcggctgccggagccgccgtgatgggcgtcttcaagtacaacttcgcggcgcagttcctctcgaggattatccctttcgtatttaacatctggttcgtgcgccagctcggggcggacgatggcgctgtgtcggcatttgcactgcagcttcctctatttatgaactgcatcttatttttaagccgggaggggtttcgacgtgcatgtttgcgtaatgattcccagagtgatgtgttgacttctgaagcgatactaatggtcgcttggatggtaattccagtgtccatcttaattacttctgttggcagcatacttgtgttgagtttaaagagagtgaagctatctgacccctatgcgaaagctgtattgatcatcggatttgcttgtattctggaattactggcggaaccattatacattatttcccagaaaaagaaatactataatataagagtgtacgttgaaccgacagctacactcttccgttgtttaacaactttcatcctcataaaaggacatattaaagtgaacaagctggttctagtttctctgtcccaggttgtctatggggcctgcattctctttggatattggtcatattttcttatgtatactgatactaaaccttcagatctttttccgttaaggccaggctttcaggaagttgatactccaagaaggcgagaaatttgtccttgtgttatttgatactccatacaaccaggccgcatatggtattgtggataaactagggagtctggttgttaggatagttttcttgccatttgaagagagttcatatgccacttttgcccgattggcaggagagagtccccgaaatatatccaatattgaagactctttgcttggtgcgcttaagcttattatgctaataggtttggtgatcatttcatttggtccaagttattcatatacccttctaaaattactctatggggaaagacacagtgatggagaggctccagttattcttcgttactattgtttatatatcatcagtttagcaatgaatggcacatctgaagcctttcttcatgctgttgcaaatgaaaaccagcttaagcagtcaaatgatatgttgcttctgttctcggtgatttacatcattctaaatgttgttcttattaaatcttctggagctgttgggttaattgctgctaatgccattaatatgttgcttcgaatatcatattctgcagtatttataaaagactatttcaagggctcattctctttccggcgctgtgtgcctgcgggctggggcattttactcatttctggtctgaccactgttttctctgagagggttttcttgaacaaaacgaggttcaagcagactgttcccattcacatagcgattggcatcatgtgcttgagcatcgcgttacttgagatataccgtggcgaaaagcagttcttgatgcaaataatcagaactttgaagcataatgacaaaagccagtgatttgaagacacagcgcatttcatagcgtattctctctggaacgcctgatgaaagagagctggtagtatagtgggtgggtaatttggtgtgtatgcaggagatcgggagttaacagaagaggggggattaatcggtcagatagataaatcggttgcgtatgggaattgctggatttcttgttgacccaatatttatattacaggtttattgagctagtgattcaataatttataattaaatgaagaagtttaggttccttttgttaagaacagcttggccgaatagagccagatgcccagatggatccccaagtgaccaagcacaacgacctggaaccatctgacgccggtcgccggcacattgtgccaatcagctgctataaagttacctagcgcgcagctgcggccgatgtggcgtcgctggatcatgtggac

SEQ ID NO: 26984 - DNA, 876 bp, Zea Mays
cctctggaaagtacggtagtagcgtccaaatgtgcaaatgttgtggcaggagcagggtcggtcaaatcgtctgcagaaatatttatgctgaggaaggttcagaggctatggatgtggctgctgcccctgctgtccaggcattggcaagatacacacgaagggaggcaacttgcctatcattgactggcaaagattctatgttctcggggaacttcaaattcacagctctgctgccggcaactcccagtcccagcccaaagaagcctgtgcgatgaactgccgtggtacgtccacatttcacgcgaaggtttagaaaacagcaggatcggtggatacctgctgttctctcagcagtacaaataacaggcttcttccagcagttgtttactctggggtccccacgattcaaacccttttgatggatatacttcgttccagataggaagtttgttttgttaatctctagtctcgagtatttgctctaggagaccacccaccagaacggagccttcttgtcgccggaccaggcatcgattcgcacactgtatgaggcgatgctgaaagaaaaaaaaaaggaaggcagcaccgatgttcggtcattaatatgcagtttctttcggctgcatgtgtctcttatgtagagtaaaactaatttattctcgcatatagaatcatactataccggacatcaattgatgatgtgaaccgtatgcaagatcatcgccatctactgtagtatgtgacagtgtaagttgttttttttccttaaaaaatgtaggcggagcaaagtcgaatctgttgtgttttttgcgatttatctggggaagagaaagaaaatggaccgctttaacatgctaatgtagagttgctaccgtg

SEQ ID NO: 26985 - DNA, 1177 bp, Zea Mays
agtaagcaaagcaagtccatcagaggagcaaatgttgtttatgatcgaatcacttctcaagttgatgcacctactatttatgatgtttttcagttggagaaaacatttaagacaacattttcattgcttgttctccatatgtggcttgttctacgccgcttgaaggaagaagggaaggatggtgttaagttcggacagtacatctacgaaatgtacaaccacgatgtagaactcagagtttctaaagctggggttaacttgcttctgacaaaatggatgaaggagctagagaaaatattctatggaaacattgtgaagtatgatgctgcgataagcccagaggctcgtcaagatgatcttgtaaatgtcatctggagaaatatttatgctgaggaaggttcagaggctatggatgtggctgctgcccctgctgtccaggcattggcaagatacacacgaagggaggcaacttgcctatcattgactggcaaagattctatgttctcggggaacttcaaattcacagctctgctgccggcaactcccagtcccagcccaaagaagcctgtgcgatgaactgccgtggtacgtccacatttcacgcgaaggtttagaaaacagcaggatcggtggatacctgctgttctctcagcagtacaaataacaggcttcttccagcagttgtttactctggggtccccacgattcaaacccttttgatggatatacttcgttccagataggaagtttgttttgttaatctctagtctcgagtatttgctctaggagaccacccaccagaacggagccttcttgtcgccggaccaggcatcgattcgcacactgtatgaggcgatgctgaaagaaaaaaaaaaggaaggcagcaccgatgttcggtcattaatatgcagtttctttcggctgcatgtgtctcttatgtagagtaaaactaatttattctcgcatatagaatcatactataccggacatcaattgatgatgtgaaccgtatgcaagatcatcgccatctactgtagtatgtgacagtgtaagttgttttttttccttaaaaaatgtaggcggagcaaagtcgaatctgttgtgttttttgcgatttatctggggaagagaaagaaaatggaccgctttaacatgctaatgtagagttgctaccgtg

SEQ ID NO: 26986 - DNA, 1381 bp, Zea Mays
ctggcgcttcctctccgcccgctgggccgaggcccgagattagactgaagtctatgttcttatccaagccctgttcattagcgttgccacctgactcccctcatagagcagtggatccacaatataagggcatcaagcgattcctactcacattgttgttgttctacagtaagcaaagcaagtccatcagaggagcaaatgttgtttatgatcgaatcacttctcaagttgatgcacctactatttatgatgtttttcagttggagaaaacatttaagacaacattttcattgcttgttctccatatgtggcttgttctacgccgcttgaaggaagaagggaaggatggtgttaagttcggacagtacatctacgaaatgtacaaccacgatgtagaactcagagtttctaaagctggggttaacttgcttctgacaaaatggatgaaggagctagagaaaatattctatggaaacattgtgaagtatgatgctgcgataagcccagaggctcgtcaagatgatcttgtaaatgtcatctggaggttcgggcgcggtagtggacaaacagagggaaagaagaaatatttatgctgaggaaggttcagaggctatggatgtggctgctgcccctgctgtccaggcattggcaagatacacacgaagggaggcaacttgcctatcattgactggcaaagattctatgttctcggggaacttcaaattcacagctctgctgccggcaactcccagtcccagcccaaagaagcctgtgcgatgaactgccgtggtacgtccacatttcacgcgaaggtttagaaaacagcaggatcggtggatacctgctgttctctcagcagtacaaataacaggcttcttccagcagttgtttactctggggtccccacgattcaaacccttttgatggatatacttcgttccagataggaagtttgttttgttaatctctagtctcgagtatttgctctaggagaccacccaccagaacggagccttcttgtcgccggaccaggcatcgattcgcacactgtatgaggcgatgctgaaagaaaaaaaaaaggaaggcagcaccgatgttcggtcattaatatgcagtttctttcggctgcatgtgtctcttatgtagagtaaaactaatttattctcgcatatagaatcatactataccggacatcaattgatgatgtgaaccgtatgcaagatcatcgccatctactgtagtatgtgacagtgtaagttgttttttttccttaaaaaatgtaggcggagcaaagtcgaatctgttgtgttttttgcgatttatctggggaagagaaagaaaatggaccgctttaacatgctaatgtagagttgctaccgtg

SEQ ID NO: 26987 - DNA, 1775 bp, Zea Mays
agcatcttctttttccgtcccctcctgcagccgccgcccgccgagacgccaagcgcgagcgggaggagaccatgtcacggtggcgcgccgccgcctacagcatctccgcagctgccgcgtcccgcaactctgcggcggaggccggcgccctctccagggccttggcgaaggctccctcgccgccttcgcttcctctccaaaccctcacgagaaactttgccaagtccgctgccgccgccacggccacgtcgcccggccctggcgcttcctctccgcccgctgggccgaggcccgagattagactgaagtctatgttcttatccaagccctgttcattagcgttgccacctgactcccctcatagagcagtggatccacaatataagggcatcaagcgattcctactcacattgttgttgttctacagtaagcaaagcaagtccatcagaggagcaaatgttgtttatgatcgaatcacttctcaagttgatgcacctactatttatgatgtttttcagttggagaaaacatttaagacaacattttcattgcttgttctccatatgtggcttgttctacgccgcttgaaggaagaagggaaggatggtgttaagttcggacagtacatctacgaaatgtacaaccacgatgtagaactcagagtttctaaagctggggttaacttgcttctgacaaaatggatgaaggagctagagaaaatattctatggaaacattgtgaagtatgatgctgcgataagcccagaggctcgtcaagatgatcttgtaaatgtcatctggagaggatccaaggcaaagacgagaacaataaaaggaacaagtccttttaggaggaattgtgggtcttcttaatcctctattgggcacaagaaaaaggcttttttgcctttttcttgtgtcgattcttcttgtatcgaagttcgggcgcggtagtggacaaacagagggaaagaagaaatatttatgctgaggaaggttcagaggctatggatgtggctgctgcccctgctgtccaggcattggcaagatacacacgaagggaggcaacttgcctatcattgactggcaaagattctatgttctcggggaacttcaaattcacagctctgctgccggcaactcccagtcccagcccaaagaagcctgtgcgatgaactgccgtggtacgtccacatttcacgcgaaggtttagaaaacagcaggatcggtggatacctgctgttctctcagcagtacaaataacaggcttcttccagcagttgtttactctggggtccccacgattcaaacccttttgatggatatacttcgttccagataggaagtttgttttgttaatctctagtctcgagtatttgctctaggagaccacccaccagaacggagccttcttgtcgccggaccaggcatcgattcgcacactgtatgaggcgatgctgaaagaaaaaaaaaaggaaggcagcaccgatgttcggtcattaatatgcagtttctttcggctgcatgtgtctcttatgtagagtaaaactaatttattctcgcatatagaatcatactataccggacatcaattgatgatgtgaaccgtatgcaagatcatcgccatctactgtagtatgtgacagtgtaagttgttttttttccttaaaaaatgtaggcggagcaaagtcgaatctgttgtgttttttgcgatttatctggggaagagaaagaaaatggaccgctttaacatgctaatgtagagttgctaccgtg

SEQ ID NO: 26988 - DNA, 1808 bp, Zea Mays
gagacgtccaattccagcccgttcccgacttccgactgcgggcgctctttggacggaccgaggtggaccacgtccagccgcaggctgaggctgcggacgagatgccgcgagggcctacgagtcagtgagccaagcgcgccgcgtcgcgtctgctggtggactctgcgcctcgtgaccacggtctccagggaccagggcggtgagccagcatcttctttttccgtcccctcctgcagccgccgcccgccgagacgccaagcgcgagcgggaggagaccatgtcacggtggcgcgccgccgcctacagcatctccgcagctgccgcgtcccgcaactctgcggcggaggccggcgccctctccagggccttggcgaaggctccctcgccgccttcgcttcctctccaaaccctcacgagaaactttgccaagtccgctgccgccgccacggccacgtcgcccggccctggcgcttcctctccgcccgctgggccgaggcccgagattagactgaagtctatgttcttatccaagccctgttcattagcgttgccacctgactcccctcatagagcagtggatccacaatataagggcatcaagcgattcctactcacattgttgttgttctacagtaagcaaagcaagtccatcagaggagcaaatgttgtttatgatcgaatcacttctcaagttgatgcacctactatttatgatgtttttcagttggagaaaacatttaagacaacattttcattgcttgttctccatatgtggcttgttctacgccgcttgaaggaagaagggaaggatggtgttaagttcggacagtacatctacgaaatgtacaaccacgatgtagaactcagagtttctaaagctggggttaacttgcttctgacaaaatggatgaaggagctagagaaaatattctatggaaacattgtgaagtatgatgctgcgataagcccagaggctcgtcaagatgatcttgtaaatgtcatctggagaaatatttatgctgaggaaggttcagaggctatggatgtggctgctgcccctgctgtccaggcattggcaagatacacacgaagggaggcaacttgcctatcattgactggcaaagattctatgttctcggggaacttcaaattcacagctctgctgccggcaactcccagtcccagcccaaagaagcctgtgcgatgaactgccgtggtacgtccacatttcacgcgaaggtttagaaaacagcaggatcggtggatacctgctgttctctcagcagtacaaataacaggcttcttccagcagttgtttactctggggtccccacgattcaaacccttttgatggatatacttcgttccagataggaagtttgttttgttaatctctagtctcgagtatttgctctaggagaccacccaccagaacggagccttcttgtcgccggaccaggcatcgattcgcacactgtatgaggcgatgctgaaagaaaaaaaaaaggaaggcagcaccgatgttcggtcattaatatgcagtttctttcggctgcatgtgtctcttatgtagagtaaaactaatttattctcgcatatagaatcatactataccggacatcaattgatgatgtgaaccgtatgcaagatcatcgccatctactgtagtatgtgacagtgtaagttgttttttttccttaaaaaatgtaggcggagcaaagtcgaatctgttgtgttttttgcgatttatctggggaagagaaagaaaatggaccgctttaacatgctaatgtagagttgctaccgtg

SEQ ID NO: 26989 - DNA, 799 bp, Zea Mays
cgagacgccaagcgcgagcgggaggagaccatgtcacggtggcgcgccgccgcctacagcatctccgcagctgccgcgtcccgcaactctgcggcggaggccggcgccctctccagggccttggcgaaggctccctcgccgccttcgcttcctctccaaaccctcacgagaaactttgccaagtccgctgccgccgccacggccacgtcgcccggccctggcgcttcctctccgcccgctgggccgaggcccgagattagactgaagtctatgttcttatccaagccctgttcattagcgttgccacctgactcccctcatagagcagtggatccacaatataagggcatcaagcgattcctactcacattgttgttgttctacagtaagcaaagcaagtccatcagaggagcaaatgttgtttatgatcgaatcacttctcaagttgatgcacctactatttatgatgtttttcagttggagaaaacatttaagacaacattttcattgcttgttctccatatgtggcttgttctacgccgcttgaaggaagaagggaaggatggtgttaagttcggacagtacatctacgaaatgtacaaccacgatgtagaactcagagtttctaaagctggggttaacttgcttctgacaaaatggatgaaggagctagagaaaatattctatggaaacattgtgaagtatgatgctgcgataagcccagaggctcgtcaagatgatcttgtaaatgtcatctggagaaccgccgttaaccattggtcgttcaggaggcgtattc

SEQ ID NO: 26990 - DNA, 1021 bp, Zea Mays
cgagacgccaagcgcgagcgggaggagaccatgtcacggtggcgcgccgccgcctacagcatctccgcagctgccgcgtcccgcaactctgcggcggaggccggcgccctctccagggccttggcgaaggctccctcgccgccttcgcttcctctccaaaccctcacgagaaactttgccaagtccgctgccgccgccacggccacgtcgcccggccctggcgcttcctctccgcccgctgggccgaggcccgagattagactgaagtctatgttcttatccaagccctgttcattagcgttgccacctgactcccctcatagagcagtggatccacaatataagggcatcaagcgattcctactcacattgttgttgttctacagtaagcaaagcaagtccatcagaggagcaaatgttgtttatgatcgaatcacttctcaagttgatgcacctactatttatgatgtttttcagttggagaaaacatttaagacaacattttcattgcttgttctccatatgtggcttgttctacgccgcttgaaggaagaagggaaggatggtgttaagttcggacagtacatctacgaaatgtacaaccacgatgtagaactcagagtttctaaagctggggttaacttgcttctgacaaaatggatgaaggagctagagaaaatattctatggaaacattgtgaagtatgatgctgcgataagcccagaggctcgtcaagatgatcttgtaaatgtcatctggaggtaactatgccaagcttctacctaacaacccaagtaaaaatttacttcgagggctacagaaggaatgttttgcctggagccctggacataccttacaattcgagctggtttccttcatttttgttgcacacacgcatatatcattgactctgatggtaacactgatgctgtaagcctgtaagtatcggttgtgttgacaagtacttccaaactgccctgcttcatggagttgtcgctccatatattgcccctaagtgaat

SEQ ID NO: 26991 - DNA, 1078 bp, Zea Mays
tgaatgtatgtgtgaattagaagttctgtattatgataggctaatggctattgctatattttgtgaatggtatcgcgtttttaacaaatatttttttcacccattgcaggttcagtttctcaactttgttctttgcccacaataagtgaaatccatcatgattgatcttgggacaagtgggtggatggagttggtcttactatggagggtgctggccgcaggggagcgatgttgcttagctttgactttgtgacagcgcgctgatatgtttttagagctatggatcaatttgttggctttgaaggacaagatcagattattggctgataacttggctttgaatttggatgccagactgcatgatcttcatccagcatcttggcagagtggtggtttgcgatgagcaaatctgattctaaagacagccaattaggaaggctacaatccagtgtggcatcctagattctgaaggagaggttgcacacgctgaatgaggctgtgatggtgatgtctagggctagcgtgctgaagaatgggcaaatgagtaaaaataagcatggtagagagggaagctgttttggaggagatgaagactatagagctacaccataagaaactcaagttgcagagaagcgagacaacaatgctacaagaggaagagatggtaggctatgacctatgatggaggcaagtcagcgacatgcatggaggaagaggtgttctctcaggataagtcaatatatgaggcagtggagtgtgcattacaacaatcattgttagaatgcatatataattcagtcgagattaaaatctggcaacatgattgctcatatgcgtgataaattgactggcttgcgtgcaagagcgagtcatatttagttttacggttaatatgattgtgtgtatgatatccgggacaaaggttggtcatcacaacctcctcataggtaaacagatgatctctatgcaacctcgacctgcagaacctcacgtccctgtctctctttcggctcctcttgtccttgtctggccgatggtgcccagcaacaacgacaacccgtcgttgatcccaacaaat

SEQ ID NO: 26992 - DNA, 584 bp, Zea Mays
gaaactgaagcatatcgtttaattggcagcctttgggtatccttcaagcccagaagccctgatggactttctgagggtgactggacctgtcccaaatgcgacaacattaacttttccttcagaaacacttgcaacatgaagaaatgtggagctccgaggccaactcctggagctaacacgagctcatctaggaaggacaataaggaagcccctgaaggaagctggacctgtccagagtgcaataacctgaactacccgtttcgttcggtgtgcaacaggaaaggatgctcgtacaacaagtcagccccgacgaataactgaacctaacctccgcacagcgcaccatattgttgagacgtgtcgtcgaactattcttgtatccttagattgtatcctagctagtcgtgtgtaatctttgaactgcacaaaaatgtgtgcctggagacgagcgaatatattcattacgtttaatttgttcgttatgtttaatttacttgctatactttctatgttcgaaattataagtcccgtcattgttcccaacacagtttaaaaatagaagattcatttttttcttgcgctaa

SEQ ID NO: 26993 - DNA, 1710 bp, Zea Mays
actcgcagtcgcaccacttgcacacgggcggccaccgcacatcagcacttttacgagccctcctatctctcgatttctcgcgcagcggccctccccttctctcgccgccgccgccgcgtgttccgtcgtctcctctcaccgatggcttttgctaaggtcggtgctgcgacgcaattggagaacagaggcgcgctgtcgaaaaggttacgcaacgacgtgtctgtaagggagggggactggaattgtcctcagtgtggtaatgtcaacttcagttttagaaatgtttgcaaccgtggagcctgtggtgcaccccgtccatcaccgagtccaagtccaaacctcagcgtcggacgcaagcttcgtaccaacgccctgctggtaccgcaacgggccattgggcggggcgccgcaacgcccttgttcgtctgtcccatctccacggcaccacgcccttgcacgtcttcgccttctccatggatgcatcagctgcggccaccgacgtcgaggtcgacgagcagtcccccctagtagtggaaggcataggcttgtcttcgggtgtgaatgtagaagacgaatctgtgtttgattgggcttctatggttctcagtggtttgtgggaggaggaagggagacatgatgttcctagtgagacgcaaatgtattcgcaacttggactaattgaagagaacgaggcagaggaaaatagaagggatgaagccttacgaggtggtacaactaattttgatgaatcggaccatgttgattcaggagaccaaaatacaaaccaaccatgtgaggactacctaccggacgagaagagagctaaagaatgatgccagcacctcctgctcctggatatgaccgactacctctgttttacggaggaggtggtggcgctccatctccaatttcacttggatctggtagctatggtggtccatatccacaccttgggatgcgatatggttatggtccaccagtaggagctcctggttcatatggccttttctcgtcatatggtcaacctgggccaatgagtggtatgggatatggcccaggacctgagctaggccgatatagctatgggtttagaggttctccaatgccggtttctagcccatggtctggtggagcaatagctgaaaacaatgacaacattgcttcacgaaagcgccgtggaggccctgatggactttctgagggtgactggacctgtcccaaatgcgacaacattaacttttccttcagaaacacttgcaacatgaagaaatgtggagctccgaggccaactcctggagctaacacgagctcatctaggaaggacaataaggaagcccctgaaggaagctggacctgtccagagtgcaataacctgaactacccgtttcgttcggtgtgcaacaggaaaggatgctcgtacaacaagtcagccccgacgaataactgaacctaacctccgcacagcgcaccatattgttgagacgtgtcgtcgaactattcttgtatccttagattgtatcctagctagtcgtgtgtaatctttgaactgcacaaaaatgtgtgcctggagacgagcgaatatattcattacgtttaatttgttcgttatgtttaatttacttgctatactttctatgttcgaaattataagtcccgtcattgttcccaacacagtttaaaaatagaagattcatttttttcttgcgctaa

SEQ ID NO: 26994 - DNA, 1581 bp, Zea Mays
actcgcagtcgcaccacttgcacacgggcggccaccgcacatcagcacttttacgagccctcctatctctcgatttctcgcgcagcggccctccccttctctcgccgccgccgccgcgtgttccgtcgtctcctctcaccgatggcttttgctaaggtcggtgctgcgacgcaattggagaacagaggcgcgctgtcgaaaaggttacgcaacgacgccacatgaaagggagacttttgcgattatgaaacgccgcggatgtggcttcgacgaaacggaggcgttggcgagggtttcgacgatatgaaaaaccaggggacagactccactctgaaatagactgacaatcgatattagccgttgagagaacgaataaccatcctccgtccgtgcgccgttgtcttctcctgtctccttcattctccattctacggatcttctcccgtctccttcttctcccgtctcctacggatcttgcctcctgcctgggagatctccttgcctgaacctcagcgtcggacgcaagcttcgtaccaacgccctgctggtaccgcaacgggccattgggcggggcgccgcaacgcccttgttcgtctgtcccatctccacggcaccacgcccttgcacgtcttcgccttctccatggatgcatcagctgcggccaccgacgtcgaggtcgacgagcagtcccccctagagaatgatgccagcacctcctgctcctggatatgaccgactacctctgttttacggaggaggtggtggcgctccatctccaatttcacttggatctggtagctatggtggtccatatccacaccttgggatgcgatatggttatggtccaccagtaggagctcctggttcatatggccttttctcgtcatatggtcaacctgggccaatgagtggtatgggatatggcccaggacctgagctaggccgatatagctatgggtttagaggttctccaatgccggtttctagcccatggtctggtggagcaatagctgaaaacaatgacaacattgcttcacgaaagcgccgtggaggccctgatggactttctgagggtgactggacctgtcccaaatgcgacaacattaacttttccttcagaaacacttgcaacatgaagaaatgtggagctccgaggccaactcctggagctaacacgagctcatctaggaaggacaataaggaagcccctgaaggaagctggacctgtccagagtgcaataacctgaactacccgtttcgttcggtgtgcaacaggaaaggatgctcgtacaacaagtcagccccgacgaataactgaacctaacctccgcacagcgcaccatattgttgagacgtgtcgtcgaactattcttgtatccttagattgtatcctagctagtcgtgtgtaatctttgaactgcacaaaaatgtgtgcctggagacgagcgaatatattcattacgtttaatttgttcgttatgtttaatttacttgctatactttctatgttcgaaattataagtcccgtcattgttcccaacacagtttaaaaatagaagattcatttttttcttgcgctaa

SEQ ID NO: 26995 - DNA, 1371 bp, Zea Mays
actcgcagtcgcaccacttgcacacgggcggccaccgcacatcagcacttttacgagccctcctatctctcgatttctcgcgcagcggccctccccttctctcgccgccgccgccgcgtgttccgtcgtctcctctcaccgatggcttttgctaaggtcggtgctgcgacgcaattggagaacagaggcgcgctgtcgaaaaggttacgcaacgacgaacctcagcgtcggacgcaagcttcgtaccaacgccctgctggtaccgcaacgggccattgggcggggcgccgcaacgcccttgttcgtctgtcccatctccacggcaccacgcccttgcacgtcttcgccttctccatggatgcatcagctgcggccaccgacgtcgaggtcgacgagcagtcccccctagagaatgatgccagcacctcctgctcctggatatgaccgactacctctgttttacggaggaggtggtggcgctccatctccaatttcacttggatctggtagctatggtggtccatatccacaccttgggatgcgatatggttatggtccaccagtaggagctcctggttcatatggccttttctcgtcatatggtcaacctgggccaatgagtggtctgtgtttcttacacacttgatagttgcagttattcaacattttcttgattgccttttttttggtaattgttgcaggtatgggatatggcccaggacctgagctaggccgatatagctatgggtttagaggttctccaatgccggtttctagcccatggtctggtggagcaatagctgaaaacaatgacaacattgcttcacgaaagcgccgtggaggccctgatggactttctgagggtgactggacctgtcccaaatgcgacaacattaacttttccttcagaaacacttgcaacatgaagaaatgtggagctccgaggccaactcctggagctaacacgagctcatctaggaaggacaataaggaagcccctgaaggaagctggacctgtccagagtgcaataacctgaactacccgtttcgttcggtgtgcaacaggaaaggatgctcgtacaacaagtcagccccgacgaataactgaacctaacctccgcacagcgcaccatattgttgagacgtgtcgtcgaactattcttgtatccttagattgtatcctagctagtcgtgtgtaatctttgaactgcacaaaaatgtgtgcctggagacgagcgaatatattcattacgtttaatttgttcgttatgtttaatttacttgctatactttctatgttcgaaattataagtcccgtcattgttcccaacacagtttaaaaatagaagattcatttttttcttgcgctaa

SEQ ID NO: 26996 - DNA, 1103 bp, Zea Mays
actcgcagtcgcaccacttgcacacgggcggccaccgcacatcagcacttttacgagccctcctatctctcgatttctcgcgcagcggccctccccttctctcgccgccgccgccgcgtgttccgtcgtctcctctcaccgatggcttttgctaaggtcggtgctgcgacgcaattggagaacagaggcgcgctgtcgaaaaggttacgcaacgacgtgtctgtaagggagggggactggaattgtcctcagtgtggtaatgtcaacttcagttttagaaatgtttgcaaccgtggagcctgtggtgcaccccgtccatcaccgagtccaagtccaagaatgatgccagcacctcctgctcctggatatgaccgactacctctgttttacggaggaggtggtggcgctccatctccaatttcacttggatctggtatgggatatggcccaggacctgagctaggccgatatagctatgggtttagaggttctccaatgccggtttctagcccatggtctggtggagcaatagctgaaaacaatgacaacattgcttcacgaaagcgccgtggaggccctgatggactttctgagggtgactggacctgtcccaaatgcgacaacattaacttttccttcagaaacacttgcaacatgaagaaatgtggagctccgaggccaactcctggagctaacacgagctcatctaggaaggacaataaggaagcccctgaaggaagctggacctgtccagagtgcaataacctgaactacccgtttcgttcggtgtgcaacaggaaaggatgctcgtacaacaagtcagccccgacgaataactgaacctaacctccgcacagcgcaccatattgttgagacgtgtcgtcgaactattcttgtatccttagattgtatcctagctagtcgtgtgtaatctttgaactgcacaaaaatgtgtgcctggagacgagcgaatatattcattacgtttaatttgttcgttatgtttaatttacttgctatactttctatgttcgaaattataagtcccgtcattgttcccaacacagtttaaaaatagaagattcatttttttcttgcgctaa

SEQ ID NO: 26997 - DNA, 1067 bp, Zea Mays
actcgcagtcgcaccacttgcacacgggcggccaccgcacatcagcacttttacgagccctcctatctctcgatttctcgcgcagcggccctccccttctctcgccgccgccgccgcgtgttccgtcgtctcctctcaccgatggcttttgctaaggtcggtgctgcgacgcaattggagaacagaggcgcgctgtcgaaaaggttacgcaacgacgtgtctgtaagggagggggactggaattgtcctcagtgtggtaatgtcaacttcagttttagaaatgtttgcaaccgtggagcctgtggtgcaccccgtccatcaccgagtccaagtccaagaatgatgccagcacctcctgctcctggatatgaccgactacctctgttttacggaggaggtatgggatatggcccaggacctgagctaggccgatatagctatgggtttagaggttctccaatgccggtttctagcccatggtctggtggagcaatagctgaaaacaatgacaacattgcttcacgaaagcgccgtggaggccctgatggactttctgagggtgactggacctgtcccaaatgcgacaacattaacttttccttcagaaacacttgcaacatgaagaaatgtggagctccgaggccaactcctggagctaacacgagctcatctaggaaggacaataaggaagcccctgaaggaagctggacctgtccagagtgcaataacctgaactacccgtttcgttcggtgtgcaacaggaaaggatgctcgtacaacaagtcagccccgacgaataactgaacctaacctccgcacagcgcaccatattgttgagacgtgtcgtcgaactattcttgtatccttagattgtatcctagctagtcgtgtgtaatctttgaactgcacaaaaatgtgtgcctggagacgagcgaatatattcattacgtttaatttgttcgttatgtttaatttacttgctatactttctatgttcgaaattataagtcccgtcattgttcccaacacagtttaaaaatagaagattcatttttttcttgcgctaa

SEQ ID NO: 26998 - DNA, 1971 bp, Zea Mays
actcgcagtcgcaccacttgcacacgggcggccaccgcacatcagcacttttacgagccctcctatctctcgatttctcgcgcagcggccctccccttctctcgccgccgccgccgcgtgttccgtcgtctcctctcaccgatggcttttgctaaggtcggtgctgcgacgcaattggagaacagaggcgcgctgtcgaaaaggttacgcaacgacgccacatgaaagggagacttttgcgattatgaaacgccgcggatgtggcttcgacgaaacggaggcgttggcgagggtttcgacgatatgaaaaaccaggggacagactccactctgaaatagactgacaatcgatattagccgttgagagaacgaataaccatcctccgtccgtgcgccgttgtcttctcctgtctccttcattctccattctacggatcttctcccgtctccttcttctcccgtctcctacggatcttgcctcctgcctgggagatctccttgcctggtataggagtggttttcccctccctgttctcctctcttacttctatccgagatctcttcttcattctccatttacctgctgttgggaatctgcagaacctcagcgtcggacgcaagcttcgtaccaacgccctgctggtaccgcaacgggccattgggcggggcgccgcaacgcccttgttcgtctgtcccatctccacggcaccacgcccttgcacgtcttcgccttctccatggatgcatcagctgcggccaccgacgtcgaggtcgacgagcagtcccccctagtggaaggcataggcttgtcttcgggtgtgaatgtagaagacgaatctgtgtttgattgggcttctatggttctcagtggtttgtgggaggaggaagggagacatgatgttcctagtgagacgcaaatgtattcgcaacttggactaattgaagagaacgaggcagaggaaaatagaagggatgaagccttacgaggtggtacaactaattttgatgaatcggaccatgttgattcaggagaccaaaatacaaaccaaccatgtgaggactacctaccggacgagaagagagctaaagaatgatgccagcacctcctgctcctggatatgaccgactacctctgttttacggaggaggtggtggcgctccatctccaatttcacttggatctggtagctatggtggtccatatccacaccttgggatgcgatatggttatggtccaccagtaggagctcctggttcatatggccttttctcgtcatatggtcaacctgggccaatgagtggtatgggatatggcccaggacctgagctaggccgatatagctatgggtttagaggttctccaatgccggtttctagcccatggtctggtggagcaatagctgaaaacaatgacaacattgcttcacgaaagcgccgtggaggccctgatggactttctgagggtgactggacctgtcccaaatgcgacaacattaacttttccttcagaaacacttgcaacatgaagaaatgtggagctccgaggccaactcctggagctaacacgagctcatctaggaaggacaataaggaagcccctgaaggaagctggacctgtccagagtgcaataacctgaactacccgtttcgttcggtgtgcaacaggaaaggatgctcgtacaacaagtcagccccgacgaataactgaacctaacctccgcacagcgcaccatattgttgagacgtgtcgtcgaactattcttgtatccttagattgtatcctagctagtcgtgtgtaatctttgaactgcacaaaaatgtgtgcctggagacgagcgaatatattcattacgtttaatttgttcgttatgtttaatttacttgctatactttctatgttcgaaattataagtcccgtcattgttcccaacacagtttaaaaatagaagattcatttttttcttgcgctaa

SEQ ID NO: 26999 - DNA, 1729 bp, Zea Mays
aaccatgaacagggtcacagtgtaggcccactcgcagtcgcaccacttgcacacgggcggccaccgcacatcagcacttttacgagccctcctatctctcgatttctcgcgcagcggccctccccttctctcgccgccgccgccgcgtgttccgtcgtctcctctcaccgatggcttttgctaaggtcggtgctgcgacgcaattggagaacagaggcgcgctgtcgaaaaggttacgcaacgacgtgtctgtaagggagggggactggaattgtcctcagtgtggtaatgtcaacttcagttttagaaatgtttgcaaccgtggagcctgtggtgcaccccgtccatcaccgagtccaagtccaccacatgaaagggagacttttgcgattatgaaacgccgcggatgtggcttcgacgaaacggaggcgttggcgagggtttcgacgatatgaaaaaccaggggacagactccactctgaaatagactgacaatcgatattagccgttgagagaacgaataaccatcctccgtccgtgcgccgttgtcttctcctgtctccttcattctccattctacggatcttctcccgtctccttcttctcccgtctcctacggatcttgcctcctgcctgggagatctccttgcctgaacctcagcgtcggacgcaagcttcgtaccaacgccctgctggtaccgcaacgggccattgggcggggcgccgcaacgcccttgttcgtctgtcccatctccacggcaccacgcccttgcacgtcttcgccttctccatggatgcatcagctgcggccaccgacgtcgaggtcgacgagcagtcccccctagagaatgatgccagcacctcctgctcctggatatgaccgactacctctgttttacggaggaggtggtggcgctccatctccaatttcacttggatctggtagctatggtggtccatatccacaccttgggatgcgatatggttatggtccaccagtaggagctcctggttcatatggccttttctcgtcatatggtcaacctgggccaatgagtggtatgggatatggcccaggacctgagctaggccgatatagctatgggtttagaggttctccaatgccggtttctagcccatggtctggtggagcaatagctgaaaacaatgacaacattgcttcacgaaagcgccgtggaggccctgatggactttctgagggtgactggacctgtcccaaatgcgacaacattaacttttccttcagaaacacttgcaacatgaagaaatgtggagctccgaggccaactcctggagctaacacgagctcatctaggaaggacaataaggaagcccctgaaggaagctggacctgtccagagtgcaataacctgaactacccgtttcgttcggtgtgcaacaggaaaggatgctcgtacaacaagtcagccccgacgaataactgaacctaacctccgcacagcgcaccatattgttgagacgtgtcgtcgaactattcttgtatccttagattgtatcctagctagtcgtgtgtaatctttgaactgcacaaaaatgtgtgcctggagacgagcgaatatattcattacgtttaatttgttcgttatgtttaatttacttgctatactttctatgttcgaaattataagtcccgtcattgttcccaacacagtttaaaaatagaagattcatttttttcttgcgctaa

SEQ ID NO: 27000 - DNA, 1311 bp, Zea Mays
atacctattttcagaagctcagtgttggtgataccacggtcccaaaaaatctctttggaccacagccccaaaccatgaacagggtcacagtgtaggcccactcgcagtcgcaccacttgcacacgggcggccaccgcacatcagcacttttacgagccctcctatctctcgatttctcgcgcagcggccctccccttctctcgccgccgccgccgcgtgttccgtcgtctcctctcaccgatggcttttgctaaggtcggtgctgcgacgcaattggagaacagaggcgcgctgtcgaaaaggttacgcaacgacgtgtctgtaagggagggggactggaattgtcctcagtgtggtaatgtcaacttcagttttagaaatgtttgcaaccgtggagcctgtggtgcaccccgtccatcaccgagtccaagtccaagaatgatgccagcacctcctgctcctggatatgaccgactacctctgttttacggaggaggtggtggcgctccatctccaatttcacttggatctggtagctatggtggtccatatccacaccttgggatgcgatatggttatggtccaccagtaggagctcctggttcatatggccttttctcgtcatatggtcaacctgggccaatgagtggtatgggatatggcccaggacctgagctaggccgatatagctatgggtttagaggttctccaatgccgcccatggtctggtggagcaatagctgaaaacaatgacaacattgcttcacgaaagcgccgtggaggccctgatggactttctgagggtgactggacctgtcccaaatgcgacaacattaacttttccttcagaaacacttgcaacatgaagaaatgtggagctccgaggccaactcctggagctaacacgagctcatctaggaaggacaataaggaagcccctgaaggaagctggacctgtccagagtgcaataacctgaactacccgtttcgttcggtgtgcaacaggaaaggatgctcgtacaacaagtcagccccgacgaataactgaacctaacctccgcacagcgcaccatattgttgagacgtgtcgtcgaactattcttgtatccttagattgtatcctagctagtcgtgtgtaatctttgaactgcacaaaaatgtgtgcctggagacgagcgaatatattcattacgtttaatttgttcgttatgtttaatttacttgctatactttctatgttcgaaattataagtcccgtcattgttcccaacacagtttaaaaatagaagattcatttttttcttgcgctaa

SEQ ID NO: 27001 - DNA, 1161 bp, Zea Mays
ctaaatctgacttagataccaaaattccaaagttcaacggattataatactaaaattctaattgcgctgttcgggatacctattttcagaagctcagtgttggtgataccacggtcccaaaaaatctctttggaccacagccccaaaccatgaacagggtcacagtgtaggcccactcgcagtcgcaccacttgcacacgggcggccaccgcacatcagcacttttacgagccctcctatctctcgatttctcgcgcagcggccctccccttctctcgccgccgccgccgcgtgttccgtcgtctcctctcaccgatggcttttgctaaggtactcttttgcattgtctacggttcaaatcgattagggcgctggcatcgccctagggtttggttttgacgctttttttccctctcttgtctgtttgtgctgggtaaggtcggtgctgcgacgcaattggagaacagaggcgcgctgtcgaaaaggttacgcaacgacggtatgggatatggcccaggacctgagctaggccgatatagctatgggtttagaggttctccaatgccgcccatggtctggtggagcaatagctgaaaacaatgacaacattgcttcacgaaagcgccgtggaggccctgatggactttctgagggtgactggacctgtcccaaatgcgacaacattaacttttccttcagaaacacttgcaacatgaagaaatgtggagctccgaggccaactcctggagctaacacgagctcatctaggaaggacaataaggaagcccctgaaggaagctggacctgtccagagtgcaataacctgaactacccgtttcgttcggtgtgcaacaggaaaggatgctcgtacaacaagtcagccccgacgaataactgaacctaacctccgcacagcgcaccatattgttgagacgtgtcgtcgaactattcttgtatccttagattgtatcctagctagtcgtgtgtaatctttgaactgcacaaaaatgtgtgcctggagacgagcgaatatattcattacgtttaatttgttcgttatgtttaatttacttgctatactttctatgttcgaaattataagtcccgtcattgttcccaacacagtttaaaaatagaagattcatttttttcttgcgctaa

SEQ ID NO: 27002 - DNA, 1418 bp, Zea Mays
tgccagagagctccagcgtcgtcgaggagaggagcgccgtcgaggaggagcgctcgtcgaggagaggaggagcgctcggggagaggagcgcccgtggatccgttctaagaaacggactgccgtaacaacgagttgagcgccggctaaatctgacttagataccaaaattccaaagttcaacggattataatactaaaattctaattgcgctgttcgggatacctattttcagaagctcagtgttggtgataccacggtcccaaaaaatctctttggaccacagccccaaaccatgaacagggtcacagtgtaggcccactcgcagtcgcaccacttgcacacgggcggccaccgcacatcagcacttttacgagccctcctatctctcgatttctcgcgcagcggccctccccttctctcgccgccgccgccgcgtgttccgtcgtctcctctcaccgatggcttttgctaaggtcggtgctgcgacgcaattggagaacagaggcgcgctgtcgaaaaggttacgcaacgacgagaatgatgccagcacctcctgctcctggatatgaccgactacctctgttttacggaggaggtggtggcgctccatctccaatttcacttggatctggtagctatggtggtccatatccacaccttgggatgcgatatggttatggtccaccagtaggagctcctggttcatatggccttttctcgtcatatggtcaacctgggccaatgagtggtatgggatatggcccaggacctgagctaggccgatatagctatgggtttagaggttctccaatgccggtttctagcccatggtctggtggagcaatagctgaaaacaatgacaacattgcttcacgaaagcgccgtggaggccctgatggactttctgagggtgactggacctgtcccaaatgcgacaacattaacttttccttcagaaacacttgcaacatgaagaaatgtggagctccgaggccaactcctggagctaacacgagctcatctaggaaggacaataaggaagcccctgaaggaagctggacctgtccagagtgcaataacctgaactacccgtttcgttcggtgtgcaacaggaaaggatgctcgtacaacaagtcagccccgacgaataactgaacctaacctccgcacagcgcaccatattgttgagacgtgtcgtcgaactattcttgtatccttagattgtatcctagctagtcgtgtgtaatctttgaactgcacaaaaatgtgtgcctggagacgagcgaatatattcattacgtttaatttgttcgttatgtttaatttacttgctatactttctatgttcgaaattataagtcccgtcattgttcccaacacagtttaaaaatagaagattcatttttttcttgcgctaa

SEQ ID NO: 27003 - DNA, 1072 bp, Zea Mays
caagattatgcttatttgtagccatcacttccagatactaccatatgatcagctcatgcaagagttagacgtttcaaatgtaagagaactcgaagatttcctaatcaatgagtgcatgtattcgggtatcgttagaggcaaactggatcagctgagaaggtgctttgaggtacaatttgcagctggaagagatcttacacctgatcagctaaagaacatgatagagactttgtctgattggttggggacatcagatagactgttgcatcaaattcaggagaaaatcaagtgggctgacacaatgagtgaggtgaacaagaagcaccagaaagaatttgaagacagagtggaagaggccaaaaaatcaatcaagcaggcagacattgacttacgggggcatgacgagtttctctctgaatctggaggaataatggattttgaagaggaccgcgtccgaccaaaaaggaggaggcaaccaccggcgtagtttcaattagcccttaccaatctctcccagaatgggacctgctgataccttgattgagacattttgacgccggagttgagtaaactttgtacatctgtcgtgtgatgcctccactgtagcgagtctgtttattttgccttctggtcttggtggggacgtacaaggccaaacctaggcgttatgttgcatttatttggtagtaaatggcccatggaagaaataacgttgttatgattatggcactgggttattctcaagtgtactgaacgataacagaagcacctctgttaaatgatgattgactcgaggcttgctgacttgctgctctagaggagttagcatagctgctcaggtatacaaactgccatcatttactctgcatgcaaaagagaaccaacttttgctgaatgacaattgtgcaagacatagatcacgaaaaagaaaacgatgaacgcataagcatgttgaaatggatttcagattatttgcgttttctttcccacagttttatcttcgtcacgagaagagaaggcaaatctgaattctgcgcgaaacgttggtaatgtacttgttggaaaaaagaaa

SEQ ID NO: 27004 - DNA, 1515 bp, Zea Mays
cgaagtctacatgataggtgccgactgctgagacagagtacggtcgcgagagtgaaggcaaggaaaaacacccaaacggcccaaccccaggaagccccgtcggaccctacagaccctaaccctagcgctcccgacgcgccgcggagcgatggcgatggacgcggagcggcggcaggcggagctgatcgcgcagttctccgctcaggcggcggcgctttcgtccgcgccccagctcgccgcgctggtgcttgaggccacctcccacccggccctcttcgccttctccgagctcctcaccctcccggccctctccaagctcactggcacgcagtacgcgtcgtcactggacttgctccggctcttcgcctacggtaccctgaatgactacaagacactgttgcctgaccaggtccgaaagctaaagcagctcagcgtgctaactctggcagagtcaactaagatactaccatatgatcagctcatgcaagagttagacgtttcaaatgtaagagaactcgaagatttcctaatcaatgagtgcatgtattcgggtatcgttagaggcaaactggatcagctgagaaggtgctttgaggtacaatttgcagctggaagagatcttacacctgatcagctaaagaacatgatagagactttgtctgattggttggggacatcagatagactgttgcatcaaattcaggagaaaatcaagtgggctgacacaatgagtgaggtgaacaagaagcaccagaaagaatttgaagacagagtggaagaggccaaaaaatcaatcaagaagttaaacaatttaagcaggcagacattgacttacgggggcatgacgagtttctctctgaatctggaggaataatggattttgaagaggaccgcgtccgaccaaaaaggaggaggcaaccaccggcgtagtttcaattagcccttaccaatctctcccagaatgggacctgctgataccttgattgagacattttgacgccggagttgagtaaactttgtacatctgtcgtgtgatgcctccactgtagcgagtctgtttattttgccttctggtcttggtggggacgtacaaggccaaacctaggcgttatgttgcatttatttggtagtaaatggcccatggaagaaataacgttgttatgattatggcactgggttattctcaagtgtactgaacgataacagaagcacctctgttaaatgatgattgactcgaggcttgctgacttgctgctctagaggagttagcatagctgctcaggtatacaaactgccatcatttactctgcatgcaaaagagaaccaacttttgctgaatgacaattgtgcaagacatagatcacgaaaaagaaaacgatgaacgcataagcatgttgaaatggatttcagattatttgcgttttctttcccacagttttatcttcgtcacgagaagagaaggcaaatctgaattctgcgcgaaacgttggtaatgtacttgttggaaaaaagaaa

SEQ ID NO: 27005 - DNA, 1598 bp, Zea Mays
cgaagtctacatgataggtgccgactgctgagacagagtacggtcgcgagagtgaaggcaaggaaaaacacccaaacggcccaaccccaggaagccccgtcggaccctacagaccctaaccctagcgctcccgacgcgccgcggagcgatggcgatggacgcggagcggcggcaggcggagctgatcgcgcagttctccgctcaggcggcggcgctttcgtccgcgccccagctcgccgcgctggtgcttgaggccacctcccacccggccctcttcgccttctccgagctcctcaccctcccggccctctccaaggttcgcgcactgcccttggcgtgcgccctgctacgttactccgggacccgctgccggactagctcactggcacgcagtacgcgtcgtcactggacttgctccggctcttcgcctacggtaccctgaatgactacaagagtaattctggattccttccagcactgttgcctgaccaggtccgaaagctaaagcagctcagcgtgctaactctggcagagtcaactaagatactaccatatgatcagctcatgcaagagttagacgtttcaaatgtaagagaactcgaagatttcctaatcaatgagtgcatgtattcgggtatcgttagaggcaaactggatcagctgagaaggtgctttgaggtacaatttgcagctggaagagatcttacacctgatcagctaaagaacatgatagagactttgtctgattggttggggacatcagatagactgttgcatcaaattcaggagaaaatcaagtgggctgacacaatgagtgaggtgaacaagaagcaccagaaagaatttgaagacagagtggaagaggccaaaaaatcaatcaagaagttaaacaatttaagcaggcagacattgacttacgggggcatgacgagtttctctctgaatctggaggaataatggattttgaagaggaccgcgtccgaccaaaaaggaggaggcaaccaccggcgtagtttcaattagcccttaccaatctctcccagaatgggacctgctgataccttgattgagacattttgacgccggagttgagtaaactttgtacatctgtcgtgtgatgcctccactgtagcgagtctgtttattttgccttctggtcttggtggggacgtacaaggccaaacctaggcgttatgttgcatttatttggtagtaaatggcccatggaagaaataacgttgttatgattatggcactgggttattctcaagtgtactgaacgataacagaagcacctctgttaaatgatgattgactcgaggcttgctgacttgctgctctagaggagttagcatagctgctcaggtatacaaactgccatcatttactctgcatgcaaaagagaaccaacttttgctgaatgacaattgtgcaagacatagatcacgaaaaagaaaacgatgaacgcataagcatgttgaaatggatttcagattatttgcgttttctttcccacagttttatcttcgtcacgagaagagaaggcaaatctgaattctgcgcgaaacgttggtaatgtacttgttggaaaaaagaaa

SEQ ID NO: 27006 - DNA, 1491 bp, Zea Mays
cgaagtctacatgataggtgccgactgctgagacagagtacggtcgcgagagtgaaggcaaggaaaaacacccaaacggcccaaccccaggaagccccgtcggaccctacagaccctaaccctagcgctcccgacgcgccgcggagcgatggcgatggacgcggagcggcggcaggcggagctgatcgcgcagttctccgctcaggcggcggcgctttcgtccgcgccccagctcgccgcgctggtgcttgaggccacctcccacccggccctcttcgccttctccgagctcctcaccctcccggccctctccaagctcactggcacgcagtacgcgtcgtcactggacttgctccggctcttcgcctacggtaccctgaatgactacaagagtaattctggattccttccagcactgttgcctgaccaggtccgaaagctaaagcagctcagcgtgctaactctggcagagtcaactaagatactaccatatgatcagctcatgcaagagttagacgtttcaaatggtatcgttagaggcaaactggatcagctgagaaggtgctttgaggtacaatttgcagctggaagagatcttacacctgatcagctaaagaacatgatagagactttgtctgattggttggggacatcagatagactgttgcatcaaattcaggagaaaatcaagtgggctgacacaatgagtgaggtgaacaagaagcaccagaaagaatttgaagacagagtggaagaggccaaaaaatcaatcaagaagttaaacaatttaagcaggcagacattgacttacgggggcatgacgagtttctctctgaatctggaggaataatggattttgaagaggaccgcgtccgaccaaaaaggaggaggcaaccaccggcgtagtttcaattagcccttaccaatctctcccagaatgggacctgctgataccttgattgagacattttgacgccggagttgagtaaactttgtacatctgtcgtgtgatgcctccactgtagcgagtctgtttattttgccttctggtcttggtggggacgtacaaggccaaacctaggcgttatgttgcatttatttggtagtaaatggcccatggaagaaataacgttgttatgattatggcactgggttattctcaagtgtactgaacgataacagaagcacctctgttaaatgatgattgactcgaggcttgctgacttgctgctctagaggagttagcatagctgctcaggtatacaaactgccatcatttactctgcatgcaaaagagaaccaacttttgctgaatgacaattgtgcaagacatagatcacgaaaaagaaaacgatgaacgcataagcatgttgaaatggatttcagattatttgcgttttctttcccacagttttatcttcgtcacgagaagagaaggcaaatctgaattctgcgcgaaacgttggtaatgtacttgttggaaaaaagaaa

SEQ ID NO: 27007 - DNA, 1526 bp, Zea Mays
cgaagtctacatgataggtgccgactgctgagacagagtacggtcgcgagagtgaaggcaaggaaaaacacccaaacggcccaaccccaggaagccccgtcggaccctacagaccctaaccctagcgctcccgacgcgccgcggagcgatggcgatggacgcggagcggcggcaggcggagctgatcgcgcagttctccgctcaggcggcggcgctttcgtccgcgccccagctcgccgcgctggtgcttgaggccacctcccacccggccctcttcgccttctccgagctcctcaccctcccggccctctccaagctcactggcacgcagtacgcgtcgtcactggacttgctccggctcttcgcctacggtaccctgaatgactacaagagtaattctggattccttccagcactgttgcctgaccaggtccgaaagctaaagcagctcagcgtgctaactctggcagagtcaactaagatactaccatatgatcagctcatgcaagagttagacgtttcaaatgtaagagaactcgaagatttcctaatcaatgagtgcatgtattcgggtatcgttagaggcaaactggatcagctgagaaggtgctttgaggtacaatttgcagctggaagagatcttacacctgatcagctaaagaacatgatagagactttgtctgattggttggggacatcagatagactgttgcatcaaattcaggagaaaatcaagtgggctgacacaatgagtgaggtgaacaagaagcaccagaaagaatttgaagacagagtggaagaggccaaaaaatcaatcaaggcagacattgacttacgggggcatgacgagtttctctctgaatctggaggaataatggattttgaagaggaccgcgtccgaccaaaaaggtgataaaatgaggaggcaaccaccggcgtagtttcaattagcccttaccaatctctcccagaatgggacctgctgataccttgattgagacattttgacgccggagttgagtaaactttgtacatctgtcgtgtgatgcctccactgtagcgagtctgtttattttgccttctggtcttggtggggacgtacaaggccaaacctaggcgttatgttgcatttatttggtagtaaatggcccatggaagaaataacgttgttatgattatggcactgggttattctcaagtgtactgaacgataacagaagcacctctgttaaatgatgattgactcgaggcttgctgacttgctgctctagaggagttagcatagctgctcaggtatacaaactgccatcatttactctgcatgcaaaagagaaccaacttttgctgaatgacaattgtgcaagacatagatcacgaaaaagaaaacgatgaacgcataagcatgttgaaatggatttcagattatttgcgttttctttcccacagttttatcttcgtcacgagaagagaaggcaaatctgaattctgcgcgaaacgttggtaatgtacttgttggaaaaaagaaa

SEQ ID NO: 27008 - DNA, 768 bp, Zea Mays
gctatctcttcctttctcttgcagcaaaaaggtctcaaagtctcttgagagtgactttagcaataaaatgaaccagctgttgctaatagttctgcaaaaacaaaggcaacaacagatgatggatggttttggaggatactatgatgaatgcatgtactggagacaaaatgatgaaattcatgatgctcataaggaggcatctgctccatgttcatcagctcctgtctcacatcttggtgctcatcagcaagagtgttggcagcactcttcatatggaagtcaacatcacgataaccaaaatttacttgaaatggaagtcagggtaaggggtgaaatgtcccagattcaacatgaaatatatgaactgcagaagttggtggaaagttgtattgcatcccaagtaaagatgcagcactccattaaagaagaggtgtgcagtgcacttcgtgaggcaggcttgatgccaaaccaacccgacacaacagcagcaaaagggggtaattgctgcatctgccatcgaatgcaagttgactctctactttacaggtgtgggcatgtgtgcacctgttttgactgcgccggtcagctgaaatcgagcggcaggagttgcccaatatgtcagactcctattgatgatgttttccgggcgcagctgaatttttgagcttaggatttaggaaaggccaagagaaaagagccggcactcccagatttagatgtggagtttgcgaactgcgaagccctggatgcttcgtcgacgcgaggaat

SEQ ID NO: 27009 - DNA, 956 bp, Zea Mays
ccacgcctcacgccccatttccggccatggcctcttcggtggccgccatgccacacgagtccgcatcatcatggagggacccctcccgcctcaccccgcccaggggcttcgtcaccatcctcatctcctcccccgacgccgccggagccggcggctcggcctcctcccccgccgccgccagcgagcccacgcccaggacccgccgccaaatcctggaccgctggacggccgcggccgcggccaccaccgtcacggacagcgccgcgccggcccccgccgaccagcgccgcgtcgccagggatgccgagctgtccgagctcgcgtccgccgcgcgccccgtcgccgcgcgcgccgccgtattccgggagccgtccccggcgccgtccgacgcctcctccacggccgcagccgcagccgccaccgcgcccgccgagctcccgccagcggggccccgggcctcgtcgctcatccagcgctggcgcgagatcgaggccgtcggccccgccacgccgcgccccgccgaccctggcgtctcggccgcggcctcggcctcagcctcggcgtccgactccgacaccggctcgccgcgcggccgcgtaggctgcatcgtcaagaagctcagcggggcgtcgtcgctgccagaggacgagctcgacgacgtcgccaggtccgagctctcgctctcgcagtccgcacccccgtcgcccgcgcccatgcgcgacgcctcgcactacccgtaccagtgcccgtcggtcgctagcgcgatcaacggcccccgcccgccgcacctcgtcttccggacggtgcgaggccgccgcgcgatggaggagctcgtcgccgcgatggcgcaccgccggaggcgcgaggtcgccgcgctcgccgagagccacgccgtgtcccgcttcccgcacaagggcaggatccagatccgtggcatccgttgaccgagtaagtgt

SEQ ID NO: 27010 - DNA, 1895 bp, Zea Mays
gcttcgctcggctaacctcgcccgcctcccatgccgctgctggcgaggagcacgaccgcggggcctcggcggcgcgccttcgtcctcgctctcctcctgctgcccccgctgtttcttattctgctccaccgcacctcatcgccctcgcttcggcccctccccgcgccccgcaagccctcttcccggtcccagtcctgcgactactccgccggcgagtgggtgcgcgaccccctcgcgggctcctcgctccgctacgacaacacctgcaaggagatcttcaagggatggaactgcatcgccaatggcaagcccaacgcccgcgacctgctcagctggcggtggaggcccgtcgggcccgggtgcgagctcccccgcctcgacccgcgccggttcctggagcacctcagggacaccagtatcggatttgtgggtgattcgttgaaccgcaacatgtttgcctcattagtatgcatgcttaggggagtaagtggtgaggttcgcaaatggcgtcctgcagaggcagaccgtggcttcaccttcctgcgctataacctcactgtggcataccacaggacaaatctcttggtacattatggtggtcagcaaatccaaatggaggtactctagaatctcttgggtataagcatggttacagagttgatgtggatattcctgaccaaacatgggtagaggcatgtagcttccatgatgttcttattttcaacactgggcattggtggtgggcaccctcgaaatttgatccaatacggtcaccaatgctgttctttgagaaggggaggccaattgtgcctcctttactgccacctgctggactggatttggctcttcaaaacatggtatgcctatagccttgtttcttcatgttactaaaaactccactttagagtgcccttgctgatatctaacaactattttatccatgcctgaagctcatatgtaattgaatcctgatgttctcttactatgcaatggactggcatttctataattctctttgtgaaaaaaattcaccgtcatgggatattgatattctacttctgcacttgaactaattgatgaattttggcagttcttgaaatagtctttaccatgtaatttgatgtgaatggatttatggcgcttgtatctatttaaaagaaaaaaaagccctgtgtatgtctatcagaatgtcattcagcttatctttctcatgctttgaataaataattttcatcagttaatgtttgcgaacaaagcaatgagaccaaacacagtgaaattcttccgtactcaatctcctagacatttcgaaggtggtgactggaatgaaggtggatcttgccaacgtaaccagcccttgtcgtcagaagaggtggaagaaattttctctttggacaataacagcaccaacgtggaggcacgcttggtaaaccaacacctggtgaaggctcttgaacagcagtctagttttagagttctggacatcactcgcatgagtgaattcagagcggatgctcacccttcaacaactggcggcaaaaagcacgatgattgcatgcattggtgtttgccaggaccaactgacacatggaacgatttgctagcgtccagtcttgaagtggttgagagctagtctgagaataaaactcaagggctcacctgagaaagttacccctagcttcactccccccccccccccccccccccacacccccccatgaatccacttgtagaatcgagttttgctgagagttcgttgtagggctcttcgctgcagcttgttttatatgtggagtggagcatttccccggcttgtattcttgaccctgtatatatttgaccattgtagggtttcactgtataataataggtcgaattcattttaaaaataaaaa

SEQ ID NO: 27011 - DNA, 1462 bp, Zea Mays
gcttcgctcggctaacctcgcccgcctcccatgccgctgctggcgaggagcacgaccgcggggcctcggcggcgcgccttcgtcctcgctctcctcctgctgcccccgctgtttcttattctgctccaccgcacctcatcgccctcgcttcggcccctccccgcgccccgcaagccctcttcccggtcccagtcctgcgactactccgccggcgagtgggtgcgcgaccccctcgcgggctcctcgctccgctacgacaacacctgcaaggagatcttcaagggatggaactgcatcgccaatggcaagcccaacgcccgcgacctgctcagctggcggtggaggcccgtcgggcccgggtgcgagctcccccgcctcgacccgcgccggttcctggagcacctcagggacaccagtatcggatttgtgggtgattcgttgaaccgcaacatgtttgcctcattagtatgcatgcttaggggagtaagtggtgaggttcgcaaatggcgtcctgcagaggcagaccgtggcttcaccttcctgcgctataacctcactgtggcataccacaggacaaatctcttggtacattatggtggtcagcaaatccaaatggaggtactctagaatctcttgggtataagcatggttacagagttgatgtggatattcctgaccaaacatgggtagaggcatgtagcttccatgatgttcttattttcaacactgggcattggtggtgggcaccctcgaaatttgatccaatacggtcaccaatgctgttctttgagaaggggaggccaattgtgcctcctttactgccacctgctggactggatttggctcttcaaaacatgacatttcgaaggtggtgactggaatgaaggtggatcttgccaacgtaaccagcccttgtcgtcagaagaggtggaagaaattttctctttggacaataacagcaccaacgtggaggcacgcttggtaaaccaacacctggtgaaggctcttgaacagcagtctagttttagagttctggacatcactcgcatgagtgaattcagagcggatgctcacccttcaacaactggcggcaaaaagcacgatgattgcatgcattggtgtttgccaggaccaactgacacatggaacgatttgctagcgtccagtcttgaagtggttgagagctagtctgagaataaaactcaagggctcacctgagaaagttacccctagcttcactccccccccccccccccccccccacacccccccatgaatccacttgtagaatcgagttttgctgagagttcgttgtagggctcttcgctgcagcttgttttatatgtggagtggagcatttccccggcttgtattcttgaccctgtatatatttgaccattgtagggtttcactgtataataataggtcgaattcattttgtttgtttgaaaactaagtcgcg

SEQ ID NO: 27012 - DNA, 1463 bp, Zea Mays
gcttcgctcggctaacctcgcccgcctcccatgccgctgctggcgaggagcacgaccgcggggcctcggcggcgcgccttcgtcctcgctctcctcctgctgcccccgctgtttcttattctgctccaccgcacctcatcgccctcgcttcggcccctccccgcgccccgcaagccctcttcccggtcccagtcctgcgactactccgccggcgagtgggtgcgcgaccccctcgcgggctcctcgctccgctacgacaacacctgcaaggagatcttcaagggatggaactgcatcgccaatggcaagcccaacgcccgcgacctgctcagctggcggtggaggcccgtcgggcccgggtgcgagctcccccgcctcgacccgcgccggttcctggagcacctcagggacaccagtatcggatttgtgggtgattcgttgaaccgcaacatgtttgcctcattagtatgcatgcttaggggagtaagtggtgaggttcgcaaatggcgtcctgcagaggcagaccgtggcttcaccttcctgcgctataacctcactgtggcataccacaggacaaatctcttggtacattatggtggtcagcaaatccaaatggaggtactctagaatctcttgggtataagcatggttacagagttgatgtggatattcctgaccaaacatgggtagaggcatgtagcttccatgatgttcttattttcaacactgggcattggtggtgggcaccctcgaaatttgatccaatacggtcaccaatgctgttctttgagaaggggaggccaattgtgcctcctttactgccacctgctggactggatttggctcttcaaaacatggacatttcgaaggtggtgactggaatgaaggtggatcttgccaacgtaaccagcccttgtcgtcagaagaggtggaagaaattttctctttggacaataacagcaccaacgtggaggcacgcttggtaaaccaacacctggtgaaggctcttgaacagcagtctagttttagagttctggacatcactcgcatgagtgaattcagagcggatgctcacccttcaacaactggcggcaaaaagcacgatgattgcatgcattggtgtttgccaggaccaactgacacatggaacgatttgctagcgtccagtcttgaagtggttgagagctagtctgagaataaaactcaagggctcacctgagaaagttacccctagcttcactccccccccccccccccccccccacacccccccatgaatccacttgtagaatcgagttttgctgagagttcgttgtagggctcttcgctgcagcttgttttatatgtggagtggagcatttccccggcttgtattcttgaccctgtatatatttgaccattgtagggtttcactgtataataataggtcgaattcattttgtttgtttgaaaactaagtcgcg

SEQ ID NO: 27013 - DNA, 1392 bp, Zea Mays
gcttcgctcggctaacctcgcccgcctcccatgccgctgctggcgaggagcacgaccgcggggcctcggcggcgcgccttcgtcctcgctctcctcctgctgcccccgctgtttcttattctgctccaccgcacctcatcgccctcgcttcggcccctccccgcgccccgcaagccctcttcccggtcccagtcctgcgactactccgccggcgagtgggtgcgcgaccccctcgcgggctcctcgctccgctacgacaacacctgcaaggagatcttcaagggatggaactgcatcgccaatggcaagcccaacgcccgcgacctgctcagctggcggtggaggcccgtcgggcccgggtgcgagctcccccgcctcgacccgcgccggttcctggagcacctcagggacaccagtatcggatttgtgggtgattcgttgaaccgcaacatgtttgcctcattagtatgcatgcttaggggagtaagtggtgaggttcgcaaatggcgtcctgcagaggcagaccgtggcttcaccttcctgcgctataacctcactgtggcataccacaggacaaatctcttggtacattatggtggtcagcaaatccaaatggaggtactctagaatctcttgggtataagcatggttacagagttgatgtggatattcctgaccaaacatgggtagaggcatgtagcttccatgatgttcttattttcaacactgggcattggtggtgggcaccctcgaaatttgatccaatacggtcaccaatgctgttctttgagaaggggaggccaattgtgcctcctttactgccacctgctggactggatttggctcttcaaaacatggtggaagaaattttctctttggacaataacagcaccaacgtggaggcacgcttggtaaaccaacacctggtgaaggctcttgaacagcagtctagttttagagttctggacatcactcgcatgagtgaattcagagcggatgctcacccttcaacaactggcggcaaaaagcacgatgattgcatgcattggtgtttgccaggaccaactgacacatggaacgatttgctagcgtccagtcttgaagtggttgagagctagtctgagaataaaactcaagggctcacctgagaaagttacccctagcttcactccccccccccccccccccccccacacccccccatgaatccacttgtagaatcgagttttgctgagagttcgttgtagggctcttcgctgcagcttgttttatatgtggagtggagcatttccccggcttgtattcttgaccctgtatatatttgaccattgtagggtttcactgtataataataggtcgaattcattttgtttgtttgaaaactaagtcgcg

SEQ ID NO: 27014 - DNA, 1527 bp, Zea Mays
gcttcgctcggctaacctcgcccgcctcccatgccgctgctggcgaggagcacgaccgcggggcctcggcggcgcgccttcgtcctcgctctcctcctgctgcccccgctgtttcttattctgctccaccgcacctcatcgccctcgcttcggcccctccccgcgccccgcaagccctcttcccggtcccagtcctgcgactactccgccggcgagtgggtgcgcgaccccctcgcgggctcctcgctccgctacgacaacacctgcaaggagatcttcaagggatggaactgcatcgccaatggcaagcccaacgcccgcgacctgctcagctggcggtggaggcccgtcgggcccgggtgcgagctcccccgcctcgacccgcgccggttcctggagcacctcagggacaccagtatcggatttgtgggtgattcgttgaaccgcaacatgtttgcctcattagtatgcatgcttaggggagtaagtggtgaggttcgcaaatggcgtcctgcagaggcagaccgtggcttcaccttcctgcgctataacctcactgtggcataccacaggacaaatctcttggtacattatggtggtcagcaaatccaaatggaggtactctagaatctcttgggtataagcatggttacagagttgatgtggatattcctgaccaaacatgggtagaggcatgtagcttccatgatgttcttattttcaacactgggcattggtggtgggcaccctcgaaatttgatccaatacggtcaccaatgctgttctttgagaaggggaggccaattgtgcctcctttactgccacctgctggactggatttggctcttcaaaacatgttaatgtttgcgaacaaagcaatgagaccaaacacagtgaaattcttccgtactcaatctcctagacatttcgaaggtggtgactggaatgaaggtggatcttgccaacgtaaccagcccttgtcgtcagaagaggtggaagaaattttctctttggacaataacagcaccaacgtggaggcacgcttggtaaaccaacacctggtgaaggctcttgaacagcagtctagttttagagttctggacatcactcgcatgagtgaattcagagcggatgctcacccttcaacaactggcggcaaaaagcacgatgattgcatgcattggtgtttgccaggaccaactgacacatggaacgatttgctagcgtccagtcttgaagtggttgagagctagtctgagaataaaactcaagggctcacctgagaaagttacccctagcttcactccccccccccccccccccccccacacccccccatgaatccacttgtagaatcgagttttgctgagagttcgttgtagggctcttcgctgcagcttgttttatatgtggagtggagcatttccccggcttgtattcttgaccctgtatatatttgaccattgtagggtttcactgtataataataggtcgaattcattttgtttgtttgaaaactaagtcgcg

SEQ ID NO: 27015 - DNA, 1387 bp, Zea Mays
tttttttgtcagttatgatctctgttgggttctctctaggcgaataattacctccgaagaaactgttgtgtctgttctatcatctataacagggaagtatcgcacaggtttgtcacctgatgctctatcagtcatagaaaaccgtgaaaaggaggagtctgaggaacttagaaaatctgcttatcttcaagttgaaacggctttatccttacctggaaggcttagtggttctgtggaatggaggaaagcaaggtcagagttgggccaagcagattcactaagttgctcatcctgccctattcggaagtgtgtggatggtcatgtttcaaatatatatgatgctctttctgcttttctttcacatttttttgacaaaaaaatccctaaagaaagaattattgaagcttttgaggcattgaagactttgatgctaactcttaaaagttccaactttaagagcagaagtgctacattagaccagaaagcacaccatctatttgaggagatatttccttccattgaaagattgttatctgctatttcactgaaagcagagttgggaactgctggataccaatctgtgaccgtgtctggaaatccagtacactcatccttagcgttaccagtagcactggatgcagttaatgagatattgagtaattataagaataatacctttttcacagaaggcaatcatttcccaagagggaacagagtatgctcaggttcagtccttgcaagcagggaacaacttccaataggaattgcaacagcagcttttgacggcattcactcctccaaatgggaagagcctgatggagccaaaggatgttggctgatttatacaatgcaagatggcaaaagttgcgagttggagtcatatgatttgatgtcagctaatgatgctccagagagggatccaatggactgggttcttgaagggagcgcagacggaggctccacctggaatatacttgatgctcggaattcagaaatgttcgagagccgtttcctgaggaaaacatttacagtggataagagatataaggcaaatgctttcaggtttaggtttctacgcgtaagagattcccattctaatccaaggtttcagataggatcaattgatctatatgggaaaaccatatgaactccccccggagctgtgtttcacttttcggctttctgaactgctcggtctcacgagcctgtgtagtatcataaattcataatattgtaatgcgagcatttactgtggacgcaacgctctcttcagtatgaatagatactgaataattaagagcatgatatatattgtttgcgcgcgcgattgagttctgaaatataagtgaagtccctcgacatgatcaacgatcctgttttcttgaac

SEQ ID NO: 27016 - DNA, 938 bp, Zea Mays
cccactgcttatggatgcacctagatccatgcgaaggagtctatgataatcccttactgtacgagaaagggtggaacaagaagttaaattatgttattgcgatttctaaagatggagtacgggacgtaacaaaacgctacaccagaaagtggcatgaggttctctctaggcgaataattacctccgaagaaactgttgtgtctgttctatcatctataacagggaagtatcgcacagaaggcaatcatttcccaagagggaacagagtatgctcaggttcagtccttgcaagcagggaacaacttccaataggaattgcaacagcagcttttgacggcattcactcctccaaatgggaagagcctgatggagccaaaggatgttggctgatttatacaatgcaagatggcaaaagttgcgagttggagtcatatgatttgatgtcagctaatgatgctccagagagggatccaatggactgggttcttgaagggagcgcagacggaggctccacctggaatatacttgatgctcggaattcagaaatgttcgagagccgtttcctgaggaaaacatttacagtggataagagatataaggcaaatgctttcaggtttaggtttctacgcgtaagagattcccattctaatccaaggtttcagataggatcaattgatctatatgggaaaaccatatgaactccccccggagctgtgtttcacttttcggctttctgaactgctcggtctcacgagcctgtgtagtatcataaattcataatattgtaatgcgagcatttactgtggacgcaacgctctcttcagtatgaatagatactgaataattaagagcatgatatatattgtttgcgcgcgcgattgagttctgaaatataagtgaagtccctcgacatgatcaacgatcctgttttcttgaac

SEQ ID NO: 27017 - DNA, 1294 bp, Zea Mays
atggtgtcttccacgcgcgtgtggcacaacggtctcggtaacacacaaagctctgagcgtgcatttaatgcgtgcgacgctaccatgatacaatgtgccttggtaacgtgcggggcggtcatagaggcctgtcacaagcctgccaatgctctgtgcttggtcagaattctggatttcactgatcacgtgtggacagaatgtttttcaaacttgtatggaagatggatgcacctagatccatgcgaaggagtctatgataatcccttactgtacgagaaagggtggaacaagaagttaaattatgttattgcgatttctaaagatggagtacgggacgtaacaaaacgctacaccagaaagtggcatgaggttctctctaggcgaataattacctccgaagaaactgttgtgtctgttctatcatctataacagggaagtatcgcacaggtttgtcacctgatgctctatcagtcatagaaaaccgtgaaaaggaggagtctgaggaacttagaaaatctgcttatcttcaagttgaaacggctttatccttacctggaaggcttagtggttctgtggaatggaggaaagcaagaaggcaatcatttcccaagagggaacagagtatgctcaggttcagtccttgcaagcagggaacaacttccaataggaattgcaacagcagcttttgacggcattcactcctccaaatgggaagagcctgatggagccaaaggatgttggctgatttatacaatgcaagatggcaaaagttgcgagttggagtcatatgatttgatgtcagctaatgatgctccagagagggatccaatggactgggttcttgaagggagcgcagacggaggctccacctggaatatacttgatgctcggaattcagaaatgttcgagagccgtttcctgaggaaaacatttacagtggataagagatataaggcaaatgctttcaggtttaggtttctacgcgtaagagattcccattctaatccaaggtttcagataggatcaattgatctatatgggaaaaccatatgaactccccccggagctgtgtttcacttttcggctttctgaactgctcggtctcacgagcctgtgtagtatcataaattcataatattgtaatgcgagcatttactgtggacgcaacgctctcttcagtatgaatagatactgaataattaagagcatgatatatattgtttgcgcgcgcgattgagttctgaaatataagtgaagtccctcgacatgatcaacgatcctgttttcttgaac

SEQ ID NO: 27018 - DNA, 1701 bp, Zea Mays
atggtgtcttccacgcgcgtgtggcacaacggtctcggtaacacacaaagctctgagcgtgcatttaatgcgtgcgacgctaccatgatacaatgtgccttggtaacgtgcggggcggtcatagaggcctgtcacaagcctgccaatgctctgtgcttggtcagaattctggatttcactgatcacgtgtggacagaatgtttttcaaacttgtatggaagatggatgcacctagatccatgcgaaggagtctatgataatcccttactgtacgagaaagggtggaacaagaagttaaattatgttattgcgatttctaaagatggagtacgggacgtaacaaaacgctacaccagaaagtggcatgaggttctctctaggcgaataattacctccgaagaaactgttgtgtctgttctatcatctataacagggaagtatcgcacaggtttgtcacctgatgctctatcagtcatagaaaaccgtgaaaaggaggagtctgaggaacttagaaaatctgcttatcttcaagttgaaacggctttatccttacctggaaggcttagtggttctgtggaatggaggaaagcaaggtcagagttgggccaagcagattcactaagttgctcatcctgccctattcggaagtgtgtggatggtcatgtttcaaatatatatgatgctctttctgcttttctttcacatttttttgacaaaaaaatccctaaagaaagaattattgaagcttttgaggcattgaagactttgatgctaactcttaaaagttccaactttaagagcagaagtgctacattagaccagaaagcacaccatctatttgaggagatatttccttccattgaaagattgttatctgctatttcactgaaagcagagttgggaactgctggataccaatctgtgaccgtgtctggaaatccagtacactcatccttagcgttaccagtagcactggatgcagttaatgagatattgagtaattataagaataatacctttttcacagaaggcaatcatttcccaagagggaacagagtatgctcaggttcagtccttgcaagcagggaacaacttccaataggaattgcaacagcagcttttgacggcattcactcctccaaatgggaagagcctgatggagccaaagatggcaaaagttgcgagttggagtcatatgatttgatgtcagctaatgatgctccagagagggatccaatggactgggttcttgaagggagcgcagacggaggctccacctggaatatacttgatgctcggaattcagaaatgttcgagagccgtttcctgaggaaaacatttacagtggataagagatataaggcaaatgctttcaggtttaggtttctacgcgtaagagattcccattctaatccaaggtttcagataggatcaattgatctatatgggaaaaccatatgaactccccccggagctgtgtttcacttttcggctttctgaactgctcggtctcacgagcctgtgtagtatcataaattcataatattgtaatgcgagcatttactgtggacgcaacgctctcttcagtatgaatagatactgaataattaagagcatgatatatattgtttgcgcgcgcgattgagttctgaaatataagtgaagtccctcgacatgatcaacgatcctgttttcttgaac

SEQ ID NO: 27019 - DNA, 1149 bp, Zea Mays
atggtgtcttccacgcgcgtgtggcacaacggtctcggtaacacacaaagctctgagcgtgcatttaatgcgtgcgacgctaccatgatacaatgtgccttggtaacgtgcggggcggtcatagaggcctgtcacaagcctgccaatgctctgtgcttggtcagaattctggatttcactgatcacgtgtggacagaatgtttttcaaacttgtatggaagatggatgcacctagatccatgcgaaggagtctatgataatcccttactgtacgagaaagggtggaacaagaagttaaattatgttattgcgatttctaaagatggagtacgggacgtaacaaaacgctacaccagaaagtggcatgaggttctctctaggcgaataattacctccgaagaaactgttgtgtctgttctatcatctataacagggaagtatcgcacagaaggcaatcatttcccaagagggaacagagtatgctcaggttcagtccttgcaagcagggaacaacttccaataggaattgcaacagcagcttttgacggcattcactcctccaaatgggaagagcctgatggagccaaaggatgttggctgatttatacaatgcaagatggcaaaagttgcgagttggagtcatatgatttgatgtcagctaatgatgctccagagagggatccaatggactgggttcttgaagggagcgcagacggaggctccacctggaatatacttgatgctcggaattcagaaatgttcgagagccgtttcctgaggaaaacatttacagtggataagagatataaggcaaatgctttcaggtttaggtttctacgcgtaagagattcccattctaatccaaggtttcagataggatcaattgatctatatgggaaaaccatatgaactccccccggagctgtgtttcacttttcggctttctgaactgctcggtctcacgagcctgtgtagtatcataaattcataatattgtaatgcgagcatttactgtggacgcaacgctctcttcagtatgaatagatactgaataattaagagcatgatatatattgtttgcgcgcgcgattgagttctgaaatataagtgaagtccctcgacatgatcaacgatcctgttttcttgaac

SEQ ID NO: 27020 - DNA, 1668 bp, Zea Mays
atggtgtcttccacgcgcgtgtggcacaacggtctcggtaacacacaaagctctgagcgtgcatttaatgcgtgcgacgctaccatgatacaatgtgccttggtaacgtgcggggcggtcatagaggcctgtcacaagcctgccaatgctctgtgcttggtcagaattctggatttcactgatcacgtgtggacagaatgtttttcaaacttgtatggaaggtggaacaagaagttaaattatgttattgcgatttctaaagatggagtacgggacgtaacaaaacgctacaccagaaagtggcatgaggttctctctaggcgaataattacctccgaagaaactgttgtgtctgttctatcatctataacagggaagtatcgcacaggtttgtcacctgatgctctatcagtcatagaaaaccgtgaaaaggaggagtctgaggaacttagaaaatctgcttatcttcaagttgaaacggctttatccttacctggaaggcttagtggttctgtggaatggaggaaagcaaggtcagagttgggccaagcagattcactaagttgctcatcctgccctattcggaagtgtgtggatggtcatgtttcaaatatatatgatgctctttctgcttttctttcacatttttttgacaaaaaaatccctaaagaaagaattattgaagcttttgaggcattgaagactttgatgctaactcttaaaagttccaactttaagagcagaagtgctacattagaccagaaagcacaccatctatttgaggagatatttccttccattgaaagattgttatctgctatttcactgaaagcagagttgggaactgctggataccaatctgtgaccgtgtctggaaatccagtacactcatccttagcgttaccagtagcactggatgcagttaatgagatattgagtaattataagaataatacctttttcacagaaggcaatcatttcccaagagggaacagagtatgctcaggttcagtccttgcaagcagggaacaacttccaataggaattgcaacagcagcttttgacggcattcactcctccaaatgggaagagcctgatggagccaaaggatgttggctgatttatacaatgcaagatggcaaaagttgcgagttggagtcatatgatttgatgtcagctaatgatgctccagagagggatccaatggactgggttcttgaagggagcgcagacggaggctccacctggaatatacttgatgctcggaattcagaaatgttcgagagccgtttcctgaggaaaacatttacagtggataagagatataaggcaaatgctttcaggtttaggtttctacgcgtaagagattcccattctaatccaaggtttcagataggatcaattgatctatatgggaaaaccatatgaactccccccggagctgtgtttcacttttcggctttctgaactgctcggtctcacgagcctgtgtagtatcataaattcataatattgtaatgcgagcatttactgtggacgcaacgctctcttcagtatgaatagatactgaataattaagagcatgatatatattgtttgcgcgcgcgattgagttctgaaatataagtgaagtccctcgacatgatcaacgatcctgttttcttgaac

SEQ ID NO: 27021 - DNA, 1214 bp, Zea Mays
atggtgtcttccacgcgcgtgtggcacaacggtctcggtaacacacaaagctctgagcgtgcatttaatgcgtgcgacgctaccatgatacaatgtgccttggtaacgtgcggggcggtcatagaggcctgtcacaagcctgccaatgctctgtgcttggtcagaattctggatttcactgatcacgtgtggacagaatgtttttcaaacttgtatggaagatggatgcacctagatccatgcgaaggagtctatgataatcccttactgtacgagaaagggtggaacaagaagttaaattatgttattgcgatttctaaagatggagtacgggacgtaacaaaacgctacaccagaaagtggcatgaggttctctctaggcgaataattacctccgaagaaactgttgtgtctgttctatcatctataacagggaagtatcgcacaggtttgtcacctgatgctctatcagtcatagaaaaccgtgaaaaggaggagtctgaggaacttagaaaatctgcttatcttcaagttgaaacggctttatccttacctggaaggcttagtggttctgtggaatggaggaaagcaaggcaacagcagcttttgacggcattcactcctccaaatgggaagagcctgatggagccaaaggatgttggctgatttatacaatgcaagatggcaaaagttgcgagttggagtcatatgatttgatgtcagctaatgatgctccagagagggatccaatggactgggttcttgaagggagcgcagacggaggctccacctggaatatacttgatgctcggaattcagaaatgttcgagagccgtttcctgaggaaaacatttacagtggataagagatataaggcaaatgctttcaggtttaggtttctacgcgtaagagattcccattctaatccaaggtttcagataggatcaattgatctatatgggaaaaccatatgaactccccccggagctgtgtttcacttttcggctttctgaactgctcggtctcacgagcctgtgtagtatcataaattcataatattgtaatgcgagcatttactgtggacgcaacgctctcttcagtatgaatagatactgaataattaagagcatgatatatattgtttgcgcgcgcgattgagttctgaaatataagtgaagtccctcgacatgatcaacgatcctgttttcttgaac

SEQ ID NO: 27022 - DNA, 2370 bp, Zea Mays
agtcgcgcgcatcttttccagtcgcgcccatctaactacgggtagactcggcaggacggcagcacaggtccacgcgggcgcggaggcaacgctatggtggctcgccgcttcgtggtccggcatggccccgcagccggaggatcagccgaggcggcggaggagcaacagcacgaggtggagtacgacacggagcacggcctcgacgtcctccgcctccagatcttttccctcaccgccgtcccgcccgacctccagaagatcgtggtggaggcggatgggtcggtggtggacgacggcaccgacctggaagccgtctctgagcgcctgcgcctccttgctatcggcgaggagggggaggacgacggggcagcggccagggcgcaggagaagtccgacgaggaattcgcacggatgcttcaggcggaagaagaggcacttctcctacaacagtacaatatacaaaatgatggtggagatgtgtttagacaaagagttgagccttacatgcaccaggttctgatgtatgaagattcagtgggacaagaggcagcacaaaagacagttccgatatgcgaactggaggagaaggcattagtttcactggccaaggaagggaatttcaatccttcgaaagatgaagagaagcatgcctttctgctgcaattgcttttttggtttaagcaatcattcagatgggttaatgcagcaccttgtgacagctgtgggccgtgagacatccaatgttggaatgggcaccccacttacctcagaaatcaaatttggcgcttcacgtgttgagatgtatagattctggatttcactgatcacgtgtggacagaatgtttttcaaacttgtatggaagatggatgcacctagatccatgcgaaggagtctatgataatcccttactgtacgagaaagggtggaacaagaagttaaattatgttattgcgatttctaaagatggagtacgggacgtaacaaaacgctacaccagaaagtggcatgaggttctctctaggcgaataattacctccgaagaaactgttgtgtctgttctatcatctataacagggaagtatcgcacaggtttgtcacctgatgctctatcagtcatagaaaaccgtgaaaaggaggagtctgaggaacttagaaaatctgcttatcttcaagttgaaacggctttatccttacctggaaggcttagtggttctgtggaatggaggaaagcaaggtcagagttgggccaagcagattcactaagttgctcatcctgccctattcggaagtgtgtggatggtcatgtttcaaatatatatgatgctctttctgcttttctttcacatttttttgacaaaaaaatccctaaagaaagaattattgaagcttttgaggcattgaagactttgatgctaactcttaaaagttccaactttaagagcagaagtgctacattagaccagaaagcacaccatctatttgaggagatatttccttccattgaaagattgttatctgctatttcactgaaagcagagttgggaactgctggataccaatctgtgaccgtgtctggaaatccagtacactcatccttagcgttaccagtagcactggatgcagttaatgagatattgagtaattataagaataatacctttttcacagaaggcaatcatttcccaagagggaacagagtatgctcaggttcagtccttgcaagcagggaacaacttccaataggaattgcaacagcagcttttgacggcattcactcctccaaatgggaagagcctgatggagccaaaggatgttggctgatttatacaatgcaagatggcaaaagttgcgagttggagtcatatgatttgatgtcagctaatgatgctccagagagggatccaatggactgggttcttgaagggagcgcagacggaggctccacctggaatatacttgatgctcggaattcagaaatgttcgagagccgtttcctgaggaaaacatttacagtggataagagatataaggcaaatgctttcaggtttaggtttctacgcgtaagagattcccattctaatccaaggtttcagataggatcaattgatctatatgggaaaaccatatgaactccccccggagctgtgtttcacttttcggctttctgaactgctcggtctcacgagcctgtgtagtatcataaattcataatattgtaatgcgagcatttactgtggacgcaacgctctcttcagtatgaatagatactgaataattaagagcatgatatatattgtttgcgcgcgcgattgagttctgaaatataagtgaagtccctcgacatgatcaacgatcctgttttcttgaac

SEQ ID NO: 27023 - DNA, 1936 bp, Zea Mays
agtcgcgcgcatcttttccagtcgcgcccatctaactacgggtagactcggcaggacggcagcacaggtccacgcgggcgcggaggcaacgctatggtggctcgccgcttcgtggtccggcatggccccgcagccggaggatcagccgaggcggcggaggagcaacagcacgaggtggagtacgacacggagcacggcctcgacgtcctccgcctccagatcttttccctcaccgccgtcccgcccgacctccagaagatcgtggtggaggcggatgggtcggtggtggacgacggcaccgacctggaagccgtctctgagcgcctgcgcctccttgctatcggcgaggagggggaggacgacggggcagcggccagggcgcaggagaagtccgacgaggaattcgcacggatgcttcaggcggaagaagaggcacttctcctacaacagtacaatatacaaaatgatggtggagatgtgtttagacaaagagttgagccttacatgcaccaggttctgatgtatgaagattcagtgggacaagaggcagcacaaaagacagttccgatatgcgaactggaggagaaggcattagtttcactggccaaggaagggaatttcaatccttcgaaagatgaagagaagcatgcctttctgctgcaattgcttttttggtttaagcaatcattcagatgggttaatgcagcaccttgtgacagctgtgggccgtgagacatccaatgttggaatgggcaccccacttacctcagaaatcaaatttggcgcttcacgtgttgagatgtatagattctggatttcactgatcacgtgtggacagaatgtttttcaaacttgtatggaagatggatgcacctagatccatgcgaaggagtctatgataatcccttactgtacgagaaagggtggaacaagaagttaaattatgttattgcgatttctaaagatggagtacgggacgtaacaaaacgctacaccagaaagtggcatgaggttctctctaggcgaataattacctccgaagaaactgttgtgtctgttctatcatctataacagggaagtatcgcacaggtttgtcacctgatgctctatcagtcatagaaaaccgtgaaaaggaggagtctgaggaacttagaaaatctgcttatcttcaagttgaaacggctttatccttacctggaaggcttagtggttctgtggaatggaggaaagcaagaaggcaatcatttcccaagagggaacagagtatgctcaggttcagtccttgcaagcagggaacaacttccaataggaattgcaacagcagcttttgacggcattcactcctccaaatgggaagagcctgatggagccaaaggatgttggctgatttatacaatgcaagatggcaaaagttgcgagttggagtcatatgatttgatgtcagctaatgatgctccagagagggatccaatggactgggttcttgaagggagcgcagacggaggctccacctggaatatacttgatgctcggaattcagaaatgttcgagagccgtttcctgaggaaaacatttacagtggataagagatataaggcaaatgctttcaggtttaggtttctacgcgtaagagattcccattctaatccaaggtttcagataggatcaattgatctatatgggaaaaccatatgaactccccccggagctgtgtttcacttttcggctttctgaactgctcggtctcacgagcctgtgtagtatcataaattcataatattgtaatgcgagcatttactgtggacgcaacgctctcttcagtatgaatagatactgaataattaagagcatgatatatattgtttgcgcgcgcgattgagttctgaaatataagtgaagtccctcgacatgatcaacgatcctgttttcttgaac

SEQ ID NO: 27024 - DNA, 2482 bp, Zea Mays
agtcgcgcgcatcttttccagtcgcgcccatctaactacgggtagactcggcaggacggcagcacaggtccacgcgggcgcggaggcaacgctatggtggctcgccgcttcgtggtccggcatggccccgcagccggaggatcagccgaggcggcggaggagcaacagcacgaggtggagtacgacacggagcacggcctcgacgtcctccgcctccagatcttttccctcaccgccgtcccgcccgacctccagaagatcgtggtggaggcggatgggtcggtggtggacgacggcaccgacctggaagccgtctctgagcgcctgcgcctccttgctatcggcgaggagggggaggacgacggggcagcggccagggcgcaggagaagtccgacgaggaattcgcacggatgcttcagggagcaacctggtggtatcattctatgttgaggctgtttcaatgtcaccacacttcaccaatttggccaccagtcaccacagtttaggaaaagcaaaatgtgccaatactgggcggaagaagaggcacttctcctacaacagtacaatatacaaaatgatggtggagatgtgtttagacaaagagttgagccttacatgcaccaggttctgatgtatgaagattcagtgggacaagaggcagcacaaaagacagttccgatatgcgaactggaggagaaggcattagtttcactggccaaggaagggaatttcaatccttcgaaagatgaagagaagcatgcctttctgctgcaattgcttttttggtttaagcaatcattcagatgggttaatgcagcaccttgtgacagctgtgggccgtgagacatccaatgttggaatgggcaccccacttacctcagaaatcaaatttggcgcttcacgtgttgagatgtatagattctggatttcactgatcacgtgtggacagaatgtttttcaaacttgtatggaagatggatgcacctagatccatgcgaaggagtctatgataatcccttactgtacgagaaagggtggaacaagaagttaaattatgttattgcgatttctaaagatggagtacgggacgtaacaaaacgctacaccagaaagtggcatgaggttctctctaggcgaataattacctccgaagaaactgttgtgtctgttctatcatctataacagggaagtatcgcacaggtttgtcacctgatgctctatcagtcatagaaaaccgtgaaaaggaggagtctgaggaacttagaaaatctgcttatcttcaagttgaaacggctttatccttacctggaaggcttagtggttctgtggaatggaggaaagcaaggtcagagttgggccaagcagattcactaagttgctcatcctgccctattcggaagtgtgtggatggtcatgtttcaaatatatatgatgctctttctgcttttctttcacatttttttgacaaaaaaatccctaaagaaagaattattgaagcttttgaggcattgaagactttgatgctaactcttaaaagttccaactttaagagcagaagtgctacattagaccagaaagcacaccatctatttgaggagatatttccttccattgaaagattgttatctgctatttcactgaaagcagagttgggaactgctggataccaatctgtgaccgtgtctggaaatccagtacactcatccttagcgttaccagtagcactggatgcagttaatgagatattgagtaattataagaataatacctttttcacagaaggcaatcatttcccaagagggaacagagtatgctcaggttcagtccttgcaagcagggaacaacttccaataggaattgcaacagcagcttttgacggcattcactcctccaaatgggaagagcctgatggagccaaaggatgttggctgatttatacaatgcaagatggcaaaagttgcgagttggagtcatatgatttgatgtcagctaatgatgctccagagagggatccaatggactgggttcttgaagggagcgcagacggaggctccacctggaatatacttgatgctcggaattcagaaatgttcgagagccgtttcctgaggaaaacatttacagtggataagagatataaggcaaatgctttcaggtttaggtttctacgcgtaagagattcccattctaatccaaggtttcagataggatcaattgatctatatgggaaaaccatatgaactccccccggagctgtgtttcacttttcggctttctgaactgctcggtctcacgagcctgtgtagtatcataaattcataatattgtaatgcgagcatttactgtggacgcaacgctctcttcagtatgaatagatactgaataattaagagcatgatatatattgtttgcgcgcgcgattgagttctgaaatataagtgaagtccctcgacatgatcaacgatcctgttttcttgaac

SEQ ID NO: 27025 - DNA, 1128 bp, Zea Mays
cgggtcaagccccatgttgttgtgtccccatgttgttgtgtccctgattcagtttgccgtacggcgccgtcatcgcttctgtggcgagctcgtcagctattgttatcttgaccgtgccagcacgtgactgtggtcgtgttcatcgaatttgccaacgctctgttgccgattcgactgtagtcgctggtgatagctttgcgtgttgtcgagcccgtcgtgttccttgttttcactcgtcggccgacctcgccacgacttagttcgtccatcatgctgatcactgtcccatgctatgcctattagctcggatcctgccaagctcgtcgtcgcgtcgttcgccatcgacctcgcttggccctgtatcattaggctagtcggccatagtcgctgccgtgcgcgcttgtccctgatgcccatcgcgtgatatttggatctcgttgattggccgctcttgtccgccgttaatttcgctttgcacctcacctgctgttgtggtgctgctatcccgcgacactcgtaccggtgcatcgtcgcctggccaggagttgtcgccactagttcgctttcgtccaaatcgccaccgcggatgcttgggtctctagtcacgcgtctttctatcccgcgcttgtctcatctgatgcctcaacaacaccgtggtcgtccttcctcgcggtgttattatttaccctgctactgtaatcatgcctcatgcgctgttagtctaaaatactcaagtcaagtgagcatcctgtgcgactcaagcccggttcgtcaagattttttagtcaagaagagattccaagggtatgtggagaaacaagccccaggtcgatgccccaagtgctcggcgaaaggcctgaacaaggatcatcgtcgtttattcggattgctagtcgatatggtaatcatactctgattcgttattttagctaattaatttgatagatggaatagaagaatattaatcgtaatattatcttacgatactcgtcttgatatgcattcatatgcataatgcatttcattaggtacgctagttgatcgtgcgatgtggaagacgagccaagtcgaccccaagcgcgggctactctgcatggtggtgctggtagatgaacctgcctgatcaag

SEQ ID NO: 27026 - DNA, 3855 bp, Zea Mays
ctcagggctcggtctggaggaggatcagcccgtcttcggacgtctcggccagtgcttgctgtggggcggtattcctcgacctgaggcaagagcttcggtctggaggagaatcaccccaccggcctttcgtccaaagctgaagctgttgccgtcgactaagtcttctgggcagatgtggaggcgtatcactcatcagccttcctccggggtggacgcgtcaggggatagtccttcgcaggctagtgggaatgaggttgttggttgcatctccagtgctcccctgccggttggcgtccgccccaagagaaagcgggttaggaagcgacgttccagggcaaaaccttcaggtgccccacctccatcttcctcggatcgtccagtccgcatggcggccaccgctgctttggtaaccccagtgcaccacgttcctccgtgtatcatgggatggagccaccaaatgacgagagtagaggatgatcttcaatacgcggtaatggtgactgtgatcagcgatcggtcttcggtccgggtttcggagatagctgatctgcttgccccaaggctggaaatggaagctagttctctggtgttgcggcgggtttctgcgtcaaattatcttcttgtcctcccatgtcgtgacaaggtagaggagttggctggtagatgggctactctcagagctgggtctttttctgtggtttgcaagaaatggtcccgtctcatggagtccaggggcgccttactcccggtgttgatcaatgttgagctccagggaattcctatacatgcttgggagacaagcaccgtggatcatttactaaacccttttgcgtggatacatcaagtccaccctaatactttgaatctgaaggatgtggccgttttccgctgctccgcgtggtgtttggacccttctgctattccttcttctaaagagctttggattgtagaacctccttttgctgttgagggtgatcctgcaggaaaacgagtgttggtttactctgtgaatattgcggtctcgatcactctccggcaggatggctccggtccagttcttcgttctgaggatcctgatgatgaggatcactctcctcgtagaaggcgtctcatctcgccttcccatgagtttgttcaggaacatcatgatagggggtcagagatcggagcgtcgttcagttcacgaccggataggcccaagagttggaagattgattctcaggtcttagctgaggctgagctggtggaattcagcaacgtggagatcagagaagttgatgtccagatccaaaatcacagtcatgtggcttcttcccgcgctgtctctgacccgctggtatcaacaatggtccatcaacaagttccggtttgtagcaggtctgccgagtgctccagcttgcaagggggtggacagttttcagtgcatgagtgccctggcagtgggcagatgattgggtgtcctgaggatttctgtcatattggaagtcagcaggggggtgggtagttttctatgcttaaatgtcctagcaatgggcagatgaacagatgtcatgaggatcacaatcagattggaagtcaacaggtatttgttttagctggagatttgggttctatggctgcctgcgaggtattgcctcccagggagtctcctgtggctgccacctcccctcctttgctcctccgacaaaacctattcaagtttactttcggcgacgccgaggagcgaggagggttgaggaaacagccttggggagctcttcgtctcaaccaccggcttctgctgttgatgtttcaacctcaagggtgtccgagttcttgtccagtattaccaaagaggtcgatgttgtgttggagaaccctaccccaacccccttagaaagaaaaaattgcctgggggcgggtggctactcctaggcgcagcaggcgtgttgctggcgtcggggttgagtgtcaccaacgcctatcttctatcaagaaaagcaagaagaccattatgaagacactgggagtgatccgtgatggggattctttgagtcaagaggtgctggatgaatatagtcgcattttcagcaaaactctttcccaggtgcagatccaagctcttgcctctcttttcggttggtctctaccagaagagacgttggtagtggaggctactttttgaggaaggttctcttccttgggttgcgggtttgttggtcgtcttaagctagtggtttatggatccttcaaaaattctcatttggaatgttagggggcttaatgcctcggctcgccaggatgctgtaagggctgaggtcgtctcctctagagtggatgtggtttgtttacaggaaactaaaatgcaggatatttctcgtttttttgttattcggatgcttggaccagattttgccaactttgtctttcgcccatctattggtgctagtggtggcattttggttgcttggaaagatcatataaattggtctggtgtttctagagtggatgatcattcagtgtcaattctttttcatcctgttgatgatgttgagtggtggctgacttgtgtgtatggtccccagttcaaccaggacaaaattgccttccttcaagaattgagagatattcgtgcttcctattctggcccttggttggtccttggggattttaatttaatttataaagatgaggataaaaataactccaacctggataggctaatgaaacatagtttccggagatggattgatgacttggctcttaaggagttgcctttggttgggcgtaagtacacctggtcgaatgggcagcataatccaactcttgtcaaattggacagtgttttctgctccttggattgggatgatcagttcccttgggccctgctgcaaagttcggcctcattcgattcagaccattgcccgcttcttctggggcttaaggatattgtgcaaggaaagccacggtttcattttgaagctttttggacaagattggaagggtttctggtagctgttgaggaagcctgggctgctgtccctgctagtcactgtccgttgctcactctctccatgaagctcaaggccacggctaaagctcttcaaggttggggcgagaaaaaggttggtcatattagatcacagcttggtcttgccagggagctgctccaccagttcgacttagctcaggacagtagaagtctttctcctgaagaattttggttgcgtaatagtttaaagcagcacagtcttgctcttgcgtctttatggcgttccttggtccggatgagatctcggatttgttggttgaaggatggggatgcgaatactgctttatttcactctcatgcgaggtatcgcaaagctaagagtttcatccctagaattgtctcagaggatggaaaggttttcactgcccaggaagagaaggcggacttgttcactaatttctatatgaatctgcttggttctgcaattaataggggggctgcggttgatttggaacagcttggagttcccacttttgatctagaagctcttgacagccctttctcggcggatgaggtttggaatacaatcattagtcttcctcttgacaaggcgccagggccagacgggttcacaggtcgttttgacaaggtctgttggtccattatcaagattgatgtcatggctgcaatatcctgtgtttgggctagaaagtttgccaacatgaattgtctgaactctgcttacatcactctcattccaaaattggaaggggccgacaaggtcaaagattttagacctatcagccttattcatagttttgcaaagctggtgtctaagcttatggctaatagattggcttgtcagttgcagcatcttgtctcgc

SEQ ID NO: 27027 - DNA, 2973 bp, Zea Mays
cttcgccttcctcagcgcgtcctcgtccggcttcctccgctcgatgcagcagcagcgactgcaggcggcgctcgacagaaaacaacacggctgcgaccggatctcaccggaaaagttgaggagtggagggtcttagctgccggagttgggtaatacctccctatatcccctattggtaggtccgccgctgctccaacctccaggtccaggcaccaggtcgctcctcccttctcttcccgtcgggttcttgtccatcgtagatagcctctccttcgccgaggtcaccagttcctcctcgtgtccttctcgctagtcgctacagtcctcctactctgcttggctcgagtggaatggggatccatcctgacctgagtggtttcttctttgcttggtaaggaacccttgctttcttggatggatctttgttctgcggattgtctaaatctcaattttcttcttcctccacgcaggtagtcgcgcatatttggtagccgcgtccgcgtgacgtcgtcggtgcttgggtccattcagacattgttcttatttgatcagtacccctatttagcgcctgcaagatcgagatcgatcttacttgactccataagatgtattggggatttggagtgccttgtactccaacttaagactgggagtgaacccgcataccccaagcccgcccttccaccgaactgaactagacatcctcaagcgtcatcaattctaatggatgatgcagcagaaaatattcttgcatcacttggccgtgtgcatctcgttgatctaatggcctctgagggccttccttctgacagctataagatgtgtgtgtcgactctgatgcagtcactcgctcaatattcggcagccatcattcagctgtcaccagctgatggtgccttgttgaggtcaggtttggactcggctcgctttttcttccaccagcgagggtataattcaaatgaggctgtacactcggatgattcccgtgaatggtgcaagacctctggttactatgttgattctcagatgtgtctggaaatgtatgattacaggcctggtattactgcaactgatcccagcggtgaaatggaattacctccatcaggtttgcctgacatattttcggtgctgggtaaagtttctcgagatatattggacgcaatcagtttctcattgaatttacgtagctgtgcatttactgagatactcgacaacatacccttgagaagccaggaagtatcatcttctgttctttcagcatgttgtcattcaaggccatcgcttgaaggaggacatcagcatagcattgcttctcaagataatggtcacttgctcatgttttctgagcaggagcaacagattgataagactttgcttaccctagttaagtcagatatgtcaggtctatatattaaagacttacatggacactggattcttgttgatggagatattggtccacatgatgttattgtctattctggccttgcactttatcaggaaactgctggctatgtaaatccagctgtacataaaacagaggttggaatacatggatgtatgtttgggcgatgctctttgatgttcaagttcatgcctagatcagttgcaaggctgagtggttcagagatgagagctgctggccatggtgttgatgcccagtttcaggttcccatacaagttaatgatttcatgcagacagatcgtttttctgatcaactgtttcctaagactgaaccatcattacacacagaacaagattcagcatcattcaactccgtgatgaataaaaagaagggaaatacaagaacaaagccgctccctccttctaaaagacttcgccaagaagcacagagggtcctgaaggagcgtgttcaggacattgcagataagaaaggcgtcaagctgagattttgcaatctcaaggaatgtgaaagccacatcctgtcattggatagtccatgtgagaacacgagaactgaaattggatggccacaaggggttccgtttgtccatccacatgacctcccaaacaaggcaaagcttgggtttttggaagcttacgaacctggatggacggcctcccaacaagaaatggagttaagttctattgaaacatgatgagtgcattctcattttatctttctaattggcaaaggttggacaactgcttgcgacattgtgaacctcatcctgatcattccagcctgttctcaaaccaaattgttctaccagtccattgcaccctagcaaagtctgaaatttgtgttgattcagccttgtgctctgccctggagtatcagtcactccaaaaaaaaactgacttggatggcacctagccttctaaatgacattcgtaaaagtgtgctgacccaagattgtctaattcaagtttgccacgatttcttaaacaatcaagccatcgagactctagaggagccagcctcagtaaattttgatgtattaccaaccttggatatgttttgaatttcggggctggtcatcaattcattccttcaacatgttgcagaagcagtaatgtatactgacgccaaataatttgtatacatagatgtagtatttgagaacgtgtaaatgcgactacccgctgcttagattgaaagttagattatataatctgggtagattataatcctaaacaaacaggcctttaatccataatgcattatacggaaatgtttgtaatatacttcgcaagttcgcatcaacaatgacaatgctgatgtggagatgtttagaaggagatggagaaaacacaattaaaagtcaagcaataagagcaacaagaaaagacacaagatcactctctcatgttactaatcattaataatcactagtcacaattatgacacttgaagagatttgaaagcttatgtcttatgaagtgcttgctcttgtattgaatgagaggcttggatcctatgaatggaggtggtttgagttgtatttata

SEQ ID NO: 27028 - DNA, 3145 bp, Zea Mays
cttcgccttcctcagcgcgtcctcgtccggcttcctccgctcgatgcagcagcagcgactgcaggcggcgctcgacagaaaacaacacggctgcgaccggatctcaccggaaaagttgaggagtggagggtcttagctgccggagttgggtaatacctccctatatcccctattggtaggtccgccgctgctccaacctccaggtccaggcaccaggtcgctcctcccttctcttcccgtcgggttcttgtccatcgtagatagcctctccttcgccgaggtcaccagttcctcctcgtgtccttctcgctagtcgctacagtcctcctactctgcttggctcgagtggaatggggatccatcctgacctgagtggtttcttctttgcttggtaaggaacccttgctttcttggatggatctttgttctgcggattgtctaaatctcaattttcttcttcctccacgcaggtagtcgcgcatatttggtagccgcgtccgcgtgacgtcgtcggtgcttgggtccattcagacattgttcttatttgatcagtacccctatttagcgcctgcaagatcgagatcgatcttacttgactccataagatgtattggggatttggagtgccttgtactccaacttaagactgggagtgaacccgcataccccaagcccgcccttccaccgaactgaactagacatcctcaagcgtcatcaattctaatggatgatgcagcagaaaatattcttgcatcacttggccgtgtgcatctcgttgatctaatggcctctgagggccttccttctgacagctataagatgtgtgtgtcgactctgatgcagtcactcgctcaatattcggcagccatcattcagctgtcaccagctgatggtgccttgttgaggtcaggtttggactcggctcgctttttcttccaccagcgagggtataattcaaatgaggctgtacactcggatgattcccgtgaatggtgcaagacctctggttactatgttgattctcagatgtgtctggaaatgtatgattacaggcctggtattactgcaactgatcccagcggtgaaatggaattacctccatcaggtttgcctgacatattttcggtgctgggtaaagtttctcgagatatattggacgcaatcagtttctcattgaatttacgtagctgtgcatttactgagatactcgacaacatacccttgagaagccaggaagtatcatcttctgttctttcagcatgttgtcattcaaggccatcgcttgaaggaggacatcagcatagcattgcttctcaagataatggtcacttgctcatgttttctgagcaggagcaacagattgataagactttgcttaccctagttaagtcagatatgtcaggtctatatattaaagacttacatggacactggattcttgttgatggagatattggtccacatgatgttattgtctattctggccttgcactttatcaggaaactgctggctatgtaaatccagctgtacataaaacagaggttggaatacatggatgtatgtttgggcgatgctctttgatgttcaagttcatgcctagatcagttgcaaggctgagtggttcagagatgagagctgctggccatggtgttgatgcccagtttcaggttcccatacaagttaatgatttcatgcagacagatcgtttttctgatcaactgtttcctaagactgaaccatcattacacacagaacaagattcagcatcattcaactccgtgatgaataaaaagaagggaaatacaagaacaaagccgctccctccttctaaaagacttcgccaagaagcacagagggtcctgaaggagcgtgttcaggacattgcagataagaaaggcgtcaagctgagattttgcaatctcaaggaatgtgaaagccacatcctgtcattggatagtccatgtgagaacacgagaactgaaattggatggccacaaggggttccgtttgtccatccacatgacctcccaaacaaggcaaagcttgggtttttggaagcttacgaacctggatggacggcctcccaacaagaaatggagttggacaactgcttgcgacattgtgaacctcatcctgatcattccagcctgttctcaaaccaaattgttctaccagtccattgcaccctagcaaagtctgaaatttgtgttgattcagccttgtgctctgccctggagtatcagtcactccaaaaaaaaactgacttggatggcacctagccttctaaatgacattcgtaaaagtgtgctgacccaagattgtctaattcaaggttagttttggaaccccattttcccaagggatttctattttcccaagaaaatttagttcaaaatgaaaatccattaagaaaatagagttcccaaactagtcctcagagtgattttgttctgcgctaatatatcgcagtgcgcagtggccctgagctttcccttgagttcaatattgtagcagcagctgttttaaagtcactctcgtggttgtgtttcatgtggagtcgcagtttgccacgatttcttaaacaatcaagccatcgagactctagaggagccagcctcagtaaattttgatgtattaccaaccttggatatgttttgaatttcggggctggtcatcaattcattccttcaacatgttgcagaagcagtaatgtatactgacgccaaataatttgtatacatagatgtagtatttgagaacgtgtaaatgcgactacccgctgcttagattgaaagttagattatataatctgggtagattataatcctaaacaaacaggcctttaatccataatgcattatacggaaatgtttgtaatatacttcgcaagttcgcatcaacaatgacaatgctgatgtggagatgtttagaaggagatggagaaaacacaattaaaagtcaagcaataagagcaacaagaaaagacacaagatcactctctcatgttactaatcattaataatcactagtcacaattatgacacttgaagagatttgaaagcttatgtcttatgaagtgcttgctcttgtattgaatgagaggcttggatcctatgaatggaggtggtttgagttgtatttata

SEQ ID NO: 27029 - DNA, 2883 bp, Zea Mays
cttcgccttcctcagcgcgtcctcgtccggcttcctccgctcgatgcagcagcagcgactgcaggcggcgctcgacagaaaacaacacggctgcgaccggatctcaccggaaaagttgaggagtggagggtcttagctgccggagttgggtaatacctccctatatcccctattggtaggtccgccgctgctccaacctccaggtccaggcaccaggtcgctcctcccttctcttcccgtcgggttcttgtccatcgtagatagcctctccttcgccgaggtcaccagttcctcctcgtgtccttctcgctagtcgctacagtcctcctactctgcttggctcgagtggaatggggatccatcctgacctgagtggtttcttctttgcttggtaaggaacccttgctttcttggatggatctttgttctgcggattgtctaaatctcaattttcttcttcctccacgcaggtagtcgcgcatatttggtagccgcgtccgcgtgacgtcgtcggtgcttgggtccattcagacattgttcttatttgatcagtacccctatttagcgcctgcaagatcgagatcgatcttacttgactccataagatgtattggggatttggagtgccttgtactccaacttaagactgggagtgaacccgcataccccaagcccgcccttccaccgaactgaactagacatcctcaagcgtcatcaattctaatggatgatgcagcagaaaatattcttgcatcacttggccgtgtgcatctcgttgatctaatggcctctgagggccttccttctgacagctataagatgtgtgtgtcgactctgatgcagtcactcgctcaatattcggcagccatcattcagctgtcaccagctgatggtgccttgttgaggtcaggtttggactcggctcgctttttcttccaccagcgagggtataattcaaatgaggctgtacactcggatgattcccgtgaatggtgcaagacctctggttactatgttgattctcagatgtgtctggaaatgtatgattacaggcctggtattactgcaactgatcccagcggtgaaatggaattacctccatcaggtttgcctgacatattttcggtgctgggtaaagtttctcgagatatattggacgcaatcagtttctcattgaatttacgtagctgtgcatttactgagatactcgacaacatacccttgagaagccaggaagtatcatcttctgttctttcagcatgttgtcattcaaggccatcgcttgaaggaggacatcagcatagcattgcttctcaagataatggtcacttgctcatgttttctgagcaggagcaacagattgataagactttgcttaccctagttaagtcagatatgtcaggtctatatattaaagacttacatggacactggattcttgttgatggagatattggtccacatgatgttattgtctattctggccttgcactttatcaggaaactgctggctatgtaaatccagctgtacataaaacagaggttggaatacatggatgtatgtttgggcgatgctctttgatgttcaagttcatgcctagatcagttgcaaggctgagtggttcagagatgagagctgctggccatggtgttgatgcccagtttcaggttcccatacaagttaatgatttcatgcagacagatcgtttttctgatcaactgtttcctaagactgaaccatcattacacacagaacaagattcagttgtttggtgtagcatcattcaactccgtgatgaataaaaagaagggaaatacaagaacaaagccgctccctccttctaaaagacttcgccaagaagcacagagggtcctgaaggagcgtgttcaggacattgcagataagaaaggcgtcaagctgagattttgcaatctcaaggaatgtgaaagccacatcctgtcattggatagtccatgtgagaacacgagaactgaaattggatggccacaaggggttccgtttgtccatccacatgacctcccaaacaaggcaaagcttgggtttttggaagcttacgaacctggatggacggcctcccaacaagaaatggagttggacaactgcttgcgacattgtgaacctcatcctgatcattccagcctgttctcaaaccaaattgttctaccagtccattgcaccctagcaaagtctgaaatttgtgttgattcagccttgtgctctgccctggagtatcagtcactccaaaaaaaaactgacttggatggcacctagccttctaaatgacattcgtaaaagtgtgctgacccaagattgtctaattcaaggagccagcctcagtaaattttgatgtattaccaaccttggatatgttttgaatttcggggctggtcatcaattcattccttcaacatgttgcagaagcagtaatgtatactgacgccaaataatttgtatacatagatgtagtatttgagaacgtgtaaatgcgactacccgctgcttagattgaaagttagattatataatctgggtagattataatcctaaacaaacaggcctttaatccataatgcattatacggaaatgtttgtaatatacttcgcaagttcgcatcaacaatgacaatgctgatgtggagatgtttagaaggagatggagaaaacacaattaaaagtcaagcaataagagcaacaagaaaagacacaagatcactctctcatgttactaatcattaataatcactagtcacaattatgacacttgaagagatttgaaagcttatgtcttatgaagtgcttgctcttgtattgaatgagaggcttggatcctatgaatggaggtggtttgagttgtatttata

SEQ ID NO: 27030 - DNA, 2946 bp, Zea Mays
accccttcgccttcctcagcgcgtcctcgtccggcttcctccgctcgatgcagcagcagcgactgcaggcggcgctcgacagaaaacaacacggctgcgaccggatctcaccggaaaagttgaggagtggagggtcttagctgccggagttgggtaatacctccctatatcccctattggtaggtccgccgctgctccaacctccaggtccaggcaccaggtcgctcctcccttctcttcccgtcgggttcttgtccatcgtagatagcctctccttcgccgaggtcaccagttcctcctcgtgtccttctcgctagtcgctacagtcctcctactctgcttggctcgagtggaatggggatccatcctgacctgagtggtttcttctttgcttggtaaggaacccttgctttcttggatggatctttgttctgcggattgtctaaatctcaattttcttcttcctccacgcaggtagtcgcgcatatttggtagccgcgtccgcgtgacgtcgtcggtgcttgggtccattcagacattgttcttatttgatcagtacccctatttagcgcctgcaagatcgagatcgatcttacttgactccataagatgtattggggatttggagtgccttgtactccaacttaagactgggagtgaacccgcataccccaagcccgcccttccaccgaactgaactagacatcctcaagcgtcatcaattctaatggatgatgcagcagaaaatattcttgcatcacttggccgtgtgcatctcgttgatctaatggcctctgagggccttccttctgacagctataagatgtgtgtgtcgactctgatgcagtcactcgctcaatattcggcagccatcattcagctgtcaccagctgatggtgccttgttgaggtcaggtttggactcggctcgctttttcttccaccagcgagggtataattcaaatgaggctgtacactcggatgattcccgtgaatggtgcaagacctctggttactatgttgattctcagatgtgtctggaaatgtatgattacaggcctggtattactgcaactgatcccagcggtgaaatggaattacctccatcaggtttgcctgacatattttcggtgctgggtaaagtttctcgagatatattggacgcaatcagtttctcattgaatttacgtagctgtgcatttactgagatactcgacaacatacccttgagaagccaggaagtatcatcttctgttctttcagcatgttgtcattcaaggccatcgcttgaaggaggacatcagcatagcattgcttctcaagataatggtcacttgctcatgttttctgagcaggagcaacagattgataagactttgcttaccctagttaagtcagatatgtcaggtctatatattaaagacttacatggacactggattcttgttgatggagatattggtccacatgatgttattgtctattctggccttgcactttatcaggaaactgctggctatgtaaatccagctgtacataaaacagaggttggaatacatggatgtatgtttgggcgatgctctttgatgttcaagttcatgcctagatcagttgcaaggctgagtggttcagagatgagagctgctggccatggtgttgatgcccagtttcaggttcccatacaagttaatgatttcatgcagacagatcgtttttctgatcaactgtttcctaagactgaaccatcattacacacagaacaagattcagttgtttggtgtagcatcattcaactccgtgatgaataaaaagaagggaaatacaagaacaaagccgctccctccttctaaaagacttcgccaagaagcacagagggtcctgaaggagcgtgttcaggacattgcagataagaaaggcgtcaagctgagattttgcaatctcaaggaatgtgaaagccacatcctgtcattggatagtccatgtgagaacacgagaactgaaattggatggccacaaggggttccgtttgtccatccacatgacctcccaaacaaggcaaagcttgggtttttggaagcttacgaacctggatggacggcctcccaacaagaaatggagttaagttctattgaaacatgatgagtgcattctcattttatctttctaattggcaaaggttggacaactgcttgcgacattgtgaacctcatcctgatcattccagcctgttctcaaaccaaattgttctaccagtccattgcaccctagcaaagtctgaaatttgtgttgattcagccttgtgctctgccctggagtatcagtcactccaaaaaaaaactgacttggatggcacctagccttctaaatgacattcgtaaaagtgtgctgacccaagattgtctaattcaaggagccagcctcagtaaattttgatgtattaccaaccttggatatgttttgaatttcggggctggtcatcaattcattccttcaacatgttgcagaagcagtaatgtatactgacgccaaataatttgtatacatagatgtagtatttgagaacgtgtaaatgcgactacccgctgcttagattgaaagttagattatataatctgggtagattataatcctaaacaaacaggcctttaatccataatgcattatacggaaatgtttgtaatatacttcgcaagttcgcatcaacaatgacaatgctgatgtggagatgtttagaaggagatggagaaaacacaattaaaagtcaagcaataagagcaacaagaaaagacacaagatcactctctcatgttactaatcattaataatcactagtcacaattatgacacttgaagagatttgaaagcttatgtcttatgaagtgcttgctcttgtattgaatgagaggcttggatcctatgaatggaggtggtttgagttgtatttata

SEQ ID NO: 27031 - DNA, 2657 bp, Zea Mays
cggcccaaccacgcgtaccccttcgccttcctcagcgcgtcctcgtccggcttcctccgctcgatgcagcagcagcgactgcaggcggcgctcgacagaaaacaacacggctgcgaccggatctcaccggaaaagttgaggagtggagggtcttagctgccggagttgggtaatacctccctatatcccctattggtaggtccgccgctgctccaacctccaggtccaggcaccaggtcgctcctcccttctcttcccgtcgggttcttgtccatcgtagatagcctctccttcgccgaggtcaccagttcctcctcgtgtccttctcgctagtcgctacagtcctcctactctgcttggctcgagtggaatggggatccatcctgacctgagtggtttcttctttgcttggtaaggaacccttgctttcttggatggatctttgttctgcggattgtctaaatctcaattttcttcttcctccacgcaggtagtcgcgcatatttggtagccgcgtccgcgtgacgtcgtcggtgcttgggtccattcagacattgttcttatttgatcagtacccctatttagcgcctgcaagatcgagatcgatcttacttgactccataagatgtattggggatttggagtgccttgtactccaacttaagactgggagtgaacccgcataccccaagcccgcccttccaccgaactgaactagacatcctcaagcgtcatcaattctaatggatgatgcagcagaaaatattcttgcatcacttggccgtgtgcatctcgttgatctaatggcctctgagggccttccttctgacagctataagatgtgtgtgtcgactctgatgcagtcactcgctcaatattcggcagccatcattcagctgtcaccagctgatggtgccttgttgaggtcaggtttggactcggctcgctttttcttccaccagcgagggtataattcaaatgaggctgtacactcggatgattcccgtgaatggtgcaagacctctggttactatgttgattctcagatgtgtctggaaatgtatgattacaggcctggtattactgcaactgatcccagcggtgaaatggaattacctccatcaggtttgcctgacatattttcggtgctgggtaaagtttctcgagatatattggacgcaatcagtttctcattgaatttacgtagctgtgcatttactgagatactcgacaacatacccttgagaagccaggaagtatcatcttctgttctttcagcatgttgtcattcaaggccatcgcttgaaggaggacatcagcatagcattgcttctcaagataatggtcacttgctcatgttttctgagcaggagcaacagattgataagactttgcttaccctagttaagtcagatatgtcaggtctatatattaaagacttacatggacactggattcttgttgatggagatattggtccacatgatgttattgtctattctggccttgcactttatcaggaaactgctggctatgtaaatccagctgtacataaaacagaggttggaatacatggatgtatgtttgggcgatgctctttgatgttcaagttcatgcctagatcagttgcaaggctgagtggttcagagatgagagctgctggccatggtgttgatgcccagtttcaggttcccatacaagttaatgatttcatgcagacagatcgtttttctgatcaactgtttcctaagactgaaccatcattacacacagaacaagattcagcatcattcaactccgtgatgaataaaaagaagggaaatacaagaacaaagccgctccctccttctaaaagacttcgccaagaagcacagagggtcctgaaggagcgtgttcaggacattgcagataagaaaggcgtcaagctgagattttgcaatctcaaggaatgtgaaagccacatcctgtcattggatagtccatgtgagaacacgagaactgaaattggatggccacaaggggttccgtttgtccatccacatgacctcccaaacaaggcaaagcttgggtttttggaagcttacgaacctggatggacggcctcccaacaagaaatggaggagccagcctcagtaaattttgatgtattaccaaccttggatatgttttgaatttcggggctggtcatcaattcattccttcaacatgttgcagaagcagtaatgtatactgacgccaaataatttgtatacatagatgtagtatttgagaacgtgtaaatgcgactacccgctgcttagattgaaagttagattatataatctgggtagattataatcctaaacaaacaggcctttaatccataatgcattatacggaaatgtttgtaatatacttcgcaagttcgcatcaacaatgacaatgctgatgtggagatgtttagaaggagatggagaaaacacaattaaaagtcaagcaataagagcaacaagaaaagacacaagatcactctctcatgttactaatcattaataatcactagtcacaattatgacacttgaagagatttgaaagcttatgtcttatgaagtgcttgctcttgtattgaatgagaggcttggatcctatgaatggaggtggtttgagttgtatttata

SEQ ID NO: 27032 - DNA, 2944 bp, Zea Mays
ccggcgtctgcgtcgctagcagctgcggactgcggctgcggttgatgggccagtcggcccaaccacgcgtaccccttcgccttcctcagcgcgtcctcgtccggcttcctccgctcgatgcagcagcagcgactgcaggcggcgctcgacagaaaacaacacggctgcgaccggatctcaccggaaaagttgaggagtggagggtcttagctgccggagttgggtaatacctccctatatcccctattggtaggtccgccgctgctccaacctccaggtccaggcaccaggtcgctcctcccttctcttcccgtcgggttcttgtccatcgtagatagcctctccttcgccgaggtcaccagttcctcctcgtgtccttctcgctagtcgctacagtcctcctactctgcttggctcgagtggaatggggatccatcctgacctgagtggtttcttctttgcttggtaaggaacccttgctttcttggatggatctttgttctgcggattgtctaaatctcaattttcttcttcctccacgcaggtagtcgcgcatatttggtagccgcgtccgcgtgacgtcgtcggtgcttgggtccattcagacattgttcttatttgatcagtacccctatttagcgcctgcaagatcgagatcgatcttacttgactccataagatgtattggggatttggagtgccttgtactccaacttaagactgggagtgaacccgcataccccaagcccgcccttccaccgaactgaactagacatcctcaagcgtcatcaattctaatggatgatgcagcagaaaatattcttgcatcacttggccgtgtgcatctcgttgatctaatggcctctgagggccttccttctgacagctataagatgtgtgtgtcgactctgatgcagtcactcgctcaatattcggcagccatcattcagctgtcaccagctgatggtgccttgttgaggtcaggtttggactcggctcgctttttcttccaccagcgagggtataattcaaatgaggctgtacactcggatgattcccgtgaatggtgcaagacctctggttactatgttgattctcagatgtgtctggaaatgtatgattacaggcctggtattactgcaactgatcccagcggtgaaatggaattacctccatcaggtttgcctgacatattttcggtgctgggtaaagtttctcgagatatattggacgcaatcagtttctcattgaatttacgtagctgtgcatttactgagatactcgacaacatacccttgagaagccaggaagtatcatcttctgttctttcagcatgttgtcattcaaggccatcgcttgaaggaggacatcagcatagcattgcttctcaagataatggtcacttgctcatgttttctgagcaggagcaacagattgataagactttgcttaccctagttaagtcagatatgtcaggtctatatattaaagacttacatggacactggattcttgttgatggagatattggtccacatgatgttattgtctattctggccttgcactttatcaggaaactgctggctatgtaaatccagctgtacataaaacagaggttggaatacatggatgtatgtttgggcgatgctctttgatgttcaagttcatgcctagatcagttgcaaggctgagtggttcagagatgagagctgctggccatggtgttgatgcccagtttcaggttcccatacaagttaatgatttcatgcagacagatcgtttttctgatcaactgtttcctaagactgaaccatcattacacacagaacaagattcagcatcattcaactccgtgatgaataaaaagaagggaaatacaagaacaaagccgctccctccttctaaaagacttcgccaagaagcacagagggtcctgaaggagcgtgttcaggacattgcagataagaaaggcgtcaagctgagattttgcaatctcaaggaatgtgaaagccacatcctgtcattggatagtccatgtgagaacacgagaactgaaattggatggccacaaggggttccgtttgtccatccacatgacctcccaaacaaggcaaagcttgggtttttggaagcttacgaacctggatggacggcctcccaacaagaaatggagttggacaactgcttgcgacattgtgaacctcatcctgatcattccagcctgttctcaaaccaaattgttctaccagtccattgcaccctagcaaagtctgaaatttgtgttgattcagccttgtgctctgccctggagtatcagtcactccaaaaaaaaactgacttggatggcacctagccttctaaatgacattcgtaaaagtgtgctgacccaagattgtctaattcaaggagccagcctcagtaaattttgatgtattaccaaccttggatatgttttgaatttcggggctggtcatcaattcattccttcaacatgttgcagaagcagtaatgtatactgacgccaaataatttgtatacatagatgtagtatttgagaacgtgtaaatgcgactacccgctgcttagattgaaagttagattatataatctgggtagattataatcctaaacaaacaggcctttaatccataatgcattatacggaaatgtttgtaatatacttcgcaagttcgcatcaacaatgacaatgctgatgtggagatgtttagaaggagatggagaaaacacaattaaaagtcaagcaataagagcaacaagaaaagacacaagatcactctctcatgttactaatcattaataatcactagtcacaattatgacacttgaagagatttgaaagcttatgtcttatgaagtgcttgctcttgtattgaatgagaggcttggatcctatgaatggaggtggtttgagttgtatttata

SEQ ID NO: 27033 - DNA, 3024 bp, Zea Mays
ccaaccggtcagaccagcggaccggcgtctgcgtcgctagcagctgcggactgcggctgcggttgatgggccagtcggcccaaccacgcgtaccccttcgccttcctcagcgcgtcctcgtccggcttcctccgctcgatgcagcagcagcgactgcaggcggcgctcgacagaaaacaacacggctgcgaccggatctcaccggaaaagttgaggagtggagggtcttagctgccggagttgggtaatacctccctatatcccctattggtaggtccgccgctgctccaacctccaggtccaggcaccaggtcgctcctcccttctcttcccgtcgggttcttgtccatcgtagatagcctctccttcgccgaggtcaccagttcctcctcgtgtccttctcgctagtcgctacagtcctcctactctgcttggctcgagtggaatggggatccatcctgacctgagtggtttcttctttgcttggtaaggaacccttgctttcttggatggatctttgttctgcggattgtctaaatctcaattttcttcttcctccacgcaggtagtcgcgcatatttggtagccgcgtccgcgtgacgtcgtcggtgcttgggtccattcagacattgttcttatttgatcagtacccctatttagcgcctgcaagatcgagatcgatcttacttgactccataagatgtattggggatttggagtgccttgtactccaacttaagactgggagtgaacccgcataccccaagcccgcccttccaccgaactgaactagacatcctcaagcgtcatcaattctaatggatgatgcagcagaaaatattcttgcatcacttggccgtgtgcatctcgttgatctaatggcctctgagggccttccttctgacagctataagatgtgtgtgtcgactctgatgcagtcactcgctcaatattcggcagccatcattcagctgtcaccagctgatggtgccttgttgaggtcaggtttggactcggctcgctttttcttccaccagcgagggtataattcaaatgaggctgtacactcggatgattcccgtgaatggtgcaagacctctggttactatgttgattctcagatgtgtctggaaatgtatgattacaggcctggtattactgcaactgatcccagcggtgaaatggaattacctccatcaggtttgcctgacatattttcggtgctgggtaaagtttctcgagatatattggacgcaatcagtttctcattgaatttacgtagctgtgcatttactgagatactcgacaacatacccttgagaagccaggaagtatcatcttctgttctttcagcatgttgtcattcaaggccatcgcttgaaggaggacatcagcatagcattgcttctcaagataatggtcacttgctcatgttttctgagcaggagcaacagattgataagactttgcttaccctagttaagtcagatatgtcaggtctatatattaaagacttacatggacactggattcttgttgatggagatattggtccacatgatgttattgtctattctggccttgcactttatcaggaaactgctggctatgtaaatccagctgtacataaaacagaggttggaatacatggatgtatgtttgggcgatgctctttgatgttcaagttcatgcctagatcagttgcaaggctgagtggttcagagatgagagctgctggccatggtgttgatgcccagtttcaggttcccatacaagttaatgatttcatgcagacagatcgtttttctgatcaactgtttcctaagactgaaccatcattacacacagaacaagattcagcatcattcaactccgtgatgaataaaaagaagggaaatacaagaacaaagccgctccctccttctaaaagacttcgccaagaagcacagagggtcctgaaggagcgtgttcaggacattgcagataagaaaggcgtcaagctgagattttgcaatctcaaggaatgtgaaagccacatcctgtcattggatagtccatgtgagaacacgagaactgaaattggatggccacaaggggttccgtttgtccatccacatgacctcccaaacaaggcaaagcttgggtttttggaagcttacgaacctggatggacggcctcccaacaagaaatggagttaagttctattgaaacatgatgagtgcattctcattttatctttctaattggcaaaggttggacaactgcttgcgacattgtgaacctcatcctgatcattccagcctgttctcaaaccaaattgttctaccagtccattgcaccctagcaaagtctgaaatttgtgttgattcagccttgtgctctgccctggagtatcagtcactccaaaaaaaaactgacttggatggcacctagccttctaaatgacattcgtaaaagtgtgctgacccaagattgtctaattcaaggagccagcctcagtaaattttgatgtattaccaaccttggatatgttttgaatttcggggctggtcatcaattcattccttcaacatgttgcagaagcagtaatgtatactgacgccaaataatttgtatacatagatgtagtatttgagaacgtgtaaatgcgactacccgctgcttagattgaaagttagattatataatctgggtagattataatcctaaacaaacaggcctttaatccataatgcattatacggaaatgtttgtaatatacttcgcaagttcgcatcaacaatgacaatgctgatgtggagatgtttagaaggagatggagaaaacacaattaaaagtcaagcaataagagcaacaagaaaagacacaagatcactctctcatgttactaatcattaataatcactagtcacaattatgacacttgaagagatttgaaagcttatgtcttatgaagtgcttgctcttgtattgaatgagaggcttggatcctatgaatggaggtggtttgagttgtatttata

SEQ ID NO: 27034 - DNA, 3083 bp, Zea Mays
ccaaccggtcagaccagcggaccggcgtctgcgtcgctagcagctgcggactgcggctgcggttgatgggccagtcggcccaaccacgcgtaccccttcgccttcctcagcgcgtcctcgtccggcttcctccgctcgatgcagcagcagcgactgcaggcggcgctcgacagaaaacaacacggctgcgaccggatctcaccggaaaagttgaggagtggagggtcttagctgccggagttgggtaatacctccctatatcccctattggtaggtccgccgctgctccaacctccaggtccaggcaccaggtcgctcctcccttctcttcccgtcgggttcttgtccatcgtagatagcctctccttcgccgaggtcaccagttcctcctcgtgtccttctcgctagtcgctacagtcctcctactctgcttggctcgagtggaatggggatccatcctgacctgagtggtttcttctttgcttggtagtcgcgcatatttggtagccgcgtccgcgtgacgtcgtcggtgcttgggtccattcagacattgttcttatttgatcagtacccctatttagcgcctgcaagatcgagatcgatcttacttgactccataagatgtattggggatttggagtgccttgtactccaacttaagactgggagtgaacccgcataccccaagcccgcccttccaccgaactgaactagacatcctcaagcgtcatcaattctaatggatgatgcagcagaaaatattcttgcatcacttggccgtgtgcatctcgttgatctaatggcctctgagggccttccttctgacagctataagatgtgtgtgtcgactctgatgcagtcactcgctcaatattcggcagccatcattcagctgtcaccagctgatggtgccttgttgaggtcaggtttggactcggctcgctttttcttccaccagcgagggtataattcaaatgaggctgtacactcggatgattcccgtgaatggtgcaagacctctggttactatgttgattctcagatgtgtctggaaatgtatgattacaggcctggtattactgcaactgatcccagcggtgaaatggaattacctccatcaggtttgcctgacatattttcggtgctgggtaaagtttctcgagatatattggacgcaatcagtttctcattgaatttacgtagctgtgcatttactgagatactcgacaacatacccttgagaagccaggaagtatcatcttctgttctttcagcatgttgtcattcaaggccatcgcttgaaggaggacatcagcatagcattgcttctcaagataatggtcacttgctcatgttttctgagcaggagcaacagattgataagactttgcttaccctagttaagtcagatatgtcaggtctatatattaaagacttacatggacactggattcttgttgatggagatattggtccacatgatgttattgtctattctggccttgcactttatcaggaaactgctggctatgtaaatccagctgtacataaaacagaggttggaatacatggatgtatgtttgggcgatgctctttgatgttcaagttcatgcctagatcagttgcaaggctgagtggttcagagatgagagctgctggccatggtgttgatgcccagtttcaggttcccatacaagttaatgatttcatgcagacagatcgtttttctgatcaactgtttcctaagactgaaccatcattacacacagaacaagattcagcatcattcaactccgtgatgaataaaaagaagggaaatacaagaacaaagccgctccctccttctaaaagacttcgccaagaagcacagagggtcctgaaggagcgtgttcaggacattgcagataagaaaggcgtcaagctgagattttgcaatctcaaggaatgtgaaagccacatcctgtcattggatagtccatgtgagaacacgagaactgaaattggatggccacaaggggttccgtttgtccatccacatgacctcccaaacaaggcaaagcttgggtttttggaagcttacgaacctggatggacggcctcccaacaagaaatggagttaagttctattgaaacatgatgagtgcattctcattttatctttctaattggcaaaggttggacaactgcttgcgacattgtgaacctcatcctgatcattccagcctgttctcaaaccaaattgttctaccagtccattgcaccctagcaaagtctgaaatttgtgttgattcagccttgtgctctgccctggagtatcagtcactccaaaaaaaaactgacttggatggcacctagccttctaaatgacattcgtaaaagtgtgctgacccaagattgtctaattcaagtgcgcagtggccctgagctttcccttgagttcaatattgtagcagcagctgttttaaagtcactctcgtggttgtgtttcatgtggagtcgcagtttgccacgatttcttaaacaatcaagccatcgagactctagaggagccagcctcagtaaattttgatgtattaccaaccttggatatgttttgaatttcggggctggtcatcaattcattccttcaacatgttgcagaagcagtaatgtatactgacgccaaataatttgtatacatagatgtagtatttgagaacgtgtaaatgcgactacccgctgcttagattgaaagttagattatataatctgggtagattataatcctaaacaaacaggcctttaatccataatgcattatacggaaatgtttgtaatatacttcgcaagttcgcatcaacaatgacaatgctgatgtggagatgtttagaaggagatggagaaaacacaattaaaagtcaagcaataagagcaacaagaaaagacacaagatcactctctcatgttactaatcattaataatcactagtcacaattatgacacttgaagagatttgaaagcttatgtcttatgaagtgcttgctcttgtattgaatgagaggcttggatcctatgaatggaggtggtttgagttgtatttata

SEQ ID NO: 27035 - DNA, 3181 bp, Zea Mays
ccaaccggtcagaccagcggaccggcgtctgcgtcgctagcagctgcggactgcggctgcggttgatgggccagtcggcccaaccacgcgtaccccttcgccttcctcagcgcgtcctcgtccggcttcctccgctcgatgcagcagcagcgactgcaggcggcgctcgacagaaaacaacacggctgcgaccggatctcaccggaaaagttgaggagtggagggtcttagctgccggagttgggtaatacctccctatatcccctattggtaggtccgccgctgctccaacctccaggtccaggcaccaggtcgctcctcccttctcttcccgtcgggttcttgtccatcgtagatagcctctccttcgccgaggtcaccagttcctcctcgtgtccttctcgctagtcgctacagtcctcctactctgcttggctcgagtggaatggggatccatcctgacctgagtggtttcttctttgcttggtaaggaacccttgctttcttggatggatctttgttctgcggattgtctaaatctcaattttcttcttcctccacgcaggtagtcgcgcatatttggtagccgcgtccgcgtgacgtcgtcggtgcttgggtccattcagacattgttcttatttgatcagtacccctatttagcgcctgcaagatcgagatcgatcttacttgactccataagatgtattggggatttggagtgccttgtactccaacttaagactgggagtgaacccgcataccccaagcccgcccttccaccgaactgaactagacatcctcaagcgtcatcaattctaatggatgatgcagcagaaaatattcttgcatcacttggccgtgtgcatctcgttgatctaatggcctctgagggccttccttctgacagctataagatgtgtgtgtcgactctgatgcagtcactcgctcaatattcggcagccatcattcagctgtcaccagctgatggtgccttgttgaggtcaggtttggactcggctcgctttttcttccaccagcgagggtataattcaaatgaggctgtacactcggatgattcccgtgaatggtgcaagacctctggttactatgttgattctcagatgtgtctggaaatgtatgattacaggcctggtattactgcaactgatcccagcggtgaaatggaattacctccatcaggtttgcctgacatattttcggtgctgggtaaagtttctcgagatatattggacgcaatcagtttctcattgaatttacgtagctgtgcatttactgagatactcgacaacatacccttgagaagccaggaagtatcatcttctgttctttcagcatgttgtcattcaaggccatcgcttgaaggaggacatcagcatagcattgcttctcaagataatggtcacttgctcatgttttctgagcaggagcaacagattgataagactttgcttaccctagttaagtcagatatgtcaggtctatatattaaagacttacatggacactggattcttgttgatggagatattggtccacatgatgttattgtctattctggccttgcactttatcaggaaactgctggctatgtaaatccagctgtacataaaacagaggttggaatacatggatgtatgtttgggcgatgctctttgatgttcaagttcatgcctagatcagttgcaaggctgagtggttcagagatgagagctgctggccatggtgttgatgcccagtttcaggttcccatacaagttaatgatttcatgcagacagatcgtttttctgatcaactgtttcctaagactgaaccatcattacacacagaacaagattcagcatcattcaactccgtgatgaataaaaagaagggaaatacaagaacaaagccgctccctccttctaaaagacttcgccaagaagcacagagggtcctgaaggagcgtgttcaggacattgcagataagaaaggcgtcaagctgagattttgcaatctcaaggaatgtgaaagccacatcctgtcattggatagtccatgtgagaacacgagaactgaaattggatggccacaaggggttccgtttgtccatccacatgacctcccaaacaaggcaaagcttgggtttttggaagcttacgaacctggatggacggcctcccaacaagaaatggagttaagttctattgaaacatgatgagtgcattctcattttatctttctaattggcaaaggttggacaactgcttgcgacattgtgaacctcatcctgatcattccagcctgttctcaaaccaaattgttctaccagtccattgcaccctagcaaagtctgaaatttgtgttgattcagccttgtgctctgccctggagtatcagtcactccaaaaaaaaactgacttggatggcacctagccttctaaatgacattcgtaaaagtgtgctgacccaagattgtctaattcaagtgcgcagtggccctgagctttcccttgagttcaatattgtagcagcagctgttttaaagtcactctcgtggttgtgtttcatgtggagtcgcagtttgccacgatttcttaaacaatcaagccatcgagactctagaggtccggttgcactgctgtggagccagcctcagtaaattttgatgtattaccaaccttggatatgttttgaatttcggggctggtcatcaattcattccttcaacatgttgcagaagcagtaatgtatactgacgccaaataatttgtatacatagatgtagtatttgagaacgtgtaaatgcgactacccgctgcttagattgaaagttagattatataatctgggtagattataatcctaaacaaacaggcctttaatccataatgcattatacggaaatgtttgtaatatacttcgcaagttcgcatcaacaatgacaatgctgatgtggagatgtttagaaggagatggagaaaacacaattaaaagtcaagcaataagagcaacaagaaaagacacaagatcactctctcatgttactaatcattaataatcactagtcacaattatgacacttgaagagatttgaaagcttatgtcttatgaagtgcttgctcttgtattgaatgagaggcttggatcctatgaatggaggtggtttgagttgtatttata

SEQ ID NO: 27036 - DNA, 3781 bp, Zea Mays
ctcatttgatgtgtgactgagcagcactagccattgccctcctgccgcttgctgacgttgggcgactgcacatcagtcagacagccacatgtgaaagccatctatggaacgtgaccccctctttccttttccatgtagatggttcatatccctctaatactcttttcaattgccatcttgaagagaagaaacctgttctggtacaactgctcttcatgttcattatagatcatacctcgttgtttttctcaaaaactgaaaataaatacctgccgcgggacgccacgtggagggttttgaaagtcgacgcctacgacacgcctagtcgctaggctatgcccctcctgcctggactagggaggtagtcgggccctaagtcgctctgggcgcctatgtggcgacttgcagcgattcagcggcgcccaggttccctaggcggcgtggaggcgagctaggcgtccttcgagggaaagcacacgcggagctttggcgcgggaataagccgtgcgctggagaggataagggggagagaagtcgtgtgcctggctgcctggttttactgcccccccccccgactgcttgtgctggtcctccatcccgccagcgacgcggctactggtcttccccgccggcgacgcgactgctggtcttcctcaccggtgacgcgactgctggtcttcctcgccggcgacgtggctgctggtcctcctcgccggcgacgtggctgctggtcctcctccccgacactttctcctccctcagcccaagccccaaggtctgtatgtcctcccctgcttctctcctctcctctcctctgtttcctttctgttttgtatatcagtttgtaatttgttgattgatggcttgaactcacatgacagagggtcaatctgaaactgcaagtgcaccagagggagttagtggccttagaaggaattcagatgatgtgggatgggagtatggagttcttgttgatctaaacaacaaggacaagaggctgaataaggaactttggaaagaaagattacatgaggtgcataaatatattgcaagatgggcctttaaccatgcaatatcattcaatgcatgtgacaacgatgagttcaagcaaatgtgtgaagcaattggacaatttgggcctggaattgaacctccaactatgttagacctgcgagggagattgttggaagaagaatatgcaagaaccaagagtttgctgcaagaacgtgaagccgagaagatgaagaatggatgctctagtatgaccgatgcttggtcagataagaagagaagcataatgaattggacaaagcaatcgaagacatgggtccggatgatgtggtgcaagttgactgtcaatgcttctaacaacatgggagcaaagaagctactgcatgtgaagagaccatatatcttttggacatcttgtgcaactcacacaattaacttgatgctccaaggaattggcaacatgcctcagttcaagaaggtgattgaccaagcaaagacattcaccatatttgtctatgggcacacaagaacactagagtgcatgagacacttcactgaggggaaagagatagtaaggccaggagtgactaggtttgcgtcaaactatctaactttggacagcatacaagagaagaaggaccaactaagaaagatggtggttcatagtaggtgggactcactgaaggatgtgaaatcaaagaagggaaaaaatgccatagcaactatattgaatccaagcttttggaaggatgtgaagttgacattggctgtttttgcgccattgttcaaagttctccgtttggttgatggagatgtgaagccattgatgggctttgtatatggaaaactattgaaggcaaagagacaggtcaaagaggcccttggcaatgttgagaaccgtttcaaggatgttgttgctgttattgagaagaagatggctggaagacttgattctccattgcatttgacagcttatttgctgaatccacactacaattatgctgacccatcaatctttgatgctcccaaaataacagaaggttttatcagttgtgtggagactttttattatcatgatgacgaaatgcaagaacaagccgccaacatcaaactccagaagtttcagaatagagaagacccatttagcaagaagcttgcaaggacttttgaaaactttgattgtaatccagaccgcctcaacaagttggtctacattcaattcaacaacatgctgattaataagagaacaaagatcaagtccaagaaaattaccgatgttctattgtctagtgatacaactgaagctcaaggtttcctccaagagaatggagataattgtgcattagtttcctttagagatgaggaagaagtcatggaaggtacaaggataccttggtctgtgcttggagatgcagtgggagcagaagaacaactagagctgcgtagaagtgcaagggcgagagagctcaatgaagaagagtttgagtccgaagaagaagagtttgatgaatatgaggatgtgtatgagatggatgaaccctaagagtgagccagcttcatgtcatgttttagcttttattatgcatccatgtatctttaacttgtgaacttagaactcttgttgtgtgcttgtgttttgtcttgtgacttgtgagaactgaatcatgtgatgtaatgtactgctactgcctactgctagtctgctatgcattttatatgtgttgctgcctgctgtcccttcatgtttgtgattgcaaaaggctatcctacgctgctgatcagtatttaatggatgggagaagggtcagacctcagataagtacctaacttgctatttcctattttttttatcacttgtattgatgcccaattgcatctaaaagtgttgtccacttctattgcagcagtgcttgaggattcagtgatcaacagatcggcaagggcaaaggacgtaaggtatgtctactgctccttccctattttttatctaaattattcgttatttgtgctataaatgtatatattatataaattggcaaaacgcctagaaaaacgcctagcgtcgcctaggctggactagttcctaggctaagggtcatcacctagattccgcctagcgcctagcaaaacttattttcaattgccatcttgaagagaagaaacctgttctggtacaactgctcttcatgttcattatagatcataccttgttgtttttctcaaaaactgaaaataaatacttgtcaacttccatggttcctccattgataaagttgcaataccagtggacttggtggtgaaagttcgaagctagaaatgtcactggttatgaaccattccaggtagcattatcattgatggtttgcaagccaaaagtgatagtcaccatttgcactgaggaacatataagctgtgtccagttcatgtcacaggcagactgttatgcagcttaactgttagtttcaagctgtataggaaacacttattgttttgttagataattaactacagaaattttctcagtggttatgcagacggaaattacttattgctattggataaactgttaaagacagtgcatgcattgcatgcagtgctttatcaaaataatggtagaaggtggtgcatcacttctgatgaaacaatacttgttgtccctgcttttcaggctggtttacttacctcaaatctgcacttcaaatggcacaaatgaatgttggtagcgtacatcttctgtctagtgaaggtgagatattagaggaaaacaaac

SEQ ID NO: 27037 - DNA, 5109 bp, Zea Mays
cttagacctgtgctttggcgtgggacagatgagggaatttttttaaccacaacctaaaattcgctcccacatggagtcgaacccaagacttgaggagtgttactcagaccacctaaccaactcagctagaggccctttcgcatagtagtagtaatagtttgctgcatgctcaagacaatcgctccaacaaccaataaagcataccataaaaagacatgcaaagaagcagtcaaatccattatgacttacattccttaatatttccaaatcattaataggaaaaagttatgttgctctgctaatgcttactgtaaagtaccaagcccatggatatggcagaagtcccttgtcaaaatagcgtcctagtaatacagaaaaaaaatactttgtcttccttatccttacattgcaaggacaataattcagtggcaggctattcgcatcatgatctctgatctgatacacaaagatttgggctcaggcatcccaaagaacaatgccaaggacctgtgatccgatcaagcaaccatagcaatataccatcaccactgggtcaggcaagcccatattataacggtaagcgtcacacgtaagtgatccaaacaggcaatcatacaaccatcttttaagaacagtcgaacagtggaaagaaaatcgcctcaccaggggcgaagggcccagtgtggccctgtattgctcgagcaataccttagtatagcccaagaaagtaccagtagtaaaaaaatcctatccctaacgtagtaatgctttcagccttcacaaacaagttcgtctccggccagccttccaggatcgccccctgcttttgcccgcactcccacagcccaccactttgtgaaattgatttcaaatgtaagatattggtggaaatcaaggtagacaactcttttatctaaatatccagtaggctttgtgactttgatttcctcccataaaagatcttcaaatttatttgatgtgagattgtattcctcatttgatgtgtgactgagcagcactagccattgccctcctgccgcttgctgacgttgggcgactgcacatcagtcagacagccacatgtgaaagccatctatggaacgtgaccccctctttccttttccatgtagatggttcatatccctctaatactcttttcaattgccatcttgaagagaagaaacctgttctggtacaactgctcttcatgttcattatagatcatacctcgttgtttttctcaaaaactgaaaataaatacctgccgcgggacgccacgtggagggttttgaaagtcgacgcctacgacacgcctagtcgctaggctatgcccctcctgcctggactagggaggtagtcgggccctaagtcgctctgggcgcctatgtggcgacttgcagcgattcagcggcgcccaggttccctaggcggcgtggaggcgagctaggcgtccttcgagggaaagcacacgcggagctttggcgcgggaataagccgtgcgctggagaggataagggggagagaagtcgtgtgcctggctgcctggttttactgcccccccccccgactgcttgtgctggtcctccatcccgccagcgacgcggctactggtcttccccgccggcgacgcgactgctggtcttcctcaccggtgacgcgactgctggtcttcctcgccggcgacgtggctgctggtcctcctcgccggcgacgtggctgctggtcctcctccccgacactttctcctccctcagcccaagccccaaggtctgtatgtcctcccctgcttctctcctctcctctcctctgtttcctttctgttttgtatatcagtttgtaatttgttgattgatggcttgaactcacatgacagagggtcaatctgaaactgcaagtgcaccagagggagttagtggccttagaaggaattcagatgatgtgggatgggagtatggagttcttgttgatctaaacaacaaggacaagaggctgaataaggaactttggaaagaaagattacatgaggtgcataaatatattgcaagatgggcctttaaccatgcaatatcattcaatgcatgtgacaacgatgagttcaagcaaatgtgtgaagcaattggacaatttgggcctggaattgaacctccaactatgttagacctgcgagggagattgttggaagaagaatatgcaagaaccaagagtttgctgcaagaacgtgaagccgagaagatgaagaatggatgctctagtatgaccgatgcttggtcagataagaagagaagcataatgaattggacaaagcaatcgaagacatgggtccggatgatgtggtgcaagttgactgtcaatgcttctaacaacatgggagcaaagaagctactgcatgtgaagagaccatatatcttttggacatcttgtgcaactcacacaattaacttgatgctccaaggaattggcaacatgcctcagttcaagaaggtgattgaccaagcaaagacattcaccatatttgtctatgggcacacaagaacactagagtgcatgagacacttcactgaggggaaagagatagtaaggccaggagtgactaggtttgcgtcaaactatctaactttggacagcatacaagagaagaaggaccaactaagaaagatggtggttcatagtaggtgggactcactgaaggatgtgaaatcaaagaagggaaaaaatgccatagcaactatattgaatccaagcttttggaaggatgtgaagttgacattggctgtttttgcgccattgttcaaagttctccgtttggttgatggagatgtgaagccattgatgggctttgtatatggaaaactattgaaggcaaagagacaggtcaaagaggcccttggcaatgttgagaaccgtttcaaggatgttgttgctgttattgagaagaagatggctggaagacttgattctccattgcatttgacagcttatttgctgaatccacactacaattatgctgacccatcaatctttgatgctcccaaaataacagaaggttttatcagttgtgtggagactttttattatcatgatgacgaaatgcaagaacaagccgccaacatcaaactccagaagtttcagaatagagaagacccatttagcaagaagcttgcaaggacttttgaaaactttgattgtaatccaggtaacagttgtttgctgatagagaggttttttatttcagcattgtaacaagcaatctgtcgtacctcctaactaatagagaggtttttatttcagcatcatggtggcggctttatggaactaaaacaccagctctacagaagatggctaccaagatcttatctttaacatcaaattcttctggttgtgaaagaaattggagtgggtttgatggggttagtacctatctgttatcaacattacagcagcattacaataaaaatgcagaactaaaagtgctcttatttttaatttataggtgcacactaagaagagaaataggctaggcttactacagaccgcctcaacaagttggtctacattcaattcaacaacatgctgattaataagagaacaaagatcaagtccaagaaaattaccgatgttctattgtctagtgatacaactgaagctcaaggtttcctccaagagaatggagataattgtgcattagtttcctttagagatgaggaagaagtcatggaaggtacaaggataccttggtctgtgcttggagatgcagtgggagcagaagaacaactagagctgcgtagaagtgcaagggcgagagagctcaatgaagaagagtttgagtccgaagaagaagagtttgatgaatatgaggatgtgtatgagatggatgaaccctaagagtgagccagcttcatgtcatgttttagcttttattatgcatccatgtatctttaacttgtgaacttagaactcttgttgtgtgcttgtgttttgtcttgtgacttgtgagaactgaatcatgtgatgtaatgtactgctactgcctactgctagtctgctatgcattttatatgtgttgctgcctgctgtcccttcatgtttgtgattgcaaaaggctatcctacgctgctgatcagtatttaatggatgggagaagggtcagacctcagataagtacctaacttgctatttcctattttttttatcacttgtattgatgcccaattgcatctaaaagtgttgtccacttctattgcagcagtgcttgaggattcagtgatcaacagatcggcaagggcaaaggacgtaaggtatgtctactgctccttccctattttttatctaaattattcgttatttgtgctataaatgtatatattatataaattggcaaaacgcctagaaaaacgcctagcgtcgcctaggctggactagttcctaggctaagggtcatcacctagattccgcctagcgcctagcaaaacttattttcaattgccatcttgaagagaagaaacctgttctggtacaactgctcttcatgttcattatagatcataccttgttgtttttctcaaaaactgaaaataaatacttgtcaacttccatggttcctccattgataaagttgcaataccagtggacttggtggtgaaagttcgaagctagaaatgtcactggttatgaaccattccaggtagcattatcattgatggtttgcaagccaaaagtgatagtcaccatttgcactgaggaacatataagctgtgtccagttcatgtcacaggcagactgttatgcagcttaactgttagtttcaagctgtataggaaacacttattgttttgttagataattaactacagaaattttctcagtggttatgcagacggaaattacttattgctattggataaactgttaaagacagtgcatgcattgcatgcagtgctttatcaaaataatggtagaaggtggtgcatcacttctgatgaaacaatacttgttgtccctgcttttcaggctggtttacttacctcaaatctgcacttcaaatggcacaaatgaatgttggtagcgtacatcttctgtctagtgaaggtgagatattagaggaaaacaaac

SEQ ID NO: 27038 - DNA, 1165 bp, Zea Mays
ccatgccacggaaaacatttctgaccagtaaagggctggctggcaatgctggagaagtataggaactatgacttcgggcggtgcccgcgtgtttactgctgtggtcaaccatgcctgccggttggacaatcagatattcatcgatctagtaccgtgaaaatatactgccccaagtgtgaagacatctactacccacggtccaagtaccaaggcagtatcctaaccatactcttattatactatctttatgcgtgcgtttcaaactttgatctcttcgtgagaactcaaacgtatggtatttttgtaccaagtctgacacagctaccaatgttctcatgtcttagcacccatttacctacagctctttgttggttgatacagaaaactattaaacatgaaaacagtccactgcgcccaccaatcaccatgttttttcaactcccatagatataatattgtttagtgcctgagatgcactagctcttttctgtgttactgtggttccttagttgtagaatgtttgtcattttgttatatgctgctattttcttaaccttgtttagacatcgatggcgcatattttgggacaacgttccctcacctgttcctgatgacatacgagcacctcaagctacagaagcccttgcagcgctatgttcctcgtgtctttggcttcaagctccacaagccatgagcctcatgtatttggcttttaagctctacaggatgtggctcactgggggaaaacccagagttttgcgagatcaaggtccttgaagactacatataagagcgccattggctacatataaaagcgctattgacagatcagtggattgataaaactccaccatgcagcggagcgcttttaccttacctggctggcacctaccaacatttgaatgtagctctaaggataacgatgttgttgtaacctaactgtaattgtttttttgattagtaaaccaggaccccgtacgatgtagagtatgggcattatttatggcttatgcaaaaaaaatcgttatgctgtcccaggctcccagcaaccctttacctgtttttttagatcctttacctgcttggttctcgtaagatggcctttgaatttgataacaaaattctatattgaattgtgatatgtgaagggcgcaccatcttcatt

SEQ ID NO: 27039 - DNA, 813 bp, Zea Mays
ccatgccacggaaaacatttctgaccagtaaagggctggctggcaatgctggagaagtataggaactatgacttcgggcggtgcccgcgtgtttactgctgtggtcaaccatgcctgccggttggacaatcagatattcatcgatctagtaccgtgaaaatatactgccccaagtgtgaagacatctactacccacggtccaagtaccaagacatcgatggcgcatattttgggacaacgttccctcacctgttcctgatgacatacgagcacctcaagctacagaagcccttgcagcgctatgttcctcgtgtctttggcttcaagctccacaagccatgagcctcatgtatttggcttttaagctctacaggatgtggctcactgggggaaaacccagagttttgcgagatcaaggtccttgaagactacatataagagcgccattggctacatataaaagcgctattgacagatcagtggattgataaaactccaccatgcagcggagcgcttttaccttacctggctggcacctaccaacatttgaatgtagctctaaggataacgatgttgttgtaacctaactgtaattgtttttttgattagtaaaccaggaccccgtacgatgtagagtatgggcattatttatggcttatgcaaaaaaaatcgttatgctgtcccaggctcccagcaaccctttacctgtttttttagatcctttacctgcttggttctcgtaagatggcctttgaatttgataacaaaattctatattgaattgtgatatgtgaagggcgcaccatcttcatt

SEQ ID NO: 27040 - DNA, 765 bp, Zea Mays
ttcatacaagatgttgcagaatgccatgtacccaactcattattaatctactttttggacatgcatcttgagagcactattttttgtcctacatgaaatgtgttacacccagctccattcagtccatcattgggctgacagtagtggtttgatcgcacatgttcagttctagagttgtagtcatcttttctagcctttagatgttttgatccagtgaagtcttagatactattccatgttttacaactaacaaatcaatatattttgtcaatgtgtcttgaaagcactagcctttctatcctgtgtagaatattttacacccagctcagtttgcttcattgttaggcttgcagtagtgggttgatcccacatgattagttctagatttatagtcttactagggttccatgtcgatcttaggaaaccatcaatagcaactggttcaacctttttaagtgtatctgtttgcaacaaatagtgttatattatgcaatagtgaggtcagatactgctcctgacccacggataatcatatccgtagcatgaggtgcatggttgcattttttctgcatttcaatttcattttgcttttgtgaattgtgaaaactgttactactttagggtattgatgatgttgattatgcacaccaagtttagaactatagacaaaacactagtacctccatccacaagtataatggattctagtggacaaaggtgatatgttcactgaggaacaaaatgagctcgtagaatcagctgcag

SEQ ID NO: 27041 - DNA, 1015 bp, Zea Mays
accgctgtttcctatcctttttcattcccacccgcccatcccttcaaaattcgctgcgtgtccctctctctccctgcgctcgtgctccgcccaggcccctttcctccaccgcgggcgcaaaccctaaccctacagccgctcgccccgcggcgcctgccaatggcgcgccccgtgtgagtgtgtgtgagaggcagagacctagaggccgctacccggggaggagagggagggagagggagaggctgatagatgtataagcaggggggagcgggggtaggggctggtctggaccggaaacggatcagcgacgcgctagacaagcaccttgagaaggcggtcgcatcgccgtccacatcgagggggtcagcgggcggcggcggtgtgcgcgaccaccaccgcctcgtcgtgccgtcctccgtgtcgtccatccccaagggccgctgctccgaagtaggatgcacgtgcggaaggagattggtttggcgattggggctgcgaagtgttgatgcacctgcacagcacatggttgttgatactcaattttgggtggcctttgctgagatttttgtccttaacatgcgggaatggaacttgtagcttgctgacactgtattgatccggaatgagattcaagcgcgtttgcgtgcttttcgagggctctttactggtggccgtgataagtctcagtctcagaggcttggtttgtatcagcccagatgtttttctgtttacgatgctgtgtttgtgtttagagtgatactgatgtaatggaaataaggaactgtgtgtaatactagaatatgctttcgaagttgacatatggtgtcatgtgatgtagaatattctacctcattcctgttattacaacacagatcttgtcagttacaaaagtactgctcgcagtttgctgttgcctttttcttcctgttaacaatttgagtttatgatagagtttatgatagattctgtataaagttcgatttgcatcgtaatccttaagcatgcgtgcattgac

SEQ ID NO: 27042 - DNA, 1012 bp, Zea Mays
accgctgtttcctatcctttttcattcccacccgcccatcccttcaaaattcgctgcgtgtccctctctctccctgcgctcgtgctccgcccaggcccctttcctccaccgcgggcgcaaaccctaaccctacagccgctcgccccgcggcgcctgccaatggcgcgccccgtgtgagtgtgtgtgagaggcagagacctagaggccgctacccggggaggagagggagggagagggagaggctgatagatgtataagcaggggggagcgggggtaggggctggtctggaccggaaacggatcagcgacgcgctagacaagcaccttgagaaggcggtcgcatcgccgtccacatcgagggggtcagcgggcggcggcggtgtgcgcgaccaccaccgcctcgtcgtgccgtcctccgtgtcgtccatccccaagggccgctgctccgaaggatgcacgtgcggaaggagattggtttggcgattggggctgcgaagtgttgatgcacctgcacagcacatggttgttgatactcaattttgggtggcctttgctgagatttttgtccttaacatgcgggaatggaacttgtagcttgctgacactgtattgatccggaatgagattcaagcgcgtttgcgtgcttttcgagggctctttactggtggccgtgataagtctcagtctcagaggcttggtttgtatcagcccagatgtttttctgtttacgatgctgtgtttgtgtttagagtgatactgatgtaatggaaataaggaactgtgtgtaatactagaatatgctttcgaagttgacatatggtgtcatgtgatgtagaatattctacctcattcctgttattacaacacagatcttgtcagttacaaaagtactgctcgcagtttgctgttgcctttttcttcctgttaacaatttgagtttatgatagagtttatgatagattctgtataaagttcgatttgcatcgtaatccttaagcatgcgtgcattgac

SEQ ID NO: 27043 - DNA, 1429 bp, Zea Mays
atgatcctatcagattgcaagggtaatagtatgtatgctgaaataccagcaaatcttgccgaagaaaagggagcactcatcgaaacaaatcagatctacgacattagtcgttttagagttactgcagcaaaaacagcctacaaacccattgatggtgacaagatgatacaatttacgatttacacaattatcaagcctggaagtaacccaccacctacatttcctttatatatctatcaattaactccatttgatgagattgaatctcaaattcagcacaagaccaaattcctagatgttcttggaactataaccgaggtaactgctttgaagacagtacacatagaaggacagctcagccccactattattagagacgtaatgatagaagatctaaggtgtttacttaagtggtggtgcggcttgccattggtatttcaatcccgcaatacctgaagctgaagcgtaccaaaatagacatggtggtgaaacaattcagctgcaccttcctacacaaccggaacatgcactacaaaccttccaacctccaacaatagaacataaaactctggagcaactcctgacaatgaacccatatgattacccagacacgggatatgaatgcacagtgacagtcactgaaatagatacatcaaacacatggtggtatccatcatgcacaaaatgcggccgaaaaacaactccacataatacaacatattattgtgatttgtgtaaatgggatggctacaaattcaaatacaagctcaaatttcgagcatcagatgcaacagccatagcacaaatgttttgctttgataacatagcacgatatattgttggcaaatcttgcgaagttatcttacgatctacaaatgcatcgacaccaattcctccagatttagctcagattgtttcactgaaatttacctttagagtaataccagatgacagttctttcgataaccaagaccaggtccccattgcccttcgcatcatctctataactgcagcgcatggtagacaacatgcactaccattgaagccaaccaatatcatagaaggtacatcaacaccacagaacaagttacaactgcagttaatcgagaactcaccatcaaatccttttcaaaatttatccacaagtactccaccacccaaacaggctgcaaggaagctaatatatccaccgctcagtaaccccctcacgtatcaacatactcccaagtctgatggcgaagaagaaattacagagcaaacaatggacaccagtcaaatcaaaggaaaaaagtatgccctcattcgaatctcctccaaaaagttacaaattaatagcattaccatacgtaatagcatgccatatttaagtgaaccattattccaagtatccacaggttcatattacataactgctttcaacgtttactaa

SEQ ID NO: 27044 - DNA, 1239 bp, Zea Mays
ctctgcttggcttccatggtgaaagccttgaccaccaaccgggactgtgctgatggcttgactgaaggtgtcgtgatgaagattctgagcacctcccttcaaacttttgtcacgctgtcttcccgccaacctattctccgaggacacggtagctttgataccaattgtgaggaaccctggatctagggttttgccatcccagaattgcttccagtgatagggtcgtgacaggcagccccgcaacgtcttggagcacaagacattgaagcttctaaagtattggacctggcaatttgttattgtcaggacagtatgttccattctgattattgcacttcaggttcttgggctgtaccccagctaggtgagctggacgtttagtattatactgaacttctcagtctacatggccttatatgccttggttcttttctaccacttgtttgctaaagagttggcacctcacaagcctcttgcaaagtttttgtgcatcaaagggatcgtattcttctgtttctggcagaacacgcccacgtactgcactgcactgcacattttcgttccagggtttcgcgctcggtatcttagctggagcaggcgtgatcaaatcccaccatttctggcgggacgtggagcacatccaggaggccatccagaacgtgctggtgatcctcgagatggtcgtgtttttcgtcgtcccctctacgggcttgttcggttctaccccaatccatatggattgagggggtttcaatccctgcggcgctgacagggccaaattcgagaagaagaacgaatgaaccaggtttccggaaggaattggggggggggggggggggggggaaccccgtgctgcttctctctgctctctggtctgccggccggaaatggagcaccagtattttcctcacggatggacatacacaggtcccttagcaagggactggtcgtcttgtacgtacgctattctcagctggggactggccgaggccgactgcgggatccttttgcgaataaatctacagtcctgttctacagtggccgcactggactgattgattccgatgaggttgcctgcaactaccactaccactgctaggggatgatcttgcaatctgcaactaccgctcgttgtttattggcggtatagtgtatagctacgtggttttgaggtctctgaggctgatttccagagttcatcacaagtggcaggagtacatgactgatgggagtttttct

SEQ ID NO: 27045 - DNA, 762 bp, Zea Mays
gggggggggggtgcttcatcattccttccatgtttctgttttcctgaacacgcccacgtactgcactgcactgcacattttcgttccagggtttcgcgctcggtatcttagctggagcaggcgtgatcaaatcccaccatttctggcgggacgtggagcacatccaggaggccatccagaacgtgctggtgatcctcgagatggtcgtgtttttcgtcgtcccctctacgggcttgttcggttctaccccaatccatatggattgagggggtttcaatccctgcggcgctgacagggccaaattcgagaagaagaacgaatgaaccaggtttccggaaggaattggggggggggggggggggggggaaccccgtgctgcttctctctgctctctggtctgccggccggaaatggagcaccagtattttcctcacggatggacatacacaggtcccttagcaagggactggtcgtcttgtacgtacgctattctcagctggggactggccgaggccgactgcgggatccttttgcgaataaatctacagtcctgttctacagtggccgcactggactgattgattccgatgaggttgcctgcaactaccactaccactgctaggggatgatcttgcaatctgcaactaccgctcgttgtttattggcggtatagtgtatagctacgtggttttgaggtctctgaggctgatttccagagttcatcacaagtggcaggagtacatgactgatgggagtttttct

SEQ ID NO: 27046 - DNA, 1564 bp, Zea Mays
tccttgactttgccaagtgaccacgtggactggcggagggaaccgagcgagtggcccagacgtcgcgactcgcgaggccgaggcgcggcggcagcgacgactccaacaaccacgcgcggaggctgcagtgctccagccaagtgatagggtcgtgacaggcagccccgcaacgtcttggagcacaagacattgaagcttctaaagtattggacctggcaatttgttattgtcaggacagtatgttccattctgattattgcacttcaggttcttgggctgtaccccagctaggtgagctggacgtttagtattatactgaacttctcagtctacatggccttatatgccttggttcttttctaccacttgtttgctaaagagttggcacctcacaagcctcttgcaaagtttttgtgcatcaaagggatcgtattcttctgtttctggcaggtatatcatctaaagtgtttctgaaagctttatataaagtttgcacgggtgattgtcttgattgcttatagacaactctctggatggattaatgtgtacttattagatagtatctgcttgccatgacttaagatgaagcttcatttctctttaatattttgatttagttagattttatgtatgagtatgactgtatgaccacctcatgttcacttccgtgccataatttctgttttataaaccccacttacagttttacttgatgtaatcacatcatatgtaaatttgagataataatttctttataaaacagtgttacaagtacgtgttgctttatgggtgatagagatagcaagaggtgcagaaagaggtgtagtggaaatgaaagctacagttataaagaaaaaacaaaacaagctagacaacttgagaacacgcccacgtactgcactgcactgcacattttcgttccagggtttcgcgctcggtatcttagctggagcaggcgtgatcaaatcccaccatttctggcgggacgtggagcacatccaggaggccatccagaacgtgctggtgatcctcgagatggtcgtgtttttcgtcgtcccctctacgggcttgttcggttctaccccaatccatatggattgagggggtttcaatccctgcggcgctgacagggccaaattcgagaagaagaacgaatgaaccaggtttccggaaggaattggggggggggggggggggggggaaccccgtgctgcttctctctgctctctggtctgccggccggaaatggagcaccagtattttcctcacggatggacatacacaggtcccttagcaagctggggactggccgaggccgactgcgggatccttttgcgaataaatctacagtcctgttctacagtggccgcactggactgattgattccgatgaggttgcctgcaactaccactaccactgctaggggatgatcttgcaatctgcaactaccgctcgttgtttattggcggtatagtgtatagctacgtggttttgaggtctctgaggctgatttccagagttcatcacaagtggcaggagtacatgactgatgggagtttttct

SEQ ID NO: 27047 - DNA, 1302 bp, Zea Mays
tccttgactttgccaagtgaccacgtggactggcggagggaaccgagcgagtggcccagacgtcgcgactcgcgaggccgaggcgcggcggcagcgacgactccaacaaccacgcgcggaggctgcagtgctccagccaagtgttacaagtacgtgttgctttatgggtgatagagatagcaagaggtgcagaaagaggtgtagtggaaatgaaagctacagttataaagaaaaaacaaaacaagctagacaacttgaggtatctcattcattttggaggcaaatttaatttgtagtttgatcctgctggaggacattcactttgtattagtctgccagtgcacttacattaggcaacatttgaatttggaaggaacctcatcccttgtggaaatggaaagagctatttgccttttttgactgaaataccactacttgcctacttggctctacattctttcgccctgacagaaacagaacacgcccacgtactgcactgcactgcacattttcgttccagggtttcgcgctcggtatcttagctggagcaggcgtgatcaaatcccaccatttctggcgggacgtggagcacatccaggaggccatccagaacgtgctggtgatcctcgagatggtcgtgtttttcgtcgtcccctctacgggcttgttcggttctaccccaatccatatggattgagggggtttcaatccctgcggcgctgacagggccaaattcgagaagaagaacgaatgaaccaggtttccggaaggaattggggggggggggggggggggggaaccccgtgctgcttctctctgctctctggtctgccggccggaaatggagcaccagtattttcctcacggatggacatacacaggtcccttagcaaggtatcgtgctgctgtaaaatcacactgtgggcttgcacgctgaatggttttttgctagttttgtcgttttgaacgttgtcgatgaggactgaggaggctatgttgccagggactggtcgtcttgtacgtacgctattctcagctggggactggccgaggccgactgcgggatccttttgcgaataaatctacagtcctgttctacagtggccgcactggactgattgattccgatgaggttgcctgcaactaccactaccactgctaggggatgatcttgcaatctgcaactaccgctcgttgtttattggcggtatagtgtatagctacgtggttttgaggtctctgaggctgatttccagagttcatcacaagtggcaggagtacatgactgatgggagtttttct

SEQ ID NO: 27048 - DNA, 5671 bp, Zea Mays
agtccttgactttgccaagtgaccacgtggactggcggagggaaccgagcgagtggcccagacgtcgcgactcgcgaggccgaggcgcggcggcagcgacgactccaacaaccacgcgcggaggctgcagtgctccagccaagtagcttttggtgtgctgaatccaacaccagctcctcctccctttgttatgtatcctgagatctccatggagggaacgcaagctcaggacacagttattacagtcacacaatatactgtacctattctatagtgaagctctgaatttcatttctttttaaatatttatacttcggctgtttgtattattgtagctaccatgaaaacagttgcttaatgcatctctagatcatttctattagttcaaaaatcaattatacaggcttttggttctgtggttggtcttcattagaaaaatctagttacagaagaatggtcactggattaatctaaattttgaacccaaaacctggctctaactaaataaaaatcgtgcttgcaaaacatttgattgacaacctgttcagtggagtgcagttaagctgagctcaaggtcacatatgtatgccctcttaaaagtgcacttctgacatttgtgagaaaaaaagaaatagatacaaaaatctgtagattttttttggcaatatgtgctacactgcttgttccaaaaaagacaaataacttgtttcatatttgtgggggcaaatcaaattatttctcctgtctttcgtgtaactcgcgtatggtctagtttttccacaaaaattatctgtgttgacatacttgttcatggtctacatgtgtttatttgttttttagaaattttggaagttcacaaagtgcatgtttcaaatatttgtgccgcattgtgttgtattaatgtcctcgactcctctgttaataagggttatgtttgacttgtcattagcataaatgtatccttcgataaaaaaacctaatctatagttttcaggcaccatgttactcatgtctccattcccggggatggatctaagtaaaatggatcccgcgactctgaccctccttggggcagctggttgtgtaatgctgactatgcatttcactgtgcaactggtgtcacaacatctcttctattggaaaaacccctaggagcagaaagctagacttattattgtgctaatggctccactatatgctatctcttcctttgtgggtcttcttgatatccagggtagcaagacattttttacattcttggatgctgttaaggaatgctatgaagcactggtgattgctaagtttatggcattgatgtacagctacttgaatatatccatcagcaagaacatagtccctgatgaaatcaaagggggaaagggggggggggtgcttcatcattccttccatgtttctgttttcctggtacctttcttatgccttggtagataaaacttttttcctaattttttataattgctgcttaagttttgtaatgtggcctgtctatggtgagttatgttataggttcatacctgggatatctataagaaagcttacttatttgaaggagacaatcatttttttttccagtggtccgttagtcaaataatcatttgtgtagcttttttgtagaatgattgaactatatacttagtggtgactggtgaataagattacaccagttttaccttttatttcagatccagtttctttaattatattttttccaaagcttccggtgttgtgtttgaacttcagtttctttaattatagtttttgaaaccagactagagggcggggtgggctcgactgctcgagcccctctaccaccgttgatcccttagagcccccccctccccacccccaaccccccaaaaaaagcaatttccaccattgctgtgaagagtaggagggggcgaggggctcaagtcgacaaactgctgtctggagatggaagatgacctcacgacttgggccagtgagttaatatgggattatttccttcgttcccacctgaactggagaatagaatcatatacccaatatccaatactctcatgggaaaagtaaaagtatgccctccagtccaccacttcacttccttcaccctctggttgctcatcatgatatcaccactagccacctttatccttactgggtcacactcttctacctccaaccttaacttcaccatctgcttgctaataaaactggtagaacttccagaatccaccaacatcaacatctgatgttgaaccaatgccctgagtctgatacactgtaaatcatcagtcccactaatagcattaagagataactaaagatcatcttcttgtttctcctcttgctctatctgctccaaaacctcaggagtcaggagtcaagatatgtaactggactgtcttccccttttggcatttcacctgatgaccaggatcatacttctccacagataaaacacagaccatttgctcttatatattccttcaattgtctctccttactccatactcccaatctcccatatctactcctttcccttctgctctatttcctccccctaatcgacccacactgggttgctttataaacttcattcctcttttgtcgatgatatgctgctgaacttgaggcaataactgtgccctgtcgacagtagcagggagctgagacataactgcatactgaatttcactcttcagtcctctgacaaactgagtgacatagaatgtctcatccatcacagggttgtgaacagctatggcatatctcacttcttcaaactccttcacatattcttctactcaccctttctgccttatactcatcaacttcctcatagctcttgggtattcctcggctccaaatttgtttagcacaagcctagacaaatttctccaatctcccaacccttgcttcaacctgaccacctgcaaccaacgtgctacagtgccttcaaaattcagggacgccacagtggacttcatgaagtcagggactcgatagaggttgaagtagtcttcacattgaatgatccaaatagttgggtctgttcctccaaactttgggaaaggcatcttcgatatatgttgctgcaattgttccccatctctctcttgtcgcctagaactctcccctcttcctccctgagtcctacatcctctattctggggaattcttttgttaccacctccttctacatcttcataattatccatagagcgatccatatctctagccatggcttccaaccgaagaagagaaacagccttaccggtctcctccacttgtttgcgaagcagcgtcctctcttccatggcatccaccttccccatcaacttctcgatggccagcatcatcttctcccaacacgcttcactctgcttggcttccatggtgaaagccttgaccaccaaccgggactgtgctgatggcttgactgaaggtgtcgtgatgaagattctgagcacctcccttcaaacttttgtcacgctgtcttcccgccaacctattctccgaggacacggtagctttgataccaattgtgaggaaccctggatctagggttttgccatcccagaattgcttccaggtatggtttcccctttctctagggttcatccgacgtgaggtttcccccttggccggttctagccagaatccggacacacacacgtatgtggtggtagtttgatttctgttatttcatttcatgccttcctcattacaatctctcagatttatagaacccctaagcggctttgcccgttaatcgggtattacagctagattacaacggattacaactgtattactctaatcctccatgtactcttctgaaccttcttgccttcttgtgttgccttggctggatctatgcaccagtgatagggtcgtgacaggcagccccgcaacgtcttggagcacaagacattgaagcttctaaagtattggacctggcaatttgttattgtcaggacagtatgttccattctgattattgcacttcaggttcttgggctgtaccccagctaggtgagctggacgtttagtattatactgaacttctcagtctacatggccttatatgccttggttcttttctaccacttgtttgctaaagagttggcacctcacaagcctcttgcaaagtttttgtgcatcaaagggatcgtattcttctgtttctggcaggtatatcatctaaagtgtttctgaaagctttatataaagtttgcacgggtgattgtcttgattgcttatagacaactctctggatggattaatgtgtacttattagatagtatctgcttgccatgacttaagatgaagcttcatttctctttaatattttgatttagttagattttatgtatgagtatgactgtatgaccacctcatgttcacttccgtgccataatttctgttttataaaccccacttacagttttacttgatgtaatcacatcatatgtaaatttgagataataatttctttataaaacagtgttacaagtacgtgttgctttatgggtgatagagatagcaagaggtgcagaaagaggtgtagtggaaatgaaagctacagttataaagaaaaaacaaaacaagctagacaacttgaggtatctcattcattttggaggcaaatttaatttgtagtttgatcctgctggaggacattcactttgtattagtctgccagtgcacttacattaggcaacatttgaatttggaaggaacctcatcccttgtggaaatggaaagagctatttgccttttttgactgaaataccactacttgcctacttggctctacattctttcgccctgacagaaacagaacacgcccacgtactgcactgcactgcacattttcgttccagggtttcgcgctcggtatcttagctggagcaggcgtgatcaaatcccaccatttctggcgggacgtggagcacatccaggaggccatccagaacgtgctggtgatcctcgagatggtcgtgtttttcgtcgtcccctctacgggcttgttcggttctaccccaatccatatggattgagggggtttcaatccctgcggcgctgacagggccaaattcgagaagaagaacgaatgaaccaggtttccggaaggaattggggggggggggggggggggggaaccccgtgctgcttctctctgctctctggtctgccggccggaaatggagcaccagtattttcctcacggatggacatacacaggtcccttagcaaggtatcgtgctgctgtaaaatcacactgtgggcttgcacgctgaatggttttttgctagttttgtcgttttgaacgttgtcgatgaggactgaggaggctatgttgccagggactggtcgtcttgtacgtacgctattctcagctggggactggccgaggccgactgcgggatccttttgcgaataaatctacagtcctgttctacagtggccgcactggactgattgattccgatgaggttgcctgcaactaccactaccactgctaggggatgatcttgcaatctgcaactaccgctcgttgtttattggcggtatagtgtatagctacgtggttttgaggtctctgaggctgatttccagagttcatcacaagtggcaggagtacatgactgatgggagtttttct

SEQ ID NO: 27049 - DNA, 1126 bp, Zea Mays
tagtccttgactttgccaagtgaccacgtggactggcggagggaaccgagcgagtggcccagacgtcgcgactcgcgaggccgaggcgcggcggcagcgacgactccaacaaccacgcgcggaggctgcagtgctccagccaagtgatagggtcgtgacaggcagccccgcaacgtcttggagcacaagacattgaagcttctaaagtattggacctggcaatttgttattgtcaggacagtatgttccattctgattattgcacttcaggttcttgggctgtaccccagctaggtgagctggacgtttagtattatactgaacttctcagtctacatggccttatatgccttggttcttttctaccacttgtttgctaaagagttggcacctcacaagcctcttgcaaagtttttgtgcatcaaagggatcgtattcttctgtttctggcagggtttcgcgctcggtatcttagctggagcaggcgtgatcaaatcccaccatttctggcgggacgtggagcacatccaggaggccatccagaacgtgctggtgatcctcgagatggtcgtgtttttcgtcgtcccctctacgggcttgttcggttctaccccaatccatatggattgagggggtttcaatccctgcggcgctgacagggccaaattcgagaagaagaacgaatgaaccaggtttccggaaggaattggggggggggggggggggggggaaccccgtgctgcttctctctgctctctggtctgccggccggaaatggagcaccagtattttcctcacggatggacatacacaggtcccttagcaagggactggtcgtcttgtacgtacgctattctcagctggggactggccgaggccgactgcgggatccttttgcgaataaatctacagtcctgttctacagtggccgcactggactgattgattccgatgaggttgcctgcaactaccactaccactgctaggggatgatcttgcaatctgcaactaccgctcgttgtttattggcggtatagtgtatagctacgtggttttgaggtctctgaggctgatttccagagttcatcacaagtggcaggagtacatgactgatgggagtttttct

SEQ ID NO: 27050 - DNA, 1845 bp, Zea Mays
gccagatcgtcactgcaaatctgcaattagtccttgactttgccaagtgaccacgtggactggcggagggaaccgagcgagtggcccagacgtcgcgactcgcgaggccgaggcgcggcggcagcgacgactccaacaaccacgcgcggaggctgcagtgctccagccaagtgatagggtcgtgacaggcagccccgcaacgtcttggagcacaagacattgaagcttctaaagtattggacctggcaatttgttattgtcaggacagtatgttccattctgattattgcacttcaggttcttgggctgtaccccagctaggtgagctggacgtttagtattatactgaacttctcagtctacatggccttatatgccttggttcttttctaccacttgtttgctaaagagttggcacctcacaagcctcttgcaaagtttttgtgcatcaaagggatcgtattcttctgtttctggcaggtatatcatctaaagtgtttctgaaagctttatataaagtttgcacgggtgattgtcttgattgcttatagacaactctctggatggattaatgtgtacttattagatagtatctgcttgccatgacttaagatgaagcttcatttctctttaatattttgatttagttagattttatgtatgagtatgactgtatgaccacctcatgttcacttccgtgccataatttctgttttataaaccccacttacagttttacttgatgtaatcacatcatatgtaaatttgagataataatttctttataaaacagtgttacaagtacgtgttgctttatgggtgatagagatagcaagaggtgcagaaagaggtgtagtggaaatgaaagctacagttataaagaaaaaacaaaacaagctagacaacttgaggtatctcattcattttggaggcaaatttaatttgtagtttgatcctgctggaggacattcactttgtattagtctgccagtgcacttacattaggcaacatttgaatttggaaggaacctcatcccttgtggaaatggaaagagctatttgccttttttgactgaaataccactacttgcctacttggctctacattctttcgccctgacagaaacagaacacgcccacgtactgcactgcactgcacattttcgttccagggtttcgcgctcggtatcttagctggagcaggcgtgatcaaatcccaccatttctggcgggacgtggagcacatccaggaggccatccagaacgtgctggtgatcctcgagatggtcgtgtttttcgtcgtcccctctacgggcttgttcggttctaccccaatccatatggattgagggggtttcaatccctgcggcgctgacagggccaaattcgagaagaagaacgaatgaaccaggtttccggaaggaattggggggggggggggggggggggaaccccgtgctgcttctctctgctctctggtctgccggccggaaatggagcaccagtattttcctcacggatggacatacacaggtcccttagcaagggactggtcgtcttgtacgtacgctattctcagctggggactggccgaggccgactgcgggatccttttgcgaataaatctacagtcctgttctacagtggccgcactggactgattgattccgatgaggttgcctgcaactaccactaccactgctaggggatgatcttgcaatctgcaactaccgctcgttgtttattggcggtatagtgtatagctacgtggttttgaggtctctgaggctgatttccagagttcatcacaagtggcaggagtacatgactgatgggagtttttct

SEQ ID NO: 27051 - DNA, 1207 bp, Zea Mays
ctccacctgcagccagatcgtcactgcaaatctgcaattagtccttgactttgccaagtgaccacgtggactggcggagggaaccgagcgagtggcccagacgtcgcgactcgcgaggccgaggcgcggcggcagcgacgactccaacaaccacgcgcggaggctgcagtgctccagccaagtgatagggtcgtgacaggcagccccgcaacgtcttggagcacaagacattgaagcttctaaagtattggacctggcaatttgttattgtcaggacagtatgttccattctgattattgcacttcaggttcttgggctgtaccccagctaggtgagctggacgtttagtattatactgaacttctcagtctacatggccttatatgccttggttcttttctaccacttgtttgctaaagagttggcacctcacaagcctcttgcaaagtttttgtgcatcaaagggatcgtattcttctgtttctggcagaacacgcccacgtactgcactgcactgcacattttcgttccagggtttcgcgctcggtatcttagctggagcaggcgtgatcaaatcccaccatttctggcgggacgtggagcacatccaggaggccatccagaacgtgctggtgatcctcgagatggtcgtgtttttcgtcgtcccctctacgggcttgttcggttctaccccaatccatatggattgagggggtttcaatccctgcggcgctgacagggccaaattcgagaagaagaacgaatgaaccaggtttccggaaggaattggggggggggggggggggggggaaccccgtgctgcttctctctgctctctggtctgccggccggaaatggagcaccagtattttcctcacggatggacatacacaggtcccttagcaagggactggtcgtcttgtacgtacgctattctcagctggggactggccgaggccgactgcgggatccttttgcgaataaatctacagtcctgttctacagtggccgcactggactgattgattccgatgaggttgcctgcaactaccactaccactgctaggggatgatcttgcaatctgcaactaccgctcgttgtttattggcggtatagtgtatagctacgtggttttgaggtctctgaggctgatttccagagttcatcacaagtggcaggagtacatgactgatgggagtttttct

SEQ ID NO: 27052 - DNA, 1685 bp, Zea Mays
ctgagggttcacctccacctgcagccagatcgtcactgcaaatctgcaattagtccttgactttgccaagtgaccacgtggactggcggagggaaccgagcgagtggcccagacgtcgcgactcgcgaggccgaggcgcggcggcagcgacgactccaacaaccacgcgcggaggctgcagtgctccagccaagtgatagggtcgtgacaggcagccccgcaacgtcttggagcacaagacattgaagcttctaaagtattggacctggcaatttgttattgtcaggacagtatgttccattctgattattgcacttcaggttcttgggctgtaccccagctaggtgagctggacgtttagtattatactgaacttctcagtctacatggccttatatgccttggttcttttctaccacttgtttgctaaagagttggcacctcacaagcctcttgcaaagtttttgtgcatcaaagggatcgtattcttctgtttctggcaggtatatcatctaaagtgtttctgaaagctttatataaagtttgcacgggtgattgtcttgattgcttatagacaactctctggatggattaatgtgtacttattagatagtatctgcttgccatgacttaagatgaagcttcatttctctttaatattttgatttagttagattttatgtatgagtatgactgtatgaccacctcatgttcacttccgtgccataatttctgttttataaaccccacttacagttttacttgatgtaatcacatcatatgtaaatttgagataataatttctttataaaacagtgttacaagtacgtgttgctttatgggtgatagagatagcaagaggtgcagaaagaggtgtagtggaaatgaaagctacagttataaagaaaaaacaaaacaagctagacaacttgagggtttcgcgctcggtatcttagctggagcaggcgtgatcaaatcccaccatttctggcgggacgtggagcacatccaggaggccatccagaacgtgctggtgatcctcgagatggtcgtgtttttcgtcgtcccctctacgggcttgttcggttctaccccaatccatatggattgagggggtttcaatccctggtaagtcaaaatcccctccaatccgtatcaatcccctcaaatccatatggattgaaaataaccgaacaagccctacagcggcgctgacagggccaaattcgagaagaagaacgaatgaaccaggtttccggaaggaattggggggggggggggggggggggaaccccgtgctgcttctctctgctctctggtctgccggccggaaatggagcaccagtattttcctcacggatggacatacacaggtcccttagcaagggactggtcgtcttgtacgtacgctattctcagctggggactggccgaggccgactgcgggatccttttgcgaataaatctacagtcctgttctacagtggccgcactggactgattgattccgatgaggttgcctgcaactaccactaccactgctaggggatgatcttgcaatctgcaactaccgctcgttgtttattggcggtatagtgtatagctacgtggttttgaggtctctgaggctgatttccagagttcatcacaagtggcaggagtacatgactgatgggagtttttct

SEQ ID NO: 27053 - DNA, 877 bp, Zea Mays
gacagttaatctgagggttcacctccacctgcagccagatcgtcactgcaaatctgcaattagtccttgactttgccaagtgaccacgtggactggcggagggaaccgagcgagtggcccagacgtcgcgactcgcgaggccgaggcgcggcggcagcgacgactccaacaaccacgcgcggaggctgcagtgctccagccaagggtttcgcgctcggtatcttagctggagcaggcgtgatcaaatcccaccatttctggcgggacgtggagcacatccaggaggccatccagaacgtgctggtgatcctcgagatggtcgtgtttttcgtcgtcccctctacgggcttgttcggttctaccccaatccatatggattgagggggtttcaatccctgcggcgctgacagggccaaattcgagaagaagaacgaatgaaccaggtttccggaaggaattggggggggggggggggggggggaaccccgtgctgcttctctctgctctctggtctgccggccggaaatggagcaccagtattttcctcacggatggacatacacaggtcccttagcaagggactggtcgtcttgtacgtacgctattctcagctggggactggccgaggccgactgcgggatccttttgcgaataaatctacagtcctgttctacagtggccgcactggactgattgattccgatgaggttgcctgcaactaccactaccactgctaggggatgatcttgcaatctgcaactaccgctcgttgtttattggcggtatagtgtatagctacgtggttttgaggtctctgaggctgatttccagagttcatcacaagtggcaggagtacatgactgatgggagtttttct

SEQ ID NO: 27054 - DNA, 2714 bp, Zea Mays
ctttctggtctggatgccatgctcctgctcgccctgaggtttctcgccggggtattgatccaaagcgggtgcgactgcgaccctagtcggcagccgccgtgctctcgcgacttgcggtcacgagattcggttcatagggcggcttgttgattgacgtagaggcacatgactggaaccgtgagctttgagttgtcaagtagtaacaacctaccttttgccatcggcttctggtttgctttactttgcagagttaatgcatttgacaaaacagttccaggaatcgctgtggcaacacgactgaatgcaatagcatgctaagacccctatttatgtttatgtgttgtctgatgtaggattgcagctaggattcgtgtatcatgtagccctggttcccaatccttgcttgattttgaaaatattatgtgaatttctacttgtaacatctctttctacttgttgagaagtccaaggttaaattctgatgcgctttttactagaaaagaaacgaaaacttaggtctgcaaatttgttaaattatttcatatgtgtctagtgctcaggccactgtgtcggcgcagaaatcctgcttgcttgattatcttcccatcgagcagtggctgtatgtcctacttactcgagtggctttggataattaattttgccaatttgctgcacaaattataggtgttcaaaagtcaaaacacagtctgttttgtttttatattcttgtacatgtacaggggtgaagtgtcccattccatataccctgagacgaagctgaggtgtgggtcagttaagagtggaatactcttagttgaatgactttggtgtcctgtcttgcacatatgtgaaaggctatgctgatattgtgatatgcggttcacaaaaagctatttagaaaatgtcctagctgagagtcctttcattctctgatgaatgagatccttgctctaaacagtagtttttaacttatagcaccctgcacataattggcaagttccttatttttcaaccaatgaaacagtgtgccttaattggctccattttagttaagtgtggattatgccaagtcattagttggtgatcaatagagacatggtgccatttgctctcttgaaaaaaaactgaatttcagttactgtaactgaacatgtaccctaataaaggagcataagatagtttccttcatcaagcctcctacagaagtattcaactgtttaggaaatagtcttcttaccacactctagttaagtaaataaactaggaggctagaaaaaactattttcaggattcagatttatatttaattacttgaaatgtatatagcacatatcatatggcactgcttttattcacagtcatgcccactgcacagtggttctttcccacagttgcttctttctcttgccaccctaatactctaccatcaatttgtccttgctccctcttgccttgcagtagcttttggtgtgctgaatccaacaccagctcctcctccctttgttatgtatcctgagatctccatggagggaacgcaagctcaggacacagttattacagtcacacaatatactgtacctattctatagtgaagctctgaatttcatttctttttaaatatttatacttcggctgtttgtattattgtagctaccatgaaaacagttgcttaatgcatctctagatcatttctattagttcaaaaatcaattatacaggcttttggttctgtggttggtcttcattagaaaaatctagttacagaagaatggtcactggattaatctaaattttgaacccaaaacctggctctaactaaataaaaatcgtgcttgcaaaacatttgattgacaacctgttcagtggagtgcagttaagctgagctcaaggtcacatatgtatgccctcttaaaagtgcacttctgacatttgtgagaaaaaaagaaatagatacaaaaatctgtagattttttttggcaatatgtgctacactgcttgttccaaaaaagacaaataacttgtttcatatttgtgggggcaaatcaaattatttctcctgtctttcgtgtaactcgcgtatggtctagtttttccacaaaaattatctgtgttgacatacttgttcatggtctacatgtgtttatttgttttttagaaattttggaagttcacaaagtgcatgtttcaaatatttgtgccgcattgtgttgtattaatgtcctcgactcctctgttaataagggttatgtttgacttgtcattagcataaatgtatccttcgataaaaaaacctaatctatagttttcaggcaccatgttactcatgtctccattcccggggatggatctaagtaaaatggatcccgcgactctgaccctccttggggcagctggttgtgtaatgctgactatgcatttcactgtgcaactggtgtcacaacatctcttctattggaaaaacccctaggagcagaaagctagacttattattgtgctaatggctccactatatgctatctcttcctttgtgggtcttcttgatatccagggtagcaagacattttttacattcttggatgctgttaaggaatgctatgaagcactggtgggtcaaccatatgattataagcctaaatgaatcttgctgtttcactaacacttcaatttccttacaattacgaaggtgattgctaagtttatggcattgatgtaca

SEQ ID NO: 27055 - DNA, 1338 bp, Zea Mays
tccttgactttgccaagtgaccacgtggactggcggagggaaccgagcgagtggcccagacgtcgcgactcgcgaggccgaggcgcggcggcagcgacgactccaacaaccacgcgcggaggctgcagtgctccagccaagatctccatggagggaacgcaagctcaggacacagttattacagtcacacaatatactgtacctattctatagtgaagctctgaatttcatttctttttaaatatttatacttcggctgtttgtattattgtagctaccatgaaaacagttgcttaatgcatctctagatcatttctattagttcaaaaatcaattatacaggcttttggttctgtggttggtcttcattagaaaaatctagttacagaagaatggtcactggattaatctaaattttgaacccaaaacctggctctaactaaataaaaatcgtgcttgcaaaacatttgattgacaacctgttcagtggagtgcagttaagctgagctcaaggtcacatatgtatgccctcttaaaagtgcacttctgacatttgtgagaaaaaaagaaatagatacaaaaatctgtagattttttttggcaatatgtgctacactgcttgttccaaaaaagacaaataacttgtttcatatttgtgggggcaaatcaaattatttctcctgtctttcgtgtaactcgcgtatggtctagtttttccacaaaaattatctgtgttgacatacttgttcatggtctacatgtgtttatttgttttttagaaattttggaagttcacaaagtgcatgtttcaaatatttgtgccgcattgtgttgtattaatgtcctcgactcctctgttaataagggttatgtttgacttgtcattagcataaatgtatccttcgataaaaaaacctaatctatagttttcaggcaccatgttactcatgtctccattcccggggatggatctaagtaaaatggatcccgcgactctgaccctccttggggcagctggttgtgtaatgctgactatgcatttcactgtgcaactggtgtcacaacatctcttctattggaaaaacccctaggagcagaaagctagacttattattgtgctaatggctccactatatgctatctcttcctttgtgggtcttcttgatatccagggtagcaagacattttttacattcttggatgctgttaaggaatgctatgaagcactggtgggtcaaccatatgattataagcctaaatgaatcttgctgtttcactaacacttcaatttccttacaattacgaaggtgattgctaagtttatggcattgatgtaca

SEQ ID NO: 27056 - DNA, 832 bp, Zea Mays
ataacattcaagcacatattggagttaattttgttttgctgcattacgaactaattttgggcctccatttcatttcacaaacaaaatgaagtaacttggtggtcactggcagttgatagtatacttgtttcaaatgtctacttcgatgtctttctgaagcagcaccttacaacggtggtccttgattcacatttttctgttgaagagcctggagagatgaaattcaagcaattggagtctttagtggaggcggaggctgaagtccgaaaagaaaagaagaaaaagaagagcagaccaactgaagaggacgaagaacaagttggagtggtcgaccatagtgataataatggtgaaatgtatgctagaaaagaaaaaaagaaaaaaaagaaaaagaagagtagaactattgaacgggacgaggagccagacaacgatggtgaaatgtgcagtcccaagagaagaaaatctgtagaaagaagcaaatgcctgaagaagagcaagaaacagcaggtcgcatagaacatagaacaagtaccatttatctcagtatttgcattcgcttgattttgcagaattacacaattttgtgctgtagttgttttgaacagtatattccttttgaaactatgcaagggaatttcgccgtccattctacgagatacttttttttatggctgcaactgcatatgcgtcactaggggcgtgttttatttgtggatatttctggtgaaagtatctggtccactagttgggttttgttgcgttttgctgattaataggagcactatattattgtgactaaattaaaatgtattttgcagaggtaaattaa

SEQ ID NO: 27057 - DNA, 2191 bp, Zea Mays
cgcccggcatggggcactccatgaatgaataaccggagtgtcgcttccggtggaactgccatggacgcccgcggagctgacgactctgttcgatctgttcaagggatgatgcttgtggaagagcttatgtactaaaattcaatccaccgtaagctatcaaaccaaaaaatgaaaatgctcgtttgcacgcttgcaaataagagccccttgcaccacagtcgacgatcaggaccgaacacggagaaaagccacactctgcgactgctcacgccaccacctttgtttgtttgaggaaattctaagcaccacctggccaggctgaaactctagcgcgactggctttttccacggcccggcccgtcaaatccatgtactgtactcgttgtcgcggagaacgcgcccctgccacctccgcgcgggcacggcacgtcgtagtaaaaccctagaaaaacagtagcccaccgcgccggcgagccgaagcgagcgcggagctaaggatgccgcggaccaccgtggtagagagctccggctgcccgccgctccgcgccctcaccaccgacatcctcggcctcgtcaaagtcgtcgaggcccacgcgaggccggcgggcgccgccaaggtcgtcgagacgtggggcgcgcctgacgcttcccgtgccatcgttgctgcctccctcgccgatcgtgccgccgaccccgtcttggctgtggcgaggaggaacggcgtggttgagctgctgaatcccttgaatggaagtgctctggctgctgtcaagaccgcggggtcagcgccaaatgacagtggcgctgaaggtgatcccctcgccgcactgcatcttttcgcaagacagacttcggactcgatcttaggcacatttcttgcctgcacggagaaggggaaagcttctatcaggtccatcacgaaagaaaatgcagattcgggttcggatgttgggccatcagccacatgggatgtgtgcaatggggccaatgtgcaattttgctcagtagatcatggcgaaagctatgtgatatttggagggcatagaagtgaacttgtgggatatcacatctagtagtaagacatggtctgctaaatctccccgagcaaatagtcttggcatattcactcgaccttggttcactgctggaaccttcttgtgcaagaatgatcatcgtaaaattgttgcctgcacaaataatcatcaggtccgcttatatgatactgcattgcaaagaagacctgccgtctctgttgattttagggagtcaccaatcaaggcagttgctgctgatccaaatgggcatgatgtctatattggcacaggaacaggggaccttgcttctttcgacatgagaacagggaaattgctgggatgctatattggcaaatgcagtggaagtattagatctattgttaggcatccagagctacctttgatagcatcttgcggactggatagctacttacgtatctgggacacaaacacaagacagttgctatctgctgtctttctgaagcagcaccttacaacggtggtccttgattcacatttttctgttgaagagcctggagagatgaaattcaagcaattggagtctttagtggaggcggaggctgaagtccgaaaagaaaagaagaaaaagaagagcagaccaactgaagaggacgaagaacaagttggagtggtcgaccatagtgataataatggtgaaatgtatgctagaaaagaaaaaaagaaaaaaaagaaaaagaagagtagaactattgaacgggacgaggagccagacaacgatggtgaaatgtgcagtcccaagagaagaaaatctgtagaaagaagcaaatgcctgaagaagagcaagaaacagcaggtcgcatagaacatagaacaagtaccatttatctcagtatttgcattcgcttgattttgcagaattacacaattttgtgctgtagttgttttgaacagtatattccttttgaaactatgcaagggaatttcgccgtccattctacgagatacttttttttatggctgcaactgcatatgcgtcactaggggcgtgttttatttgtggatatttctggtgaaagtatctggtccactagttgggttttgttgcgttttgctgattaataggagcactatattattgtgactaaattaaaatgtattttgcagaggtaaattaa

SEQ ID NO: 27058 - DNA, 2144 bp, Zea Mays
cgcccggcatggggcactccatgaatgaataaccggagtgtcgcttccggtggaactgccatggacgcccgcggagctgacgactctgttcgatctgttcaagggatgatgcttgtggaagagcttatgtactaaaattcaatccaccgtaagctatcaaaccaaaaaatgaaaatgctcgtttgcacgcttgcaaataagagccccttgcaccacagtcgacgatcaggaccgaacacggagaaaagccacactctgcgactgctcacgccaccacctttgtttgtttgaggaaattctaagcaccacctggccaggctgaaactctagcgcgactggctttttccacggcccggcccgtcaaatccatgtactgtactcgttgtcgcggagaacgcgcccctgccacctccgcgcgggcacggcacgtcgtagtaaaaccctagaaaaacagtagcccaccgcgccggcgagccgaagcgagcgcggagctaaggatgccgcggaccaccgtggtagagagctccggctgcccgccgctccgcgccctcaccaccgacatcctcggcctcgtcaaagtcgtcgaggcccacgcgaggccggcgggcgccgccaaggtcgtcgagacgtggggcgcgcctgacgcttcccgtgccatcgttgctgcctccctcgccgatcgtgccgccgaccccgtcttggctgtggcgaggaggaacggcgtggttgagctgctgaatcccttgaatggaagtgctctggctgctgtcaagaccgcggggtcagcgccaaatgacagtggcgctgaagcttaggcacatttcttgcctgcacggagaaggggaaagcttctatcaggtccatcacgaaagaaaatgcagattcgggttcggatgttgggccatcagccacatgggatgtgtgcaatggggccaatgtgcaattttgctcagtagatcatggcgaaagctatgtgatatttggagggaaaggcatagaagtgaacttgtgggatatcacatctagtagtaagacatggtctgctaaatctccccgagcaaatagtcttggcatattcactcgaccttggttcactgctggaaccttcttgtgcaagaatgatcatcgtaaaattgttgcctgcacaaataatcatcaggtccgcttatatgatactgcattgcaaagaagacctgccgtctctgttgattttagggagtcaccaatcaaggcagttgctgctgatccaaatgggcatgatgtctatattggcacaggaacaggggaccttgcttctttcgacatgagaacagggaaattgctgggatgctatattggcaaatgcagtggaagtattagatctattgttaggcatccagagctacctttgatagcatcttgcggactggatagctacttacgtatctgggacacaaacacaagacagttgctatctgctgtctttctgaagcagcaccttacaacggtggtccttgattcacatttttctgttgaagagcctggagagatgaaattcaagcaattggagtctttagtggaggcggaggctgaagtccgaaaagaaaagaagaaaaagaagagcagaccaactgaagaggacgaagaacaagttggagtggtcgaccatagtgataataatggtgaaatgtatgctagaaaagaaaaaaagaaaaaaaagaaaaagaagagtagaactattgaacgggacgaggagccagacaacgatggtgaaatgtgcagtcccaagagaagaaaatctgtagaaagaagcaaatgcctgaagaagagcaagaaacagcaggtcgcatagaacatagaacaagtaccatttatctcagtatttgcattcgcttgattttgcagaattacacaattttgtgctgtagttgttttgaacagtatattccttttgaaactatgcaagggaatttcgccgtccattctacgagatacttttttttatggctgcaactgcatatgcgtcactaggggcgtgttttatttgtggatatttctggtgaaagtatctggtccactagttgggttttgttgcgttttgctgattaataggagcactatattattgtgactaaattaaaatgtattttgcagaggtaaattaa

SEQ ID NO: 27059 - DNA, 667 bp, Zea Mays
aaagggatcctttcccacttccggagaaagagcggaaacctctcaccgaagttgaacagtttgtgttgcatgttgatgagagggcagtgcagagatcagaatttgatacattgataaaagagaaagaaaagacttacaaaaggttgagagaggagaacgaattcgcgcacaagatcgaggaagagaaggcattgaagcagctgaggagaaccatggtgccacatgctcggccgctccccaagtttgacaggccattccgaccacagaaatcgacgaagcaggtgacaaggccgaagtcgccacagcttcaggtggatgagcgaggggcgaggaggcacgctttgatcagatgatcaccgccgttgtttatctatcttgtactacactgattgtcatgcgcggtcaagatcatatctcaatcttgccgtcgatctgttgttggttactagattctttcttctgctgaccagtgaccatatgtagagcaggccaggccctaataacagcaatctttgtcagcacaacgcagctgacacggtgtatgcccttgccctgtgtgtgtttgtgtgccagtgtgtgtgtgtatgtttgtgtaagtgtaatatgattacctcgatggtgagacttcttaatccgatgatggcttgatatagagcttgtgttgacc

SEQ ID NO: 27060 - DNA, 2737 bp, Zea Mays
cccgaccgttggagaccccaacccctaaatgcagtaatgctcacccgcaacgttcttctcccaatcggttccacctgatgcatcccccgccgacttccttcttcttcatcatcgtctcttcatcgcttcaggaggccgccgcataattagagataggacttagagatataataacccccagctcctgatccccaagccctaggcgtaggattccacgtccatcgatggcgctggacacggggacggcggcgggtatcgacgaggcgtacgagttctccgcgcccaggttcttcgacttcgtcgtcgaggaaacggaggaggccgtacgtgccgccgagagctggttcgaggctgcccgcagccacgccccctcgccgttcaacccaaggatcaaggaatcgagggcggaggtcaagctcgcggtcctctgtgatttcgcgcaagccgaggagccggctccagaggtaaataaacagaaggagccagctgacgaaatgtcggggccgcctgcggctcaagaagagagagatgaatcgcccccgtctctggagttcctctcggcgacggacctttctgtaaaatcagcagatggtggttctaccagcacgcttaagatgcagacgcgttatcctgcccctcctaccaatgttgcccctgcgagttcgacatgtgacagctcttcagtgaatactgatgcgcgcacgccgaagatgcaggtaaacatgtgcagagcaggtcctacggctgcttcgacgaatgtcaagaggagcgtgatgatcaagggtggccgtgatttggtggggactggaaaggcagccactgctggcgctgaaattgctcaagagaaccaagcggtgaagaggcagaagctcgatgatgggagagccagacagatactcaatgtcaagactaaggtgctgcctcataaggcgagagctgatttagctggaagcgaaatgaggaggtcccatgaggatatgcgctctgcgaaggaagcagatccatatgtatcagctgcagaattggttaagaagtttgaatcagggaccagagagcttagcatcactcacagtagatgtcgttctcatgaggatgctgcatcacagcgaagcctgcgaaggcctaagcttatgttaactagacctaaggaacctgacttccagacttcccagagagttcgaacagtaaaagtgaagagctctgcagagatagaggaggaaatgttggcaaagatacccaagttcagggcacggccattcaacaaaacgattgctgaagccccttcgttccctccacttccaaggagaaccccacagatacctgaattcaatgaattccatcttaaaacaatggagagagcaagtcgatatgcggacacctgttcagaagtttcttgtgcagatactatccagagtcaaaataagacactgaaatcgagacaagcaaagccaccacaacttcatacagcaatgagagctcggccaccaagtgtgaaaagttttcaggaacttgaactggaggagctggagaaggcccccaagttcaaggccaagccattaaacaaaaggattcttgagagcaagggagacattggtgtatttttccatccaaagtctcaggtcacagctcccaaaaaattccatttttctaccgatgttcgcttgggccctccatcagttgctgacttatttgacaagctctctcttcactctgaatgttcttcaaacagcaacagacaagatgtgcccagacgcaccataccaaaccctttcaatctacaaacagaggaaagaggtcatttaaaagagaggcagctagaagcacatctcttacaaaagaagatggaggaggaaaaggccagggttcacaaagctaatccttacccatacaccacggactacccgacgatgccaccgaaacctgagccgaagccctgtacaaggccagaaggctttcaactagagagttcggtgagacatgaactagagcagcgaaggctgatggaagaaaaacagagaatggagagtgaagaggctcagaggagaatcttcaaagctcaacctgtaatgaaagaggatcctttcccacttccggagaaagagcggaaacctctcaccgaagttgaacagtttgtgttgcatgttgatgagagggcagtgcagagatcagaatttgatacattgataaaagagaaagaaaagacttacaaaaggttgagagaggagaacgaattcgcgcacaagatcgaggaagagaaggcattgaagcagctgaggagaaccatggtgccacatgctcggccgctccccaagtttgacaggccattccgaccacagaaatcgacgaagcaggtgacaaggccgaagtcgccacagcttcaggtggatgagcgaggggcgaggaggcacgctttgatcagatgatcaccgccgttgtttatctatcttgtactacactgattgtcatgcgcggtcaagatcatatctcaatcttgccgtcgatctgttgttggttactagattctttcttctgctgaccagtgaccatatgtagagcaggccaggccctaataacagcaatctttgtcagcacaacgcagctgacacggtgtatgcccttgccctgtgtgtgtttgtgtgccagtgtgtgtgtgtatgtttgtgtaagtgtaatatgattacctcgatggtgagacttcttaatccgatgatggcttgatatagagcttgtgttgacc

SEQ ID NO: 27061 - DNA, 2770 bp, Zea Mays
cccgaccgttggagaccccaacccctaaatgcagtaatgctcacccgcaacgttcttctcccaatcggttccacctgatgcatcccccgccgacttccttcttcttcatcatcgtctcttcatcgcttcaggaggccgccgcataattagagataggacttagagatataataacccccagctcctgatccccaagccctaggcgtaggattccacgtccatcgatggcgctggacacggggacggcggcgggtatcgacgaggcgtacgagttctccgcgcccaggttcttcgacttcgtcgtcgaggaaacggaggaggccgtacgtgccgccgagagctggttcgaggctgcccgcagccacgccccctcgccgttcaacccaaggatcaaggaatcgagggcggaggtcaagctcgcggtcctctgtgatttcgcgcaagccgaggagccggctccagaggtaaataaacagaaggagccagctgacgaaatgtcggggccgcctgcggctcaagaagagagagatgaatcgcccccgtctctggagttcctctcggcgacggacctttctgtaaaatcagcagatggtggttctaccagcacgcttaagatgcagacgcgttatcctgcccctcctaccaatgttgcccctgcgagttcgacatgtgacagctcttcagtgaatactgatgcgcgcacgccgaagatgcaggtaaacatgtgcagagcaggtcctacggctgcttcgacgaatgtcaagaggagcgtgatgatcaagggtggccgtgatttggtggggactggaaaggcagccactgctggcgctgaaattgctcaagagaaccaagcggtgaagaggcagaagctcgatgatgggagagccagacagatactcaatgtcaagactaaggtgctgcctcataaggcgagagctgatttagctggaagcgaaatgaggaggtcccatgaggatatgcgctctgcgaaggaagcagatccatatgtatcagctgcagaattggttaagaagtttgaatcagggaccagagagcttagcatcactcacagtagatgtcgttctcatgaggatgctgcatcacagcgaagcctgcgaaggcctaagcttatgttaactagacctaaggaacctgacttccagacttcccagagagttcgaacagtaaaagtgaagagctctgcagagatagaggaggaaatgttggcaaagatacccaagttcagggcacggccattcaacaaaacgattgctgaagccccttcgttccctccacttccaaggagaaccccacagatacctgaattcaatgaattccatcttaaaacaatggagagagcaagtcgatatgcggacacctgttcagaagtttcttgtgcagatactatccagagtcaaaataagacactgaaatcgagacaagcaaagccaccacaacttcatacagcaatgagagctcggccaccaagtgtgaaaagttttcaggaacttgaactggaggagctggagaaggcccccaagttcaaggccaagccattaaacaaaaggattcttgagagcaagggagacattggtgtatttttccatccaaagtctcaggtcacagctcccaaaaaattccatttttctaccgatgttcgcttgggccctccatcagttgctgacttatttgacaaggtatttaccaacagccatatggtatttggcaagctctctcttcactctgaatgttcttcaaacagcaacagacaagatgtgcccagacgcaccataccaaaccctttcaatctacaaacagaggaaagaggtcatttaaaagagaggcagctagaagcacatctcttacaaaagaagatggaggaggaaaaggccagggttcacaaagctaatccttacccatacaccacggactacccgacgatgccaccgaaacctgagccgaagccctgtacaaggccagaaggctttcaactagagagttcggtgagacatgaactagagcagcgaaggctgatggaagaaaaacagagaatggagagtgaagaggctcagaggagaatcttcaaagctcaacctgtaatgaaagaggatcctttcccacttccggagaaagagcggaaacctctcaccgaagttgaacagtttgtgttgcatgttgatgagagggcagtgcagagatcagaatttgatacattgataaaagagaaagaaaagacttacaaaaggttgagagaggagaacgaattcgcgcacaagatcgaggaagagaaggcattgaagcagctgaggagaaccatggtgccacatgctcggccgctccccaagtttgacaggccattccgaccacagaaatcgacgaagcaggtgacaaggccgaagtcgccacagcttcaggtggatgagcgaggggcgaggaggcacgctttgatcagatgatcaccgccgttgtttatctatcttgtactacactgattgtcatgcgcggtcaagatcatatctcaatcttgccgtcgatctgttgttggttactagattctttcttctgctgaccagtgaccatatgtagagcaggccaggccctaataacagcaatctttgtcagcacaacgcagctgacacggtgtatgcccttgccctgtgtgtgtttgtgtgccagtgtgtgtgtgtatgtttgtgtaagtgtaatatgattacctcgatggtgagacttcttaatccgatgatggcttgatatagagcttgtgttgacc

SEQ ID NO: 27062 - DNA, 2648 bp, Zea Mays
cccgaccgttggagaccccaacccctaaatgcagtaatgctcacccgcaacgttcttctcccaatcggttccacctgatgcatcccccgccgacttccttcttcttcatcatcgtctcttcatcgcttcaggaggccgccgcataattagagataggacttagagatataataacccccagctcctgatccccaagccctaggcgtaggattccacgtccatcgatggcgctggacacggggacggcggcgggtatcgacgaggcgtacgagttctccgcgcccagcgttcaacccaaggatcaaggaatcgagggcggaggtcaagctcgcggtcctctgtgatttcgcgcaagccgaggagccggctccagaggtaaataaacagaaggagccagctgacgaaatgtcggggccgcctgcggctcaagaagagagagatgaatcgcccccgtctctggagttcctctcggcgacggacctttctgtaaaatcagcagatggtggttctaccagcacgcttaagatgcagacgcgttatcctgcccctcctaccaatgttgcccctgcgagttcgacatgtgacagctcttcagtgaatactgatgcgcgcacgccgaagatgcaggtaaacatgtgcagagcaggtcctacggctgcttcgacgaatgtcaagaggagcgtgatgatcaagggtggccgtgatttggtggggactggaaaggcagccactgctggcgctgaaattgctcaagagaaccaagcggtgaagaggcagaagctcgatgatgggagagccagacagatactcaatgtcaagactaaggtgctgcctcataaggcgagagctgatttagctggaagcgaaatgaggaggtcccatgaggatatgcgctctgcgaaggaagcagatccatatgtatcagctgcagaattggttaagaagtttgaatcagggaccagagagcttagcatcactcacagtagatgtcgttctcatgaggatgctgcatcacagcgaagcctgcgaaggcctaagcttatgttaactagacctaaggaacctgacttccagacttcccagagagttcgaacagtaaaagtgaagagctctgcagagatagaggaggaaatgttggcaaagatacccaagttcagggcacggccattcaacaaaacgattgctgaagccccttcgttccctccacttccaaggagaaccccacagatacctgaattcaatgaattccatcttaaaacaatggagagagcaagtcgatatgcggacacctgttcagaagtttcttgtgcagatactatccagagtcaaaataagacactgaaatcgagacaagcaaagccaccacaacttcatacagcaatgagagctcggccaccaagtgtgaaaagttttcaggaacttgaactggaggagctggagaaggcccccaagttcaaggccaagccattaaacaaaaggattcttgagagcaagggagacattggtgtatttttccatccaaagtctcaggtcacagctcccaaaaaattccatttttctaccgatgttcgcttgggccctccatcagttgctgacttatttgacaagctctctcttcactctgaatgttcttcaaacagcaacagacaagatgtgcccagacgcaccataccaaaccctttcaatctacaaacagaggaaagaggtcatttaaaagagaggcagctagaagcacatctcttacaaaagaagatggaggaggaaaaggccagggttcacaaagctaatccttacccatacaccacggactacccgacgatgccaccgaaacctgagccgaagccctgtacaaggccagaaggctttcaactagagagttcggtgagacatgaactagagcagcgaaggctgatggaagaaaaacagagaatggagagtgaagaggctcagaggagaatcttcaaagctcaacctgtaatgaaagaggatcctttcccacttccggagaaagagcggaaacctctcaccgaagttgaacagtttgtgttgcatgttgatgagagggcagtgcagagatcagaatttgatacattgataaaagagaaagaaaagacttacaaaaggttgagagaggagaacgaattcgcgcacaagatcgaggaagagaaggcattgaagcagctgaggagaaccatggtgccacatgctcggccgctccccaagtttgacaggccattccgaccacagaaatcgacgaagcaggtgacaaggccgaagtcgccacagcttcaggtggatgagcgaggggcgaggaggcacgctttgatcagatgatcaccgccgttgtttatctatcttgtactacactgattgtcatgcgcggtcaagatcatatctcaatcttgccgtcgatctgttgttggttactagattctttcttctgctgaccagtgaccatatgtagagcaggccaggccctaataacagcaatctttgtcagcacaacgcagctgacacggtgtatgcccttgccctgtgtgtgtttgtgtgccagtgtgtgtgtgtatgtttgtgtaagtgtaatatgattacctcgatggtgagacttcttaatccgatgatggcttgatatagagcttgtgttgacc

SEQ ID NO: 27063 - DNA, 2851 bp, Zea Mays
cccgaccgttggagaccccaacccctaaatgcagtaatgctcacccgcaacgttcttctcccaatcggttccacctgatgcatcccccgccgacttccttcttcttcatcatcgtctcttcatcgcttcaggaggccgccgcataattagagataggacttagagatataataacccccagctcctgatccccaagccctaggcgtaggattccacgtccatcgatggcgctggacacggggacggcggcgggtatcgacgaggcgtacgagttctccgcgcccaggttcttcgacttcgtcgtcgaggaaacggaggaggccgtacgtgccgccgagagctggttcgaggctgcccgcagccacgccccctcgccgttcaacccaaggatcaaggaatcgagggcggaggtcaagctcgcggtcctctgtgatttcgcgcaagccgaggagccggctccagaggtaaataaacagaaggagccagctgacgaaatgtcggggccgcctgcggctcaagaagagagagatgaatcgcccccgtctctggagttcctctcggcgacggacctttctgtaaaatcagcagatggtggttctaccagcacgcttaagatgcagacgcgttatcctgcccctcctaccaatgttgcccctgcgagttcgacatgtgacagctcttcagtgaatactgatgcgcgcacgccgaagatgcaggtaaacatgtgcagagcaggtcctacggctgcttcgacgaatgtcaagaggagcgtgatgatcaagggtggccgtgatttggtggggactggaaaggcagccactgctggcgctgaaattgctcaagagaaccaagcggcctggacggcggaggctggcagcccctggaggtctggacggcggaggcctggccaccaggacggcggaggttgggtgccgtgttgcctgctggtgcagcgaggagccgtggacagcagagcagaccctgcacggcggagggcagagggagagatactcaatgtcaagactaaggtgctgcctcataaggcgagagctgatttagctggaagcgaaatgaggaggtcccatgaggatatgcgctctgcgaaggaagcagatccatatgtatcagctgcagaattggttaagaagtttgaatcagggaccagagagcttagcatcactcacagtagatgtcgttctcatgaggatgctgcatcacagcgaagcctgcgaaggcctaagcttatgttaactagacctaaggaacctgacttccagacttcccagagagttcgaacagtaaaagtgaagagctctgcagagatagaggaggaaatgttggcaaagatacccaagttcagggcacggccattcaacaaaacgattgctgaagccccttcgttccctccacttccaaggagaaccccacagatacctgaattcaatgaattccatcttaaaacaatggagagagcaagtcgatatgcggacacctgttcagaagtttcttgtgcagatactatccagagtcaaaataagacactgaaatcgagacaagcaaagccaccacaacttcatacagcaatgagagctcggccaccaagtgtgaaaagttttcaggaacttgaactggaggagctggagaaggcccccaagttcaaggccaagccattaaacaaaaggattcttgagagcaagggagacattggtgtatttttccatccaaagtctcaggtcacagctcccaaaaaattccatttttctaccgatgttcgcttgggccctccatcagttgctgacttatttgacaagctctctcttcactctgaatgttcttcaaacagcaacagacaagatgtgcccagacgcaccataccaaaccctttcaatctacaaacagaggaaagaggtcatttaaaagagaggcagctagaagcacatctcttacaaaagaagatggaggaggaaaaggccagggttcacaaagctaatccttacccatacaccacggactacccgacgatgccaccgaaacctgagccgaagccctgtacaaggccagaaggctttcaactagagagttcggtgagacatgaactagagcagcgaaggctgatggaagaaaaacagagaatggagagtgaagaggctcagaggagaatcttcaaagctcaacctgtaatgaaagaggatcctttcccacttccggagaaagagcggaaacctctcaccgaagttgaacagtttgtgttgcatgttgatgagagggcagtgcagagatcagaatttgatacattgataaaagagaaagaaaagacttacaaaaggttgagagaggagaacgaattcgcgcacaagatcgaggaagagaaggcattgaagcagctgaggagaaccatggtgccacatgctcggccgctccccaagtttgacaggccattccgaccacagaaatcgacgaagcaggtgacaaggccgaagtcgccacagcttcaggtggatgagcgaggggcgaggaggcacgctttgatcagatgatcaccgccgttgtttatctatcttgtactacactgattgtcatgcgcggtcaagatcatatctcaatcttgccgtcgatctgttgttggttactagattctttcttctgctgaccagtgaccatatgtagagcaggccaggccctaataacagcaatctttgtcagcacaacgcagctgacacggtgtatgcccttgccctgtgtgtgtttgtgtgccagtgtgtgtgtgtatgtttgtgtaagtgtaatatgattacctcgatggtgagacttcttaatccgatgatggcttgatatagagcttgtgttgacc

SEQ ID NO: 27064 - DNA, 2705 bp, Zea Mays
cccgaccgttggagaccccaacccctaaatgcagtaatgctcacccgcaacgttcttctcccaatcggttccacctgatgcatcccccgccgacttccttcttcttcatcatcgtctcttcatcgcttcaggaggccgccgcataattagagataggacttagagatataataacccccagctcctgatccccaagccctaggcgtaggattccacgtccatcgatggcgctggacacggggacggcggcgggtatcgacgaggcgtacgagttctccgcgcccaggttcttcgacttcgtcgtcgaggaaacggaggaggccgtacgtgccgccgagagctggttcgaggctgcccgcagccacgccccctcgccgttcaacccaaggatcaaggaatcgagggcggaggtcaagctcgcggtcctctgtgatttcgcgcaagccgaggagccggctccagaggtaaataaacagaaggagccagctgacgaaatgtcggggccgcctgcggctcaagaagagagagatgaatcgcccccgtctctggagttcctctcggcgacggacctttctgtaaaatcagcagatggtggttctaccagcacgcttaagatgcagacgcgttatcctgcccctcctaccaatgttgcccctgcgagttcgacatgtgacagctcttcagtgaatactgatgcgcgcacgccgaagatgcaggtaaacatgtgcagagcaggtcctacggctgcttcgacgaatgtcaagaggagcgtgatgatcaagggtggccgtgatttggtggggactggaaaggcagccactgctggcgctgaaattgctcaagagaaccaagcggtgaagaggcagaagctcgatgatgggagagccagacagatactcaatgtcaagactaaggtgctgcctcataaggcgagagctgatttagctggaagcgaaatgaggaggtcccatgaggatatgcgctctgcgaaggaagcagatccatatgtatcagctgcagaattggttaagaagtttgaatcagggaccagagagcttagcatcactcacagtagatgtcgttctcatgaggatgctgcatcacagcgaagcctgcgaaggcctaagcttatgttaactagacctaaggaacctgacttccagacttcccagagagttcgaacagtaaaagtgaagagctctgcagagatagaggaggaaatgttggcaaagatacccaagttcagggcacggccattcaacaaaacgattgctgaagccccttcgttccctccacttccaaggagaaccccacagatacctgaattcaatgaattccatcttaaaacaatggagagagcaagtcgatatgcggacacctgttcagaagtttcttgtgcagatactatccagagtcaaaataagacactgaaatcgagacaagcaaagccaccacaacttcatacagcaatgagagctcggccaccaagtgtgaaaagttttcaggaacttgaactggaggagctggagaaggcccccaagttcaaggccaagccattaaacaaaaggattcttgagagcaagggagacattggtgtatttttccatccaaagtctcaggtcacagctcccaaaaaattccatttttctaccgatgttcgcttgggccctccatcagttgctgacttatttgacaagcaacagacaagatgtgcccagacgcaccataccaaaccctttcaatctacaaacagaggaaagaggtcatttaaaagagaggcagctagaagcacatctcttacaaaagaagatggaggaggaaaaggccagggttcacaaagctaatccttacccatacaccacggactacccgacgatgccaccgaaacctgagccgaagccctgtacaaggccagaaggctttcaactagagagttcggtgagacatgaactagagcagcgaaggctgatggaagaaaaacagagaatggagagtgaagaggctcagaggagaatcttcaaagctcaacctgtaatgaaagaggatcctttcccacttccggagaaagagcggaaacctctcaccgaagttgaacagtttgtgttgcatgttgatgagagggcagtgcagagatcagaatttgatacattgataaaagagaaagaaaagacttacaaaaggttgagagaggagaacgaattcgcgcacaagatcgaggaagagaaggcattgaagcagctgaggagaaccatggtgccacatgctcggccgctccccaagtttgacaggccattccgaccacagaaatcgacgaagcaggtgacaaggccgaagtcgccacagcttcaggtggatgagcgaggggcgaggaggcacgctttgatcagatgatcaccgccgttgtttatctatcttgtactacactgattgtcatgcgcggtcaagatcatatctcaatcttgccgtcgatctgttgttggttactagattctttcttctgctgaccagtgaccatatgtagagcaggccaggccctaataacagcaatctttgtcagcacaacgcagctgacacggtgtatgcccttgccctgtgtgtgtttgtgtgccagtgtgtgtgtgtatgtttgtgtaagtgtaatatgattacctcgatggtgagacttcttaatccgatgatggcttgatatagagcttgtgttgacc

SEQ ID NO: 27065 - DNA, 3994 bp, Zea Mays
ccggcctcaattcgtgctctctcttaaatttgaaagtgtagacatgtaatgtaatgtcaacattcgaaggtggacagtggacataacccttgccaaaattgttacagagaagagaagtaagtaagtaactagcatagcaacagcgtaaatagttaatagataaacacaggagtgagaaaaaaccagaaatggctctatgcatatatgtgtagcatattccaataaaccccttaacacaaggtgcagctgcttcgctgagtttggagaggcacaaactatatgctttgctatgcggctatgcccgggacttttggggacggaaaacaactagctggagctactgaaggaatagcaaggataaaaacatgctgatctacactcagattcatgtagcagcatagcaagcatccagaccaaatataaggtgagctaatacttctagggatcaggagtcatgttaatcacaatcagcacatcaactatgaacacgctgatctacacccagattcatgtaacgttaacctagctcgagaagcccaattatgcctaacctgttcgctgtggcacatcccaccttatacaaggaccaagctccaattatgcctaactgaatatcgcccaattaattaacaaatcgaatagacgcaaccatactgagggccagcagcagctagaagcaaagcaactagcagcttcgatgccagggtcaatcgactcaacgacagcgcctatggtccagttacgaacaggggcaagaagagaagaaccaacctggtgccagctctgcctcccgtcccagagagcacaggctgccggacgaggcccgcctatcctcatccaccgtgggggtcacgtactcacgagtctccacagatcctacaaaggcgcgaggtaagtcggagatacgcggcgccaacagagccgctgccgtaacagcagcagcatttgctcttcaccggcgagcgagcggcggcggagtagagaagggaaaggggacgacgacgacacggtgcctcccagtcccacctccgggttggactggtcactggacccgatccttcacctaatcaccttcactcgatcagtcgggctcgagcggcttcatttcactgacatgtgggtccctatccgcagctaggattctgggcccctgtggcagccagtggaagagttcctctcacttaacagcatctcttctctctcccacggttgcttccaggtcccaccacgtagggaggggattggagacgccgagctccaccggaggcgaaggcggaggcgcgtggcgcgccctcggactcctcgctgggggtaaactgcaaaaaaaatataggagtggactctggcgcattgctggaagagacacctccggctctggttgtacgagttggtggtcgtctctccagatccgatgctcttcctggtcgatggcgcgaaaccgtggtggctaaatcctttcttcccgcttgagtagacaacatcgcctttccctcgcaatgccaccgaaaagaggtgctgctggcacccgctgcaccacctctgctgcccatggcgccaccgagtttgccaccggcagccgatccgtcgcgggccaatccgccgcccagttcgtcgttgaagctgccacccagttggccgcccaagccaccaccccaaccatcgccctcgttcttagatatgcttcaaagtcttgtttttcaggacaaaatggaccttgcacctcagggtttgataacacagcaacaaaaggcaaatgagcgaaggccagttggtagctcacaaatttggacagtatgtaactttctcattccttgtttctcttattacttgggcatcttaaacaaaatacaacctgagataatgaaaattttgtagcggtatggtgttctgcttccaagccagcagactcgaaagctaaaagaatggattctgactgatgagcagcaacagcttgttaatgctagtggtcttggacatctggcacttaccactgggtttaccattgaccgttctttgctgacatctttttgtgaaagatggaataatgaaacaaatactgcacatttcatgggatttgagattgcgccttcacttcgtgatgtttcatatattcttggcattccagtgactggtcatgtggtgaccgcagagccaattggtgatgaagctgtgaagcggatgtgcttgcattatttaggagagagccctggaaatggagagcaactgtgtggcttaattaggctgacttggttgtataggaattttcatcaactacctgaacatccaaccatcaataagattgcatatagcacccgagcttaccttctataccttgttggttccaccttgtttcctgacaccatgaggggatttgtatccccaagatatctaccactgttggcagattttgggaagatccgtgagtatgcttggggggctgcagcccttgctcatttgtataggggattgtctgttgcagtaacacctaatgccacaacacagtttctcggcagtgcaactttgctcatggcctggatttatgagtatcttcctattactcaaccacaacagaagaaccagagcacattgctgccccgggcttgccggtggaactttggaggagcaacacgtggacagagaaaaaaagtcatggactggagaaaagtttttgagcaacttcaattttccgaggtcaactggaacccttacaaggacatgaatccagcaattgttccggaatattgcattgcagcagataacatctgctactctcgtacttggctaatcagctttaacataaaggaggcgtatgtgcctgacaggtttgctaggcagttcgggagggaacaaggacgcctccatggtgtgccaatgtggacaagaagaacttggagtaagtggaaagactggaggactgagtatgctcgtgagattgaggagttccatcaattggttggctgccatttcacccctcctgcggaaaccaatatcaactcctttccactacatgagtctagtgctggacagaatgatgcaggatgcagtctgaatatctctcataatttttctgcaatggttgaagatttgaaaaatgatctcccagtaattggtcgatatcttgagggaaacttgcttccttcagatgttgcaagcttcctagagagggtgagcacgatgatcaagagttataccccaccacagggcagccgaaggaaagatcgagtaagtcatggccccgctgacccagtcaggtcaaagaacccaagaaaaaggggaagacattcactctttcaagattcttttcctcatcggtatctaggcaccccggtaaacatagtgtttgatggcaccattcctctactaaatgggggtgaggcattgaaggaacaagtggccatggatccctggcgggtctcccagtcccatttgacgatgaccacatcttcttcatctctagactcaagctcaccagaatcaatgaagcggaggcgggaaggtggggatgaaattccaatcacaagggacactgattgcctccaaagtggaaggctctgtgtgcagctgaaaatgttcaagcacagagatggagtgaatgccgaggcagctaatccgattttccgctgacgaagacaaaacttcgcttggtcttcatattgtacaaagtagcaaagaaacatgacttgtttgctgcactgctgacagttagctggccaccaacaccgctctgcggtattgctgtctgcaatttgcgaggattttcctgtgtttatatcgttgtgaaacagttgcctctgtgaaatagatgccttttcagaagcgatagagttgtaactgtttatgacaattaacatggctattaaaggggcaagtcttttggcacagatagtgggaatggttgttctatcttttagggttagtttgggaactacgtttttccaagggatttctattttttcaagggaaaatgaactaattttccttggaaaaatgaaaa

SEQ ID NO: 27066 - DNA, 4285 bp, Zea Mays
ccttgcctccttccatggcgcatgctggtaggagcggaaccggcgctcaagcacaaggtgccccgaggccgagcagtcatcaagttccctcaaagacaagtgctgtggctgcaggaggttcctcaagtgcacctacaccgacgagtgctgctgcaaatgcaatgccatcttcaagtgctcaagctccaccatcagaaggtcctgacacccttgctgacaagaaacgggcagcgggcggtggctctgtgtttaagccaccccctcccatggtagctgttgctgtgggttccatcgatgaagatgagaagccaggacctacagagaatgacgcgacaagcctctctacgacaattcgcagtaactcattgcgacgctaccgaggaagtggttccgatgataaaacatctttgaatgtcactgatgaggacgaaagggccccatcacccaaccatcaggatgagccccaccggcaagaggcccacatctctagaagctctcaaggttctcgtcctcatggcactcctcgtggttatggttactatgatgatagaggatcccatgataaacatggtgatcgtgagagatctgcatccattggctatagtaatagtggaaggcgaagataccatgatgatagagaatctcatactaggcgcgctgagcgtgagaggtctacatcaaatgaatatactaacaagagaagtcgacatgagcatagctcaagaagctcaagaacatctgcacgatctgattgggatgatggacgctgggaatgggaagatacacctcgtcgagattatcgtgataatcgtcctggctcccggagacaacatccaacacgatctcctatgctcgctgctgcatccccggatgcacgcctggtatctccttggttagacgggaatacaccacgtctagcagcgtccccgtgggataatgtatccccttcacctgctccaatacgtgcttctggttcctcaaaagggtcttcttattcacattccagtggaagatcacaccagcttaccttttcatcaactactagttctaattgagataaccgaggaaatgatgcaggagatggactacaatgctgaccgtgcatggtatgactgcgaagaacacactaccatgtttgatggtgatcattctatgtatcttggagatgataattcctacaaaaagagggaagcagagatgccgaagaagctgactcgtagagatggtagcctgatgacccttgctcaaagcaaaaagatgtcacagatgactgctgataatgctcagtgggaggatagacaattgttgagatctggagctgttaaaggaacagaagtgcaaactgaatttgatgatgaggaggaacggaaagtaatacttcttgttcatgacacaaagccccccttcctggatgggagagttgttttcacaaaacaagcagaacctgtaatgcctctgaaggacccaacatctgatatggctattattgcacgcaaaggttctagtctggttagggaaatccgtgaaaagcaaagcatgaacaaatcaaggcaacgattttgggagcttgctggatctaagcttggcaatatcttgggtgttgagaaaacagctgaacaggttgatgcagatactgctgttgttggtgaccaaggtgagattaattttaaagaagaagcaaagttttcacaacatttgaaggataaagcagaagctgtcagtgattttgcaaaatcaaaatccctttctcaacaaaggcaatatcttcccatatttaccgtccgggatgatctgctacaggttgtgcgtgaaaatcaagtggttgtggttgttggtgaaactggttctgggaagactactcaactgactcagtatctgcatgaggatggatatactaccacaggagttgttggttgtacccaaccaaggcgtgtggctgccatgagtgttgctaagcgagtcagcgaggaaatggagactgatctgggagataaagtcggatatgccatacggtttgaggatgtcactggtccaaacactataataaagtatatgacagatggagtgcttctccgtgaaaccttgaaagatgctgacctcgacaaatatcgtgttgttgtcatggatgaagcacatgaaagatcactcaacactgatgttttgtttggtatactgaagaaggttgttgcacgtagacgggattttaaactaatcgttacatctgcaaccctaaatgctgacaagttctccaagttcttcggaggtgtgcctgtattccatattccgggtcggactttcccagttaacattatgttcagcaaaacaccatgtgaggactatgtggaagctgcagtgaagcaggccatgactatccacataaccagcggccttggtgatatcctaatcttcatgactgggcaggaagaaattgaggctacctgctatgcgcttgctgaacgcatggaacagttaatatcgtcatccaccaagactatccccaagctagagattctgcccatctactcacagttgcctgctgacttgcaagccaagatttttcagaaggctgaagagggcgctcgcaagtgtattgttgctaccaatattgctgagacctcattaacagttgatggtatcttctatgtcattgataccgggtatgggaagatgaaggtgtacaacccgcggatgggtatggacgccctccaggttttcccagtcagccgggcagctgccgaccagcgtgcaggtcgggcaggaagaactggccctggcacatgctacagattgttcacagaatcagcctaccagaatgagatgctccctaaccctgtgccagagatccaaaggactaacctggggaatgtggtgcttttactgaaatccctcagagttgaaaacttgctcgactttgactttatggacccaccgccccaggagaatatcctcaactcaatgtaccaactctgggtgttaggtgcattgaacaatgttggtggccttacagaaattggctggaagatggtggagttcccgttggatccaactctggcaaaaatgcttcttatgggggagcagctagagtgccttgatgaggtgctgaccattgtatccatgctatcagtgccgtcagtcttcttccggccaaaagaccgagcagaggagagtgacgcagcaagggagaaattctttgtcccagagtctgaccacctgacactcctgaacgtgtatcttcagtggaagtcgaatcagtatcgaggcgattggtgcaacgaccacttcctccatgtcaagggtctccgcaaggctcgtgaggtgagatctcagctgctggacatactgaaaaccctgaagatccccctgacatcatgccatatggaatgggacgtggtgaggaaggctatctgctctgcgtacttccacaattccgcccggttgaagggtattggggagtacgtcaactgccggaatgggatgccgtgccacctgcaccccagcagtgcgctatatggccttggctacactcctgactatgtcgtctaccatgagcttgtcctgaccaccaaggagtacatgcagtgcgtcaccgcagttgatccacagtggctagcggagatggggcccatgttcttctctgtgaaggagacagacacctctcttcttgaccacaagaagaggcagaaggaagagaagacggcgatggaggaggagatggagaagctgaggcggcagcaagcagaggccgcgcgcatggagaaggagaaggaacgggagaagagagctaagcagcagcaacaggttgctatgcccggcctgaagaagggtgcgacttatctgaggcccaagagaatgggtctgtagataagacctgatataacttaactgtctccggtgattttgttactaggctgagggaacttgtaatgtgtagcctgctcaagcagcatgtaaaacaacacgtcaatgtgaatgtatacaacatcgacatgtgaaaaaatgaaaagaaaaatagagtgttgtcgacatagagtttgattttttgctgagttagctcttaaaagtatgcagtcattatgtttgatatggtatgtcctcttaatgaaaaatatgattcttgaaggtctatgaattctgcaggcaagctaaattagctcttaaaacatttcaagaaacaacgtgaccctgaatggactcaaccaatcgtccattgctgattagagatgacaatgggtatccgaaacccgatgggtttttatcccattagggtacgagtttgggtcagttt

SEQ ID NO: 27067 - DNA, 4811 bp, Zea Mays
catgcatacattgtgcgttcgcttccgtagtacagggcccccatgtgcgccttgccgccttgcctccactccacacaaccgtgtcagtacggcacccggacaagaggcaaacggcaaacccgatcggccgatccattctccaaccctagccgccggccgccgccacctacccggctaccccacgtttccagtccccactccctccgccggcgcatcctgcttccagcctccatcggcgcatcctgctcctggcctcccgccaccggcgcatccttgctcccggcctcctgccaccggccgcatccccagggccgcgagatcctgctcccgccaccggccgccgcaacctgccagcgtccagggcactcgcccccaccatccgccgccgccccccaccggcagtcgcaacctgccagcgtccagggctccaggcaagggccgccacgtgaccacgtctcgcaggtcagcaggtcccttgcctccttccatggcgcatgctggtaggagcggaaccggcgctcaagcacaaggtgccccgaggccgagcagtcatcaagttccctcaaagacaagtgctgtggctgcaggaggttcctcaagtgcacctacaccgacgagtgctgctgcaaatgcaatgccatcttcaagtgctcaagctccaccatcagaaggtcctgacacccttgctgacaagaaacgggcagcgggcggtggctctgtgtttaagccaccccctcccatggtagctgttgctgtgggttccatcgatgaagatgagaagccaggacctacagagaatgacgcgacaagcctctctacgacaattcgcagtaactcattgcgacgctaccgaggaagtggttccgatgataaaacatctttgaatgaatcaacagtcactgatgaggacgaaagggccccatcacccaaccatcaggatgagccccaccggcaagaggcccacatctctagaagctctcaaggttctcgtcctcatggcactcctcgtggttatggttactatgatgatagaggatcccatgataaacatggtgatcgtgagagatctgcatccattggctatagtaatagtggaaggcgaagataccatgatgatagagaatctcatactaggcgcgctgagcgtgagaggtctacatcaaatgaatatactaacaagagaagtcgacatgagcatagctcaagaagctcaagaacatctgcacgatctgattgggatgatggacgctgggaatgggaagatacacctcgtcgagattatcgtgataatcgtcctggctcccggagacaacatccaacacgatctcctatgctcgctgctgcatccccggatgcacgcctggtatctccttggttagacgggaatacaccacgtctagcagcgtccccgtgggataatgtatccccttcacctgctccaatacgtgcttctggttcctcaaaagggtcttcttattcacattccagtggaagatcacaccagcttaccttttcatcaactactagttctaatattattgatgctgatagaagcccctcaaatcctgataggaacagtgagataaccgaggaaatgatgcaggagatggactacaatgctgaccgtgcatggtatgactgcgaagaacacactaccatgtttgatggtgatcattctatgtatcttggagatgataattcctacaaaaagagggaagcagagatgccgaagaagctgactcgtagagatggtagcctgatgacccttgctcaaagcaaaaagatgtcacagatgactgctgataatgctcagtgggaggatagacaattgttgagatctggagctgttaaaggaacagaagtgcaaactgaatttgatgatgaggaggaacggaaagtaatacttcttgttcatgacacaaagccccccttcctggatgggagagttgttttcacaaaacaagcagaacctgtaatgcctctgaaggacccaacatctgatatggctattattgcacgcaaaggttctagtctggttagggaaatccgtgaaaagcaaagcatgaacaaatcaaggcaacgattttgggagcttgctggatctaagcttggcaatatcttgggtgttgagaaaacagctgaacaggttgatgcagatactgctgttgttggtgaccaaggtgagattaattttaaagaagaagcaaagttttcacaacatttgaaggataaagcagaagctgtcagtgattttgcaaaatcaaaatccctttctcaacaaaggcaatatcttcccatatttaccgtccgggatgatctgctacaggttgtgcgtgaaaatcaagtggttgtggttgttggtgaaactggttctgggaagactactcaactgactcagtatctgcatgaggatggatatactaccacaggagttgttggttgtacccaaccaaggcgtgtggctgccatgagtgttgctaagcgagtcagcgaggaaatggagactgatctgggagataaagtcggatatgccatacggtttgaggatgtcactggtccaaacactataataaagtatatgacagatggagtgcttctccgtgaaaccttgaaagatgctgacctcgacaaatatcgtgttgttgtcatggatgaagcacatgaaagatcactcaacactgatgttttgtttggtatactgaagaaggttgttgcacgtagacgggattttaaactaatcgttacatctgcaaccctaaatgctgacaagttctccaagttcttcggaggtgtgcctgtattccatattccgggtcggactttcccagttaacattatgttcagcaaaacaccatgtgaggactatgtggaagctgcagtgaagcaggccatgactatccacataaccagcggccttggtgatatcctaatcttcatgactgggcaggaagaaattgaggctacctgctatgcgcttgctgaacgcatggaacagttaatatcgtcatccaccaagactatccccaagctagagattctgcccatctactcacagttgcctgctgacttgcaagccaagatttttcagaaggctgaagagggcgctcgcaagtgtattgttgctaccaatattgctgagacctcattaacagttgatggtatcttctatgtcattgataccgggtatgggaagatgaaggtgtacaacccgcggatgggtatggacgccctccaggttttcccagtcagccgggcagctgccgaccagcgtgcaggtcgggcaggaagaactggccctggcacatgctacagattgttcacagaatcagcctaccagaatgagatgctccctaaccctgtgccagagatccaaaggactaacctggggaatgtggtgcttttactgaaatccctcagagttgaaaacttgctcgactttgactttatggacccaccgccccaggagaatatcctcaactcaatgtaccaactctgggtgttaggtgcattgaacaatgttggtggccttacagaaattggctggaagatggtggagttcccgttggatccaactctggcaaaaatgcttcttatgggggagcagctagagtgccttgatgaggtgctgaccattgtatccatgctatcagtgccgtcagtcttcttccggccaaaagaccgagcagaggagagtgacgcagcaagggagaaattctttgtcccagagtctgaccacctgacactcctgaacgtgtatcttcagtggaagtcgaatcagtatcgaggcgattggtgcaacgaccacttcctccatgtcaagggtctccgcaaggctcgtgaggtgagatctcagctgctggacatactgaaaaccctgaagatccccctgacatcatgccatatggaatgggacgtggtgaggaaggctatctgctctgcgtacttccacaattccgcccggttgaagggtattggggagtacgtcaactgccggaatgggatgccgtgccacctgcaccccagcagtgcgctatatggccttggctacactcctgactatgtcgtctaccatgagcttgtcctgaccaccaaggagtacatgcagtgcgtcaccgcagttgatccacagtggctagcggagatggggcccatgttcttctctgtgaaggagacagacacctctcttcttgaccacaagaagaggcagaaggaagagaagacggcgatggaggaggagatggagaagctgaggcggcagcaagcagaggccgcgcgcatggagaaggagaaggaacgggagaagagagctaagcagcagcaacaggttgctatgcccggcctgaagaagggtgcgacttatctgaggcccaagagaatgggtctgtagataagacctgatataacttaactgtctccggtgattttgttactaggctgagggaacttgtaatgtgtagcctgctcaagcagcatgtaaaacaacacgtcaatgtgaatgtatacaacatcgacatgtgaaaaaatgaaaagaaaaatagagtgttgtcgacatagagtttgattttttgctgagttagctcttaaaagtatgcagtcattatgtttgatatggtatgtcctcttaatgaaaaatatgattcttgaaggtctatgaattctgcaggcaagctaaattagctcttaaaacatttcaagaaacaacgtgaccctgaatggactcaaccaatcgtccattgctgattagagatgacaatgggtatccgaaacccgatgggtttttatcccattagggtacgagtttgggtcagttt

SEQ ID NO: 27068 - DNA, 4803 bp, Zea Mays
catgcatacattgtgcgttcgcttccgtagtacagggcccccatgtgcgccttgccgccttgcctccactccacacaaccgtgtcagtacggcacccggacaagaggcaaacggcaaacccgatcggccgatccattctccaaccctagccgccggccgccgccacctacccggctaccccacgtttccagtccccactccctccgccggcgcatcctgcttccagcctccatcggcgcatcctgctcctggcctcccgccaccggcgcatccttgctcccggcctcctgccaccggccgcatccccagggccgcgagatcctgctcccgccaccggccgccgcaacctgccagcgtccagggcactcgcccccaccatccgccgccgccccccaccggcagtcgcaacctgccagcgtccagggctccaggcaagggccgccacgtgaccacgtctcgcaggtcccttgcctccttccatggcgcatgctggtaggagcggaaccggcgctcaagcacaaggtgccccgaggccgagcagtcatcaagttccctcaaagacaagtgctgtggctgcaggaggttcctcaagtgcacctacaccgacgagtgctgctgcaaatgcaatgccatcttcaagtgctcaagctccaccatcagaaggtcctgacacccttgctgacaagaaacgggcagcgggcggtggctctgtgtttaagccaccccctcccatggtagctgttgctgtgggttccatcgatgaagatgagaagccaggacctacagagaatgacgcgacaagcctctctacgacaattcgcagtaactcattgcgacgctaccgaggaagtggttccgatgataaaacatctttgaatgaatcaacagtcactgatgaggacgaaagggccccatcacccaaccatcaggatgagccccaccggcaagaggcccacatctctagaagctctcaaggttctcgtcctcatggcactcctcgtggttatggttactatgatgatagaggatcccatgataaacatggtgatcgtgagagatctgcatccattggctatagtaatagtggaaggcgaagataccatgatgatagagaatctcatactaggcgcgctgagcgtgagaggtctacatcaaatgaatatactaacaagagaagtcgacatgagcatagctcaagaagctcaagaacatctgcacgatctgattgggatgatggacgctgggaatgggaagatacacctcgtcgagattatcgtgataatcgtcctggctcccggagacaacatccaacacgatctcctatgctcgctgctgcatccccggatgcacgcctggtatctccttggttagacgggaatacaccacgtctagcagcgtccccgtgggataatgtatccccttcacctgctccaatacgtgcttctggttcctcaaaagggtcttcttattcacattccagtggaagatcacaccagcttaccttttcatcaactactagttctaatattattgatgctgatagaagcccctcaaatcctgataggaacagtgagataaccgaggaaatgatgcaggagatggactacaatgctgaccgtgcatggtatgactgcgaagaacacactaccatgtttgatggtgatcattctatgtatcttggagatgataattcctacaaaaagagggaagcagagatgccgaagaagctgactcgtagagatggtagcctgatgacccttgctcaaagcaaaaagatgtcacagatgactgctgataatgctcagtgggaggatagacaattgttgagatctggagctgttaaaggaacagaagtgcaaactgaatttgatgatgaggaggaacggaaagtaatacttcttgttcatgacacaaagccccccttcctggatgggagagttgttttcacaaaacaagcagaacctgtaatgcctctgaaggacccaacatctgatatggctattattgcacgcaaaggttctagtctggttagggaaatccgtgaaaagcaaagcatgaacaaatcaaggcaacgattttgggagcttgctggatctaagcttggcaatatcttgggtgttgagaaaacagctgaacaggttgatgcagatactgctgttgttggtgaccaaggtgagattaattttaaagaagaagcaaagttttcacaacatttgaaggataaagcagaagctgtcagtgattttgcaaaatcaaaatccctttctcaacaaaggcaatatcttcccatatttaccgtccgggatgatctgctacaggttgtgcgtgaaaatcaagtggttgtggttgttggtgaaactggttctgggaagactactcaactgactcagtatctgcatgaggatggatatactaccacaggagttgttggttgtacccaaccaaggcgtgtggctgccatgagtgttgctaagcgagtcagcgaggaaatggagactgatctgggagataaagtcggatatgccatacggtttgaggatgtcactggtccaaacactataataaagtatatgacagatggagtgcttctccgtgaaaccttgaaagatgctgacctcgacaaatatcgtgttgttgtcatggatgaagcacatgaaagatcactcaacactgatgttttgtttggtatactgaagaaggttgttgcacgtagacgggattttaaactaatcgttacatctgcaaccctaaatgctgacaagttctccaagttcttcggaggtgtgcctgtattccatattccgggtcggactttcccagttaacattatgttcagcaaaacaccatgtgaggactatgtggaagctgcagtgaagcaggccatgactatccacataaccagcggccttggtgatatcctaatcttcatgactgggcaggaagaaattgaggctacctgctatgcgcttgctgaacgcatggaacagttaatatcgtcatccaccaagactatccccaagctagagattctgcccatctactcacagttgcctgctgacttgcaagccaagatttttcagaaggctgaagagggcgctcgcaagtgtattgttgctaccaatattgctgagacctcattaacagttgatggtatcttctatgtcattgataccgggtatgggaagatgaaggtgtacaacccgcggatgggtatggacgccctccaggttttcccagtcagccgggcagctgccgaccagcgtgcaggtcgggcaggaagaactggccctggcacatgctacagattgttcacagaatcagcctaccagaatgagatgctccctaaccctgtgccagagatccaaaggactaacctggggaatgtggtgcttttactgaaatccctcagagttgaaaacttgctcgactttgactttatggacccaccgccccaggagaatatcctcaactcaatgtaccaactctgggtgttaggtgcattgaacaatgttggtggccttacagaaattggctggaagatggtggagttcccgttggatccaactctggcaaaaatgcttcttatgggggagcagctagagtgccttgatgaggtgctgaccattgtatccatgctatcagtgccgtcagtcttcttccggccaaaagaccgagcagaggagagtgacgcagcaagggagaaattctttgtcccagagtctgaccacctgacactcctgaacgtgtatcttcagtggaagtcgaatcagtatcgaggcgattggtgcaacgaccacttcctccatgtcaagggtctccgcaaggctcgtgaggtgagatctcagctgctggacatactgaaaaccctgaagatccccctgacatcatgccatatggaatgggacgtggtgaggaaggctatctgctctgcgtacttccacaattccgcccggttgaagggtattggggagtacgtcaactgccggaatgggatgccgtgccacctgcaccccagcagtgcgctatatggccttggctacactcctgactatgtcgtctaccatgagcttgtcctgaccaccaaggagtacatgcagtgcgtcaccgcagttgatccacagtggctagcggagatggggcccatgttcttctctgtgaaggagacagacacctctcttcttgaccacaagaagaggcagaaggaagagaagacggcgatggaggaggagatggagaagctgaggcggcagcaagcagaggccgcgcgcatggagaaggagaaggaacgggagaagagagctaagcagcagcaacaggttgctatgcccggcctgaagaagggtgcgacttatctgaggcccaagagaatgggtctgtagataagacctgatataacttaactgtctccggtgattttgttactaggctgagggaacttgtaatgtgtagcctgctcaagcagcatgtaaaacaacacgtcaatgtgaatgtatacaacatcgacatgtgaaaaaatgaaaagaaaaatagagtgttgtcgacatagagtttgattttttgctgagttagctcttaaaagtatgcagtcattatgtttgatatggtatgtcctcttaatgaaaaatatgattcttgaaggtctatgaattctgcaggcaagctaaattagctcttaaaacatttcaagaaacaacgtgaccctgaatggactcaaccaatcgtccattgctgattagagatgacaatgggtatccgaaacccgatgggtttttatcccattagggtacgagtttgggtcagttt

SEQ ID NO: 27069 - DNA, 4802 bp, Zea Mays
catgcatacattgtgcgttcgcttccgtagtacagggcccccatgtgcgccttgccgccttgcctccactccacacaaccgtgtcagtacggcacccggacaagaggcaaacggcaaacccgatcggccgatccattctccaaccctagccgccggccgccgccacctacccggctaccccacgtttccagtccccactccctccgccggcgcatcctgcttccagcctccatcggcgcatcctgctcctggcctcccgccaccggcgcatccttgctcccggcctcctgccaccggccgcatccccagggccgcgagatcctgctcccgccaccggccgccgcaacctgccagcgtccagggcactcgcccccaccatccgccgccgccccccaccggcagtcgcaacctgccagcgtccagggctccaggcaagggccgccacgtgaccacgtctcgcaggtcagcaggtcccttgcctccttccatggcgcatgctggtaggagcggaaccggcgctcaagcacaaggtgccccgaggccgagcagtcatcaagttccctcaaagacaagtgctgtggctgcaggaggttcctcaagtgcacctacaccgacgagtgctgctgcaaatgcaatgccatcttcaagtgctcaagctccaccatcagaaggtcctgacacccttgctgacaagaaacgggcagcgggcggtggctctgtgtttaagccaccccctcccatggtagctgttgctgtgggttccatcgatgaagatgagaagccaggacctacagagaatgacgcgacaagcctctctacgacaattcgcagtaactcattgcgacgctaccgaggaagtggttccgatgataaaacatctttgaatgtcactgatgaggacgaaagggccccatcacccaaccatcaggatgagccccaccggcaagaggcccacatctctagaagctctcaaggttctcgtcctcatggcactcctcgtggttatggttactatgatgatagaggatcccatgataaacatggtgatcgtgagagatctgcatccattggctatagtaatagtggaaggcgaagataccatgatgatagagaatctcatactaggcgcgctgagcgtgagaggtctacatcaaatgaatatactaacaagagaagtcgacatgagcatagctcaagaagctcaagaacatctgcacgatctgattgggatgatggacgctgggaatgggaagatacacctcgtcgagattatcgtgataatcgtcctggctcccggagacaacatccaacacgatctcctatgctcgctgctgcatccccggatgcacgcctggtatctccttggttagacgggaatacaccacgtctagcagcgtccccgtgggataatgtatccccttcacctgctccaatacgtgcttctggttcctcaaaagggtcttcttattcacattccagtggaagatcacaccagcttaccttttcatcaactactagttctaatattattgatgctgatagaagcccctcaaatcctgataggaacagtgagataaccgaggaaatgatgcaggagatggactacaatgctgaccgtgcatggtatgactgcgaagaacacactaccatgtttgatggtgatcattctatgtatcttggagatgataattcctacaaaaagagggaagcagagatgccgaagaagctgactcgtagagatggtagcctgatgacccttgctcaaagcaaaaagatgtcacagatgactgctgataatgctcagtgggaggatagacaattgttgagatctggagctgttaaaggaacagaagtgcaaactgaatttgatgatgaggaggaacggaaagtaatacttcttgttcatgacacaaagccccccttcctggatgggagagttgttttcacaaaacaagcagaacctgtaatgcctctgaaggacccaacatctgatatggctattattgcacgcaaaggttctagtctggttagggaaatccgtgaaaagcaaagcatgaacaaatcaaggcaacgattttgggagcttgctggatctaagcttggcaatatcttgggtgttgagaaaacagctgaacaggttgatgcagatactgctgttgttggtgaccaaggtgagattaattttaaagaagaagcaaagttttcacaacatttgaaggataaagcagaagctgtcagtgattttgcaaaatcaaaatccctttctcaacaaaggcaatatcttcccatatttaccgtccgggatgatctgctacaggttgtgcgtgaaaatcaagtggttgtggttgttggtgaaactggttctgggaagactactcaactgactcagtatctgcatgaggatggatatactaccacaggagttgttggttgtacccaaccaaggcgtgtggctgccatgagtgttgctaagcgagtcagcgaggaaatggagactgatctgggagataaagtcggatatgccatacggtttgaggatgtcactggtccaaacactataataaagtatatgacagatggagtgcttctccgtgaaaccttgaaagatgctgacctcgacaaatatcgtgttgttgtcatggatgaagcacatgaaagatcactcaacactgatgttttgtttggtatactgaagaaggttgttgcacgtagacgggattttaaactaatcgttacatctgcaaccctaaatgctgacaagttctccaagttcttcggaggtgtgcctgtattccatattccgggtcggactttcccagttaacattatgttcagcaaaacaccatgtgaggactatgtggaagctgcagtgaagcaggccatgactatccacataaccagcggccttggtgatatcctaatcttcatgactgggcaggaagaaattgaggctacctgctatgcgcttgctgaacgcatggaacagttaatatcgtcatccaccaagactatccccaagctagagattctgcccatctactcacagttgcctgctgacttgcaagccaagatttttcagaaggctgaagagggcgctcgcaagtgtattgttgctaccaatattgctgagacctcattaacagttgatggtatcttctatgtcattgataccgggtatgggaagatgaaggtgtacaacccgcggatgggtatggacgccctccaggttttcccagtcagccgggcagctgccgaccagcgtgcaggtcgggcaggaagaactggccctggcacatgctacagattgttcacagaatcagcctaccagaatgagatgctccctaaccctgtgccagagatccaaaggactaacctggggaatgtggtgcttttactgaaatccctcagagttgaaaacttgctcgactttgactttatggacccaccgccccaggagaatatcctcaactcaatgtaccaactctgggtgttaggtgcattgaacaatgttggtggccttacagaaattggctggaagatggtggagttcccgttggatccaactctggcaaaaatgcttcttatgggggagcagctagagtgccttgatgaggtgctgaccattgtatccatgctatcagtgccgtcagtcttcttccggccaaaagaccgagcagaggagagtgacgcagcaagggagaaattctttgtcccagagtctgaccacctgacactcctgaacgtgtatcttcagtggaagtcgaatcagtatcgaggcgattggtgcaacgaccacttcctccatgtcaagggtctccgcaaggctcgtgaggtgagatctcagctgctggacatactgaaaaccctgaagatccccctgacatcatgccatatggaatgggacgtggtgaggaaggctatctgctctgcgtacttccacaattccgcccggttgaagggtattggggagtacgtcaactgccggaatgggatgccgtgccacctgcaccccagcagtgcgctatatggccttggctacactcctgactatgtcgtctaccatgagcttgtcctgaccaccaaggagtacatgcagtgcgtcaccgcagttgatccacagtggctagcggagatggggcccatgttcttctctgtgaaggagacagacacctctcttcttgaccacaagaagaggcagaaggaagagaagacggcgatggaggaggagatggagaagctgaggcggcagcaagcagaggccgcgcgcatggagaaggagaaggaacgggagaagagagctaagcagcagcaacaggttgctatgcccggcctgaagaagggtgcgacttatctgaggcccaagagaatgggtctgtagataagacctgatataacttaactgtctccggtgattttgttactaggctgagggaacttgtaatgtgtagcctgctcaagcagcatgtaaaacaacacgtcaatgtgaatgtatacaacatcgacatgtgaaaaaatgaaaagaaaaatagagtgttgtcgacatagagtttgattttttgctgagttagctcttaaaagtatgcagtcattatgtttgatatggtatgtcctcttaatgaaaaatatgattcttgaaggtctatgaattctgcaggcaagctaaattagctcttaaaacatttcaagaaacaacgtgaccctgaatggactcaaccaatcgtccattgctgattagagatgacaatgggtatccgaaacccgatgggtttttatcccattagggtacgagtttgggtcagttt

SEQ ID NO: 27070 - DNA, 4773 bp, Zea Mays
catgcatacattgtgcgttcgcttccgtagtacagggcccccatgtgcgccttgccgccttgcctccactccacacaaccgtgtcagtacggcacccggacaagaggcaaacggcaaacccgatcggccgatccattctccaaccctagccgccggccgccgccacctacccggctaccccacgtttccagtccccactccctccgccggcgcatcctgcttccagcctccatcggcgcatcctgctcctggcctcccgccaccggcgcatccttgctcccggcctcctgccaccggccgcatccccagggccgcgagatcctgctcccgccaccggccgccgcaacctgccagcgtccagggcactcgcccccaccatccgccgccgccccccaccggcagtcgcaacctgccagcgtccagggctccaggcaagggccgccacgtgaccacgtctcgcaggtcagcaggtcccttgcctccttccatggcgcatgctggtaggagcggaaccggcgctcaagcacaaggtgccccgaggccgagcagtcatcaagttccctcaaagacaagtgctgtggctgcaggaggttcctcaagtgcacctacaccgacgagtgctgctgcaaatgcaatgccatcttcaagtgctcaagctccaccatcagaaggtcctgacacccttgctgacaagaaacgggcagcgggcggtggctctgtgtttaagccaccccctcccatggtagctgttgctgtgggttccatcgatgaagatgagaagccaggacctacagagaatgacgcgacaagcctctctacgacaattcgcagtaactcattgcgacgctaccgaggaagtggttccgatgataaaacatctttgaatgaatcaacagtcactgatgaggacgaaagggccccatcacccaaccatcaggatgagccccaccggcaagaggcccacatctctagaagctctcaaggttctcgtcctcatggcactcctcgtggttatggttactatgatgatagaggatcccatgataaacatggtgatcgtgagagatctgcatccattggctatagtaatagtggaaggcgaagataccatgatgatagagaatctcatactaggcgcgctgagcgtgagaggtctacatcaaatgaatatactaacaagagaagtcgacatgagcatagctcaagaagctcaagaacatctgcacgatctgattgggatgatggacgctgggaatgggaagatacacctcgtcgagattatcgtgataatcgtcctggctcccggagacaacatccaacacgatctcctatgctcgctgctgcatccccggatgcacgcctggtatctccttggttagacgggaatacaccacgtctagcagcgtccccgtgggataatgtatccccttcacctgctccaatacgtgcttctggttcctcaaaagggtcttcttattcacattccagtggaagatcacaccagcttaccttttcatcaactactagttctaatgaacagtgagataaccgaggaaatgatgcaggagatggactacaatgctgaccgtgcatggtatgactgcgaagaacacactaccatgtttgatggtgatcattctatgtatcttggagatgataattcctacaaaaagagggaagcagagatgccgaagaagctgactcgtagagatggtagcctgatgacccttgctcaaagcaaaaagatgtcacagatgactgctgataatgctcagtgggaggatagacaattgttgagatctggagctgttaaaggaacagaagtgcaaactgaatttgatgatgaggaggaacggaaagtaatacttcttgttcatgacacaaagccccccttcctggatgggagagttgttttcacaaaacaagcagaacctgtaatgcctctgaaggacccaacatctgatatggctattattgcacgcaaaggttctagtctggttagggaaatccgtgaaaagcaaagcatgaacaaatcaaggcaacgattttgggagcttgctggatctaagcttggcaatatcttgggtgttgagaaaacagctgaacaggttgatgcagatactgctgttgttggtgaccaaggtgagattaattttaaagaagaagcaaagttttcacaacatttgaaggataaagcagaagctgtcagtgattttgcaaaatcaaaatccctttctcaacaaaggcaatatcttcccatatttaccgtccgggatgatctgctacaggttgtgcgtgaaaatcaagtggttgtggttgttggtgaaactggttctgggaagactactcaactgactcagtatctgcatgaggatggatatactaccacaggagttgttggttgtacccaaccaaggcgtgtggctgccatgagtgttgctaagcgagtcagcgaggaaatggagactgatctgggagataaagtcggatatgccatacggtttgaggatgtcactggtccaaacactataataaagtatatgacagatggagtgcttctccgtgaaaccttgaaagatgctgacctcgacaaatatcgtgttgttgtcatggatgaagcacatgaaagatcactcaacactgatgttttgtttggtatactgaagaaggttgttgcacgtagacgggattttaaactaatcgttacatctgcaaccctaaatgctgacaagttctccaagttcttcggaggtgtgcctgtattccatattccgggtcggactttcccagttaacattatgttcagcaaaacaccatgtgaggactatgtggaagctgcagtgaagcaggccatgactatccacataaccagcggccttggtgatatcctaatcttcatgactgggcaggaagaaattgaggctacctgctatgcgcttgctgaacgcatggaacagttaatatcgtcatccaccaagactatccccaagctagagattctgcccatctactcacagttgcctgctgacttgcaagccaagatttttcagaaggctgaagagggcgctcgcaagtgtattgttgctaccaatattgctgagacctcattaacagttgatggtatcttctatgtcattgataccgggtatgggaagatgaaggtgtacaacccgcggatgggtatggacgccctccaggttttcccagtcagccgggcagctgccgaccagcgtgcaggtcgggcaggaagaactggccctggcacatgctacagattgttcacagaatcagcctaccagaatgagatgctccctaaccctgtgccagagatccaaaggactaacctggggaatgtggtgcttttactgaaatccctcagagttgaaaacttgctcgactttgactttatggacccaccgccccaggagaatatcctcaactcaatgtaccaactctgggtgttaggtgcattgaacaatgttggtggccttacagaaattggctggaagatggtggagttcccgttggatccaactctggcaaaaatgcttcttatgggggagcagctagagtgccttgatgaggtgctgaccattgtatccatgctatcagtgccgtcagtcttcttccggccaaaagaccgagcagaggagagtgacgcagcaagggagaaattctttgtcccagagtctgaccacctgacactcctgaacgtgtatcttcagtggaagtcgaatcagtatcgaggcgattggtgcaacgaccacttcctccatgtcaagggtctccgcaaggctcgtgaggtgagatctcagctgctggacatactgaaaaccctgaagatccccctgacatcatgccatatggaatgggacgtggtgaggaaggctatctgctctgcgtacttccacaattccgcccggttgaagggtattggggagtacgtcaactgccggaatgggatgccgtgccacctgcaccccagcagtgcgctatatggccttggctacactcctgactatgtcgtctaccatgagcttgtcctgaccaccaaggagtacatgcagtgcgtcaccgcagttgatccacagtggctagcggagatggggcccatgttcttctctgtgaaggagacagacacctctcttcttgaccacaagaagaggcagaaggaagagaagacggcgatggaggaggagatggagaagctgaggcggcagcaagcagaggccgcgcgcatggagaaggagaaggaacgggagaagagagctaagcagcagcaacaggttgctatgcccggcctgaagaagggtgcgacttatctgaggcccaagagaatgggtctgtagataagacctgatataacttaactgtctccggtgattttgttactaggctgagggaacttgtaatgtgtagcctgctcaagcagcatgtaaaacaacacgtcaatgtgaatgtatacaacatcgacatgtgaaaaaatgaaaagaaaaatagagtgttgtcgacatagagtttgattttttgctgagttagctcttaaaagtatgcagtcattatgtttgatatggtatgtcctcttaatgaaaaatatgattcttgaaggtctatgaattctgcaggcaagctaaattagctcttaaaacatttcaagaaacaacgtgaccctgaatggactcaaccaatcgtccattgctgattagagatgacaatgggtatccgaaacccgatgggtttttatcccattagggtacgagtttgggtcagttt

SEQ ID NO: 27071 - DNA, 4783 bp, Zea Mays
catgcatacattgtgcgttcgcttccgtagtacagggcccccatgtgcgccttgccgccttgcctccactccacacaaccgtgtcagtacggcacccggacaagaggcaaacggcaaacccgatcggccgatccattctccaaccctagccgccggccgccgccacctacccggctaccccacgtttccagtccccactccctccgccggcgcatcctgcttccagcctccatcggcgcatcctgctcctggcctcccgccaccggcgcatccttgctcccggcctcctgccaccggccgcatccccagggccgcgagatcctgctcccgccaccggccgccgcaacctgccagcgtccagggcactcgcccccaccatccgccgccgccccccaccggcagtcgcaacctgccagcgtccagggctccaggcaagggccgccacgtgaccacgtctcgcaggtcagcaggtcccttgcctccttccatggcgcatgctggtaggagcggaaccggcgctcaagcacaaggtgccccgaggccgagcagtcatcaagttccctcaaagacaagtgctgtggctgcaggaggttcctcaagtgcacctacaccgacgagtgctgctgcaaatgcaatgccatcttcaagtgctcaagctccaccatcagaaggtcctgacacccttgctgacaagaaacgggcagcgggcggtggctctgtgtttaagccaccccctcccatggtagctgttgctgtgggttccatcgatgaagatgagaagccaggacctacagagaatgacgcgacaagcctctctacgacaattcgcagtaactcattgcgacgctaccgaggaagtggttccgatgataaaacatctttgaatgtcactgatgaggacgaaagggccccatcacccaaccatcaggatgagccccaccggcaagaggcccacatctctagaagctctcaaggttctcgtcctcatggcactcctcgtggttatggttactatgatgatagaggatcccatgataaacatggtgatcgtgagagatctgcatccattggctatagtaatagtggaaggcgaagataccatgatgatagagaatctcatactaggcgcgctgagcgtgagaggtctacatcaaatgaatatactaacaagagaagtcgacatgagcatagctcaagaagctcaagaacatctgcacgatctgattgggatgatggacgctgggaatgggaagatacacctcgtcgagattatcgtgataatcgtcctggctcccggagacaacatccaacacgatctcctatgctcgctgctgcatccccggatgcacgcctggtatctccttggttagacgggaatacaccacgtctagcagcgtccccgtgggataatgtatccccttcacctgctccaatacgtgcttctggttcctcaaaagggtcttcttattcacattccagtggaagatcacaccagcttaccttttcatcaactactagttctaatattattgatgctgatagaagcccctcaaatcctgataggaacagtgagataaccgaggaaatgatgcaggagatggactacaatgctgaccgtgcatggtatgactgcgaagaacacactaccatgtttgatggtgatcattctatgtatcttggagatgataattcctacaaaaagagggaagcagagatgccgaagaagctgactcgtagagatggtagcctgatgacccttgctcaaagcaaaaagatgtcacagatgactgctgataatgctcagtgggaggatagacaattgttgagatctggagctgttaaaggaacagaagtgcaaactgaatttgatgatgaggaggaacggaaaacacaaagccccccttcctggatgggagagttgttttcacaaaacaagcagaacctgtaatgcctctgaaggacccaacatctgatatggctattattgcacgcaaaggttctagtctggttagggaaatccgtgaaaagcaaagcatgaacaaatcaaggcaacgattttgggagcttgctggatctaagcttggcaatatcttgggtgttgagaaaacagctgaacaggttgatgcagatactgctgttgttggtgaccaaggtgagattaattttaaagaagaagcaaagttttcacaacatttgaaggataaagcagaagctgtcagtgattttgcaaaatcaaaatccctttctcaacaaaggcaatatcttcccatatttaccgtccgggatgatctgctacaggttgtgcgtgaaaatcaagtggttgtggttgttggtgaaactggttctgggaagactactcaactgactcagtatctgcatgaggatggatatactaccacaggagttgttggttgtacccaaccaaggcgtgtggctgccatgagtgttgctaagcgagtcagcgaggaaatggagactgatctgggagataaagtcggatatgccatacggtttgaggatgtcactggtccaaacactataataaagtatatgacagatggagtgcttctccgtgaaaccttgaaagatgctgacctcgacaaatatcgtgttgttgtcatggatgaagcacatgaaagatcactcaacactgatgttttgtttggtatactgaagaaggttgttgcacgtagacgggattttaaactaatcgttacatctgcaaccctaaatgctgacaagttctccaagttcttcggaggtgtgcctgtattccatattccgggtcggactttcccagttaacattatgttcagcaaaacaccatgtgaggactatgtggaagctgcagtgaagcaggccatgactatccacataaccagcggccttggtgatatcctaatcttcatgactgggcaggaagaaattgaggctacctgctatgcgcttgctgaacgcatggaacagttaatatcgtcatccaccaagactatccccaagctagagattctgcccatctactcacagttgcctgctgacttgcaagccaagatttttcagaaggctgaagagggcgctcgcaagtgtattgttgctaccaatattgctgagacctcattaacagttgatggtatcttctatgtcattgataccgggtatgggaagatgaaggtgtacaacccgcggatgggtatggacgccctccaggttttcccagtcagccgggcagctgccgaccagcgtgcaggtcgggcaggaagaactggccctggcacatgctacagattgttcacagaatcagcctaccagaatgagatgctccctaaccctgtgccagagatccaaaggactaacctggggaatgtggtgcttttactgaaatccctcagagttgaaaacttgctcgactttgactttatggacccaccgccccaggagaatatcctcaactcaatgtaccaactctgggtgttaggtgcattgaacaatgttggtggccttacagaaattggctggaagatggtggagttcccgttggatccaactctggcaaaaatgcttcttatgggggagcagctagagtgccttgatgaggtgctgaccattgtatccatgctatcagtgccgtcagtcttcttccggccaaaagaccgagcagaggagagtgacgcagcaagggagaaattctttgtcccagagtctgaccacctgacactcctgaacgtgtatcttcagtggaagtcgaatcagtatcgaggcgattggtgcaacgaccacttcctccatgtcaagggtctccgcaaggctcgtgaggtgagatctcagctgctggacatactgaaaaccctgaagatccccctgacatcatgccatatggaatgggacgtggtgaggaaggctatctgctctgcgtacttccacaattccgcccggttgaagggtattggggagtacgtcaactgccggaatgggatgccgtgccacctgcaccccagcagtgcgctatatggccttggctacactcctgactatgtcgtctaccatgagcttgtcctgaccaccaaggagtacatgcagtgcgtcaccgcagttgatccacagtggctagcggagatggggcccatgttcttctctgtgaaggagacagacacctctcttcttgaccacaagaagaggcagaaggaagagaagacggcgatggaggaggagatggagaagctgaggcggcagcaagcagaggccgcgcgcatggagaaggagaaggaacgggagaagagagctaagcagcagcaacaggttgctatgcccggcctgaagaagggtgcgacttatctgaggcccaagagaatgggtctgtagataagacctgatataacttaactgtctccggtgattttgttactaggctgagggaacttgtaatgtgtagcctgctcaagcagcatgtaaaacaacacgtcaatgtgaatgtatacaacatcgacatgtgaaaaaatgaaaagaaaaatagagtgttgtcgacatagagtttgattttttgctgagttagctcttaaaagtatgcagtcattatgtttgatatggtatgtcctcttaatgaaaaatatgattcttgaaggtctatgaattctgcaggcaagctaaattagctcttaaaacatttcaagaaacaacgtgaccctgaatggactcaaccaatcgtccattgctgattagagatgacaatgggtatccgaaacccgatgggtttttatcccattagggtacgagtttgggtcagttt

SEQ ID NO: 27072 - DNA, 4792 bp, Zea Mays
catgcatacattgtgcgttcgcttccgtagtacagggcccccatgtgcgccttgccgccttgcctccactccacacaaccgtgtcagtacggcacccggacaagaggcaaacggcaaacccgatcggccgatccattctccaaccctagccgccggccgccgccacctacccggctaccccacgtttccagtccccactccctccgccggcgcatcctgcttccagcctccatcggcgcatcctgctcctggcctcccgccaccggcgcatccttgctcccggcctcctgccaccggccgcatccccagggccgcgagatcctgctcccgccaccggccgccgcaacctgccagcgtccagggcactcgcccccaccatccgccgccgccccccaccggcagtcgcaacctgccagcgtccagggctccaggcaagggccgccacgtgaccacgtctcgcaggtcagcaggtcccttgcctccttccatggcgcatgctggtaggagcggaaccggcgctcaagcacaaggtgccccgaggccgagcagtcatcaagttccctcaaagacaagtgctgtggctgcaggaggttcctcaagtgcacctacaccgacgagtgctgctgcaaatgcaatgccatcttcaagtgctcaagctccaccatcagaaggtcctgacacccttgctgacaagaaacgggcagcgggcggtggctctgtgtttaagccaccccctcccatggtagctgttgctgtgggttccatcgatgaagatgagaagccaggacctacagagaatgacgcgacaagcctctctacgacaattcgcagtaactcattgcgacgctaccgaggaagtggttccgatgataaaacatctttgaatgtcactgatgaggacgaaagggccccatcacccaaccatcaggatgagccccaccggcaagaggcccacatctctagaagctctcaaggttctcgtcctcatggcactcctcgtggttatggttactatgatgatagaggatcccatgataaacatggtgatcgtgagagatctgcatccattggctatagtaatagtggaaggcgaagataccatgatgatagagaatctcatactaggcgcgctgagcgtgagaggtctacatcaaatgaatatactaacaagagaagtcgacatgagcatagctcaagaagctcaagaacatctgcacgatctgattgggatgatggacgctgggaatgggaagatacacctcgtcgagattatcgtgataatcgtcctggctcccggagacaacatccaacacgatctcctatgctcgctgctgcatccccggatgcacgcctggtatctccttggttagacgggaatacaccacgtctagcagcgtccccgtgggataatgtatccccttcacctgctccaatacgtgcttctggttcctcaaaagggtcttcttattcacattccagtggaagatcacaccagcttaccttttcatcaactactagttctaatattattgatgctgatagaagcccctcaaatcctgataggaacagtgagataaccgaggaaatgatgcaggagatggactacaatgctgaccgtgcatggtatgactgcgaagaacacactaccatgtttgatggtgatcattctatgtatcttggagatgataattcctacaaaaagagggaagcagagatgccgaagaagctgactcgtagagatggtagcctgatgacccttgctcaaagcaaaaagatgtcacagatgactgctgataatgctcagtgggaggatagacaattgttgagatctggagctgttaaaggaacagaagtgcaaactgaatttgatgatgaggaggaacggaaagtaatacttcttgttcatgacacaaagccccccttcctggatgggagagttgttttcacaaaacaagcagaacctgtaatgcctctgaaggacccaacatctgatatggctattattgcacgcaaaggttctagtctggttagggaaatccgtgaaaagcaaagcatgaacaaatcaaggcaacgattttgggagcttgctggatctaagcttggcaatatcttgggtgttgagaaaacagctgaacagatactgctgttgttggtgaccaaggtgagattaattttaaagaagaagcaaagttttcacaacatttgaaggataaagcagaagctgtcagtgattttgcaaaatcaaaatccctttctcaacaaaggcaatatcttcccatatttaccgtccgggatgatctgctacaggttgtgcgtgaaaatcaagtggttgtggttgttggtgaaactggttctgggaagactactcaactgactcagtatctgcatgaggatggatatactaccacaggagttgttggttgtacccaaccaaggcgtgtggctgccatgagtgttgctaagcgagtcagcgaggaaatggagactgatctgggagataaagtcggatatgccatacggtttgaggatgtcactggtccaaacactataataaagtatatgacagatggagtgcttctccgtgaaaccttgaaagatgctgacctcgacaaatatcgtgttgttgtcatggatgaagcacatgaaagatcactcaacactgatgttttgtttggtatactgaagaaggttgttgcacgtagacgggattttaaactaatcgttacatctgcaaccctaaatgctgacaagttctccaagttcttcggaggtgtgcctgtattccatattccgggtcggactttcccagttaacattatgttcagcaaaacaccatgtgaggactatgtggaagctgcagtgaagcaggccatgactatccacataaccagcggccttggtgatatcctaatcttcatgactgggcaggaagaaattgaggctacctgctatgcgcttgctgaacgcatggaacagttaatatcgtcatccaccaagactatccccaagctagagattctgcccatctactcacagttgcctgctgacttgcaagccaagatttttcagaaggctgaagagggcgctcgcaagtgtattgttgctaccaatattgctgagacctcattaacagttgatggtatcttctatgtcattgataccgggtatgggaagatgaaggtgtacaacccgcggatgggtatggacgccctccaggttttcccagtcagccgggcagctgccgaccagcgtgcaggtcgggcaggaagaactggccctggcacatgctacagattgttcacagaatcagcctaccagaatgagatgctccctaaccctgtgccagagatccaaaggactaacctggggaatgtggtgcttttactgaaatccctcagagttgaaaacttgctcgactttgactttatggacccaccgccccaggagaatatcctcaactcaatgtaccaactctgggtgttaggtgcattgaacaatgttggtggccttacagaaattggctggaagatggtggagttcccgttggatccaactctggcaaaaatgcttcttatgggggagcagctagagtgccttgatgaggtgctgaccattgtatccatgctatcagtgccgtcagtcttcttccggccaaaagaccgagcagaggagagtgacgcagcaagggagaaattctttgtcccagagtctgaccacctgacactcctgaacgtgtatcttcagtggaagtcgaatcagtatcgaggcgattggtgcaacgaccacttcctccatgtcaagggtctccgcaaggctcgtgaggtgagatctcagctgctggacatactgaaaaccctgaagatccccctgacatcatgccatatggaatgggacgtggtgaggaaggctatctgctctgcgtacttccacaattccgcccggttgaagggtattggggagtacgtcaactgccggaatgggatgccgtgccacctgcaccccagcagtgcgctatatggccttggctacactcctgactatgtcgtctaccatgagcttgtcctgaccaccaaggagtacatgcagtgcgtcaccgcagttgatccacagtggctagcggagatggggcccatgttcttctctgtgaaggagacagacacctctcttcttgaccacaagaagaggcagaaggaagagaagacggcgatggaggaggagatggagaagctgaggcggcagcaagcagaggccgcgcgcatggagaaggagaaggaacgggagaagagagctaagcagcagcaacaggttgctatgcccggcctgaagaagggtgcgacttatctgaggcccaagagaatgggtctgtagataagacctgatataacttaactgtctccggtgattttgttactaggctgagggaacttgtaatgtgtagcctgctcaagcagcatgtaaaacaacacgtcaatgtgaatgtatacaacatcgacatgtgaaaaaatgaaaagaaaaatagagtgttgtcgacatagagtttgattttttgctgagttagctcttaaaagtatgcagtcattatgtttgatatggtatgtcctcttaatgaaaaatatgattcttgaaggtctatgaattctgcaggcaagctaaattagctcttaaaacatttcaagaaacaacgtgaccctgaatggactcaaccaatcgtccattgctgattagagatgacaatgggtatccgaaacccgatgggtttttatcccattagggtacgagtttgggtcagttt

SEQ ID NO: 27073 - DNA, 4764 bp, Zea Mays
catgcatacattgtgcgttcgcttccgtagtacagggcccccatgtgcgccttgccgccttgcctccactccacacaaccgtgtcagtacggcacccggacaagaggcaaacggcaaacccgatcggccgatccattctccaaccctagccgccggccgccgccacctacccggctaccccacgtttccagtccccactccctccgccggcgcatcctgcttccagcctccatcggcgcatcctgctcctggcctcccgccaccggcgcatccttgctcccggcctcctgccaccggccgcatccccagggccgcgagatcctgctcccgccaccggccgccgcaacctgccagcgtccagggcactcgcccccaccatccgccgccgccccccaccggcagtcgcaacctgccagcgtccagggctccaggcaagggccgccacgtgaccacgtctcgcaggtcagcaggtcccttgcctccttccatggcgcatgctggtaggagcggaaccggcgctcaagcacaaggtgccccgaggccgagcagtcatcaagttccctcaaagacaagtgctgtggctgcaggaggttcctcaagtgcacctacaccgacgagtgctgctgcaaatgcaatgccatcttcaagtgctcaagctccaccatcagaaggtcctgacacccttgctgacaagaaacgggcagcgggcggtggctctgtgtttaagccaccccctcccatggtagctgttgctgtgggttccatcgatgaagatgagaagccaggacctacagagaatgacgcgacaagcctctctacgacaattcgcagtaactcattgcgacgctaccgaggaagtggttccgatgataaaacatctttgaatgtcactgatgaggacgaaagggccccatcacccaaccatcaggatgagccccaccggcaagaggcccacatctctagaagctctcaaggttctcgtcctcatggcactcctcgtggttatggttactatgatgatagaggatcccatgataaacatggtgatcgtgagagatctgcatccattggctatagtaatagtggaaggcgaagataccatgatgatagagaatctcatactaggcgcgctgagcgtgagaggtctacatcaaatgaatatactaacaagagaagtcgacatgagcatagctcaagaagctcaagaacatctgcacgatctgattgggatgatggacgctgggaatgggaagatacacctcgtcgagattatcgtgataatcgtcctggctcccggagacaacatccaacacgatctcctatgctcgctgctgcatccccggatgcacgcctggtatctccttggttagacgggaatacaccacgtctagcagcgtccccgtgggataatgtatccccttcacctgctccaatacgtgcttctggttcctcaaaagggtcttcttattcacattccagtggaagatcacaccagcttaccttttcatcaactactagttctaatgaacagtgagataaccgaggaaatgatgcaggagatggactacaatgctgaccgtgcatggtatgactgcgaagaacacactaccatgtttgatggtgatcattctatgtatcttggagatgataattcctacaaaaagagggaagcagagatgccgaagaagctgactcgtagagatggtagcctgatgacccttgctcaaagcaaaaagatgtcacagatgactgctgataatgctcagtgggaggatagacaattgttgagatctggagctgttaaaggaacagaagtgcaaactgaatttgatgatgaggaggaacggaaagtaatacttcttgttcatgacacaaagccccccttcctggatgggagagttgttttcacaaaacaagcagaacctgtaatgcctctgaaggacccaacatctgatatggctattattgcacgcaaaggttctagtctggttagggaaatccgtgaaaagcaaagcatgaacaaatcaaggcaacgattttgggagcttgctggatctaagcttggcaatatcttgggtgttgagaaaacagctgaacaggttgatgcagatactgctgttgttggtgaccaaggtgagattaattttaaagaagaagcaaagttttcacaacatttgaaggataaagcagaagctgtcagtgattttgcaaaatcaaaatccctttctcaacaaaggcaatatcttcccatatttaccgtccgggatgatctgctacaggttgtgcgtgaaaatcaagtggttgtggttgttggtgaaactggttctgggaagactactcaactgactcagtatctgcatgaggatggatatactaccacaggagttgttggttgtacccaaccaaggcgtgtggctgccatgagtgttgctaagcgagtcagcgaggaaatggagactgatctgggagataaagtcggatatgccatacggtttgaggatgtcactggtccaaacactataataaagtatatgacagatggagtgcttctccgtgaaaccttgaaagatgctgacctcgacaaatatcgtgttgttgtcatggatgaagcacatgaaagatcactcaacactgatgttttgtttggtatactgaagaaggttgttgcacgtagacgggattttaaactaatcgttacatctgcaaccctaaatgctgacaagttctccaagttcttcggaggtgtgcctgtattccatattccgggtcggactttcccagttaacattatgttcagcaaaacaccatgtgaggactatgtggaagctgcagtgaagcaggccatgactatccacataaccagcggccttggtgatatcctaatcttcatgactgggcaggaagaaattgaggctacctgctatgcgcttgctgaacgcatggaacagttaatatcgtcatccaccaagactatccccaagctagagattctgcccatctactcacagttgcctgctgacttgcaagccaagatttttcagaaggctgaagagggcgctcgcaagtgtattgttgctaccaatattgctgagacctcattaacagttgatggtatcttctatgtcattgataccgggtatgggaagatgaaggtgtacaacccgcggatgggtatggacgccctccaggttttcccagtcagccgggcagctgccgaccagcgtgcaggtcgggcaggaagaactggccctggcacatgctacagattgttcacagaatcagcctaccagaatgagatgctccctaaccctgtgccagagatccaaaggactaacctggggaatgtggtgcttttactgaaatccctcagagttgaaaacttgctcgactttgactttatggacccaccgccccaggagaatatcctcaactcaatgtaccaactctgggtgttaggtgcattgaacaatgttggtggccttacagaaattggctggaagatggtggagttcccgttggatccaactctggcaaaaatgcttcttatgggggagcagctagagtgccttgatgaggtgctgaccattgtatccatgctatcagtgccgtcagtcttcttccggccaaaagaccgagcagaggagagtgacgcagcaagggagaaattctttgtcccagagtctgaccacctgacactcctgaacgtgtatcttcagtggaagtcgaatcagtatcgaggcgattggtgcaacgaccacttcctccatgtcaagggtctccgcaaggctcgtgaggtgagatctcagctgctggacatactgaaaaccctgaagatccccctgacatcatgccatatggaatgggacgtggtgaggaaggctatctgctctgcgtacttccacaattccgcccggttgaagggtattggggagtacgtcaactgccggaatgggatgccgtgccacctgcaccccagcagtgcgctatatggccttggctacactcctgactatgtcgtctaccatgagcttgtcctgaccaccaaggagtacatgcagtgcgtcaccgcagttgatccacagtggctagcggagatggggcccatgttcttctctgtgaaggagacagacacctctcttcttgaccacaagaagaggcagaaggaagagaagacggcgatggaggaggagatggagaagctgaggcggcagcaagcagaggccgcgcgcatggagaaggagaaggaacgggagaagagagctaagcagcagcaacaggttgctatgcccggcctgaagaagggtgcgacttatctgaggcccaagagaatgggtctgtagataagacctgatataacttaactgtctccggtgattttgttactaggctgagggaacttgtaatgtgtagcctgctcaagcagcatgtaaaacaacacgtcaatgtgaatgtatacaacatcgacatgtgaaaaaatgaaaagaaaaatagagtgttgtcgacatagagtttgattttttgctgagttagctcttaaaagtatgcagtcattatgtttgatatggtatgtcctcttaatgaaaaatatgattcttgaaggtctatgaattctgcaggcaagctaaattagctcttaaaacatttcaagaaacaacgtgaccctgaatggactcaaccaatcgtccattgctgattagagatgacaatgggtatccgaaacccgatgggtttttatcccattagggtacgagtttgggtcagttt

SEQ ID NO: 27074 - DNA, 2607 bp, Zea Mays
catgcatacattgtgcgttcgcttccgtagtacagggcccccatgtgcgccttgccgccttgcctccactccacacaaccgtgtcagtacggcacccggacaagaggcaaacggcaaacccgatcggccgatccattctccaaccctagccgccggccgccgccacctacccggctaccccacgtttccagtccccactccctccgccggcgcatcctgcttccagcctccatcggcgcatcctgctcctggcctcccgccaccggcgcatccttgctcccggcctcctgccaccggccgcatccccagggccgcgagatcctgctcccgccaccggccgccgcaacctgccagcgtccagggcactcgcccccaccatccgccgccgccccccaccggcagtcgcaacctgccagcgtccagggctccaggcaagggccgccacgtgaccacgtctcgcaggtcagcaggtcccttgcctccttccatggcgcatgctggtaggagcggaaccggcgctcaagcacaaggtgccccgaggccgagcagtcatcaagttccctcaaagacaagtgctgtggctgcaggaggttcctcaagtgcacctacaccgacgagtgctgctgcaaatgcaatgccatcttcaagtgctcaagctccaccatcagaaggtcctgacacccttgctgacaagaaacgggcagcgggcggtggctctgtgtttaagccaccccctcccatggtagctgttgctgtgggttccatcgatgaagatgagaagccaggacctacagagaatgacgcgacaagcctctctacgacaattcgcagtaactcattgcgacgctaccgaggaagtggttccgatgataaaacatctttgaatgtcactgatgaggacgaaagggccccatcacccaaccatcaggatgagccccaccggcaagaggcccacatctctagaagctctcaaggttctcgtcctcatggcactcctcgtggttatggttactatgatgatagaggatcccatgataaacatggtgatcgtgagagatctgcatccattggctatagtaatagtggaaggcgaagataccatgatgatagagaatctcatactaggcgcgctgagcgtgagaggtctacatcaaatgaatatactaacaagagaagtcgacatgagcatagctcaagaagctcaagaacatctgcacgatctgattgggatgatggacgctgggaatgggaagatacacctcgtcgagattatcgtgataatcgtcctggctcccggagacaacatccaacacgatctcctatgctcgctgctgcatccccggatgcacgcctggtatctccttggttagacgggaatacaccacgtctagcagcgtccccgtgggataatgtatccccttcacctgctccaatacgtgcttctggttcctcaaaagggtcttcttattcacattccagtggaagatcacaccagcttaccttttcatcaactactagttctaatattattgatgctgatagaagcccctcaaatcctgataggaacagtgagataaccgaggaaatgatgcaggagatggactacaatgctgaccgtgcatggtatgactgcgaagaacacactaccatgtttgatggtgatcattctatgtatcttggagatgataattcctacaaaaagagggaagcagagatgccgaagaagctgactcgtagagatggtagcctgatgacccttgctcaaagcaaaaagatgtcacagatgactgctgataatgctcagtgggaggatagacaattgttgagatctggagctgttaaaggaacagaagtgcaaactgaatttgatgatgaggaggaacggaaagtaatacttcttgttcatgacacaaagccccccttcctggatgggagagttgttttcacaaaacaagcagaacctgtaatgcctctgaaggacccaacatctgatatggctattattgcacgcaaaggttctagtctggttagggaaatccgtgaaaagcaaagcatgaacaaatcaaggcaacgattttgggagcttgctggatctaagcttggcaatatcttgggtgttgagaaaacagctgaacaggttgatgcagatactgctgttgttggtgaccaaggtgagattaattttaaagaagaagcaaagttttcacaacatttgaaggataaagcagaagctgtcagtgattttgcaaaatcaaaatccctttctcaacaaaggcaatatcttcccatatttaccgtccgggatgatctgctacaggaatgactacatgagctccttacaatctgatgatcggagccgacaacaatcaccaaaggcgctcaacaatcctccactgcctagtcgtctatgtggcgacaaccgccaagagtaacaagaatctgcaactcaaagcgatcactagtgccactagatgcaagctctcaatgcaaatcattagaaccactctccaatctcattatgaatgtatcactatcactagatgtgggtggaagatgttttcttgggcttactaggatgtatactcagtcgggaagccagaatatgcc

SEQ ID NO: 27075 - DNA, 3205 bp, Zea Mays
ctgattctgcggatgataaagtacaagccagatgacatacttgattaatgccatacccagagttaaaagggtttgcagcataattggccttagggttcccatagcttccaatataacctgcaggagacaaatcagcttcacctagtaatcctcgacacctaatatgccagattacaaaacagcttcacctactatgtcagattgctaatcaacttcacctattatgccagatcactaatcagttaacacgacaccacattttacaacaggctggtagtttctcattaacatgatctatgtataggttaggttttagcgtgcagaattttcacatctccaattcacaattgctgggttaggttttagcatatagaattttcacatctccaattcacaatcgctctagaagcaattgtttggagcattatcttgacacttggctagttttgttgtcaaggtcatctcacctaattcatcatatataagtagcagacgttcggaacagaagcaagcgatgtactaaaaaaaataacaacccactcagatcataccttgattgcctgaagacacaatggcccgtgacctcttctacgcgttaccaacctcagctcgaagtttctccacacctgggtttacccctttcagtcaagaaactccccaaaaacacttttctagaactcattgacaagatagctgataaactaaccggatggaaatctgccctcattcacacagcaggccggctgaccttggttaaatcagtgctcacagccattcctatccatcaccttatagtgcttcaatgccctaaatgggtgatcaaggctattgacaaaattcggaggggtttcttgtggaaaggcagaaaagatatcagaggtggtcactgctctattggttgggcaagagtttgcagaccacttagcatgggtggcctgggtatccataaccttgaagttcttggttgggctttaaatctaagatggctttggctcaaaaaaactcaaccggaaaggccctgggcagatttcttgttcaaggttcattccaatgtcaaagctcttttctctgcctcggtccacactactgtaggtgatggctctcgaaccctgttctggactgatcgctggattcatgggcaatcaatatctgtccttgcccccactttggtcagccatattacagtgagaatcaagaaaagcagatctgtgcaagaagccttggtaaacaatagatgggttaatgacatatctggcagcctgtcagctcagattatcttcgacttcttagtaatttgggacctagtgcaaggttttcagttacatccggggattcctgatgtgcatagatggtccccgtctgcatctggagattattccactaaatcggcatatgatcgttttatggctggttcagtctcttttgagccagctactagaatttggaaaagttgggcccccccaaggtgtaaattcttcatttggttggcttctctaaatcgttgctggacagcggatagattaagcagacgaggtcttgagcatcctgttaggtgccccctttgtgaccagcaggaggaaacagttcagcatatcttagtggcttgtgtgtttgccagagacacttggtggcagactttgcataaggtagggctgcatcgcctgactccaggattggcaacaacgaccttccaagactggtggagagaagctgagtgccaggtgccaaaaaaccagaaaagaggatttaattccttagtgattctggtggcttggtggctatggaagcatagaaatgaatgtgtgtttgatggtgcatcccccaacatcagcatcatcatgcagcatattcatgaggatgctgttcggtggggcttggcaggggcaagagatcttaggagattgtggccttaggtgctggtgtggctgggggttgtttggataccccccccccccttttcttttttctgtcttgatatattttttttggcagcttgtactgggtctattttagacctctttctcctttttcttaatatataagatgcgcagttctcctgcgcgttcgataaaaagaagccactgaaataaataaaaaaatctgcatgtcctgtccctgctcataactctgtgcatatcctttcttctcaagctcaataccagatctgcatattggctcataataaataccagacgattgaataaaagcaaaggtattcgttgcaaattcacctctctattactcagcagaaaatcaaaattccactaaatccttttttgaacttaccaatccagtttggagtggagggtgttttgactagtttaacattttgaccaggtgaaaagggaaaaatgacaatgtttactcataatgctgactaggaagaggtaaggcaaagcagggaagagcagataaaacattaataatgatttgtattttttccttgaataggcatgagagttgcgtatcattgcttctcttgtgcatcattaataacgagtttgtttgcatgtggaaaatccttagaccttctatattcaaaagagtagatcacatatttaatagcatgtacctcaaatgttgtgtttcatgtttgatctcctgggtttcagcttgtaatgcagacaccttatgcaaatcttctgccgactgagccaaatcctgtgttaatccctgaacttggcccatgagttcctgcctcattgcaccaaggttttgaatgtccatacgaacttgtgcaagctcagctctcatttcatgtactgcccgaagctccacttccatcttcattgacctctcatagacctattaaaattattttggatgttagactcggtagaattaaaaccgaatatatgaaatgtgatttcggcactactacacatttggaaggtcaagtaatgcctaggaaggacactttaggtatttaggatcaatgctacagagagacaagaatattgatgaagatgttaggcatagaactaaagcagggtggatgaagtgacgtcaagtacctgacattctatatgacaagaggataccacataaactaaaagacaaattttataggatagcgattagcttgctatgttgtatggtgcaaaatgttggcctacaaaaaagacaacatgttcaatatataagtgttgcaaaattgtgtatcttgcgttggatttatgtccatacaagatgggatcgagtccag

SEQ ID NO: 27076 - DNA, 1482 bp, Zea Mays
gacaaattgggtgtctatgtatttacatgctgttataaagcaattcagtactactggctatgagcggtcagattccattgtaattgatgaggttgaactacagagacatcaacagcttgagaaattgtatacttctactcgttctgtaagggatttccagaaggacatagttagagcagctgaaggtttggtgtctattggaaacaaacatattgaagtgggaacaaaattttctgaggactgctatagatatggaagcgaaaataatgcaagcgacgaagcccttagaaaagcagcatcactatacggaggtgctttgagaaatattgagaaagagtatgaagatttcaacagaattttatcttctcagactatagacccattgagagcaatggctatgggtggacccctggaagatgctcgtggtcttgcacagcgctatagcaggatgagacatgaagctgagatcctctctactgaaattgctagaagaaaggcacgggtaagagaagctccaattgctgagcacactacaaagcttcagcaatcagaagctagaatgatagagcacaaagcaagcatggccgtgttagggaaggaagcagcagctgcacttgcagctgtcgagtctcaacagcaacgagtgacccttcagaggctggttggcacggcggaagcagaaaagttattccatctgagattagctgctatacttgatgacgttgaggcagagatgtcctctgagaagcaaaggagagaatctgcaccacctatcatatcttcacataagcgtgctgagaaagctcagtacttccttgctgaggtaatgcataatttcaatggaaccacggagaaggaactgagcttaattgttggcgattatgttgttgttcgtcagattgctcccaacggctgggcggaaggagaatgccgagggaaggctggctggtttccggctgcctatgttgagaggcgcgagaatatccccccgaataaagttttccctcaagtataagatcataagaggggtcatctgtttccactgataagcagtttggtttggcattgaggagctgcaaggctgtatctaacttctgattggtttgatgctccgtatggcgtatcttgtgcatcctatgttcttgtggtggtctagacttggaataagatatgtcggcacgtgctctgcgcctgtgcctgcgcgcacattgatgaagatgtcgctttgcatgtgtccgcagtgtgctactgcttgcggcagcgtaggtcatgttgaatgagctttcctttactgacagatttcgagtgtaaattggttcttgcacttttttttcgttagggtgtatcagtagttctgtacaatatgtttttaatgagaccattcggccatcagagctttgatctgtctcctaaccgcaggattttttttttcagaacgcttatttcacattttagctgtcagaagttgatttttttttcttt

SEQ ID NO: 27077 - DNA, 963 bp, Zea Mays
gtcgacggaatcggtgctccggcagaccggcttcattcctaagccgcgtaggtaacacctcctcctcacgacctcaccatagtcggatctgttgtaggcagtagccagtagcagtaggccagtagctaacatctccgcgtcacttttgtttgtaggtcgtgaggaaccgacgcgtcggcgatggaggacggtggtggtgacattagtcgctccatcaaccacgatttgaggctgctcagagaacctggagtccctgagactactaccactaccgaccatgctagtggcagtagtagtagtgttgcagttcctatcgacctcgccgtcggggaatctggcgctggccaaggcgcagaagctcctgctgaggttggtcagggctccagcgaccgcaagaggtgtaacacctcaaagttaaactacagaggaccactcctacaacatctattactggcagcaagctctggtgcatgcataagttctttagactctgaactgtcctcctaccttgatagtgacactctttagaagtttgaggatgatttcaacctcttaaactggtggcatgagcataaactaacatttcctgttctctcaatattagctagagatgttatttcagttcctgtttcgacagtatcttctgagtctgctttcagtctttgtggcaggatcatcgaggaacgacgacgacgattagccccagagatggttgagatgctcctttgcatcaaggactgggagctaggtgatgcaagagctcaacactctgcccaggacaaagaattagaagatgcattcgaaggaatgtatcttgatgaggtggatgaacttaagacttagggtattaggactgtatctgtaattctctatcttcatgtttcatccatgtaatatgtagtcattattcatcaacagcgaacattatatatgagctgggactgtactcttttcctttctagg

SEQ ID NO: 27078 - DNA, 1791 bp, Zea Mays
ctgctttctataaaaatggctacagcttcttgttactctttaaaggaagctattctttttagaccatttagaagggctactcaagagccggagctagtttggagccctctcaaacaggcccgtccgaatccaaaccaagtttttagtgcagctcggcgcggaggacgtggcgctgatcgagtacgcgaagctgacggggcgtcccttccgggtgttcagcctggacacggggcggctcaacccggagacgtaccagctcttcgacagggtggagaagcactacggcatccgcatcgagtacatgttcccggacgccagcgaggtgcaggagctggtgcggaccaagggcctcttctccttctacgaggacggccaccaggagtgctgccgcgtgcgcaaggtgcggcccctgcgcagggcgctcagggggctcagggcgtggatcaccggccagaggaaggaccagtcccccggcaccagggccagcatccctctggtccaggttgacccttccttcgaaggcctggacggcggggctggtagcttggtcaagtggaaccccgtggccaacgtcgacggcaaggacatctggactttcctgcggaccatggacgtccctgtcaacgccctgcatgctcagggctacgtgtccatcgggtgcgagccgtgcaccaggcctgtcctgccggggcagcacgagcgggaaggccggtggtggtgggaggacgccaaggccaaggagtgcggcctccacaagggcaacatcgacaaggacggccaggcggcggcggcggcggcggcccccaggactgccaacggcaacggctcggcgggcgccccggacatcttcgagagccccgccgtcgtgtccctcacccgcgccggggtcgagaacctgctgcgcctggagagccgcgccgagccgtggctcgtggtgctgtacgcgccctggtgcccgttctgccaggccatggaggcctcctacgtggagctggccgagaggctggcggggtccggcggcgtgaaggtggcccggttccgcgccgacggcgagcagaagccgttcgcgcaggccgagctgcagctgcagagcttccccaccgtgctcctgttccccagccgcaccgcccggcccatcaagtacccgtcggagaagagggacgtcgactcgctcctcgccttcgtcaacagcctccggtgaggcccgccagtgagcgagaaccatcgttctctgtcagtatgtactgtattacatgttggtatccatctaggtgcgctgtacgtagagagggaggcggagggaactgggatgctagaaaaaacagatgcaggtgttgcttgtaactgcagaatgatggtaggtatgcatgaagtctgaggtcctgtgttatttggcagctgagggagagatttgtgcgtgcttgtagttgtagctagtggcgatggagtattctaaggaaaatcaaataagaatcgaagttttgagagttcttgtttgttcatgttggctgtcgactatatagacagtagaaagcgaagatttttatttataccttgtgcgtcgcttcatgttactagcacatagtttttaattgtcaactatattgttatgaatcaatactgagagcacctataggggtgaataagtgatcctataagaattcaacactaaatatcccaacttggttatgagtgtttagaaagattgaaacaaagttgttaaagcaagaactcttcacttgattcttccttaagagtgagtattgaacttggaacaataacacaagtgag

SEQ ID NO: 27079 - DNA, 1809 bp, Zea Mays
acgccacaggaaggggaaaaaaaacgcaggtgcccaaaacacgttcgccccagagaattgaaaacttaccactgcgaattcaattcgaaagcctcagacccagagagcttcccatggcatccgctaccacctccatctcgtcgcaccctgccgccctccgcgacgtcaaagcggcgcggaggacgtggcgctgatcgagtacgcgaagctgacggggcgtcccttccgggtgttcagcctggacacggggcggctcaacccggagacgtaccagctcttcgacagggtggagaagcactacggcatccgcatcgagtacatgttcccggacgccagcgaggtgcaggagctggtgcggaccaagggcctcttctccttctacgaggacggccaccaggagtgctgccgcgtgcgcaaggtgcggcccctgcgcagggcgctcagggggctcagggcgtggatcaccggccagaggaaggaccagtcccccggcaccagggccagcatccctctggtccaggttgacccttccttcgaaggcctggacggcggggctggtagcttggtcaagtggaaccccgtggccaacgtcgacggcaaggacatctggactttcctgcggaccatggacgtccctgtcaacgccctgcatgctcagggctacgtgtccatcgggtgcgagccgtgcaccaggcctgtcctgccggggcagcacgagcgggaaggccggtggtggtgggaggacgccaaggccaaggagtgcggcctccacaagggcaacatcgacaaggacggccaggcggcggcggcggcggcggcccccaggactgccaacggcaacggctcggcgggcgccccggacatcttcgagagccccgccgtcgtgtccctcacccgcgccggggtcgagaacctgctgcgcctggagagccgcgccgagccgtggctcgtggtgctgtacgcgccctggtgcccgttctgccaggccatggaggcctcctacgtggagctggccgagaggctggcggggtccggcggcgtgaaggtggcccggttccgcgccgacggcgagcagaagccgttcgcgcaggccgagctgcagctgcagagcttccccaccgtgctcctgttccccagccgcaccgcccggcccatcaagtacccgtcggagaagagggacgtcgactcgctcctcgccttcgtcaacagcctccggtgaggcccgccagtgagcgagaaccatcgttctctgtcagtatgtactgtattacatgttggtatccatctaggtgcgctgtacgtagagagggaggcggagggaactgggatgctagaaaaaacagatgcaggtgttgcttgtaactgcagaatgatggtaggtatgcatgaagtctgaggtcctgtgttatttggcagctgagggagagatttgtgcgtgcttgtagttgtagctagtggcgatggagtattctaaggaaaatcaaataagaatcgaagttttgagagttcttgtttgttcatgttggctgtcgactatatagacagtagaaagcgaagatttttatttataccttgtgcgtcgcttcatgttactagcacatagtttttaattgtcaactatattgttatgaatcaatactgagagcacctataggggtgaataagtgatcctataagaattcaacactaaatatcccaacttggttatgagtgtttagaaagattgaaacaaagttgttaaagcaagaactcttcacttgattcttccttaagagtgagtattgaacttggaacaataacacaagtgag

SEQ ID NO: 27080 - DNA, 84 bp, Zea Mays
ctgcctgctgccgtccgcgtcttggcctccttggggtttggttcgcctgccttctctctctctctcttgctcgccttttttttt

SEQ ID NO: 27081 - DNA, 561 bp, Zea Mays
gtgaataagagtttatcagcaaagtcatgcctggcgttgctcatcattaatgacatcccagcttcaaggctagaatcaaatgcaaggacaaacgaatcagtgcatcgcaacgagagaattggcaaccttttttagcttcagcatgccatttgaactgaatagggcacagacctcagttcctggcttcctgctactacatacatcatggacaaaagaagcaatttcattcagaagacgggggtaaaggccactccccactgccctactctaacaatctattcaacgcaaaaccatttacaaccaacatacatttcgatacgggcattacacaggggtctacactaccaaatgaaagcctaaattctggtgccaaaatttccaccgaagaaagctgtattgtggtcagagaggttcctccaaagtattctgatcatgggcattgctagtatgctacctacatgtatgccacccaaactcccaaagcatttctccgaatgctgggatttgaactcctatcacaatgcccccagtagacatgatctcatttcaagcagtgtccat

SEQ ID NO: 27082 - DNA, 2092 bp, Zea Mays
gagagctatctcactaagtcaccatgtcacggatgaatatggttaactatttggttcactataattctaaacatggaccttaacacaactgaattccaatagtcattttattttgagagacaaattttcttttgtttgttttcatttaaaagttccatttgtggtattctgatgccaatttcgcatttacaattttttgctggagtagaatttactaggagctgcagaagcaaagatatcctcaaaacctcctagagctttgccaagagttgctatgatgaggtcatcaactaccacagctgtcacctctggggtttcagacaaaagaagcagcactgggggtgctgccaacaggcaggcagctggtaaaactgccagtacttcagctggcctgagatctggcgggggtacaaagtctagttcaatctcaaaatcaggtcccttcacatcagcagcaacttctcatggtgtgtcaatggacactaagccggaagcaaaaaccaaatcagcaaccttaagcaacaaaaataggactgcccagagggtccctgttcatccgccatcaaaatctggtatcagcaaaactattccctcaagatcatcagggaacacgattccagctaagggccatgctgaccgtgcatcaccaagcatttcacctagcagctccatggacagcatgagctctgtcatatctggggcttcaactgcttccaccgtagggaggatgagccatacatctgagagtttaaatggactgtccccctccctcaggaagagcaatgactgccctccaactccaaagcttaggcctcctgttgtcacagagggtcattcatctggaacagcagcacctggagttaatttaaaagctacttctgaaatgaccaaccagagaaaaggttttaagccatctgggcttcggaggcccacacccaagattggttattttgatgctgagaaatacattgaccaaaacatcggtgcacagctacaaccacaaccttcaaaggtccagtgtctacctgacacaacacaatttcagagcatgaatgtggatgccgcaccagctacctacgtccaacaggattcaaaactgacagcaacacctcatgaggaaagttgtgcttccgaaagtaaggtcgtgaagctgctgcctcttaaggtggaagtagagccttttaaggtggcggaaccatgcacgcaccagactgatccagttgtggtcagacccgaagcagtgcaacagcaatccatggagatccagtgcttgctatatgccacaccaaactctcagcaaacctttggtcaacaagtattagaacctatagtagcacctcatgaggttagtgcttgcaaaagtaacacagtaaagacgcctttggaaactgtgcaaatggaagtagaagcgcctctagaagcagtgcaattggaagcagaagcttttaaggtggacaaacctgaagcgtgcagacacctggtcagtccaattgtggtgaaactcgaagacaaattctgtgatcaaaatgctagagctcttgtcgctgaacgtgaagattgcacgctcatgactgaggcagtggtggcactggctacagactattcaaaagagaacattccggttttgcatgagaatatacaagctaatgtggatgcgagttcattagttgaggtgctgacccagaagttatcctccatttctcttggggaggataactctaacgtggctctcaggtcctgcagtgaatgaggtttggatggtatgctggttgttattttattaccctcttgttatctgtaggcaaccgtaccgcagctgacgagtccaattcccttaacctgcttgtggtgtaaaatccttgtgcacagagctttatagaactaagattttctattgtatgcatgaaaacctcatctttgtctattgccggtttgcaagtaaagtgtgtttgtttggtaattatattttactttgtttagtaattcacaatggatacctagagagcctgtttgtaactgctatacgagtgggtgattttttgtgggagagggtctaatggtatatgttttgatgtcggtacatatatatgcc

SEQ ID NO: 27083 - DNA, 2766 bp, Zea Mays
gtcgctcgcagtcgcaggctcgcaagtcgcagcggccgcaacgccccaacctggcctcctcccaacatttttatagccagccgcccctcgccgcctatttccaacgtctctccagctcgtctcgcattcccttcgcctcctctccgatcctgacaactgttggcgatctagggttttcccaccggtctccggtgactccgaccggccgcaggcctccgcgctgcacccatggaggggctcaccctcatcgacgtctccgtcgaggacgatcttcttttcgacatcgcctcaccgccccacgcagggtctctggtgggcgccgtggcgacttcctctggcgcttttccgtcggcggcgggacgggctccggatccggacagtgtgatggaggagcaggcgctccccgagcggacggactccccggaacagcggaaggccaagaagggggtgaacctgcgcaagagcttggcttgggacagcgctttttttacaagtgaaggtgttctcgacactgaggaattggccattgtaaacagcaccttccgtaagacgcagggttccaggttgcctggaatcgtggaggaaatgagtagatcgggggaatcagcaacctcaactctggaaagtgaatcctgggtgatggagagcgttgagactgaactatttgacaatgtccgtgcttcgatccagaggtctcttggcaaacctgataaagttccaggtcggcctgttgctggctcaaaccacccaaaggccacagcaaatgtacctcgtgttgcagttgcagctagaaaaggtgttgatcggatgccccagccaaagataagggcccctgtttcaacaagccaaggagccggtgtcagacaaagggcccaagtcaccaccaaagagcctgtggctgcacgagttaatttactaggagctgcagaagcaaagatatcctcaaaacctcctagagctttgccaagagttgctatgatgaggtcatcaactaccacagctgtcacctctggggtttcagacaaaagaagcagcactgggggtgctgccaacaggcaggcagctggtaaaactgccagtacttcagctggcctgagatctggcgggggtacaaagtctagttcaatctcaaaatcaggtcccttcacatcagcagcaacttctcatggtgtgtcaatggacactaagccggaagcaaaaaccaaatcagcaaccttaagcaacaaaaataggactgcccagagggtccctgttcatccgccatcaaaatctggtatcagcaaaactattccctcaagatcatcagggaacacgattccagctaagggccatgctgaccgtgcatcaccaagcatttcacctagcagctccatggacagcatgagctctgtcatatctggggcttcaactgcttccaccgtagggaggatgagccatacatctgagagtttaaatggactgtccccctccctcaggaagagcaatgactgccctccaactccaaagcttaggcctcctgttgtcacagagggtcattcatctggaacagcagcacctggagttaatttaaaagctacttctgaaatgaccaaccagagaaaaggttttaagccatctgggcttcggaggcccacacccaagattggttattttgatgctgagaaatacattgaccaaaacatcggtgcacagctacaaccacaaccttcaaaggtccagtgtctacctgacacaacacaatttcagagcatgaatgtggatgccgcaccagctacctacgtccaacaggattcaaaactgacagcaacacctcatgaggaaagttgtgcttccgaaagtaaggtcgtgaagctgctgcctcttaaggtggaagtagagccttttaaggtggcggaaccatgcacgcaccagactgatccagttgtggtcagacccgaagcagtgcaacagcaatccatggagatccagtgcttgctatatgccacaccaaactctcagcaaacctttggtcaacaagtattagaacctatagtagcacctcatgaggttagtgcttgcaaaagtaacacagtaaagacgcctttggaaactgtgcaaatggaagtagaagcgcctctagaagcagtgcaattggaagcagaagcttttaaggtggacaaacctgaagcgtgcagacacctggacaaattctgtgatcaaaatgctagagctcttgtcgctgaacgtgaagattgcacgctcatgactgaggcagtggtggcactggctacagactattcaaaagagaacattccggttttgcatgagaatatacaagctaatgtggatgcgagttcattagttgaggtgctgacccagaagttatcctccatttctcttggggaggataactctaacgtggctctcaggtcctgcagtgaatgaggtttggatggtatgctggttgttattttattaccctcttgttatctgtaggcaaccgtaccgcagctgacgagtccaattcccttaacctgcttgtggtgtaaaatccttgtgcacagagctttatagaactaagattttctattgtatgcatgaaaacctcatctttgtctattgccggtttgcaagtaaagtgtgtttgtttggtaattatattttactttgtttagtaattcacaatggatacctagagagcctgtttgtaactgctatacgagtgggtgattttttgtgggagagggtctaatggtatatgttttgatgtcggtacatatatatgcc

SEQ ID NO: 27084 - DNA, 2813 bp, Zea Mays
ctgccgcagcagcaggacgcgtcgctcgcagtcgcaggctcgcaagtcgcagcggccgcaacgccccaacctggcctcctcccaacatttttatagccagccgcccctcgccgcctatttccaacgtctctccagctcgtctcgcattcccttcgcctcctctccgatcctgacaactgttggcgatctagggttttcccaccggtctccggtgactccgaccggccgcaggcctccgcgctgcacccatggaggggctcaccctcatcgacgtctccgtcgaggacgatcttcttttcgacatcgcctcaccgccccacgcagggtctctggtgggcgccgtggcgacttcctctggcgcttttccgtcggcggcgggacgggctccggatccggacagtgtgatggaggagcaggcgctccccgagcggacggactccccggaacagcggaaggccaagaagggggtgaacctgcgcaagagcttggcttgggacagcgctttttttacaagtgaaggtgttctcgacactgaggaattggccattgtaaacagcaccttccgtaagacgcagggttccaggttgcctggaatcgtggaggaaatgagtagatcgggggaatcagcaacctcaactctggaaagtgaatcctgggtgatggagagcgttgagactgaactatttgacaatgtccgtgcttcgatccagaggtctcttggcaaacctgataaagttccaggtcggcctgttgctggctcaaaccacccaaaggccacagcaaatgtacctcgtgttgcagttgcagctagaaaaggtgttgatcggatgccccagccaaagataagggcccctgtttcaacaagccaaggagccggtgtcagacaaagggcccaagtcaccaccaaagagcctgtggctgcacgagttaatttactaggagctgcagaagcaaagatatcctcaaaacctcctagagctttgccaagagttgctatgatgaggtcatcaactaccacagctgtcacctctggggtttcagacaaaagaagcagcactgggggtgctgccaacaggcaggcagctggtaaaactgccagtacttcagctggcctgagatctggcgggggtacaaagtctagttcaatctcaaaatcaggtcccttcacatcagcagcaacttctcatggtgtgtcaatggacactaagccggaagcaaaaaccaaatcagcaaccttaagcaacaaaaataggactgcccagagggtccctgttcatccgccatcaaaatctggtatcagcaaaactattccctcaagatcatcagggaacacgattccagctaagggccatgctgaccgtgcatcaccaagcatttcacctagcagctccatggacagcatgagctctgtcatatctggggcttcaactgcttccaccgtagggaggatgagccatacatctgagagtttaaatggactgtccccctccctcaggaagagcaatgactgccctccaactccaaagcttaggcctcctgttgtcacagagggtcattcatctggaacagcagcacctggagttaatttaaaagctacttctgaaatgaccaaccagagaaaaggttttaagccatctgggcttcggaggcccacacccaagattggttattttgatgctgagaaatacattgaccaaaacatcggtgcacagctacaaccacaaccttcaaaggtccagtgtctacctgacacaacacaatttcagagcatgaatgtggatgccgcaccagctacctacgtccaacaggattcaaaactgacagcaacacctcatgaggaaagttgtgcttccgaaagtaaggtcgtgaagctgctgcctcttaaggtggaagtagagccttttaaggtggcggaaccatgcacgcaccagactgatccagttgtggtcagacccgaagcagtgcaacagcaatccatggagatccagtgcttgctatatgccacaccaaactctcagcaaacctttggtcaacaagtattagaacctatagtagcacctcatgaggttagtgcttgcaaaagtaacacagtaaagacgcctttggaaactgtgcaaatggaagtagaagcgcctctagaagcagtgcaattggaagcagaagcttttaaggtggacaaacctgaagcgtgcagacacctggtcagtccaattgtggtgaaactcgaagacaaattctgtgatcaaaatgctagagctcttgtcgctgaacgtgaagattgcacgctcatgactgaggcagtggtggcactggctacagactattcaaaagagaacattccggttttgcatgagaatatacaagctaatgtggatgcgagttcattagttgaggtgctgacccagaagttatcctccatttctcttggggaggataactctaacgtggctctcaggtcctgcagtgaatgaggtttggatggtatgctggttgttattttattaccctcttgttatctgtaggcaaccgtaccgcagctgacgagtccaattcccttaacctgcttgtggtgtaaaatccttgtgcacagagctttatagaactaagattttctattgtatgcatgaaaacctcatctttgtctattgccggtttgcaagtaaagtgtgtttgtttggtaattatattttactttgtttagtaattcacaatggatacctagagagcctgtttgtaactgctatacgagtgggtgattttttgtgggagagggtctaatggtatatgttttgatgtcggtacatatatatgcc

SEQ ID NO: 27085 - DNA, 1054 bp, Zea Mays
atcctctcgaccgattttcccccaaaaatagctgccggagctcgcgataattcggttgtcgatggccaggacctctttcaaaatggagcacgacctcgagaaaaggcagtccgaatctgccaggatcagggataagtatcccgacagaattcctgtgattgttgagaaagctggcaaaactgatgtccccgagattgataagaagaagtaccttgtccctgctgatctcactgtcggccagtttgtctatgtggtgaggaagagaatcaagctgagcccagagaaggccatctttgtctttgtgaagaacaccttgccaccaactgcctctttgatgtctgcaatctacgaagagaacaaggacgaggatggcttcctttacatgacctacagtggtgaaaacaccttcggctctgcctagagcaatcgcccctgccactgtaaataaacgagcatgatggggctgctgctattgtaaacctgtgtatatacctcagtctctagtatgctgctgccggattgcttcaatggcttcaatgacacccttagctttcaactgtttggatttctcctgtgacattgaattccttcggtatcgaaacatttgatcatttcactattacttcacttaccttatctcatcagatgcgtgattgctgtttatctgtgctcatcgtgtttgttttaagctgcaactgcaatctgctgacggccaagctgatgctatatttttcttgatggaatcgatagattcccgcagtagataaaggggtgtttggtttaagaaattaatccatccaaaatgaggtgatgcatcgtgagttagttccttaaatttggtaggatgactcatactcagtccttatatcagtactatctaactatgaaatcaaataaaaaagtgaggaataagaacagtactaactacgaaaccaaataaaaaaatgaggaagtccttatatcagtactatctaactatgaaatcaaataaaaaagtgaggaataagaacagtactaactacgaaaccaaataaaaaaaatgaggaataagaaa

SEQ ID NO: 27086 - DNA, 2438 bp, Zea Mays
cttaccttccggtaaagcaatgcaactacaacgagctgacagcaaagcaaagcttgagaggcttttctcaaaaacgcgccgtcgccgtttcttccccctttttctttgagaaaattcgcccgcgagatctttagtttcagaccccgtgtggattagtcgctgtcacgatcgaggcggggcgccaattgcggtggccaccacctccaatccactccccgcggtggcctcgccgagctgttcttgctccgtcctccctccaactccaagatttgtttcgcacccgattcctgagcttccgcggcgcttcttgctgaaaagaaagctccgagttcttcagttctggatcgatagagaggcggttcctttgcgggctctgagatccagtgtcgaataccgtgtcttgaatcatggccttgtgaattccaatataaacgttcctgcttggcttgctttgttttgacacaagcgttgtactccttggggttttccctccaggttcagctctcgctcttgatttgtctcatcgacgcatcagttgggctgcaggcttagagctggaaggaataatttgactagagaaatggggcagtgttgtagcagagctcccgccccggactctggacggggaggcaccaatggttatggctattctaaccaggcaaagccagcgcaaacaccttcgagttacaaccctcctcagcagccggccgaggtgaggtacacgccgccggcgacgaaccctccggtagtcccacctgtgcctgtgccaccgaagcccacggcggacacgattcttggcaaacagtacgaggacgtgcgctctgtctactccctcggaaaggagcttggccggggccagttcggggtgacatacctctgcacagaggttgcctctggtaagcagtacgcctgcaagtccatctccaagcgcaagcttaccagcaaggcagacagggaggacattcgaagagagatccagatcatgcagcatctgtctggacagccaaacattgttgagttccggggagcatacgaggacaagagcaatgtccatgtggtgatggagctctgcgcaggtggggagctcttcgatcgcatcattgccaaggggcactacacagagcgtgcagctgctacaatctgcagagcagttgtgaatgttgtcaacatttgccacttcatgggtgtgatgcaccgtgacctgaaaccggagaacttcttgcttgcgagcaaggaggagaatgcaatgctcaaggccactgattttgggctttccgtcttcatcgaagaaggaaagatgtacagggacatcgttggaagtgcttattatgttgcgcctgaagtccttaagcggagctatggaaaagagatagatgtttggagcgcaggtgttattttgtacattcttctcagtggtgtgcctccattttgggctgaaactgaaaaggggatatttgatgctattctgcatgaggagattgactttgaaagtcaaccttggccatcaatttctgagagtgctaaagacttggttagaaagatgttgacacgagatccaaagaaaagactgacttcagctcaagttcttcaacattcatggctcagagaaggtggaggtgcatctgataagcctatcgacagtgctgttctttctagaatgaagcagttcagagcaatgaataagctgaaaaagatggccctaaaggttattgcctcaaaccttaacgaggaagagatcaaggggctaaagcaaatgttcatgaacatggacacagacaatagtggcacaatcacgtatgaagaactcaaagcaggactagccaaacttggatcaaagctgtcggaagctgaagtaaagcagttgatggaggctgctgatgttgatgggaatggatccatcgactatgttgagttcatcactgccacaatgcatagacacaagctcgaaagagacgagtatttgtttaaggcattccagtacttcgataaagataacagcggtttcatcacaagagatgagctggagtctgctttgatcgagcatgagatgggtgacacgagtacaataaaggagatcatatcagaagtggacacagacaatgatgggaggattaactatgaggagttctgcgcaatgatgagaggagggatgcagcagccaatgaggctcaagtagcctgttcccttagtagaaatggtgtaccgttagttactgttcttcactctttttcccccttccttacaatgggcgtcgctcttttgcattgtcaagagatgattgtgtatatctttttcttttgctcgtgtttgttgcattgtagtatcctgaacgtcccttccttttgtaagtttgtttatacacaagcacatccaatagaaagtgcaatttgtgtctcactctgtactagttgtgtaattggtgataggaaaaaggtcta

SEQ ID NO: 27087 - DNA, 2632 bp, Zea Mays
aaattccctatgaggtagtcctgcacacatcataagaagaagatggagtacatatcccctgagagaaatctggaggggacttgtggagatcctgggccgttatttgccgaccaaggtggcagcttgttggaccacttgggttatcaagggggaggaattccacaacatgagtctccaacactggatcatggacttttggttgatccagctggtgcaattccgtatttatctacagattctccgcccttcatgaatgatcaaatcacttgcaatgttataaaatctgcttcagctagtccagaatcttgtacaaaacaacctcaagaacctcttaatgtagaatctgatgtacagaatgacgcagctgaacaaaatgttcacaatagtaactctgaagaacagatcacttctctgggctgtgatgtacagcagaacacagaagtaattgatgaactgttgcctccaaagcttcctgaaagcagtggtaatgatatatcaaactttcaaccggaaactacatattctgatgcctaccatggtgactctttgttaactgaaaatagttgtaatagttatcagcttaacaatagtggtgctcctgctgctgatattccaaactctcctgcacttcagatggaaaatgaggagatgggaaagttacatgagacttctcacaatgaaaacagtgggtcagaggatgatcaaatgaatggtaggaagccttgccccattagtggtcgagacaatgagaagtttaacacttcagctgtacctccctcttgggaacagacaaaacaaaaaaatcctggtaccagaaatggaagttcaactccagacgatcaatttgattctcctccagacaggtttgcaagattggaaagggacacaccatctccagatgggagagtatcccctgaaaggtttgcaagactggaaagggataccccacctccagacggggatatatctcgtccaggtgaaagttcacatgtccattctgagacgatggagatggagccagaatatcgcgccaatgatgataccccacctccagacgggaggatgtctcctccagttgaaagttcacatgtccattctaagaagatggagtcacaacaccatgccaaagatgttggtgagttagctcgttttgaaagcccacaggtaagacatcggtcccgatcttctgaaaaacatgaccccagccgcaaaagaacctcttcaggggagttgtctccacatgcgcgtcagaattctcctgtagaaaggaaaagacggagagagtctcgccatggtgatgggtcacctcgacagagatctgcatctccccgaagaagatctacaccccctcgaagaagatctatatcccctcgaagatcctcacacaagaggagggaatcaccaagaaggggagactcacctaggaggaggcactcacctaggaggagggagtcaccaaggaagagagactcaccaaggaggagagactcaccaaggaggagggattcaccaaagaggaggagggactccccaaggaggagggataggtcaaaatcaaggtcaccttcaagaaaacatgacacttctagacataaaaaagaacatgacagatctcggtccaggtctccccactcaagggatcatcacagacgatctccaaggcattcaccaagacgcagatcacccccagccagtcatcgccatcattcaccaagaagacattggtcaccacctgccaacaggaagactggattgggtaagcctggaaagaatctctttattgcaggatttagctatgccaccactgagcgagatttggagaagaaattttgcaagtttggacgtgtaacaagtgcacgtgttgttcgtgataaacgaactggagattcccgtggctttggattcttatccttggataaggatgaggatgctgatgcagcaatccgtgcttgtgacgagactgagtggaatggaaggatcattcttgtggagaagtcaaaagcacctgcatggtgaatcttccgctttgggggcgcacacgccattgttcgagagggatttcattgcttcacctttcacagattttaccattcagaaaaaaagaaactaccggtatgacatactcggtacatgtcaaagttcacccgaacctggcttttgatgctgtactaggaggccctgctgctgataagagggacttacgacttagtggtacttttagtgtctgcaacctctacacgtgaaatgtgatacgtgcctgttcgtgagctgtcagttctcttcttcaccttcatctcgcgcccactgaatactgatggcatgaacggattccgggagactcaagctttatggtgttgttgcgactcaagggttatgttagcagttcaataatctgcatattagcttttcaatgttgtgcatcctctgaatgagggtttggaaaatgtcctatatagtttgtgttttggattccagatgttgtttaattatggtcacgacacgatacctatgccccatctgttgactgttggtgatgttttttttcctgatgacatgtcttttcatcctgtgttcttgaatctagagttgtctgtctattggcgcaatattagtgagatggaaactgagcgtg

SEQ ID NO: 27088 - DNA, 2652 bp, Zea Mays
ctgtttctgggaagaggctaggggctacttcataggcattgtcatgtcgaagcgtgggaacgatggagtacatatcccctgagagaaatctggaggggacttgtggagatcctgggccgttatttgccgaccaaggtggcagcttgttggaccacttgggttatcaagggggaggaattccacaacatgagtctccaacactggatcatggacttttggttgatccagctggtgcaattccgtatttatctacagattctccgcccttcatgaatgatcaaatcacttgcaatgttataaaatctgcttcagctagtccagaatcttgtacaaaacaacctcaagaacctcttaatgtagaatctgatgtacagaatgacgcagctgaacaaaatgttcacaatagtaactctgaagaacagatcacttctctgggctgtgatgtacagcagaacacagaagtaattgatgaactgttgcctccaaagcttcctgaaagcagtggtaatgatatatcaaactttcaaccggaaactacatattctgatgcctaccatggtgactctttgttaactgaaaatagttgtaatagttatcagcttaacaatagtggtgctcctgctgctgatattccaaactctcctgcacttcagatggaaaatgaggagatgggaaagttacatgagacttctcacaatgaaaacagtgggtcagaggatgatcaaatgaatggtaggaagccttgccccattagtggtcgagacaatgagaagtttaacacttcagctgtacctccctcttgggaacagacaaaacaaaaaaatcctggtaccagaaatggaagttcaactccagacgatcaatttgattctcctccagacaggtttgcaagattggaaagggacacaccatctccagatgggagagtatcccctgaaaggtttgcaagactggaaagggataccccacctccagacggggatatatctcgtccaggtgaaagttcacatgtccattctgagacgatggagatggagccagaatatcgcgccaatgatgataccccacctccagacgggaggatgtctcctccagttgaaagttcacatgtccattctaagaagatggagtcacaacaccatgccaaagatgttggtgagttagctcgttttgaaagcccacaggtaagacatcggtcccgatcttctgaaaaacatgaccccagccgcaaaagaacctcttcaggggagttgtctccacatgcgcgtcagaattctcctgtagaaaggaaaagacggagagagtctcgccatggtgatgggtcacctcgacagagatctgcatctccccgaagaagatctacaccccctcgaagaagatctatatcccctcgaagatcctcacacaagaggagggaatcaccaagaaggggagactcacctaggaggaggcactcacctaggaggagggagtcaccaaggaagagagactcaccaaggaggagagactcaccaaggaggagggattcaccaaagaggaggagggactccccaaggaggagggataggtcaaaatcaaggtcaccttcaagaaaacatgacacttctagacataaaaaagaacatgacagatctcggtccaggtctccccactcaagggatcatcacagacgatctccaaggcattcaccaagacgcagatcacccccagccagtcatcgccatcattcaccaagaagacattggtcaccacctgccaacaggaagactggattgggtaagcctggaaagaatctctttattgcaggatttagctatgccaccactgagcgagatttggagaagaaattttgcaagtttggacgtgtaacaagtgcacgtgttgttcgtgataaacgaactggagattcccgtggctttggattcttatccttggataaggatgaggatgctgatgcagcaatccgtgcttgtgacgagactgagtggaatggaaggatcattcttgtggagaagtcaaaagcacctgcatggtgaatcttccgctttgggggcgcacacgccattgttcgagagggatttcattgcttcacctttcacagattttaccattcagaaaaaaagaaactaccggtatgacatactcggtacatgtcaaagttcacccgaacctggcttttgatgctgtactaggaggccctgctgctgataagagggacttacgacttagtggtacttttagtgtctgcaacctctacacgtgaaatgtgatacgtgcctgttcgtgagctgtcagttctcttcttcaccttcatctcgcgcccactgaatactgatggcatgaacggattccgggagactcaagctttatggtgttgttgcgactcaagggttatgttagcagttcaataatctgcatattagcttttcaatgttgtgcatcctctgaatgagggtttggaaaatgtcctatatagtttgtgttttggattccagatgttgtttaattatggtcacgacacgatacctatgccccatctgttgactgttggtgatgttttttttcctgatgacatgtcttttcatcctgtgttcttgaatctagagttgtctgtctattggcgcaatattagtgagatggaaactgagcgtg

SEQ ID NO: 27089 - DNA, 2789 bp, Zea Mays
accgggccaccacaccacgtgacatccgtttcgtacggcctcccccaaaaatctcagcccgtctctctctcctaacgaagaggagagggggcagaagaaaacctcgcgcgggggaggcgcgagaggaatcgcgggggccggaggagcagcggccggtggaggtggcgcgcgcggtggccgtccgagatggagtacatatcccctgagagaaatctggaggggacttgtggagatcctgggccgttatttgccgaccaaggtggcagcttgttggaccacttgggttatcaagggggaggaattccacaacatgagtctccaacactggatcatggacttttggttgatccagctggtgcaattccgtatttatctacagattctccgcccttcatgaatgatcaaatcacttgcaatgttataaaatctgcttcagctagtccagaatcttgtacaaaacaacctcaagaacctcttaatgtagaatctgatgtacagaatgacgcagctgaacaaaatgttcacaatagtaactctgaagaacagatcacttctctgggctgtgatgtacagcagaacacagaagtaattgatgaactgttgcctccaaagcttcctgaaagcagtggtaatgatatatcaaactttcaaccggaaactacatattctgatgcctaccatggtgactctttgttaactgaaaatagttgtaatagttatcagcttaacaatagtggtgctcctgctgctgatattccaaactctcctgcacttcagatggaaaatgaggagatgggaaagttacatgagacttctcacaatgaaaacagtgggtcagaggatgatcaaatgaatggtaggaagccttgccccattagtggtcgagacaatgagaagtttaacacttcagctgtacctccctcttgggaacagacaaaacaaaaaaatcctggtaccagaaatggaagttcaactccagacgatcaatttgattctcctccagacaggtttgcaagattggaaagggacacaccatctccagatgggagagtatcccctgaaaggtttgcaagactggaaagggataccccacctccagacggggatatatctcgtccaggtgaaagttcacatgtccattctgagacgatggagatggagccagaatatcgcgccaatgatgataccccacctccagacgggaggatgtctcctccagttgaaagttcacatgtccattctaagaagatggagtcacaacaccatgccaaagatgttggtgagttagctcgttttgaaagcccacaggtaagacatcggtcccgatcttctgaaaaacatgaccccagccgcaaaagaacctcttcaggggagttgtctccacatgcgcgtcagaattctcctgtagaaaggaaaagacggagagagtctcgccatggtgatgggtcacctcgacagagatctgcatctccccgaagaagatctacaccccctcgaagaagatctatatcccctcgaagatcctcacacaagaggagggaatcaccaagaaggggagactcacctaggaggaggcactcacctaggaggagggagtcaccaaggaagagagactcaccaaggaggagagactcaccaaggaggagggattcaccaaagaggaggagggactccccaaggaggagggataggtcaaaatcaaggtcaccttcaagaaaacatgacacttctagacataaaaaagaacatgacagatctcggtccaggtctccccactcaagggatcatcacagacgatctccaagaaggcattcaccaagacgcagatcacccccagccagtcatcgccatcattcaccaagaagacattggtcaccacctgccaacaggaagactggattgggtaagcctggaaagaatctctttattgcaggatttagctatgccaccactgagcgagatttggagaagaaattttgcaagtttggacgtgtaacaagtgcacgtgttgttcgtgataaacgaactggagattcccgtggctttggattcttatccttggataaggatgaggatgctgatgcagcaatccgtgcttgtgacgagactgagtggaatggaaggatcattcttgtggagaagtcaaaagcacctgcatggtgaatcttccgctttgggggcgcacacgccattgttcgagagggatttcattgcttcacctttcacagattttaccattcagaaaaaaagaaactaccggtatgacatactcggtacatgtcaaagttcacccgaacctggcttttgatgctgtactaggacttgtttcagggccctgctgctgataagagggacttacgacttagtggtacttttagtgtctgcaacctctacacgtgaaatgtgatacgtgcctgttcgtgagctgtcagttctcttcttcaccttcatctcgcgcccactgaatactgatggcatgaacggattccgggagactcaagctttatggtgttgttgcgactcaagggttatgttagcagttcaataatctgcatattagcttttcaatgttgtgcatcctctgaatgagggtttggaaaatgtcctatatagtttgtgttttggattccagatgttgtttaattatggtcacgacacgatacctatgccccatctgttgactgttggtgatgttttttttcctgatgacatgtcttttcatcctgtgttcttgaatctagagttgtctgtctattggcgcaatattagtgagatggaaactgagcgtg

SEQ ID NO: 27090 - DNA, 2717 bp, Zea Mays
accgggccaccacaccacgtgacatccgtttcgtacggcctcccccaaaaatctcagcccgtctctctctcctaacgaagaggagagggggcagaagaaaacctcgcgcgggggaggcgcgagaggaatcgcgggggccggaggagcagcggccggtggaggtggcgcgcgcggtggccgtccgagatggagtacatatcccctgagagaaatctggaggggacttgtggagatcctgggccgttatttgccgaccaaggtggcagcttgttggaccacttgggttatcaagggggaggaattccacaacatgagtctccaacactggatcatggacttttggttgatccagctggtgcaattccgtatttatctacagattctccgcccttcatgaatgatcaaatcacttgcaatgttataaaatctgcttcagctagtccagaatcttgtacaaaacaacctcaagaacctcttaatgtagaatctgatgtacagaatgacgcagctgaacaaaatgttcacaatagtaactctgaagaacagatcacttctctgggctgtgatgtacagcagaacacagaagtaattgatgaactgttgcctccaaagcttcctgaaagcagtggtaatgatatatcaaactttcaaccggaaactacatattctgatgcctaccatggtgactctttgttaactgaaaatagttgtaatagttatcagcttaacaatagtggtgctcctgctgctgatattccaaactctcctgcacttcagatggaaaatgaggagatgggaaagttacatgagacttctcacaatgaaaacagtgggtcagaggatgatcaaatgaatggtaggaagccttgccccattagtggtcgagacaatgagaagtttaacacttcagctgtacctccctcttgggaacagacaaaacaaaaaaatcctggtaccagaaatggaagttcaactccagacgatcaatttgattctcctccagacaggtttgcaagattggaaagggacacaccatctccagatgggagagtatcccctgaaaggtttgcaagactggaaagggataccccacctccagacggggatatatctcgtccaggtgaaagttcacatgtccattctgagacgatggagatggagccagaatatcgcgccaatgatgataccccacctccagacgggaggatgtctcctccagttgaaagttcacatgtccattctaagaagatggagtcacaacaccatgccaaagatgttggtgagttagctcgttttgaaagcccacaggtaagacatcggtcccgatcttctgaaaaacatgaccccagccgcaaaagaacctcttcaggggagttgtctccacatgcgcgtcagaattctcctgtagaaaggaaaagacggagagagtctcgccatggtgatgggtcacctcgacagagatctgcatctccccgaagaagatctacaccccctcgaagaagatctatatcccctcgaagatcctcacacaagaggagggaatcaccaagaaggggagactcacctaggaggaggcactcacctaggaggagggagtcaccaaggaagagagactcaccaaggaggagagactcaccaaggaggagggattcaccaaagaggaggagggactccccaaggaggagggataggtcaaaatcaaggtcaccttcaagaaaacatgacacttctagacataaaaaagaacatgacagatctcggtccaggtctccccactcaagggatcatcacagacgatctccaagaaggcattcaccaagacgcagatcacccccagccagtcatcgccatcattcaccaagaagacattggtcaccacctgccaacaggaagactggattgggtaagcctggaaagaatctctttattgcaggatttagctatgccaccactgagcgagatttggagaagaaattttgcaagtttggacgtgtaacaagtgcacgtgttgttcgtgataaacgaactggagattcccgtggctttggattcttatccttggataaggatgaggatgctgatgcagcaatccgtgcttgtgacgagactgagtggaatggaaggatcattcttgtggagaagtcaaaagcacctgcatggtgaatcttccgctttgggggcgcacacgccattgttcgagagggatttcattgcttcacctttcacagattttaccattcagaaaaaaagaaactaccgggccctgctgctgataagagggacttacgacttagtggtacttttagtgtctgcaacctctacacgtgaaatgtgatacgtgcctgttcgtgagctgtcagttctcttcttcaccttcatctcgcgcccactgaatactgatggcatgaacggattccgggagactcaagctttatggtgttgttgcgactcaagggttatgttagcagttcaataatctgcatattagcttttcaatgttgtgcatcctctgaatgagggtttggaaaatgtcctatatagtttgtgttttggattccagatgttgtttaattatggtcacgacacgatacctatgccccatctgttgactgttggtgatgttttttttcctgatgacatgtcttttcatcctgtgttcttgaatctagagttgtctgtctattggcgcaatattagtgagatggaaactgagcgtg

SEQ ID NO: 27091 - DNA, 2889 bp, Zea Mays
cgtgggtccagatgagactgcgtccccaccccgctcctatcacctcactcacgtcacgcgcactgcagcgcagcggcatatttcctccaggccaggcagccccaccgggcaccgggccaccacaccacgtgacatccgtttcgtacggcctcccccaaaaatctcagcccgtctctctctcctaacgaagaggagagggggcagaagaaaacctcgcgcgggggaggcgcgagaggaatcgcgggggccggaggagcagcggccggtggaggtggcgcgcgcggtggccgtccgagatggagtacatatcccctgagagaaatctggaggggacttgtggagatcctgggccgttatttgccgaccaaggtggcagcttgttggaccacttgggttatcaagggggaggaattccacaacatgagtctccaacactggatcatggacttttggttgatccagctggtgcaattccgtatttatctacagattctccgcccttcatgaatgatcaaatcacttgcaatgttataaaatctgcttcagctagtccagaatcttgtacaaaacaacctcaagaacctcttaatgtagaatctgatgtacagaatgacgcagctgaacaaaatgttcacaatagtaactctgaagaacagatcacttctctgggctgtgatgtacagcagaacacagaagtaattgatgaactgttgcctccaaagcttcctgaaagcagtggtaatgatatatcaaactttcaaccggaaactacatattctgatgcctaccatggtgactctttgttaactgaaaatagttgtaatagttatcagcttaacaatagtggtgctcctgctgctgatattccaaactctcctgcacttcagatggaaaatgaggagatgggaaagttacatgagacttctcacaatgaaaacagtgggtcagaggatgatcaaatgaatggtaggaagccttgccccattagtggtcgagacaatgagaagtttaacacttcagctgtacctccctcttgggaacagacaaaacaaaaaaatcctggtaccagaaatggaagttcaactccagacgatcaatttgattctcctccagacaggtttgcaagattggaaagggacacaccatctccagatgggagagtatcccctgaaaggtttgcaagactggaaagggataccccacctccagacggggatatatctcgtccaggtgaaagttcacatgtccattctgagacgatggagatggagccagaatatcgcgccaatgatgataccccacctccagacgggaggatgtctcctccagttgaaagttcacatgtccattctaagaagatggagtcacaacaccatgccaaagatgttggtgagttagctcgttttgaaagcccacaggtaagacatcggtcccgatcttctgaaaaacatgaccccagccgcaaaagaacctcttcaggggagttgtctccacatgcgcgtcagaattctcctgtagaaaggaaaagacggagagagtctcgccatggtgatgggtcacctcgacagagatctgcatctccccgaagaagatctacaccccctcgaagaagatctatatcccctcgaagatcctcacacaagaggagggaatcaccaagaaggggagactcacctaggaggaggcactcacctaggaggagggagtcaccaaggaagagagactcaccaaggaggagagactcaccaaggaggagggattcaccaaagaggaggagggactccccaaggaggagggataggtcaaaatcaaggtcaccttcaagaaaacatgacacttctagacataaaaaagaacatgacagatctcggtccaggtctccccactcaagggatcatcacagacgatctccaagaaggcattcaccaagacgcagatcacccccagccagtcatcgccatcattcaccaagaagacattggtcaccacctgccaacaggaagactggattgggtaagcctggaaagaatctctttattgcaggatttagctatgccaccactgagcgagatttggagaagaaattttgcaagtttggacgtgtaacaagtgcacgtgttgttcgtgataaacgaactggagattcccgtggctttggattcttatccttggataaggatgaggatgctgatgcagcaatccgtgcttgtgacgagactgagtggaatggaaggatcattcttgtggagaagtcaaaagcacctgcatggtgaatcttccgctttgggggcgcacacgccattgttcgagagggatttcattgcttcacctttcacagattttaccattcagaaaaaaagaaactaccggtatgacatactcggtacatgtcaaagttcacccgaacctggcttttgatgctgtactaggaggccctgctgctgataagagggacttacgacttagtggtacttttagtgtctgcaacctctacacgtgaaatgtgatacgtgcctgttcgtgagctgtcagttctcttcttcaccttcatctcgcgcccactgaatactgatggcatgaacggattccgggagactcaagctttatggtgttgttgcgactcaagggttatgttagcagttcaataatctgcatattagcttttcaatgttgtgcatcctctgaatgagggtttggaaaatgtcctatatagtttgtgttttggattccagatgttgtttaattatggtcacgacacgatacctatgccccatctgttgactgttggtgatgttttttttcctgatgacatgtcttttcatcctgtgttcttgaatctagagttgtctgtctattggcgcaatattagtgagatggaaactgagcgtg
